United States Patent Application Publication US 2009/0070897 A1 - sequence listing, part 3

SEQ ID NO: 8807 - protein, 381 aa, Arabidopsis thaliana
MVVMSRVSFYSSFLLLLLEVVVASSEFDDEGRTSFSPTTAIIMIVLVSVFFALGCISVYMRRCLQHALGMDSGGGPGNWLNVRQTTEPGLDASVIETFPTFPYSTVKTLRIGKEALECPVCLNEFEDDETLRLIPQCCHVFHPGCIDAWLRSQTTCPLCRANLVPVPGESVSSEIPGLARETGQNSLRTPIDDNRKRVLTSPDERLIDSVAWTGNQSMPRKSMSTGWKLAELYSPASSPGQPEENLDRYTLRLPQEIHDQLVNSSLGKQGSKGQLALPQERSSVRGFRTGSLGTEKNYFYFERFDQDGRLDRRPFSITPPYHTRSIQSPDEIINASGNYQDRAGAPKGLLLAIRSPFDRLFTGKKNAGERSYLQSGDASPV

SEQ ID NO: 8808 - protein, 399 aa, Pseudomonas putida KT2440
MSGNRGVVYLGAGKVEVQKIDYPKMQDPRGKKIEHGVILKVVSTNICGSDQHMVRGRTTAQVGLVLGHEITGEIVEKGRDVERMQIGDLVSVPFNVACGRCRSCKEMHTGVCLTVNPARAGGAYGYVDMGDWTGGQAEYVLVPYADFNLLKLPERDKAMEKIRDLTCLSDILPTGYHGAVTAGVGPGSTVYVAGAGPVGLAAAASARLLGAACVIVGDLNPARLAHAKSQGFEVVDLSKDTPLHEQIVDILGEPEVDCAVDAVGFEARGHGHEGAKHEAPATVLNSLMQVTRVAGNIGIPGLYVTEDPGAVDAAAKIGALSIRFGLGWAKSHSFHTGQTPTMKYNRQLMQAIMWDRINIAEVVGVQVINLDQAPEGYGEFDAGVPKKFVIDPHKMWGAA

SEQ ID NO: 8809 - protein, 496 aa, Bifidobacterium longum DJO10A
MSEQFDLVIIGAGPGGYSTALRAAELGMKVALVERDATVGGTCLNRGCIPSKALITATHTIDTVHRAAELGVNASVNGIDFGTLRDYRLRVVKTMVGGLAGLLAHRGITVFRANAAFHADETAPATSNHIVHLVPSPDQSDILTYHKADVPEPSGPTMDLTATNIVIATGAKPRPLPGNPFAGALIDSTQALEVNEFPSSAVIIGAGAIALEFASMWNAAGSKVTLLIRKDRVLSAWDRRAGTTLTRELKRHGVNIITRASVTHVDTGANLGATVHYTREGQDGEQSVWGEIALVAIGRDPITDPAWGVTIDDHGHVATDAYGRTDKPGVWAVGDVTAGHALAHRAFEQGIVIAETIAGLNPKPVDEATVPQIVFSFPEAASVGLTVEQAQAREDLIEIKETNYPMLANARMLMSGTAGSLTIVSGCDAANPDTPRVLGVHMVSQMASDIIAEAEQLVGNHVPLADAARLVHPHPTFSETLGEALLKADGRPLHTR

SEQ ID NO: 8810 - protein, 206 aa, Mundulea sericea
MAYKFHEDDHGEVIAEITKPGLEPYLGLHYPATDIPQASRFLFMKNKVRMIVDCHAKHVKVLQDEKLPFDLTLCGSTLRAPHSCHLQYMANMDSIASLVMAVVVNDNEEDGDSSDAVQPQKRKRLWGLVVCHNTSPRFVPFPLRYACEFLAQVFAIHVNKEIELENQIIEKNILRTQTLLCDMLMRDAPLGIVSQSPNIMDLVKCD

SEQ ID NO: 8811 - protein, 396 aa, Rubrobacter xylanophilus DSM 9941
MHKLHLPRLGQTMERGTILRWARREGEPFEVGDILYEVESEKAVNEIEAKLPGTLARITVEEGQECPVGTLLAVVADPGETLSEEEIEAAIAEEGGREAPAASGGGTGVRAPSSARAQRRVRAMPKARALARELGVELAAVEGTGQGGAITVEDVRRAAGAAPGEGPRVRERRPLGDVGRTMARVVTRSWHEVPQFVQMVQLDASALVGRRRELAGQIKRSHGVDLSYTDLLLEAVAGAAGEEPLANSSLVDGEILLYEDVNVSVAVATGSGLLVPVVRWAQALELGELAARLREVLERARSGRLSAEDTAGGTITLSNLGMYGIEGGTPLVTHPQAAVVFAGAIVERPWAVSGRVEVRPTLTLSVGFDHRILDGVAAARFTTALRRRLESPNQEG

SEQ ID NO: 8812 - protein, 357 aa, Rubrobacter xylanophilus DSM 9941
MPEKKMMRAAVYRGPRELRVEPVPVPEIGPSDVLVRVHSCGICGSDLHSYKAGMYIRPGQIMGHEFMGTVAAAGEDVEGVEEGDRVTGFSIGVCGSCYWCSRQQYILCPELFRNSTGYGLPGGFAEYVPIRNAVVGQSIHPVPSELDDETAATTEPVSVGVGAIEAAGVRPGDRVVVLGAGMIGNACMQAARAAGAGQVAVIDVSPVRLEAARSLGADAVFDARTGDALSWVKELWGVGRYHFNEGGMADVVVEAAGAPVTVQQAFEMVRSGGAIVFVGLPEEPAPIDVTKIVHKQPRIVGSLGGDFARAIELMASGSIRTKELITHRFPLEDAAEAFETQLRTGEAMKVMIQPREG

SEQ ID NO: 8813 - protein, 422 aa, Vibrio cholerae O1 biovar eltor str. N16961
MAKTIQAIRGMNDCLPTQSPLWQKVEGVVKNVISAYGYSEVRMPIVEMTHLFSRAIGEVTDVVEKEMYTFEDRNGDSLTLRPEGTAGCVRSGIENGLLYNQEQRLWYMGPMFRHERPQKGRYRQFHQCGVEVFGLDGPDVDAELIMMTARLWRELGIAQHVRLELNSIGSLEARANYRTALIDYLEQYQNVLDEDCKRRMYTNPLRVLDSKNPDVQAILGDAPQLSDYLDAESKQHFAGLCELLDAAGIEYTVNQRLVRGLDYYNRTVFEWITESLGSQGTVCGGGRYDGLVEQLGGKPTPAVGFAMGLERLVLMMETLGNTDVRRSVDVYMVTAGEGTMMAGMKLAEQLREQVPGLRVMTHFGGGNFKKQFKRADKVGAAIALVLGEDEVAAQTVVVKDLAGGEQNTVAQAEVAKLLAHLA

SEQ ID NO: 8814 - protein, 198 aa, Oryza meridionalis
GQTPVFPRIFGHEAGGIVESVGEGVTDLAPGDHVLPVFTGECKECAHCKSAESNMCDLLRINTDRGVMIGDGKSRFSINGKPIYHFVGTSTFSEYTVMHVGCVAKINPAAPLDKVCVLSCGISTGLGATINVAKPPKGSTVAIFGLGAVGLAAAEGARIAGASRIIGIDLNANRFEEARKFGCTEFVNPKDHDKPVQQ

SEQ ID NO: 8815 - protein, 141 aa, Mundulea sericea
MAYKFHEDDHGEVIAEITKPGLEPYLGLHYPATDVPQATRFLFMKNKVRMIVDCRAKHVKVLQDRKVPFDLTLCGSTLRAPHGCHVQYMANMNCSASLVMAVVLNDNDEDGGDSDAVQPQKRRRLWGLVVCHNTTPRFVPF

SEQ ID NO: 8816 - protein, 400 aa, Nostoc punctiforme PCC 73102
MSKKSLASLSSADISGKRALVRVDFNVPVDDQGKITDDTRIRAALPTIQDLTQKGAKVILASHFGRPKGVDDKLRLTPVAKRLSELLGQEVIKTDDSIGDEVAAKVAALQNGQVLLLENVRFYPEEEKNDAEFAKKLAANADFYVNDAFGTAHRAHASTEGVTKFLSPSVAGYLVEKELQYLQNAIENPQRPLAAIIGGSKVSSKIGVIETLLEKCDKLIIGGGMIFTFYKARGLSVGKSLVEEDKLELAKSLEAKAKERGVALLLPTDVVLADNFAPDANSQTVSIENIPDGWMGLDIGPDSVKFFQEALADTKTVIWNGPMGVFEFDKFAAGTEAIAHTLAEIGKTGTTTIIGGGDSVAAVEKVGLADQMSHISTGGGASLELLEGKVLPGIAALDDA

SEQ ID NO: 8817 - protein, 520 aa, Amanita muscaria
MPPAATGNGGIDPKNKFTGIAMTAFSAFGGILYGYDTGIISGILAMDDFKRTFGQQASDGTCSLPLSSQSLFVSILSAGTFVGALFGAPMGDIIGRKWGIVIAAAIFSIGIALQTASVTAAPFVVGRVFAGLGVGLVSCLVPMYQSECSPKWIRGAVVSLYQWAITIGILLAAVINNATQGRSNHSAYQIPISIQFVWAFILGFGMMLLPESPRFLVRQGRDEDAALSLSRLTRLSPDDPVVRNELAEIRTNFEAELALGESSYLDCFRPSHNKILLRTLTGIFIQAWQQLTGINFIFYYGTQYFQNAGINQAFLITIATGIVNVFMTLPGLYGVERYGRRSLLLIGALGMTICEFIVAIVGVTIPASNLAGQRVLIAFVCIYIAFFASTWGPMLWVIVGEIFPLQVRAKGISLSVASNWLWNFGIAFATPYLVNTQAGSAGLGSKVFFIWGTTCACCLVFTYFCVPETKGLSLEQIDEMYQEVMPLKSYQYRRRLAIEGGFRTEKADIIHEETAEKESG

SEQ ID NO: 8818 - protein, 411 aa, Bacillus cereus ATCC 10987
MNTGDTVFMFVATVMVMLMTPGLALFYGGMVRSKNVLSTTMHSYSAMAIVSIQWIVIGYSLSFGPDWHGLIGTFNWFGLNGVTYAPNPDYSSTIPHNLFMMFQLMFAILTPALISGAFAERMRFSAFLIFILLWTTIVYNPVAHWVWGVGGWLRELGALDFAGGNVVHITSGVAGLVLAIFLGKRKNINGSSPHHLPFTMLGAGLLWFGWFGFNVGSALSLNDVALTAFINTNIAAAASALTWMLSEWFFQSKPTAMGAACGAVSGLVAITPACGFVTPFSALLIGAIGGVLCFGAVFFLKTKFGYDDTLDAFGCHGIGGTWGGIATGLFATTTVNSDGANGLFYGNAALLFKQLVAIGATYAFTIIMTYAIIKAINFFLPVRVDEHEEHMGLDISMHGEKAYEYVEKSAN

SEQ ID NO: 8819 - protein, 361 aa, Sinorhizobium meliloti
MKALVENLKATARETDATDIRAAFAADPNRFSRFSTAFDDLLFDYSKCAVNDRIIDGLEALAKAAKVEEKRDAMFRGDIINITEERAVLHTALRNRSNRPVLVDGKDVMPDVNAVLEAMGKFADDIRSGALKGATGKKITDVVNIGIGGSDLGPVMATLALAPFHDGPRLHFVSNVDGAHIADTLTLLDPETSLFIVASKTFTTIETMTNAATARAFIAGKLGEAAVGHHFAAVSTALDKVGAFGIDAARVFGFWDWVGGRYSIWSAIGLPLMIAIGKENFGRFLDGGHAIDEHFRSAPLRQNIPMLLGLIGFYNRNVLGYPSRAILPYDQRLTRFPAYLQQLDMESNGKGVTLDSQPVEF

SEQ ID NO: 8820 - protein, 198 aa, Oryza officinalis
GQTPVFPRIFGHEAGGIVESVGEGVTDLAPGDHVLPVFTGECKECPHCKSAESNMCDLLRINTDRGVMIGDGKSRFSINGKPIYHFVGTSTFSEYTVMHVGCVAKINPAAPLDKVCVLSCGISTGLGATINVAKPPKGSTVAIFGLGAVGLAAAEGARIAGASRIIGIGLNANRFEEARKFGCTEFVNPKDHDKPVQQ

SEQ ID NO: 8821 - protein, 507 aa, Pichia angusta
MSNPPVFTTSQGCPVSDPFTTQRIPLDSTGYKYAPPIGPLLLQDFKLIDTLSHFDRERIPERVVHAKGAGAYGVFEVTDDITDVCSAKFLDTVGKKTRIFTRFSTVGGEKGSADTARDPRGFATKFYTEDGNLDLVYNNTPIFFIRDPIKFPHFIHTQKRNPATNLKDPNMFWDYLTANDESLHQVMYLFSNRGTPASYRTMNGYSGHTYKWYNSKGEWVYVQVHFIANQGVHNLLDEEAGRLAGEDPDHSTRDLWEAIEKGDYPSWECYIQTMTLEQSKKLPFSVFDLTKVWPHKDFPLRHFGRFTLNENPKNYYAETEQIAFSPSHTVPGMEPSNDPVLQSRLFSYPDTHRHRLGPNYHQIPVNCPLKSGSFNPINRDGPMCVDGNLGGTPNYANAYNCPIQYAVSPKASGNKPDEKYTGEVVPYHWEHTDYDYFQPKMFWKVLGRTPGEQESLVKNVANHVSAADEFIQDRVYEYFSKAEPIIGDLIRKKVQELKRKASSPSKI

SEQ ID NO: 8822 - protein, 662 aa, Neurospora crassa
MVLFKRPPDEKGSVWFSVLIGVFVAFGGLLFGYDTGTISGVIAMKYWNERFSTGYIDADGRPAISPSQSSLIVSILSAGTFFGALASPLLADKIGRRWGIIISSWVFNFGVSMQVISVAIPLFVAGRFFAGLGVGLLSALVPLYQSETAPKWIRGMIVGVYQLAITIGILFAAIVNNGTHEREDTGSYRIPIALQWLFSLTLIIGMHFLPETPRYCIKRGDMTRATRALARIRCLSPNDPAILAEMEEIRANYQYELSLGNSSYLDCFRKGMLKRMLTGMVLQILQQLTGVNFIFYYGTQFFENSGISNSFLISMILATVNVLSTVPAVFMFDKFGRRPLLLWGGVAMHICHFIVATLGTSTTSQTATGVIIVLNVAAQKASITFVCLFIAFFAATWGPLAWVVTAELYPLKHRSQMLSISTATNKHVPSFSTPDSVYYHDILGWLVNWAIAYSTPYLVNYGPGYANLQSKIFFVWGTACMLCVGFVYFYIYETKGLSLEEIDEMYQTPNLKAKDSSKWRPSVHFRETPLTEITYHKATGGSPAQAEAAPVAETAERAEREAVPTLPNLTTAPKIGPPPPPPESDDVLKTLQDAVLRPAGAFAHPATLNPAWNSHSPLSAQIAPSNLPSSSLASNRSAPSLGTTPNEGGTSSPHPARRSFGR

SEQ ID NO: 8823 - protein, 426 aa, Azotobacter vinelandii
MSRTNESLMQRRIAAVPRGVGQIHPIFAEHARNCSVVDVEGREYIDFAGGIAVLNTGHLHPKVVEAVQRQLHKLSHTCFQVLAYEPYVELCEKLNARVPGDFAKKTLLVSTGSEAVENAVKIARAATGRTGVIAFTSAYHGRTLMTLALTGKKVPYAAGMGLLPGGVFRARYPSALHGIDVAEALASVERVFKNDAEPRDIAAILVEPVQGEGGFNVAPPEFMRGLRAICDRHGILLIADEVQTGAGRTGTFFAMEQMGVAADLTAFAKSIAGGFPLAGVCGRAEPMDAIAPGGLGGTYAGSPLACAAALAVLEVFEEERLLERARDIGARLSEGLRAIQGRHPSIVEVRGLGAMVAMELCEGGDPHKPATALTGQLVVRARDKGLILLSCGAYGNVLRFLMPLTVPDELLERGLAILAECFDELA

SEQ ID NO: 8824 - protein, 1483 aa, Eremothecium gossypii
MRARSEGPGRNLSPRTGVPRSPAVVSSQGILRSPSLKSGASPMSTLGLGWKHGQQSPTGHVAQYLSPLSADSSSAPSRKTSITGLSTLRGGSPSRKPRSNSVSSNFKMAEDAENNTPTLVLPPSLASLNSQSTLSTVYTGNPAAAANPEASSSSSKSGNSATSSLRSGYKPMKRQYVLNEQLYLSRMKNSHLDDYYTRGIAPTMNDDEEDDTDLDTPDVNIDNDDQAFGSNVFTFHDRETSRSVDNELVMLSTKHLLGKMNWLRELDPGNPDIEAPLEFLARAENVSINSATPQDNRQDIEGMLGKLSRNPLVQERLEWQTMLWNVLRGDIVNSEKTKLAEQRTTDELTTQFSDELWLELKSWLYGRSVEDQRTWLQYLRASTDSIFERIIEFRLEDDIEIPDAVVKVESLLNEYYKVIPYWKNCQQMYKEKPITNSDDFKLRIETLNTYVVMYAAFKTEITALHQWIGNDDPEAEGAAGGIEDIKCAEKPIAEQVLKEKDIETIFQNKIFYRHGPWVFKAKLAAIEYGDYFNLMNLPSLNGYLTTLITFPMKLIKEIILIRLNYARKLQKPTMMMIDQMIDDFKSYIKLAVQIIYTINLYCSNKELQLGNVIDDTFDKTVNDAISYFFKLLNLKLVDSTKKSFKNFKEPEALFSHWEDLKNVGCHIDGANEVVPTGFVSLTLRLLNKLHAYILKEQNSVTEKVSKAECEKWIMVTLENIGLFKRKMNRFSNVLTKALQNSANYRINDIRLLLQNLKDTGHFLIYTGGYLEDSGTYLFASKELLGYSGTDILRIVKGMEVGSDLIPEVSITNSLSVYTAIEQGVCSDPIFVQEERPDGLSYYHVQSECNKRHIGKSRGKIIHSYDSFYGSETEGSELYELERKLKSLGYLVAVCPDEPILWEGEMYNLSYEKQLNAEDFPVNITPGMLTLMAQGSTYSMEYQCDKFQHFAGNSVVFTEKRCSIVPAEQTLQKINKAYFRITYHTLAHHHKLVSTIQRKFRGFESLNTVFIFCRDFAKNFLRSNVASYETKSVIIMQMLKVSIGWLTFLIDDCDPNDPKTFRWCVLAMEFAMQMTSGWNILGISGEQFKTLKDKISGCMALLISHFDIMGVRSREAENTVMPQVRAIMDFETDDEETVQQLNTKMRLKAINELEQNTVNTRRQVGKVLDATDKDNQYLLTLASSLSNVSIKWQKRSFIGGGSFGSVYSAVNLDTGDILAVKEIKFNDRKTIKQVFPSIRDEMTVLEMLNHPNVVQYYGVEVHRDRVNIFMEYCEGGSLASLLAHGRIEDEMVTQVYSLQMLEGLAYLHESGVDHRDIKPENILLDFNGIIKYVDFGAAKVLASNGSKKLNLEQHMEGEKMIGTPMYMSPEAISGTGYGKFGSDDIWSLGCVILEMVTGRRPWANLDNQWAIIYQVAAGQIPMFPSKNEMSQAGIKFLSRCLIQDPNQRSTAVELLMDPWIIEIRTIAFGDDTVEPVSKERPLNS

SEQ ID NO: 8825 - protein, 546 aa, Pseudomonas putida KT2440
MSELIRVPDIGSGEGEIIELFVKVGDRIEADQSLLTLESDKASMEIPAPKAGVIKELKVKLGDRLKEGDELLVLEAEGAAAAAPEAPAAAAAPAAAPAPAAEAAPAAPAAAPAAASVQDIHVPDIGSSGKAKIIEVLVKVGDTVEADQSLITLESDKASMEIPSPAAGVVEEVLCKLEDEVGTGDLIFKLKVAGAAPAAAPAPAAAPAPAKAEAAPAAAPAAAAPAAAPAPAATAPAAGSNAKVHAGPAVRQLAREFGVELGAVAATGPHGRILKEDVQVYVKAMMQKAKEAPAAAGATGGAGIPPIPAVDFSKFGEVEEVALTRLMQVGAANLHRSWLNVPHVTQFDSADITELEAFRVAQKAVAEKAGVKLTVLPLLLKACAFLLKELPDFNSSLAPSGKAIIRKKYVHIGFAVDTPDGLLVPVIKNVDQKSLLQLAAEAAALAEKARTKKLSADEMQGACFTISSLGHIGGTGFTPIVNAPEVAILGVSKATMQPVWDGKAFQPKLMLPLSLSYDHRVINGAAAARFTKRLGDVLGDIRTMLL

SEQ ID NO: 8826 - protein, 151 aa, Mundulea sericea
MAYKFHEDDHGEVVSEIRRSDLEPYLGLHYPATDIPQASRFLSKQNRVRMICDCHAKPVKVIQSEELRQPLCLVNSTLRSPHVCHTQYMANMDSIASLVMAIIVNGNDTTRLWGLLVCHHTSPRYVPFPVRYACEFLMQAFGLQLYMEIQL

SEQ ID NO: 8827 - protein, 190 aa, Mundulea sericea
  unsure (1)..(190): unsure at all Xaa locations
EVVAESKRPDLEPYIGLHYPATDIPQASRFLFKQNRVRMIVDCHASPVRVVQDEALVQPLCLVGSTLXAPHGCHAQYMANMGSIASLVMAVIINGNDEEGVGGRSSMRLWGLVVCHHTSARCIPFPLRYACEFLMQAFGLQLNMELQLAAQALEKRVLRTQTLLCDMLLRDSPTGIVTQSPNIMDLVKCD

SEQ ID NO: 8828 - protein, 161 aa, Paxillus involutus
VVLIGDSGVGKSNLLSRFTRNEFNLDSKSTIGVEFATRSINVDSKTVKAQIWDTAGQERYRAITSAYYRGAVGALLVYDISKHATYVNVTRWLKELRDHADSNIVIMLVGNKSDLKHLRAVPTEEAKNFSAENELSFIETSALDASNVESAFQTILTDVYR

SEQ ID NO: 8829 - protein, 200 aa, Dalbergiella nyasae
EDDHGEVIAEITKPGLEPYLGLHYPATDIPQAARFLFMKNKVRMIVDCHAKHVKVLQDEKLPLDLTLCGSTLRAPHSCHLQYMANMDSIASLVMAVVVNDNEEDGDSSDAVQPQKRKRLWGLVVCHNTTPRFVPFPLRYACEFLAQVFAIHVNKEIELEYQIIEKNILRTQTLLCDMLMRDAPLGIVSQSPNIMDLVKCD

SEQ ID NO: 8830 - protein, 178 aa, Helicobacter pylori
MLTIKDIHALEVMDSRGNPTIQASVILSDNTKASAIVPSGASTGKREALELRDNDKTRFLGKGVLRACENVNSVIKHHLIGLEATNQAFVDERLRALDGTPNYANLGANAVLGVSMALARASAKALNLPLYRYLGGANALTLPVPMLNIINGGTHANNSIDFQEYMIMPLGFESFKEA

SEQ ID NO: 8831 - protein, 389 aa, Neisseria meningitidis MC58
MSKKLHPQTLAIRGGKEQTEYREHNQALFLTSSFMWDNAQHAADLFSKKIKGFTYTRTANPTTAAFEKRIAALEGAERAVATSAGMSAIQAAFFTFLQAGDHVISSRSLFGTTVGFINNIVAKFGIEVSHVSPTDINEWKAAVKANTKLLFLETPSNPLGEVADLEALAELAHGIGALLVVDNSLLSPVGSQPLKHGADISVSSATKAIDGHGRVMGGVLAGSEELLAQVAMYCNSCGLAMSPFNAWQLLSGVETLSLRMEKQFDNALKIAQWLQAQPQVQAVYYTGLSDHPQAALIRKQQNGGGIVIGFEVADQEAAWKVVDGVELFSRTANLGDVRSTITHPWTTTHGRMQPEEKLAANIRPGLVRLSVGLEYVGDLIDDLKQALAR

SEQ ID NO: 8832 - protein, 162 aa, Zea mays
LQAVIKRLMTDVPFGVLLSGGLDSSLVASVASRHLNETKVDRQWGNKLHTFCIGLKGSPDLKAAREVADYLSTVHHEFHFTVQEGIDALEEVIYHIETYDVTTIRASTPMFLMSRKIKSLGVKMVISGEGSDEIFGGYLYFHKAPNKKEFHEETCRKVKIFL

SEQ ID NO: 8833 - protein, 161 aa, Paxillus involutus
VVLIGDSGVGKSNLLSRFTRNEFNLDSKSTIGVEFATRSISVDGKTVKAQIWDTAGQERYRAITSAYYRGAVGALLVYDISKHATYVNVTRWLKELRDHADSNIVIMLVGNKSDLKHLRAVPTEEAKNFSTENELSFIETSALDASNVESAFQTILTDVYR

SEQ ID NO: 8834 - protein, 67 aa, Glycine max
MGKQIVPVKSVIYALSPFQQKIMPGLWKDLPTKIHHKVSENWISATLLLGPLVGTYTVQLMVKSSTS

SEQ ID NO: 8835 - protein, 126 aa, Arabidopsis thaliana
MAPTKKGKKTKSAAESTTVTESSSFPTCLRLLTPSSVAITIHAKPGSKAASITDVSDEAVGVQIDAPARDGEANAALLEYMSSVLGVKRRQVSLGSGSKSRDKVVIVEDMTQQSVFQALSQASKPT

SEQ ID NO: 8836 - protein, 196 aa, Dalbergiella nyasae
DHGEVVAEVKKPGLEPYLGLHYPATDIPQATRFSFMKNKVRMIVDCHAKHVKVLQDKKIPFDLTLCGSTLRAPHSCHLQYMENMNSSASLVMAVVVNDNDEDGDSSDAIQPQKRKRLWGLVVCHHTTPRFVPFPLRYACEFLAQVFAIHVNKELELEYQIVEKNILRTQTLLCDMLMRDAPLGIVSQSPNIMDLVK

SEQ ID NO: 8837 - protein, 198 aa, Oryza rhizomatis
GQTPVFPRIFGHEAGGIVESVGEGVTDLAPGDHVLPVFTGECKECPHCKSAESNMCDLLRINTDRGVMIGDGRSRFSINGKPIYHFVGTSTFSEYTVMHVGCVAKINPAAPLDKVCVLSCGISTGLGATINVAKPPKGSTVAIFGLGAVGLAAAEGARIAGASRIIGIDLNANRFEEARKFGCTEFVNPKDHDKPVQQ

SEQ ID NO: 8838 - protein, 187 aa, Dalbergiella nyasae
EDEHGEVVSEIRRSDLEPYLGLHYPATDIPQASRLLFKQNRVRMICDCDAKPVKVIQSEELRQPLCLVNSTLRSPHGCHTQYMANMGSIASLVMAVIINGNDTTRLWGLLVCHHTSPRYVPFPVCYACEFLMQAFGLQLYMEIQLASQMAEKRILKTQTLLCDMLLRDAPFGIVNQSPNIMDLVKCD

SEQ ID NO: 8839 - protein, 513 aa, Picea abies
MAGGMAVSRPKQGRAELYEGHITAYVILACIVAATGGSLFGYDLGVSGGVTSMDDFLKKFFRHVYERKQHHLRETDYCKYDNQLLTLFTSSLYLSGLVATFGASYITRSKGRRVSIIIGGLSFLLGAILNAAAKNLGMLIVGRILLGAGVGFSNQSVPLYLSEMAPAKVRGGTNNLFQLKTCLGIFVTNVINYFTNKLHPWGWRLSLGLAVIPALLMSIGGYFLPETPNSLVEQGRLQEGRQILEKIRGTKNVQAEFDDLVEASDVARAVKHPFRNLLQRRNRPQLVMGTCIPAFQQLTGNNSFLFYAPVIFQSLGMGNDASLYSAIMTGAVITFGALVSMFTVDRVGRRFLFMEGGTQMIVCHVIISILLKSNFGKGEKIPTGYGVGIVLLICIFYLLAYGWLWGPLSWLVCSEIFPMESLVVCVNLFFTAVIAQSFLALLCHLKYGIFLLFGGLVFIMSVVIYFFLPETKNVPIEEMRFQWAKHWYWKRFMDEYMDNDDENEKGNMTKAAA

SEQ ID NO: 8840 - protein, 229 aa, Streptococcus pneumoniae R6
MKKPVIGITGNEKTHPDDDIMMSYAAKGFVEGVKDAGGIPIILPIGDQEMACHYISLIDKLILTGGQNVDPKFYGEPKTIDSDDYHLQRDIFELALIKEAIKQKKPIFSVCRGTQLFNVAMGGTLYQDIEDHWQDSSVEYTTQRLVTETDTVLQEIYGEISHINSFHHQSIKDLAPNLKVVAHDPKDGIIEAVMSTDDVAFLGVQWHPELLFENRPKDKKLFDYVVNEL

SEQ ID NO: 8841 - protein, 516 aa, Arabidopsis thaliana
MAYASRIINHSKKLKDVSTLLRRENAATIRYYSNTNRAPLNREVTGVHYFFNYEIKSKQCNGKANIWKRIFMVQSHSLTLCGGYLPPHQEIGMPSLSPTMTEGNIARWLKKEGDKVAPGEVLCEVETDKATVEMECMEEGYLAKIVKAEGSKEIQVGEVIAITVEDEEDIGKFKDYTPSSTADAAPTKAEPTPAPPKEEKVKQPSSPPEPKASKPSTPPTGDRVFASPLARKLAEDNNVPLSDIEGTGPEGRIVKADIDEYLASSGKGATAKPSKSTDSKAPALDYVDIPHSQIRKVTASRLAFSKQTIPHYYLTVDTCVDKLMALRSQLNSFKEASGGKRISVNDLVVKAAALALRKVPQCNSSWTDDYIRQFKNVNINVAVQTENGLYVPVVKDADRKGLSTIGEEVRLLAQKAKENSLKPEDYEGGTFTVSNLGGPFGIKQFCAVVNPPQAAILAVGSAEKRVVPGNGPDQFNFASYMPVTLSCDHRVVDGAIGAEWLKAFKGYIENPKSMLL

SEQ ID NO: 8842 - protein, 424 aa, Rubrobacter xylanophilus DSM 9941
MSYRRPKGTYDVYPGDAARQEPHERPDLWDRLYDAARDLFRRYGYAEVRTPVFEEAELFVRSTGETSDIVRKEMFVFRDKAGRELALRPEGTAGVVRAYVEHGLYKLAQPVKMWYFGPMFRHERQQKGRYRQHTQIGAEVLGSGDPLVDVEVVALLYAIHRSAGVREEVIHLNNLGDVETRRRYVPELRAFLERHRSELDPDSVARIETNPLRTFDSKDPNTRAVLREAPLIGEYLSEEAAAHLRAVEEGLEALGIPYVRDERLVRGLDYYTSTVFEAKSPVLGAQDTVGAGGRYNRLVEELGGPDVPGIGFGTGVERVLLAARAAEPESALDAFFVTLSPEARLPALQLAEALRAEGLSCELDYAGRSPKGQFRQADRSGASYAVVLGEEELSGGFCTLRDMKSGEERRVSGGPKGLLRAIAG

SEQ ID NO: 8843 - protein, 394 aa, Rhizobium etli
MTKTWRPATQLVHGGTWRSEYGETSEAIYLTQGFVYDTSEPAEARFKGETDGFIYARYGSPTNDMFEKRMCALEGAEDARATASGMAAVAAAVLCQVKAGDHIVAARALFGSCRWVVETLAPKYGVECTLVDGRDLANWEKAIRPNTKVFFLESPTNPTLEVVDISGVAKLANQVGAKLIVDNVFATPLFQKPLELGAHIVVYSATKHIDGQGACLGGVVLADKAWIDENLHDYFRHTGPAMSPFNAWTLLKGIETLPLRVRQQTENAAKIADFLAEQGKVAKVIYPGRKDHPQAEIIAKQMTGGSTLVCFELKGGKEAAFALQNALEIIKISNNLGDTKSLITHPATTTHKNLTEEARAELGISPGTVRLSAGIEDTDDLIEDFARGLTKVSA

SEQ ID NO: 8844 - protein, 445 aa, Mortierella alpina
MATPLPPSFVVPATQTETRRDPLQHEELPPLFPEKITIFNIWRYLDYKHVLGLGLTPLIALYGLLTTEIQTKTLIWSIIYYYATGLGITAGYHRLWAHRAYNAGPAMSFVLALLGAGAVEGSIKWWSRGHRAHHRWTDTEKDPYSAHRGLFFSHIGWMLIKRPGWKIGHADVDDLNKSKLVQWQHKNYLPLVLIMGVVFPTVVAGLGWGDWRGGYFYAAILRLVFVHHATFCVNSLAHWLGDGPFDDRHSPRDHFITAFVTLGEGYHNFHHQFPQDYRNAIRFYQYDPTKWVIALCAFFGLATHLKTFPENEVRKGQLQMIEKRVLEKKTKLQWGTPIADLPILSFEDFQHACKNDNKKWILLEGVVYDVADFMTEHPGGEKYLKMGVGKDMTAAFNGGMYDHSNAARNLLSLMRVAVVEYGGEVEAQKKNPSMPIYGTDHVKAE

SEQ ID NO: 8845 - protein, 360 aa, Bordetella parapertussis 12822
MKTHAIVQRGPRRLEYVQLPLPEVLAPDEALVRVEGCGICGTDYERYEGSLGHVPELIPGHEPVGRIERIGDSAAQRMQLKEGDRVAVQPHYGCGVCSYCVEGMFQLCARKINLGLSPLSEGCGLWGGFAEHMMLKGNAIVHKMPDSLPIEDAVMFNPLGAGFEWAITSAGTRVGDDVLIFGPGQRGLACVIAAVIAGANRIVVTGLQKDAYKLELARSLGATEVVAIDPADPASLARALEGQKFDRVIDVTPVATQPILDAIALVRPGGTIVLAGLKGNTRTVALRPDDLVMDGIEIKGVRGISTRSYGLAVRAICSGAYDFSAWHTHTMALKDAELAIRILAGEVRQGPEPLHITIVP

SEQ ID NO: 8846 - protein, 445 aa, Mortierella alpina
MATPLPPTFTVPASSTETRRDPLPHDVLPPLFNGEKVNILNIWKYLDWKHVIGLLVTPLVALYGMCTTELHTKTLVWSIVYYFATGLGITAGYHRLWAHRAYNAGPAMSFALALFGAGAVEGSIKWWSRGHRAHHRWTDTEKDPYSAHRGVFYSHLGWLLIKRPGWKIGHADVDDLNKNPLVQWQHKHYLILVILMGLVFPTAVAGLGWGDWRGGYFYAAILRLIFVHHATFCVNSLAHWLGDGPFDDRHTPRDHFITAFLTLGEGYHNFHHQFPQDYRSAIRFYQYDPTKWLIATCAFFGFASHLKTFPENEIKKGKLQMIEKEVLEKKTKLQWGTPIADLPILSFEDFQHACKNDRKQWILLEGVVYDVADFMTEHPGGEKYIKMGVGKDMTSAFNGGMYDHSNAARNLLSLMRVAVVEFGGEVEAQKSRPSVTVYGDHSKEE

SEQ ID NO: 8847 - protein, 223 aa, Sorghum bicolor
IENKISRQVTFAKRRNGLLKKAYELSLMCDAEVALIIFSGRGRLFEFSSSSCMYKTLERYRSSNYSSQEVKVPLDSEINYQDYLKLRTRVEFLQTTQRNILGEVLGPLSMKELEQLENQIETSLKQIRSRENQMLLDQLFDLKSKEQELQDLNKDLRKKLQETSPENALHVSSWEEGGHSGASGNVLDPYQGLLQHPESDPSLQIGYHQQAYMDQLNNEDMAG

SEQ ID NO: 8848 - protein, 296 aa, Acinetobacter calcoaceticus
MSLKRKGIILAGGSGTRLHPITKGVSKQLLPIYDKPMIYYPLSVLMLAGIREVLIISTPEDLPNFEKLLGDGSQFGIELSYKVQPSPDGLAQAFLIGEEFIGTDPVCLILGDNIYYGQHFSQQLEAASALPNGATVFGYHVTDPERFGVVEFDNTGKVLSIEEKPLKPKSAYAVTRLYFYDNRVVEFAKQVKPSARGELEITDINNAYLNDGSLNVELLGRGFAWLDTGTHESLLEAGQFIYTIEKRQSFKVACLEEIGFHQGWISKEQLLDSAEALKKTEYGQCLKKVWEESNEG

SEQ ID NO: 8849 - protein, 431 aa, Shewanella oneidensis
MAKIINVIGREIMDSRGNPTVEAEVHLEGGFIGMAAAPSGASTGSREALELRDGDKSRYLGKGVLTAVANVNGPIRTALIGKDATAQAELDQIMIDLDGTENKDKLGANAILAVSLAAAKAAAAFKGMPLYAHIAELNGTPGQYAMPVPMMNILNGGEHADNNVDIQEFMVQPVGAKNFREALRMGAEIFHTLKKVLHGKGLSTSVGDEGGFAPNLSSNADALAVIKEAVELAGYKLGTDVTLALDCAASEFYKDGKYDLAGEGKVFDSNGFSDFLKSLTEQYPIVSIEDGLDESDWDGWAYQTQIMGDKIQLVGDDLFVTNTKILTRGIENGIANSILIKFNQIGSLTETLAAIRMAKAAGYTAVISHRSGETEDATIADLAVGTAAGQIKTGSLCRSDRVAKYNQLLRIEEQLGEKAPYRGLKEIKGQA

SEQ ID NO: 8850 - protein, 393 aa, Desulfovibrio vulgaris subsp. vulgaris str. Hildenborough
MSLLSQQISGYMERASWIRKMFEAGIILKQQYGEDAVCDFSLGNPDLPAPAAVGDGLRAMADRAGEPFAFGYMPNGGYAWARQKLATHLSAEQGVSLTGDDVVLTCGAAGGLNAFFRAVLDEGDEVLSMAPYFVEYGFYVENHGGVFRTVKTLPDTFGLDLDAIELAMTPRTRAVIINSPNNPTGAVYSRAELEGLADILARASARNGRPVFLIADEPYRFLAFDGAEVPSVLPLYDHSLVVSSFSKNLSLAGERLGYIALSPRMENRGKLAAGLLLTNRILGFVNPPVVGQHIMAAALGAQVDASIYARRRDVMAEVLTEAGYDFQMPRGAFYFFPKAPGGDDVTFVSRLMEERILAVPGSGFGGPGHFRLTFCVDETIIRRAAEGFRRARG

SEQ ID NO: 8851 - protein, 268 aa, Crocosphaera watsonii WH 8501
MSIRLGIIGGGVMAEAILTRLLESQLYQANTLLVSEPQTSRREFLAQTYGVNVTDSNQETLQATEALLLAIKPQILDKVISQLTLDGVENYPLVLSILAGTPLSRLETAFENFPVIRVMPNTPATVGVGMTAIAAGTRVKPSHLTLATSLFEAVGEVVEVPESLMDGVTGLSGSGPAFVALMIEALSDGGVASGLPRAIANKLAIQTVLGTATLVKDTGLHPGQLKDQVTSPGGTTIAGVAKLEEKGFRSAVIEAVKAAYRRSQDLGK

SEQ ID NO: 8852 - protein, 781 aa, Leptospira interrogans serovar lai str. 56601
MKNRIANRIVLILFLGINLPLFSESPALELSKTVDPIWLILCAALVFFMQAGFLMLETGLSRLKNTINVAVKNLMDYIVGTIAFFSVGFALMFGLSYEGWIGTNHFFLTGLKTGKDFSFFLFQVAFMGTAATIVSGAVAERIKFSAYLIVSVVVSLFIYPVFGHWTWGGGWIAKIGFVDFAGSTVVHSLGGWIALAGVIVLGPRKDKFKEDGTPRKIHGHNLTFSVLGVFILWFGWFGFNGGSALSFTDQVPLIILNTSLAGSVGGIFAITFSWIFYRVASVEDCMNGVLGGLVAITAGCHAFQPYASLIVGALAGISVVITSWVLEKILKLDDVVGAFPVHGVCGIIGTLLLPILSENQDIRIYPQFIGVLTCSFWAFGLGMILFLLLKISIGIRVNEEFEEKGLNVTEHGAGSSWIDLIHSLKDLAKGGGDLTRKIHVDSGTEAGAIAFLMNRYLANLGQMIYTIKEKSIELEYSSSEISVAWGKMSQGIQQQAANLGEVTSIFDSFRESFQTISSSAAQQKEMETSASELLNELVFGFQKFDSDLKNSSEKSEESVKAIDLSRKELNQLETDINDIGSSAKKVEGLVKLLNDISAKLGMLSINASIEAARSGAAGKGFGVVAEEISKLASSTQESTKKASEILGEIQSTVSRGKTTVQTSVEFFKNLTEEFRFLAETYITIRKSSLHYSNLIGNLNRLNTSITNQSEIIMTDIDKRFSEIGNLYESVDLINGAFHEISAQSEELNATGEFLKQLAEILNSLVRNFRVEQNSSQELIPG

SEQ ID NO: 8853 - protein, 257 aa, Silene latifolia
MGRGRVQLKRIENKINRQVTFSKRRTGLLKKAHEISVLCDADVGLIVFSTKGKLFEYATDSCMEKILERYERYSYAERQLTAPDPDSHVSWTLEHAKLKARLEILQKNHRHYMGEDLDTLSLKELQNFEHQLDTALKHIRSKKNQLMYESIHELQKKDKALQEHNNTLSKKVKEKEKEKEKEKAIADQQAQWVQQNQELNPSAFFSSQVLPALNIRGNYETGSSVIVNEVAQTQNRSNSSNNNSLVPSWMLNHLAEQ

SEQ ID NO: 8854 - protein, 729 aa, Synechococcus elongatus PCC 7942
MFDLSKFLPVITPLMIDTAKTLCPYCGVGCGLEAVPPAQPGRATVRDREGTPIWQIRGDRQHPSSQGMVCVKGATVAESVSKSRLKYPMFRASLDDPFTEISWDEALDRLCDRIQQTQADYGKDGICFYGSGQFQTEDYYIAQKLVKGCLGTNNFDTNSRLCMSSAVSAYSLCLGSDGPPACYEDLDLADCLLIVGSNTAECHPILFNRYRKRHKQGGTNLIVVDPRCTPTAEVADLHLALKPGSDVALLNGLGWLLYQMGYVKKDFIANQTEGFEDWLAIIEDYPPQRTAELTGLAVAELVRAADLIASAQRWLSLWSMGVNQSIQGTAKATSLINLHLLTRQIGLPGCGPFSLTGQPNAMGGRETGGLAHLLPGYRKVIDPQHRADVETIWGLPMGSISPQPGRTAWQMIEGLEQGAVGFLWVAATNPAVSLPDVKRAQAALKRSPFTVLQDAYHPTETTTYAHLLLPAAQWSEKTGTMTNSERRVTLCQAFRQPPGEARADWQIFAEVGRRLGFAFDYTDAAAVFAEYVQVTAGRLCDLSGLSHELLAQAGPQQWPFPAGAEPTTESKRLYTKHHFAYADGRARFQPFHHLGVAEPPDDRYPLVLTVGRLYGHWHTQTRTGRIDKINKLHPSAFVEIHPRDADRYNISEGQAVVIRSRRGEGCFPAKVTTAISPGVLFVPMHWGALWGDRTEANALTHPAACPISGEPELKACAVQIEAASSTFTI

SEQ ID NO: 8855 - protein, 427 aa, Ipomoea batatas
LGGGAGTRLYPLTKKRAKPAVPLGANYRLIDIPVSNCLNSNVSKIYVITQFNSAYLNRHLSRAYASNMGGYKNEGFVEVLAAQQSPENLWSQGTADAVRQYLWLFEEHNVLVLEFLVLAGDHLYRMDYERFIQAHRETDADITVAALPMDEKRATAFGLMKIDEEGRIIEFAEKPKREQLKAMKVDTTILGLDDQRAKELPFIASMGIYVISKNVMLNLLREKFPGANDFGSEVIPGATSIGMRVQAYLFDGYWEDIGTIEAFYNANLGITKKPVPDFSFYDRSAPISTTPRYLPPSKMLDADVTDSVIGEGCVIKNCKIHHSVVGLRSCISEGAIIEDSLLMGADYYETDADRRLLAAKGSVPIGIGRNSHIKRAIIHNIARIGNDVKIINNDNVQEAARETEGYFIKSGIVTIIKDALIPSGTII

SEQ ID NO: 8856 - protein, 310 aa, Orobanche ramosa
MVITLNNGFKMPIIGLGVWRTEGKDLKNLIINAIKIGYRHFDCAADYKNEAEVGEALEEALQTGLVKREDLFITTKLWNSDHGHVVEACTDSLKKLRLEYLDLYLVHFPVATKHTGVGTTDSALGDDGILDIDTTISLETTWHAMEDLVSLGLARSIGISNYDIFLTRDCLAYSKIKPAVNQIETHPYFQRESLVKFCQKHGICVTAHTPLGGALANTEWFGTVSCLDDPVIKGLTEKYKKKTVAQIALRWGIQRNTVVIPKTSKQDRLIENFQVFDFELSNEDMELLKTMERKYRTNQPAKFWGIDLFA

SEQ ID NO: 8857 - protein, 257 aa, Brucella suis 1330
MSDQAPQIDLNFPLSEKVAIVTGGASGIGAAISKAFIAKGAKVAVLDISADIAKAKAEELGENAKPFVCDVSSQQSVNDAITAVISQFGKIDIAVNSAGVVYLAPAEDISLDYWDKTININLKGSFLVTQAVGRAMIAAGNGGKIINLASQAGTVAIEEHVAYCASKFGVIGMSKTFAAEWGKYGICVNTLSPTIVLTELGKKAWAGEKGEAAKKRIPAGRFAYPEEIAAAAVFLASAGADMITGADLLIDGGYTIL

SEQ ID NO: 8858 - protein, 176 aa, Dalbergiella nyasae
IGLHYPATDIPQAFRFLFKQNRVRMIVDCHASPVRVVQDEALVQPLCLVGSTLRAPHGCHAQYMANMGSIASLVMAVIINGNDEEGVGGRSSMRLWGLVVCHHTSARCIPFPLRYACEFLMQAFGLQLNMELQLAAQTLEKRVLRTQTLLCDMLLRDSPTGIVTQSPNIMDLVKCD

SEQ ID NO: 8859 - protein, 262 aa, Phleum pratense
MASSSSVLLVVALFAVFLGSAHGIPKVPPGPNITATYGDKWLDAKSTWYGKPTAAGPKDNGGACGYKDVDKPPFSGMTGCGNTPIFKSGRGCGSCFEIKCTKPEACSGEPVVVHITDDNEEPIAAYHFDLSGIAFGSMAKKGDEQKLRSAGEVEIQFRRVKCKYPEGTKVTFHVEKGSNPNYLALLVKFSGDGDVVAVDIKEKGKDKWIALKESWGAIWRIDTPEVLKGPFTVRYTTEGGTKARAKDVIPEGWKADTAYESK

SEQ ID NO: 8860 - protein, 329 aa, Spinacia oleracea
MAAKLMHAIQYSGYGGGTDALKHVEVAVPDPKSDELLLKIEAATLNPIDWKIQKGVLRPLLPRKFPTIPGTDVAGEVVQAGSAVNRFKTGDKVVAVLSHATGGALAEYAVAKENLTVARPPEVSAAEGAALPVAALTAHQALTQFANIKLDGSGERKNILITAASGGVGHYAVQLAKLGNTHVTATCGARNLDFVKGLGADEVLDYKTPEGASLTSPSGKKYDYVVHGASGIPWSTFEPNLSEAGKVIDLTPGPTAMMTFAWKKLTFSKKQLVPLLLIPKIPNFEYVVNLVKEKKLKTVIDSKHPLSKGEDAWSRIMGGHATGKIIIEP

SEQ ID NO: 8861 - protein, 368 aa, Malus x domestica
MGKGGQSCNGVVRDAKPVEQENMAAWLVDVNTIKILPFKLPAIGPNDVRIRIKAVGICGSDIHYLKTMKCGDFQVKDPMVIGHECAGIVDKVGSEVKHLVPGDRVAVEPGISCARCQQCKGGRYNLCPDMKFFATPPVHGSLANQIVHPADLCFKLPENVSLEEGAMCEPLSVGVHACRRANVDPETTVLIIGAGPIGLVSVLAARAFGAPRIVIVDMDDKRLAMAKSLGADEAVKVSTKMEDLDDEVAEIKEAMISEVDVTFDCVGFNKTVSTGLNATRPGGKVCLVGMGHGVMTVPLTPAAAREVDVVGVFRYQKTWPLCLEFLRSGKIDVKPLITHRFGFTEKEVEEAFATSARGGNAIKVMFKL

SEQ ID NO: 8862 - protein, 192 aa, Zea mays
MMRETYMDVLPPVDHIAASRSGGWFPGAVRLWTAAENKQFERALAGLDLCRPDWEKVARAIPGRTVREVVSHFKSLQVDVQQIESGLVPMPVYGAGAGSFTLQWDGCYGPADSRHNGYRFGNGGCGRRHHGRTPEQERKKGVPWTEEEHRLFLLGLKKYGKGDWRNISRNYVQTRTPTQVASHAQKYFIRLN

SEQ ID NO: 8863 - protein, 198 aa, Oryza latifolia
GQTPMFPRIFGHEAGGIVESVGEGVTDLAPGDHVLPVFTGECKECPHCKSAESNMCDLLRINTDRGVMIGDGKSRFSINGKPIYHFVGTSTFSEYTVMHVGCVAKINPAAPLDKVCVLSCGISTGLGATINVAKPPKGSTVAIFGLGAVSLAAAEGARIAGASRIIGIDLNANRFEEARKFGCTEFVNPKDHDKPVQQ

SEQ ID NO: 8864 - protein, 466 aa, Xylella fastidiosa Ann-1
MIKPRTPPGVLELLPREQIAFQRMLDVIRRNYERFGFLPVETPVFELSDVLLTKSGGETERQVYFVQSTGTLANAAESGATRLPELALRFDLTVPLARYVAEYEHVLAFPFRRYQIQRVYRGERAQRGRFREFYQCDIDVIGKQTLSIRYDAEVLAVIHAVFSELGIGDFQVQLNNRKVLRGFLESQGVRDGELQLAILREVDKLDKRGVLDVRDTLIGQGFGIPAAQVENILTFVATRSTSHADALARLDALIEDSGPGSHDMLRQGVAELREVLTLVNVLGVPEHAYRLNFSIARGLDYYTGTVYETALINHHQIGSICSGGRYENLANHYTQSKLPGVGISIGLTRLFWQLRDAGLIDGIAESSVQAMVVLMDEATLDDALDIARCLRIGGINTEVQMEAKKLSKQFQYASRAGIRFVVLAGDDERARGVVAVKDLTREQQFEIPREELASTLQVELEQAKVM

SEQ ID NO: 8865 - protein, 198 aa, Oryza australiensis
GQTPMFPRIFGHEAGGIVESVGEGVTDLAPGDHVLPVFTGECKECPHCKSPESNMCDLLRINTDRGVMIGDGKSRFSINGKPIYHFVGTSTFSEYTVMHVGCVAKINPEAPLDKVCVLSCGISTGLGATINVAKPPKGSTVAIFGLGAVGLAAAEGARIAGASRIIGIDLNANRFEEARKFGCTEFVNPKDHDKPVQQ

SEQ ID NO: 8866 - protein, 814 aa, Salmonella typhimurium LT2
MKTKIPDAVLAAEVSRRGLVKTTAIGGLAMASSAFTLPFTRIANAAEAISPAKTGEKVVWSACTVNCGSRCPLRMHVVDGEIKYVETDNTGNDDYDGLHQVRACLRGRSMRRRVYNPDRLKYPMKRVGARGEGKFERISWDEAYDIIATNMQRLIKEYGNESIYLNYGTGTLGGTLTRSWPPGKTLVARLMNCCGGYLNHYGDYSSAQIAAGLNYTYGGWADGNSPSDIENSKLVVLFGNNPGETRMSGGGVTYYLEQARQKSNARMIIIDPRYTDTGAGREDEWIPIRPGTDAALVNGLAYVLITENMVDQPFLDKYCVGYDEKTLPASAPKNGHYKAYILGQGKDGIAKTPEWAAQITGIPADRIIKLAREIGSAKPAYICQGWGPQRHANGEIATRAISMLAILTGNVGINGGNSGAREGSYALPFERMPTLENPVETSISMFMWTDAIERGPEMTALRDGVRGKDKLDVPIKMIWNYAGNCLINQHSEINRTHEILQDDKKCEMIVVIDCHMTSSAKYADILLPDCTASEQMDFALDASCGNMSYVIFTDQAIKPRFECKTIYEMTSELAKRLGVEQQFTEGRTQEEWMRHLYEQSRKSIPNLPTFEEFRKQGIFKQRDPEGHHVAYKDFREDPQANPLTTPSGKIEIYSQALADIAATWELPEGDVIDPLPIYTPGFENYNDPLTDKFPLQLTGFHYKARVHSTYGNVDVLKAACRQEMWINPMDAQKRGINNGDKVRIFNDRGEVHIEAKVTPRMMPGVVALGEGAWYDPDAKRVDQGGCINVLTTQRPSPLAKGNPSHTNLVQVEKA

SEQ ID NO: 8867 - protein, 476 aa, Nostoc punctiforme PCC 73102
MSQGFDYDLVIIGAGVGGHGAALHAVSCGLKTAIIEAGDMGGTCVNRGCIPSKALLAASGRVRELRNAHHLKSLGIQIGSVEFDRQAIANHANNLVSKIQGDLTNSLKRLGVDIIRGWGKIAGAQKVAVTGDGAEKIITAKDIILSPGSIPFVPPGIEVDGKTVFTSDQGVKLESLPDWVAIIGSGYIGLEFSDVYSALGCEITLIEALDQLMPGFDRDIAKLAERVLITPRDIETKVGIYAKKVTPGSPVVIELANFKTKEDVDVIEVDACLVATGRIPATKNLGLESVGIELDRRNFIPVDDRMAVLSAGEVVPNVWAIGDANGKMMLAHAASAQGIIAVENIVGRERIVDYRSIPAAAFTHPEVSYVGLTETAAKELGQTEGFEIATSRSYFKGNSKALAENEADGIAKVIYRKDTGEVLGVHIFGLHASDLIHEASAAIANRQSVQSLAHLVHAHPTLSEVLDEAYKRAIAI

SEQ ID NO: 8868 - protein, 384 aa, Chloroflexus aurantiacus
MARKHPYEPLPWNDLPSVSWNFVWREPIGVCAQIIPWNYAFCMAAWKLGPALATGNTVVFKPSSLAPLSTLAIFQTIHDLNLLPKGVINLVLGPGGDVGEYLVTHPAVDKVAFTGSTEVGRKIMALAAPHIKRVTLELGGKNAMLILPDADLDLVVDGVLWGAFYHSGQLCEAGSRLLVPHALHDTLVERLVERVRGMRIGDPMDLETDIGPLISERQREKVEYYIAVGREEGATVVIGGGRPIGEAFANGHYVEPTIFTGVRPEMRIAREEIFGPVLSVIAYDEIGEAIRIANDSIYGLAASVWSRDLQHALSVVRRIRAGTVWINEHHVLNPRAPFGGYRQSGFGREMGRYGLDEYTEVKHIHVDLMQRRQGRLWWDTLLPE

SEQ ID NO: 8869 - protein, 242 aa, Zea mays
MASLFKDPSKLSAYRDRRFKGTQEECEAALLASTTLYIGNMSFYTTEEQAYELFSRAGEIKKIIMGLDKNSKTPCGFCFVLYYSREDAEDAVKYISGTMLDDRPIRVDFDWGFEEGRQWGRGRSGGQVRDEYRTDYDPGRGGYGKMVLRELEAQRELVDYGGSFQPNAPPPYERSERKRGHGDSHRNDRGDYQQKRYRNDDRSAPEESKRAPDSDPAEKNPRFREKGDSDEEEDDYDGKRRR

SEQ ID NO: 8870 - protein, 641 aa, Streptomyces avermitilis MA-4680
MTKRDRTPKTYTRLTHPLVRDSRDEPLRRATWEEALDRAARGLDAARGAFGMFSCARATNEMNYVAQKFARVVMGTNNVDSCNRTCHAPSVAGLSAAFGSGGGTSSYEETEHTDLIVMWGSNARFAHPIFFQHVLKGIRNGARMYAVDPRRTSTAEWAESWLGLNVGTDIPMAHAIGREIIHAGLANETFVERATSGFEEYRALVEPWTLSLAEKVTGVPARAIRELAHAYARAERAQLCWTLGITEHHNGTDNVRALINLSLLTGHVGRYGSGLQPLRGQNNVQGGGDMGAIPNRLPGFQDILDPDARLKFESAWDTVIQPHYGLNLTEMFEAMEEGTLRAVYCIGENPAQSEADSERAVRRMRALDFLVVQDIFLTRTAELADVVLPATAGWAETDGTTTNSERRVQRVRRAVTPPGEAREDIDILCALAARLGHDWKYADAEAVWNELRSVSPDHYGMTYERLAEHQGIQWPCPAPDRLEPPYLHGRLWSSDPAGRGRLAPFGIVQHDPPVDLTDEEYPIRLTTGRRLDSYNTGVQSGGFASPLRRGEFVELCPEDAERYGVVVGEQVQVASRRGAVVAPVWIDPALRPGLAFMTMHFPDEVDTNRLTIEANCPIAGTAEFKASAIRIEKLPVTAVRS

SEQ ID NO: 8871 - protein, 394 aa, Xanthomonas axonopodis pv. citri str. 306
MDSLLQYAGGYSRRSQDIAPFHVMSLLARANALEQAGHDVIHLEIGEPDFTTAAPIVAAGQAALAAGHTRYTAARGLPALREAIAGFYAQRYACNLDPERILVTPGGSGALLLASSLLVDPGRHWLLADPGYPCNRHFLRLVEGAAQLVPVGPDSDYQLTPALVESAWNADSVGALVASPANPTGSVLSRTQLAALSQALHARGGHLVVDEIYHGLTYGLDAHSVLEVDDGAFVLNSFSKYFGMTGWRLGWLIAPPDAVPELEKLAQNLYISASTIAQHAALACFTPESIALFEARRAEFQQRRDYLLPALRALGFEIAVEPQGAFYLYADISGFSDDAQAFCAHFLETEHVAFTPGIDFGHYRANQHVRIAYTQSLPRLQQAVERIARGLKRL

SEQ ID NO: 8872 - protein, 142 aa, Glycine max
  unsure (1)..(142): unsure at all Xaa locations
MLTMKLLHPLHHSLSSSLPLPSRRRQSKPYRCSLPSPGGERVIRSETVVSPVMVSQSFEGRRVLLGCLLSAAGGILLPDSSEAVSTSRRALRASKIPDSEFTTLPNGLKYYDIKVGNGAEAVKGSRVAVHYVAKWXGITFXT

SEQ ID NO: 8873 - protein, 485 aa, Haemophilus influenzae Rd KW20
MGMNRVLVSQAAGGLAEYLKGYDKEPSIVIGYDGRKNSDVFARDTAEIMAGAGVKAYLLPRKLPTPVLAYAIQYFDTTAGVMVTASHNPPEDNGYKVYLGKANGGGQIVSPADKDIAALIDKVAAGNIQDLPRSDNYVVLNDEVVDAYITKTASLAKEPACDINYVYTAMHGVGYEVLSKTLAKAGLPQPHVVADQVWPDGTFPTVNFPNPEEKGALDLAIKVAKEKNAEFIIANDPDADRLAVAVPDAQGNWKSLHGNVVGCFLGWYLAKQYQGKQGTLACSLVSSPALAEIAKKYSFQSEETLTGFKYIGKVSGLLFGFEEALGYLVDPDKVRDKDGISAAIVFLDLVRNLKKQGKTLADYADEFTKEFGAYVSGQISIRVSDLSEIGKLMTALRNNPPAEIAGVKVAQFIDHIKTDRQSDILVFNLENGGRLIARPSGTEPKIKFYLDARGKDPKDADRVLAEFDEGVRHILRQDAYGKQDC

SEQ ID NO: 8874 - protein, 268 aa, Oryza sativa
MMAAAGLESAWEYLITHFSEFQLASIGTFLLHESVFFLSGLPSLLFERLGLFSKYKIQKKSNTPDYQNRCVVRLVLYHVCVNLPLTILSYRTFKFMGLRSTLPLPHWTVVVSQVLFFFVLEDFIFYWGHRALHTKWLYQHVHSVHHEYATPFGLTSEYAHPAEILFLGFATVAGPALTGPHLFTLWVWMVLRVLETVEAHSGYHFPWSPSNFLPLYGGAEFHDYHHRVLYTKSGNYSSTFIYMDWLFGTDKDYRKTKALEEKERTKHL

SEQ ID NO: 8875 - protein, 427 aa, Pseudomonas syringae pv. syringae B728a
MKTQIQAIHAREILDSRGNPTVEVDVTLECGAMGRASVPSGASTGAHEAVELRDKDTQRYSGKGVLKAVSNVNTEILESLRGMNAIDQEQIDHLMIKLDGTSDKSRLGGNAILGVSLAVARAAASALNLPLFQYLGGEQAARMPVPMFNILNGGVHANWQGPDFQEFMIAPTGAGSFKEALRWGSEVYHELKAVLKDAGYSTAVGDEGGFAPALKKNSDAIELIIKAIERAGYTPGSQIEIAIDPASSGFYENGLYHLRSEGRKVDAQELINLYSSWVDKYPIAVLEDGLAEDDWSGWKLLNAALGDRIELVGDDLFVTNVERIQRGITENVANAVLIKPNQIGTLTETKAAIEMAYGANWGAMVSHRSGETVDSSIADLTVAMGTGHLKTGAPCRGERVEKYNQFLRIEEDLGSRAFYAGHDAFVR

SEQ ID NO: 8876 - protein, 198 aa, Oryza ridleyi
GQTPVFPRIFGHEAGGIVESVGDGVTDLAPGDHVLPVFTGECKECPHCKSAESNMCDLLRINTDRGVMIGDGKSRFSINGKPIYHFVGTSTFSEYTVMHVGCVAKINPEAPLDKVCVLSCGISTGLGATINVAKPPKGSTVAIFGLGAVGLAAAEGARIAGASRIIGVDLNPNRFEEARKFGCTEFVNPKDHDKPVQQ

SEQ ID NO: 8877 - protein, 198 aa, Oryza longiglumis
GQTPVFPRIFGHEAGGIVESVGEGVTDLAPGDHVLPVFTGECKECPHCKSAESNMCDLLRINTDRGVMIGDGKSRFSINGKPIYHFVGTSTFSEYTVMHVGCVAKINPEAPLDKVCVLSCGISTGLGATINVAKPPKGSTVAIFGLGAVGLAAAEGARIAGASRIIGVDLNPNRFEEARKFGCTEFVNPKDHDKPVQQ

SEQ ID NO: 8878 - protein, 198 aa, Oryza schlechteri
GQTPVFPRIFGHEAGGIVESVGEGVTDLALGDHVLPVFTGECKECPHCKSAESNMCDLLRINTDRGVMIGDGKSRFSINGKPIYHFVGTSTFSEYTVMHVGCVAKINPKAPLDKVCVLSCGISTGLGATINVAKPPKGSTVAIFGLGAVGLAAAEGARIAGASRIIGVDLNANRFEEARKFGCTEFVNPKDHDKPVQQ

SEQ ID NO: 8879 - protein, 903 aa, Agrobacterium tumefaciens str. C58
MWGRCPAGQRGVSVIRREGNSMPAETKTTCPYCGVGCGVIATVNDSGVVSVKGDPDHPANFGRLCSKGSALAETIDLDGRLLHPEIAGRRAAWDEALDLVASRFSDAIAEHGPDSVAFYVSGQLLTEDYYLANKLMKGFIGSANIDTNSRLCMSSSVAGHRRAFGADTVPGTYEDMELADLVILTGSNLAWCHPVLYQRLAAAKAARPGMKVVVIDPRRTMSADIADMHLAIRPDGDVALFTGLLAHLFASSAIDRGYVENHTAGFEAATQAASEHSLPEIAEATGLTIAELIPFYELFERTEKTVTCYSQGVNQSESGTDKVNAIINCHLATGRIGRPGMGPFSLTGQPNAMGGREVGGLANMLAAHMSIENADDRDRVQRFWASPAIAQKPGLKAVDMFRAVADGRIKALWIMATNPVVSMPDAGAVEVTIKACPFVVVSDVMANTDTARHAHVLLPSLGWGEKDGTVTNSERRISRQRSFLDAPGEAKADWWQMAEVARRMGFDAAFAYQQPSEIFAEHAALSGFENAGRRDFDIGGIERDSYETMAPVQWPKAGAGEAEVTRFFANGRFYHADGKARFIATALPETDRTSADYPLTLNTGRIRDQWHTMTRTGKSARLTAHIAEPFAEIHPRDAQALGIKSADLVELESPHGKVLLRALVSERQARGSVFAPMHWNDQFASRARIDVVVAPVTDPHSGQPASKNVGVRVTRFEASAYGFAICRSRPDAPDCAYWAVAKAEGGYRMELAFAEAPEDWTLWARRVFGIDVRIEPLGYSDRQTGDLRLAFFDGDTLLAALFIAREPVAVARNWAISQLSERHEDLRMRFALVAGRPGAGRADPGATVCSCFNVGVNQITAAIREGCHSVEAIGNALNAGTNCGSCRAEIRGIIDGCLKTAAE

SEQ ID NO: 8880 - protein, 301 aa, Shigella flexneri 2a str. 301
MDEIMTNLKAVIPVAGLGMHMLPATKAIPKEMLPIVDKPMIQYIVDEIVAAGIKEILLVTHASKNAVENHFDTSYELESLLEQRVKRQLLAEVQSICPPGVIIMNVRQGEPLGLGHSILCARPAIGDNPFVVVLPDVVIDDASADPLRYNLAAMIARFNETGRSQVLAKRMPGDLSEYSVIQTKEPLDREGKVSRIVEFIEKPDQPQTLDSDIMAVGRYVLSADIWPELERTQPGAWGRIQLTDAIAELAKKQSVDAMLMTGDSYDCGKKMGYMQAFVKYGLRNLKEGAKFRKGIEKLLSE

SEQ ID NO: 8881 - protein, 198 aa, Porteresia coarctata
GQTPVFPRTFGHEAGGIVESVGEGVTDLTPGDHVLPVFTGECKECPHCKSAESNMCDLLRINTDRGVMIGDGKSRFSINGKPIYHFVGTSTFSEYTVMHVGCVAKINPKAPLDKVCVLSCGISTGLGATINVAKPPKGSTVAIFGLGAVGLAAAEGARIAGASRIIGVDLNPNRFEEARKFGCTEFVNPKDHDKPVQQ

SEQ ID NO: 8882 - protein, 185 aa, Pseudomonas fluorescens PfO-1
MSADLEHIRQIMREADCLYTEAEVEAAIARVGAQINEQLADSNPVVFCVMNGGLIFSGKLLTHLQFPLEASYLHATRYRNETSGGDLFWKAKPEVSFIDRDVLIIDDILDEGHTLGAIIDFCRHAGARKVHTAVLIDKDHDRKARPDLKADFVGLPCIDRYIFGYGMDYKGYWRNANGIFAVKGM

SEQ ID NO: 8883 - protein, 359 aa, Streptococcus pyogenes MGAS8232
MKPSIYSLTRDELIAWAVERGQKQFRATQIWDWLYKKRVQSFEEMTNISKDFVPILNDSFCVNPLKQRVVQESADGTVKYLFELPDGMLIETVLMRQHYGHSVCVTTQVGCNIGCTFCASGLIKKQRDLNSGEITAQIMLVQKYFDDRKQGERVSHVVVMGIGEPFDNYKNVMCFLRVINDDNGLAIGARHITVSTSGLAHKIRDFANEGVQVNLAVSLHAPNNDLRSSIMRVNRSFPLEKLFSAIEYYIEKTNRRVTFEYIMLNEVNDSIKQAQELADLTKTIRKLSYVNLIPYNPVSEHDQYSRSPKERVLAFYDVLKKNGVNCVVRQEHGTDIDAACGQLRSKTMKKDREKVTATK

SEQ ID NO: 8884 - protein, 282 aa, ASPERGILLUS NIDULANS FGSC A4
MPQNEYIERWTKQHGKRLDHDERVRKREARQSHQQSKDAQNLRGLRAKLYQQKRHAEKIQMRKRIKAQEEKNVKSSAPSEPSKTPLPQYLLDRSEATNAKALSSAIKDKRAEKAAKFAVPLPKVKGISEEEMFKVVNTGKKTHKKSWKRMITKPTFVGNDFTRRPVKYERFIRPMGLRYKKANVTQYVLSLATIGVYLGFTDKFSCSPEMAVTVQLPILSVKKNPQNPLYTQLGVLTKGTVIEVNVSELGIVTAGGKVAWGKYAQITNTPENDGCVNAVLLV

SEQ ID NO: 8885 - protein, 250 aa, Wigglesworthia glossinidia endosymbiont of Glossina brevipalpis
MKIKEKMTDFGFSYVKKSKKNSMIEDIFNNVSYKYDLMNDIMSFGVHRIWKNILVYCNSTNPDQKILDLASGTGDITKRLSKLINKKGFIVSLDINRKMLKICRKKIRNSGTIRNIFYIQANSEYLPFKKNIFDSVIVSFGFRNFTEKKKQLSSIFNVLKPGGKLLILEFSKPLFEFLKKIYDIYSFYCIPKMGNIISGNYYSYKYLVESIKIHPSQKKLNKILSESEFCNSEYINISGGIVAIHRCYKF

SEQ ID NO: 8886 - protein, 492 aa, Bordetella pertussis Tohama I
MRISMGKITGFMEFQRLQEAAEAPQKRLKHWREFVLHLNDEQAKQQAARCMDCGIPFCSNGCPVNNIIPDWNDLVYRQDWRRALDVLHSTNNFPEFTGRICPAPCEAACTLNINSDAVGIKSIEHAIIDKGWAEGWVTPQVPVRKTGKKVAVVGSGPAGLACSQQLARAGHSVTLFEKSDRIGGLLRYGIPDFKLEKSQIDRRIAQMEAEGVEFAPSTYIGNPDDAAADGLTVRTPQSLLADFDAVVMTGGSETPRDLPVPGRELSGVYYAMDFLRQQNKAVAGDRLSGQTLAKDKHVVVIGGGDTGSDCVGTSNRHGAASVTQFELLPQPPECEDKPMVWPYWPLKLRTSSSHDEGCERDWSVATKALAGSDGQVEKLVGVRVEWFKDEATGQMKMREIEDSEFEIPADLVLLAMGFVSPVATVLDAFGVDRDARGNVRANTDDYRTNVDKVFAAGDMRRGQSLVVWAIREGRQCARSVDEYLMGASELPR

SEQ ID NO: 8887 - protein, 235 aa, Glycine max
SARVPLLGGLLSVWYSDFFQAQTHLVAPFDQYLHRFPAYLQQLSMESNGKTITSDGSSAKYTTGPILFGEPCTNAQHSFFQLVHQGTKLIPTDFILAAKSHNPVSDNLHQKMLASNYFAQAEALMVGKTDDQVRAEGTPEELVPHKRFLGNRPTTSILVGGAIGPAELGALIVYYEHLTFTEGAIWDINSFDQWGVELGKVLAKKILKELDEAGNGEGHDASTGGLIGAFKKYGN

SEQ ID NO: 8888 - protein, 543 aa, Synechococcus elongatus PCC 7942
MNIHTVATQAFSDQKPGTSGLRKQVPVFQKRHYLENFVQSIFDSLEGYQGQTLVLGGDGRYYNRTAIQTILKMAAANGWGRVLVGQGGILSTPAVSNLIRQNGAFGGIILSASHNPGGPEGDFGIKYNISNGGPAPEKVTDAIYACSLKIEAYRILEAGDVDLDRLGSQQLGEMTVEVIDSVADYSRLMQSLFDFDRIRDRLRGGLRIAIDSMHAVTGPYATTIFEKELGAAAGTVFNGKPLEDFGGGHPDPNLVYAHDLVELLFGDRAPDFGAASDGDGDRNMILGNHFFVTPSDSLAILAANASLVPAYRNGLSGIARSMPTSAAADRVAQALNLPCYETPTGWKFFGNLLDADRVTLCGEESFGTGSNHVREKDGLWAVLFWLNILAVREQSVAEIVQEHWRTYGRNYYSRHDYEGVESDRASTLVDKLRSQLPSLTGQKLGAYTVAYADDFRYEDPVDGSISEQQGIRIGFEDGSRMVFRLSGTGTAGATLRLYLERFEGDTTKQGLDPQVALADLIAIADEVAQITTLTGFDQPTVIT

SEQ ID NO: 8889 - protein, 454 aa, Lupinus angustifolius
SSLLSIPSLSLQYNDKLKVGGNSLRFSKEQSNTFSNAKSSCRISMVAAVNVSRFEGIPMAPPDPILGVSEAFRADTSDAKLNLGVGAYRTEELQPYVLKVVNKAENLMLERGQNKEYLAIEGLAAFNKATAELLLGADNPAIKQQRVATVQGLSGTGSLRLGAALIERYFPGAKVLISAPTWGNHKNIFNDARVPWSEYRYYDPKTVGLDFEGMIEDIKAAPEGTFVLLHGCAHNPTGIDPTPEQWEKIADVIQEKNHIPFFDVAYQGFASGSLDEDAASVRLFVARGLEVLVAQSYSKNLGLYAERIGAINVISSSPESAARVKSQLKRIARPMYSNPPVHGARIVADIVGNPALFDEWKVEMEMMAGRIKNVRQQLYDSISSKDKSGKDWSFILKQIGMFSYTGLNKNQSDNMTNKWHVYMTKDGRISLAGLSLAKCEYLADAIIDSFHYVS

SEQ ID NO: 8890 - protein, 86 aa, Avena sativa
TIKYLLEKGAKVILSSHLGRPKGVTPKFSLAPLVPRLSELLGITVTKADDVIGPEVEKLVAALPNGSVLLLENVRFYKEEEKNEPE

SEQ ID NO: 8891 - protein, 463 aa, Methanocaldococcus jannaschii
MFIDGKWINREDMDVINPYSLEVIKKIPALSREEAKEAIDTAEKYKEVMKNLPITKRYNILMNIAKQIKEKKEELAKILAIDAGKPIKQARVEVERSIGTFKLAAFYVKEHRDEVIPSDDRLIFTRREPVGIVGAITPFNFPLNLSAHKIAPAIATGNVIVHHPSSKAPLVCIELAKIIENALKKYNVPLGVYNLLTGAGEVVGDEIVVNEKVNMISFTGSSKVGELITKKAGFKKIALELGGVNPNIVLKDADLNKAVNALIKGSFIYAGQVCISVGMILVDESIADKFIEMFVNKAKVLNVGNPLDEKTDVGPLISVEHAEWVEKVVEKAIDEGGKLLLGGKRDKALFYPTILEVDRDNILCKTETFAPVIPIIRTNEEEMIDIANSTEYGLHSAIFTNDINKSLKFAENLEFGGVVINDSSLFRQDNMPFGGVKKSGLGREGVKYAMEEMSNIKTIIISK

SEQ ID NO: 8892 - protein, 437 aa, Eremothecium gossypii
MAISKVYARSVYDSRGNPTVEVEVTTENGTFRSIVPSGASTGVHEALELRDGDKSKWLGKGVTKAVSNVNDIIAPALLSANVDVKDQKAVDALMLTLDGTPNKSKLGANAILGVSMAVAKAAAAEKKVPLYQHLADLAGSSTTPFVLPVPFLNVLNGGSHAGGALALQEFMIAPTGAESFSEALRMGSEVYHNLKSLTKKRYGASAGNVGDEGGVAPNIQTAEEALDLIVDAIKAAGYEGKIDIALDCASSEFFKDGKYDLDFKNPESDSSKWLSGQELADLYKKLVEKYPIVSIEDPFAEDDWEAWSHFYKNAGVQIVADDLTVTNPTRIATAIQKKAADALLLKVNQIGSLTESIQAAKDSFDATWGVMVSHRSGETEDTFIADLVVGLRTGQIKTGAPARSERLAKLNQLLRIEEELGSKAIYAGKKFHNANKL

SEQ ID NO: 8893 - protein, 345 aa, Trichodesmium erythraeum IMS101
MTQSFKTPTQTPLLGLSLAKLTEWVQQQGQPAYRGKQLYQWIYQKGAKSLADITVFSKQWREEISNFPIGRSVIHHRSVAPDATVKYLLKLSDGNIIETVGIPTYKRLTVCVSSQVGCPMACDFCATGKGGFSRNLEAHEIIDQVLTVQEDFERRVSHIVFMGMGEPLLNTKNVLAAVRSLNQDLGIGQRLITISTSGIRDRIRQLAQHKLQVTLAVSLHASNQRLREHLIPSAKFYPLADLISECREYVKITKRRISFEYILLASFNDLPDHARELAKNMRGFQCHVNLIPYNPISEVDYQRPTQEMIKTFANALAEQNIAVSIRYSRGLEANAACGQLRASRV

SEQ ID NO: 8894 - protein, 105 aa, Picea sitchensis
NLLIDRKTNALKLADFGLARAFGIPVRTFTHEVVTLWYRAPEILLGSRHYSTPVDVWSVGCIFAEMVNQRPLFPGDSEIDELFKIFRVLGTPNEETWPGVTSLPD

SEQ ID NO: 8895 - protein, 301 aa, Neisseria meningitidis
MPSENPSQRKKEKMKGIILAGGSGTRLYPITRGVSKQLLPVYDKPMIYYPLSVLMLAGIRDILVITAPEDNASFKRLLGDGSDFGISISYAVQPSPDGLAQAFIIGEEFIGNDNVCLVLGDNIFYGQSFTQTLKQAARQTHGATVFAYQVKNPERFGVVEFNENFRAVSIEEKPQRPKSDWAVTGLYFYDNRAVEFAKQLKPSARGELEISDLNRMYLEDGSLSVQILGRGFAWLDTGTHESLHEAASFVQTVQNIQNLHIACLEEIAWRNGWLSDEKLEELARPMAKNQYGQYLLRLLKK

SEQ ID NO: 8896 - protein, 295 aa, Haemophilus influenzae Rd
MKAVIPVAGLGTRMLPATKAIPKEMLTLVDKPLIQYVVNECVAAGIKEIVLVTHSSKNAIENHFDTSFELETMLEKRVKRQLLEEVRSICPKNVTIMHVRQGNAKGLGHAVLCGRPLVGNESFAVMLPDVLLAEFSADQKKENLAAMIQRFNETGASQIMVTPVPQENVSSYGVADCGGIELNGGESAKINSIVEKPSIEDAPSNLAVVGRYVFSAAIWDLLEKTPIGVGDEIQLTDAIDMLIEKETVEAFHMTGETFDCGDKIGYMEAFVEYGIRHEKLGKEFKSFIKNLAKTL

SEQ ID NO: 8897 - protein, 253 aa, Xanthomonas axonopodis pv. citri str. 306
MSESPYTSGTTHFGFRDVAAKDKQKLVGEVFTSVARNYDLMNDLMSLGVHRAWKRYFVATAQVKPGDRVLDLAGGTGDIAVLLKERVGNEGAVVLGDINAGMLSVGRDRLTNRGLVSGFDYVQCNAEALPFPDQSFDLLTISFGLRNVTDKDAALREMYRVLKVGGQARVLEFSEVTADWFKPIYDFHSFKILPRLGQLFARDADSYQYLAESIRKHPPQESLKGMMGEAGFARCHFKNLTGGIVAIHSGYKI

SEQ ID NO: 8898 - protein, 108 aa, Zea mays
  unsure (1)..(108): unsure at all Xaa locations
MGKMNKSMDQNCCIYCCLQLLDDDTLXTHDKGRHWKCHVCHKKLCAGSGVAIHVLQVHMEYLTNVPKAXPAREVSDIEILGMQVITAHVLCCSLWYIRRPCINGTLCR

SEQ ID NO: 8899 - protein, 178 aa, Erwinia carotovora subsp. atroseptica SCRI1043
MMKHTVEVMISEQEVMARVTELGQQISEHYRDSGSDMVLVGLLRGSFIFMADLCRAIDVPHEVDFMTASSYGSGMNSTRDVKILKDLDEDIRGKDVLIVEDIIDSGNTLSRVREILQLREPKSLAICTLLDKPERREVAVKVEWVGFSIPDEFVVGYGIDYAQHYRHLPYVGKVVPQE

SEQ ID NO: 8900 - protein, 651 aa, Magnetococcus sp. MC-1
MYEQVSHSLLNEIMLELDPEILKQNQMRYFYTRLGANFYAIHSIAKVLYGNRNDFNEQMKRLVETMARQYIARPAQYRESDLEREKDHTWFLHQQWVGMALYSDGFANDLQGLNTKLSYLQELGINMIHIMPLLDCPPNKSDGGYAIRDFRKIDSRAGTLEDITTLADSMHTRGMLLTLDVVLNHTSDEHEWARRAREGDSDYQNYFYVFKDRSMPDLFEESMVEIFPQTAPGNFTWSEEMGRWVMTSFNSYQWDLNYSNPSVLIEILDIILYWANLGADIMRLDAVAFLWKKIGSTCQNQREAHLILQLLKDCCQVTAPGVLFIAEAIVSPLEITKYFGEDAINAKECEIAYNATLMALLWDAIATKKAELLYRGIKSLPDKLERATWLNYIRCHDDIGLGFDDTDIRQAGYEPFAHRRFLVDYFTGGYTDSPARGRPFGQNDKTGDARISGTLASLAGLESALYEGNEEAVHTSIQMILLLHSVILSFGGIPLLYYGDELGTLNDYSYEQQESKREDSRWIHRPTIDWDKAELRNQPGSVEYRLFNALKKMIAVRKEIPAFADFNNREMLDLGNPHLLAYARFDFMHASAKVLVICNFDLKPQYVELEQLRQLGFLKSHNLRDASTGESPQRFNDQLAIPAYGFYWLME

SEQ ID NO: 8901 - protein, 495 aa, Zea mays
  unsure (1)..(495): unsure at all Xaa locations
MARKMLIDGEVAAVADGGHYDYDLFVIGAGSGGVRGSRTAASFGAKVAICELPFHPISSEWLGGHGGTCVIRGCVPKKILVYGASFRGEFEDSKNFGWEINGDINFNWKTLLENKTKEIVRLNGVYQRILTSAGVTMIEGAGSLVDAHTVEVSQPDGSKQRYTAKHILIATGSRAQRVNIPGKXLAITSDEALSLEELPKRAVILGGGYIAVEFASIWRGMGAEVDLFYRRDLPLRGFDDEMRAIVASNLEGRGIKLHPGTNLSELSKTADGIKVVTDKGEELIADVVLFATGRTPNSQRLNLQAAGVEIDRVGAIKVDEYSRTSAPSVWAVGDVTNRINLTPVALMEATCFAKTVFGGQQVKPDHRDVPCAVFSIPPLSVVGLSEEQALEEANGDILVFISSFNPMKNSISKRQEKTIMKLVVDAETDKVLGASMCGPDAPEIIQGIAIAVKCGATKADFDSTVGIHPSAAEEFVTMRTVTRRLSPTSKPKTNL

SEQ ID NO: 8902 - protein, 198 aa, Oryza longiglumis
GQTPVFPRIFGHEAGGIVESVGEGVTDLAPGDHVLPVFTGECKECPHCKSAESNMCDLLRINTDRGVMIGDGKSRFSINGKPIYHFVGTSTFSEYTVMHVGCVAKINPKAPLDKVCVLSCGISTGLGATINVAKPPKGSTVAIFGLGAVGLAAAEGARIAGASRIIGVDLNPNRFEEARKFGCTEFVNPKDHDKPVQQ

SEQ ID NO: 8903 - protein, 198 aa, Oryza meyeriana
GQTPMFPRIFGHEAGGIVESVGEGVTDLSPGDHVLPVFTGECKDCPHCKSAESNMCDLLRINTDRGVMIGDGKSRFSINGKPIYHFVGTSTFSEYTVMHVGCVAKINPKAPLDKVCVLSCGISTGLGATINVARPPKGSTVAIFGLGAVGLAAAEGARIAGASRIIGVDLNANRFEEARKFGCTEFVNPKDHDKPVQQ

SEQ ID NO: 8904 - protein, 198 aa, Oryza granulata
GQTPMFPRIFGHEAGGIVESVGEGVTDLSPGDHVLPVFTGECKECPHCKSAESNMCDLLRINTDRGVMIGDGKSRFSINGKPIYHFVGTSTFSEYTVMHVGCVAKINPKAPLDKVCVLSCGISTGLGATINVARPPKGSTVAIFGLGAVGLAAAEGARIAGASRIIGVDLNANRFEEARKFGCTEFVNPKDHDKPVQQ

SEQ ID NO: 8905 - protein, 444 aa, Spinacia oleracea
NSQTCLDPEASRSVLGIILGGGAGTRLYPLTKKRAKPAVPLGANYRLIDIPVSNCLNSNISKIYVLTQFNSASLNRHLSRAYASNLGGYKNEGFVEVLAAQQSPENPDWFQGTADAVRQYLWLFEEHNVMEFLILAGDHLYRMDYERFIQAHRETDADITVAALPMDEKRATAFGLMKIDEEGRIIEFAEKPKGEQLQAMKVDTTILGLDDERAKEMPYIASMGIYVISKDVMLNLLRDKFPGANDFGSEVIPGATSIGLTVQAYLYDGYWEDIGTIEAFYNANLGITKKPVPDFSFYDRSSPIYTQPRYLPPSKMLDADITDSVIGEGCVIKNCKIHHSVIGLRSCISEGAIIEDTLLMGADYYETDADRKLLAAKGSVVLGIGQNSHIKRAIIDKNARIGDNVKIINSDNVQEAARETDGYFIKSGIVTVIKDALIPSGTVI

SEQ ID NO: 8906 - protein, 369 aa, Rubrobacter xylanophilus DSM 9941
MLYGEGQEFRVEEIEVDDPKQNEVLVHLAATGLCHSDYHMVTGEYGPLHFPMIGGHEGAGVVEKVGPGVTRVSPGDHVLLTFIPACGHCRFCSMGLSFLCDRGAAILQGPQLDGTFRMHTADGQDAGQFCCISTFSEYTVVPEASIVPIDRDLDLTKVCIVGCCVPTGFGSAVNKADVQPGETVVVFGIGGVGINAVQGAAVKGASKVVAVDPVDFKLETAEELGATHTINPNERDPVQTVVDLTNGVGADKAIITIDNVLPEHVGQAFKAIRKGGRVVVTGVARYDHQHIDVPPYELTLFAKEVVGTMYGDSPVNADLARYLELYRTGKLKVDELITRTYSHDEINQGYRDMLDGKNIRGVIVYDWAR

SEQ ID NO: 8907 - protein, 474 aa, Streptococcus pneumoniae R6
MTRYQNLVNGKWKSSEQEITIYSPINQEELGTVPAMTQTEADEAMQAARAALPAWRALSAIERAAYLHKTAAILERDKEKIGTILAKEVAKGIKAAIGEVVRTADLIRYAAEEGLRITGQAMEGGGFEAASKNKLAVVRREPVGIVLAIAPFNYPVNLSASKIAPALIAGNVVMLKPPTQGSISGLLLAKAFEEAGIPAGVFNTITGRGSEIGDYIIEHKEVNFINFTGSTPIGERIGRLAGMRPIMLELGGKDAALVLEDADLEHAAKQIVAGAFSYSGQRCTAIKRVIVLESVADKLATLLQEEVSKLTVGDPFDNADITPVIDNASADFIWGLIEDAQEKEAQALTPIKREGNLLWPVLFDQVTKDMKVAWEEPFGPVLPIIRVASVEEAIAFANESEFGLQSSVFTNDFKKAFEIAEKLEVGTVHINNKTQRGPDNFPFLGVKGSGAGVQGIKYSIEAMTNVKSIVFDVK

SEQ ID NO: 8908 - protein, 198 aa, Oryza brachyantha
GQTPVFPRIFGHEAGGIVESVGEGVTDLAPGDHVLPVFTGECKECPHCKSAESNMCDLLRINTDRGVMIGDGKSRFSINGKPIYHFVGTSTFSEYTVMHVGCVAKINPEAPLDKVCVLSCGISTGLGATINVAKPPKGSTVAIFGLGAVGLAAAEGARISGASRIIGVDLNPNRFEEARKFGCTEFVNPKDHDKPVQQ

SEQ ID NO: 8909 - protein, 438 aa, Oryza sativa (japonica cultivar-group)
MAYCIRHSPGRCQCYPSPPTTLQRGESAAAVVPCSICLDAVVAGGGDRSTARLQCGHEFHLDCIGSAFNAKGVMQCPNCRQIERGNWLYANGSRPSQDVSNDDWGHDEDFYDANQPETSRSVFLPFRFQWCPIGRLAQLPSVFDEGESAPPVTFHDFMGQNFTSEHLPVSAPGATPPGPYIAYFQPLQSSASSSSSHVTERTMDGTTYHDHWNPLPGPSDGRPLATVHPIDFHHNHWTHLPNSYSQPNSNNGVAEQMAIPVVPMRVGGLDSDSQQRGSLPSVYGNGSGSRSRIPSVPPMAPQFMRPHGNINEQYQQNSSSLYAAPQRRTAVQAVQDSMNFTLFPQAPTGPNSMETEDAGGNQFYAWERDRFAPYPLMPVDSEANWWGSTPQSHGVTDHSAAPGRRLFGQWIGAGRSPPPPPPPPADNSSYRQMHIPRM

SEQ ID NO: 8910 - protein, 380 aa, Streptococcus pneumoniae R6
MKNEMLALILAGGQGTRLGKLTQSIAKPAVQFGGRYRIIDFALSNCANSGIHNVGVVTQYQPLALNNHIGNGSSWGLDGINSGVSILQPYSASEGNRWFEGTSHAIYQNIDYIDNVNPEYVLILSGDHIYKMDYDDMLQSHKDNNASLTVAVLDVPLKEASRFGIMNTDANNRIVEFEEKPAQPKSTKASMGIYIFDWQRLRNMLVAAEKSKVGMSDFGKNVIPNYLESGESVYAYEFSGYWKDVGTIESLWEANMEYISPENALDSRNRQWKIYSRNLISPPNFLGANAHVEDSLVVDGCFVDGTVKHSILSRGAQVREGAEVLDSVIMSGAIIGQGAKIKRAIIGEGAIISDGVEIDGTDEVQVVGYNEVVGVATDED

SEQ ID NO: 8911 - protein, 198 aa, Rhynchoryza subulata
GQTPMFPRIFGHEAGGIVESVGEGVTDLAPGDHVLPVFTGECKECPHCKSAESNMCDLLRINTDRGVMIGDGKSRFSINGKPIYHFVGTSTFSEYTVMHIGCVAKINPEAPLDKVCVLSCGISTGLGATINVAKPPKGSTVAIFGLGAVGLAAAEGARIAGASRIIGVDLNPNRFEEARKFGCTEFVNPKDHDKPVQQ

SEQ ID NO: 8912 - protein, 379 aa, Streptococcus pneumoniae R6
MKIDKYSAILGNTVGFHNMSTLTDHRPVASLPFGGKYRLIDFPLSSLANAGVRSVFGIFQQDNISSVFDHIRSGREWGLSTLLSHYYLGIYNTRVESSTVGKEYYQQLLTYLKRSGSNQTVALNCDVLINIDLNQVFHLHSTTKEPITVVYKKLAKKDISEVNAILDVDETDHVLSHKLFDSKSTAETFNMSTDIFVVDTPWLIEHLEEEAKKEHPEKLRYVLRDLAVKEGAFAYEYTGYLANIHSVKSYYQANIDMLESQKFYSLFSPNQKIYTKVKNEEPTYYANTSKVSTSQFASGSIIEGQVANSVLSRNIHVHKDSLVKDSLLFPRVVIGEGAQVEYAILDKGVEVEPGVVIRGTAEHPVVVKKGAKVTEDIHS

SEQ ID NO: 8913 - protein, 317 aa, Clarkia lewisii
LVEKFGIDPNNAFAFWDWVGGRYSVCSAVGVLPLSLQYGFSVVEKFLQGAHSIDQHFSSAPFEKNIPVLLGLLSVWNVSFLGYPARAILPYSQALEKLAPHIQQVSMESNGKGVSIDGLPLPFESGEIDFGEPGTNGQHSFYQLIHQGRVIPCDFIGVVKSQQPVYLKGEVVNNHDELMSNFFAQPDALAYGKTPAQLKKENVSEHLIPHKTFTGNRPSLSILLPTLDAYRIGQLLAIYEHRVAVQGFVWGINSFDQWGVELGKSLATQVRKQLHASRVKGEPVEEGFNFSTKTLLTRYLQATTDVPADPSTLLPNI

SEQ ID NO: 8914 - protein, 537 aa, Oryza sativa
  unsure (1)..(537): unsure at all Xaa locations
MGLRATEAATGNGGGMRSLPDFLGRKSKYVRMDDVLPDEQGDGGGGGGVVRVRGGGGSGRYVFACSVFASLNHVLLGYDVGVMSGCIIFIQKDLHISEVQQEVLVGCLSFISLLGSLAAGRTSDAVGRKWTIGLAAAVFQAGAAVMTLAPSFAVLMMGRLLAGIGIGIGIMVAPVYISEITPATLRGSYASFPEIFISLGILLGYVSNLAFSGLPDHINWRVMLAAGIVPSISVAFVLLVIPESPRWLVMQGRAAEARAVLLKVTDGEDEAQERLAEIEEAARVTATGNGKAVWRELLRPSPVIRRMLVTGIGVQLFQQITGIDALVYYSPTIFRDAGITTESQLLAATVGVGLSKTVFIVIAIVLVDRVGRKPLLYVSTAGITACLAALAASLSLLAHGALPRAAAIGAAXILTVCGFVAFFSVGIGPINMVLSSEIYPLRLRAQAVALGFAVNRLTSGAVAMSFLSICGXVSVPGAXFAAFAAFSALSVVFVHVFVPEMSGKSLEQIESLFGAGAGPGEVKLGNAEHLVQGKEMS

SEQ ID NO: 8915 - protein, 360 aa, Triticum aestivum
MGSVDASETTVTGWAARDATGHLSPYTYTLRKTGPEDVVLKVKYCGICHTDIHQVKNDLGASKYPMVPGHEVVGEVVEVGPEVSKFRAGDVVGVGVIVGCCRDCRPCKANVEQYCNKKIWSYNDVYTDGKPTQGGFASAMVVDQKFVVKIPAGLAPEQAAPLLCAGVTVYSPLKHFGLMTPGLRGGILGLGGVGHMGVKVAKSMGHHVTVISSSNKKRAEAMDDLGADAYLVSSDADQMAAAADSLDYIIDTVPAKHPLEPYLALLKMDGKLVLMGVIAEPLSFVSPMVMLGRKTITGSFIGSMDETEEVLQFCVDKGLTSQIEVVKMDYVNQAFERLERNDVRYRFVVDVGGSNIEDAA

SEQ ID NO: 8916 - protein, 524 aa, Emericella nidulans
MPPNFAGLSGRKLSLTVSTVATMGFLLFGYDQGVMSGIISDVAFNDVFTATKDDATMQALVTAVYELGCLAGAVYALMFGDRMGRRWMILSGAAVMILGVIIQVTSFPGHIPLLQFFIGRVITGIGNGMNTSTIPTYQAECSKTSNRGLLICIEGGIIAIGTAIAYWIDFGSHYGPPDLVWRFPIAFQIIFGIIIIVGMWFLPDSPRHLIAKGRIEEGEYVLAALNGCEVHDHETQIQKQLTLDSLRASGALGKKTSFRDLLTGGPSQHLRRMLVGSSSQVFQQLGGCNAVIYYLPVLLKSNLHQDNDQALLIGGINMIVYAVFATFSWFFIERIGRRKLFLGGSMVQTTAMIITFACLIPGDEQSSKGAVFGLFLYMAAFGATWLPLPWLYPAELSPVRTRAKANAVSTCNNWLFNFAVVMFTPPMVAAIGWGTYLFFAAWNAFFIPVIWFFYPETANRSLEEIDLIFAKGYHEKISYVRASHELPKLSDDEIEAEAAKYQYSPETEAEVEKGHVAHPGSTSE

SEQ ID NO: 8917 - protein, 365 aa, Clostridium acetobutylicum
MAKKPVMLMILDGFGISDKVDGNAVKAASKPNFDKYFNNYPHTHLGASGLSVGLPDGQMGNSEVGHLNIGAGRIVYQSLTKITKAIEDGDFFKNAALNKAVNNVLENDSTLHLMGLLSPGGVHSHTNHLKGLLQLAKKKNVKKVFVHAFLDGRDVPPSSAKEFIKDIEDYMNEIGLGEIATVSGRYYAMDRDNRWEREELAYNAMVLGKGEEAESAIKAVDASYHDNKTDEFVLPTVIVKEGKPVATIKDKDSVIFFNFRPDRARQITRAIAEEAFDGFKRDRLNIEFVTMTEYDASFKGVDVAFGPENITNTLGEYVSNKGLNQLRIAETEKYAHVTFFFNGGVEEPNKNEDRALISSPKVATY

SEQ ID NO: 8918 - protein, 428 aa, Pseudomonas aeruginosa PAO1
MGTHVIKMPDIGEGIAEVELVEWHVQVGDSVNEDQVLAEVMTDKATVEIPSPVAGRILALGGQPGQVMAVGGELIRLEVEGAGNLAESPAAATPAAPVAATPEKPKEAPVAAPKAAAEAPRALRDSEAPRQRRQPGERPLASPAVRQRARDLGIELQFVQGSGPAGRVLHEDLDAYLTQDGSVARSGGAAQGYAERHDEQAVPVIGLRRKIAQKMQDAKRRIPHFSYVEEIDVTDLEALRAHLNQKWGGQRGKLTLLPFLVRAMVVALRDFPQLNARYDDEAEVVTRYGAVHVGIATQSDNGLMVPVLRHAESRDLWGNASEVARLAEAARSGKAQRQELSGSTITLSSLGVLGGIVSTPVINHPEVAIVGVNRIVERPMVVGGNIVVRKMMNLSSSFDHRVVDGMDAAAFIQAVRGLLEHPATLFLE

SEQ ID NO: 8919 - protein, 404 aa, Mesoplasma florum L1
MNYNLKKTLKDINVKGKKVLVRVDFNVPLKDGVITDDNRIQAALPTIKYLVENGAKVILFSHLSRIKSEDDKKTKSLAPVAKRLEEVLAQSVNFVNQTRGTELETAINALNEKEVLLFENTRFEDVKDGEVVKAESKNDPELGKYWASLGDVFINDAFGTAHRAHASNVGIASNISESALGFLVQNEIEMLGKGIDAPERPFVAILGGAKVSDKIGVIDNLLTKVDKILIGGGMTYTFHKAMGLEIGNSLLEADKVELAKEYLEKANGKIMLPVDSLCAPEYADVAPTLCGENVPAGMMGLDIGPKTIEMYEKELANAKTVVWNGPMGVSEFENFKAGTVAVCEAAAKRKADGGFTLIGGGDSAAAAIKLGFKDEFSWISTGGGASLEYMEGKELPGIAAIQNK

SEQ ID NO: 8920 - protein, 131 aa, Haemophilus haemolyticus
DFCQRIISGEWKGYTGKAITDVVNIGIGGSDLGPYMVTEALRPYKNHLNMHFVSNVDGTHIAETLKKVNPETTLFLVASKTFTTQETMTNAQSARDWLLKAAKDESAVAKHFAALSTNAKDVEKFGIDTNN

SEQ ID NO: 8921 - protein, 464 aa, Pseudomonas aeruginosa PAO1
MSQILKTSLLIVGGGPGGYVAAIRAGQLGIPTVLVEGAALGGTCLNVGCIPSKALIHAAEEYLKARHYASRSALGIQVQAPSIDIARTVEWKDAIVDRLTSGVAALLKKHGVDVVQGWARILDGKSVAVELAGGGSQRIECEHLLLAAGSQSVELPILPLGGKVISSTEALAPGSLPKRLVVVGGGYIGLELGTAYRKLGVEVAVVEAQPRILPGYDEELTKPVAQALRRLGVELYLGHSLLGPSENGVRVRDGAGEEREIAADQVLVAVGRKPRSEGWNLESLGLDMNGRAVKVDDQCRTSMRNVWAIGDLAGEPMLAHRAMAQGEMVAELIAGKRRQFAPVAIPAVCFTDPEVVVAGLSPEQAKDAGLDCLVASFPFAANGRAMTLEANEGFVRVVARRDNHLVVGWQAVGKAVSELSTAFAQSLEMGARLEDIAGTIHAHPTLGEAVQEAALRALGHALHI

SEQ ID NO: 8922 - protein, 510 aa, Magnetococcus sp. MC-1
MTLVILDGWGLRDTQENNAIANASTPHMDDWLANRPHAQVRTSGRDVGLPDGQMGNSEVGHLNLGAGRVVYQEFTRVSCAIEDGSFMHNQVLLDAIRAANEAGGAVHLYGLLSPGGVHSHQDQILAAVQCAKQNGASEIYIHALLDGRDTPPQSAMEYMTRFEEGLQKLGAGRVATVCGRYFTMDRDKRWERVERGYRLMALGEGTPFDSACEAIQAAYDAQQTDEFVEPAVMVEQGQPIGMINDGDTLICMNFRADRVREISHVFTDTTFEPFVRDGLPKLSAYVCLTQYDVSLQNVQIAYPPVALTNILGQVMAQHGLTQLRAAETEKYAHVTYFFNGGQEQPGEGEDRLLVASPKVATYDMQPAMSAAELTDRVIEKIQSTPYDLVVVNYANPDMVGHTGVYEAAVQAIETVDTQLGRLTDAIVQMGGEVLITADHGNADQMVDEQGTAHTAHTLNPAPLIYLGRDAQLHDGRLSDVAPTLLALMGLPQPLEMDGVSLVQFTQPAVA

SEQ ID NO: 8923 - protein, 368 aa, Xanthomonas axonopodis pv. citri str. 306
MKTRAAVAWGPHQPLTIEEVDLQPPRPGEVLVRLVATGICQGDAHALAHGHAGSFPAILGQEGAGVVEDVGIGVTSVRPGDHVIPLYMPECGVCKFCRSGRTNLCQAIRSSQERGLMPDGSSRFSLHGRPILHHMGTSTFSEYTVLPEIAVARIHPEAPLEQACLLGCTVTTGVGAVLNSTHVRPGDCVAVFGLGGIGLSVIQGALLAQAGRIIAVDIDPAKFALARTLGATDCLDPRDYGAPIQQVIVDLTDGGADHSFECVGDVGAMRAALECCHKGWGESVILGMADDTQEISTRPFQLVTGRVWRGSAFGGVKGRSELPGYVERYLHGDIQLAPLITRTLALDDINQALTDLRAARGIKSIVAY

SEQ ID NO: 8924 - protein, 131 aa, Haemophilus haemolyticus
DFCQRIISGEWKGYTGKAITDVVNIGIGGSDLGPYMVTEALRPYKNHLNMHFVSNVDGTHIAETLKKINPETTLFLVASKTFTTQETMTNAQSARDWLLKAAKDESAVAKHFAALSTNAKDVEKFGIDTNN

SEQ ID NO: 8925 - protein, 131 aa, Haemophilus parainfluenzae
AFCYRVISGEWKGYTGKAITDVVNIGIGGSDLGPYMVTEALRPYKNHLNMHFVSNVDGTHIAETLKKVNPETTLFLVASKTFTTQETMTNANSARDWLLAAAKDNSAVAKHFAALSTNGKAVAEFGIDTNN

SEQ ID NO: 8926 - protein, 323 aa, Desulfovibrio desulfuricans G20
NLILAAGSEPASFPGLIPDGNCVLHSSHILQLETPPQSLIIVGGGAIGLEMGDLFARFGTQITIVEALPHLVPAEDGDIADALTKALKREGWTVHTGRRVRSLVTDEEGALLTFEDGTAIRADKALMAAGRSPATAALHPEKAGIMTDGRGWISTDNFLQAAENIYAVGDVNGRTLLAHAAEHQARYVVSRLRGLTAAEYPAPVMPSCVYGHMEVMRTGATAKELTAQGISVSVSRAPLASNAIAQSCGATQGFVKAVWAAGNGTPELRGIAATGHGVSHLVGLATVMVQQRWRRENIHDIIYAHPTLDEALEAALSAPLENA

SEQ ID NO: 8927 - protein, 131 aa, Haemophilus parainfluenzae
AFCDRVISGEWKGYTGKAITDVVNIGIGGSDLGPYMVTEALRPYKNHLNMHFVSNVDGTHIAETLKKVNPETTLFLVASKTFTTQETMTNANSARDWLLAAAKDSSAVAKHFAALSTNGKAVAEFGIDTNN

SEQ ID NO: 8928 - protein, 498 aa, Gloeobacter violaceus PCC 7421
MSTPIHCLNYIDGQWQPAQSGETLEDLNPADRREVVATFPRSGAADVEAAVTAARKAYRGWRLVSAPARAEIVFRIGEILRGRKEALAQLMSREMGKTIVEARGDVQEAIDCAFYYAGEGRRLFGQTTPSEMDNKFAMSVRSPVGVCSLITPWNFPVAIPCWKALPALVCGNTVILKPAEDTPACATALIDVFREAGLPAGVANLVHGTGEETGRALVAHPGVDLVSFTGSSVVGAEVASVCGRTHKRVCLEMGGKNAQIVMEDADLELALKGALWGAFGTTGQRCTATSRLILHRDIKQVFTEKLIEQARQLRLGPGIDPNTEVGPLINESQLSRVHEYIEIARQEGLKILLGGEPVRSEELVHGHFFEPTILDEVPPASRLAREEVFGPVVVLMTVDSFEQAVELLNDTPYGLSSSVYTRDVNRAFRAIRDIEAGITYINGPTTGAEVHLPFGGVKQTGNGHREAGAAVLDVFSEWKTVYVDFSGQLQRAQIDNRS

SEQ ID NO: 8929 - protein, 439 aa, Gloeobacter violaceus PCC 7421
MLSLPTKEASLPRVPRLVGPLPGPRAQALIARDEAVTSPSYTRGYPLVAARGEGCMLEDVDGNVFLDLTAGIAVTATGHAHPVVVRAIQEQAANLLHMSGTDFYYEPMAELAEALCERAPFPTAAGRPRARVFFSNSGAESNEGALKLARYYTGRQQVVAFLGAFHGRTYGAMSLTGSRAVQRQGFGPLVPGISHIPYGTHASLDYLEDKLFPAVLPPEEIAAIVVESIQGEGGYIVPEDGFHERIRQICTRHGILMVVDEVQAGMGRTGKLFAIEHWGVQPDIVTLAKGIASGLPLGAILSRPEIMTWPAGSHATTFGGNPVACAAANATLKLLEAGLIENAERMGRVLQAGLGQLADRFSFVSASRGKGLMVAVDLFDAAGNLDRERRDQIVDLAFYRGLLLLGCGKAAIRFCPPLVIDADQVRVALDILRQIFEEQ

SEQ ID NO: 8930 - protein, 131 aa, Haemophilus parainfluenzae
AFCERVISGEWKGYTGKAITDVVNIGIGGSDLGPYMVTEALRPYKNHLNMHFVSNVDGTHIAETLKKVNPENTLFLVASKTFTTQETMTNANSARDWLLAAAKDNSAVAKHFAALSTNGKAVAEFGIDTNN

SEQ ID NO: 8931 - protein, 356 aa, Zea mays
MQSAAAFRPCPTRLLPASPDRDGKCRQRQVSCSAAGDAVAAPKAEEGGGLMKTLWLGSLFGLWYLFNIYFNIYNKQVLKVFPYPINITEVQFAVGTVAALFMWITGIIKRPKISGAQLVAILPLAIVHTMGNLFTNMSLGKVAVSFTHTIKAMEPFFSVILSAIFLGELPTIWVVSSLLPIVGGVALASLTEASFNWAGFWSAMASNVTFQSRNVLSKKLMVKKEESLDNLNLFSIITVMSFFLLAPVTFFTEGVKITPTFLQSAGLNVNQVLTRCLFAGLCFHAYQQVSYMILAMVSPVTHSVGNCVKRVVVIVTSVLFFRTPVSPINSLGTAIALAGVFLYSQLKRLKPKPKTA

SEQ ID NO: 8932 - protein, 184 aa, Xanthomonas axonopodis pv. citri str. 306
MSTLTISQALAQADLLVDRPAIDAAVATIADAIARDYAGEVPVYLTIMHGALPFSGQLALELGARGQDLQFDYLHATRYRGETTGGELVWKHRPATALFGRRVILVDDILDEGYTLQGVRQWCLEQGATDVRVAVLTVKRHDRCVPGVTADYVGVEVPDRYVFGFGMDVNEQLRGIPAIYAMKQ

SEQ ID NO: 8933 - protein, 468 aa, Agrobacterium tumefaciens str. C58
MAYDVVVIGTGPGGYVCAVKAAQLGLKVAVIEKRATYGGTCLNVGCIPSKALLHASETFAHVAHGVDTLGIEVAAPKLNLEKMMGHKDGVVKANVDGVAFLFKKNKIDAFQGTGKVVSAGKVSVTNDKGETQEIEAKNIVIATGSDVAGIPGVKVDIDETVIVSSTGAIALSKVPEKLIVVGGGVIGLELGSVWSRLGAKVTVVEYLDNILGGMDGEVSKQSQRLLAKQGLDFKLGAKVTAVEKTAAGAKVVFEPVKGGAAETLEADVVLISTGRKPYTEGLGLAEAGVVLDSRGRVEIDGHYKTNVDGIYAIGDVVKGPMLAHKAEDEGVALAEILAGQRGHVNYDVIPAVVYTQPEIASVGNTEEELKAAGVAYKVGKFPFTANGRARAMQVTDGFVKILADKETDRVLGGHIVGFGAGEMIHEITVLMEFGGSSEDLGRTCHAHPTMSEAVKEAALATFFKPIHM

SEQ ID NO: 8934 - protein, 198 aa, Leersia perrieri
GQTPVFPRIFGHEAGGIVESVGEGVTDLAPGDHVLPVFTGECKECPHCKSPDSNMCDLLRINTDRGVMIGDGKSRFSINGKPIYHFVGTSTFSEYTVMHVGCVAKINPEAPLDKVCVLSCGISTGLGATINVAKPPKGSTVAIFGLGAVGLAAAEGARIAGASRIIGIDLNPNRFEEARKFGCTEFINPKDHDKPIQQ

SEQ ID NO: 8935 - protein, 198 aa, Zizaniopsis villanensis
GQTPVFPRIFGHEAGGIVESVGEGVTDLAPGDHVLPVFTGECKECPHCKSPDSNMCDLLRINTDRGVMIGDGKSRFSINGKPIYHFVGTSTFSEYTVMHVGCVAKINPEAPLDKVCVLSCGISTGLGATINVAKPPKGSTVAIFGLGAVGLAAAEGVRIAGASRIIGIDLNPNRFEEARKFGCTEFINPKDHDKPIQQ

SEQ ID NO: 8936 - protein, 72 aa, Solanum tuberosum
MGKQPVKLKAVVYAISPFQQKIMPGLWKDLPGKIHHKVSENWISATLLLGPLVGTYSYVQHFLEKEKLEHRY

SEQ ID NO: 8937 - protein, 434 aa, Streptococcus pneumoniae R6
MSIITDVYAREVLDSRGNPTLEVEVYTESGAFGRGMVPSGASTGEHEAVELRDGDKSRYGGLGTQKAVDNVNNIIAEAIIGYDVRDQQAIDRAMIALDGTPNKGKLGANAILGVSIAVARAAADYLEIPLYSYLGGFNTKVLPTPMMNIINGGSHSDAPIAFQEFMILPVGAPTFKEALRYGAEIFHALKKILKSRGLETAVGDEGGFAPRFEGTEDGVETILAAIEAAGYVPGKDVFLGFDCASSEFYDKERKVYDYTKFEGEGAAVRTSAEQIDYLEELVNKYPIITIEDGMDENDWDGWKALTERLGKKVQLVGDDFFVTNTDYLARGIQEGAANSILIKVNQIGTLTETFEAIEMAKEAGYTAVVSHRSGETEDSTIADIAVATNAGQIKTGSLSRTDRIAKYNQLLRIEDQLGEVAEYRGLKSFYNLKK

SEQ ID NO: 8938 - protein, 306 aa, Streptococcus pneumoniae R6
MTKTAFLFAGQGAQYLGMGRDFYDQYPIVKETIDRASQVLGYDLRYLIDTEEDKLNQTRYTQPAILATSVAIYRLLQEKGYQPDMVAGLSLGEYSALVASGALDFEDAVALVAKRGAYMEEAAPADSGKMVAVLNTPVEVIEEACQKASELGVVTPANYNTPAQIVIAGEVVAVDRAVELLQEAGAKRLIPLKVSGPFHTSLLEPASQKLAETLAQVSFSDFTCPLVGNTEAAVMQKEDIAQLLTRQVKEPVRFYESIGVMQEAGISNFIEIGPGKVLSGFVKKIDQTAHLAHVEDQASLVALLEK

SEQ ID NO: 8939 - protein, 146 aa, Glycine max
  unsure (1)..(146): unsure at all Xaa locations
APPPKSFVSEYPIVSIEDPFDQDDWVHYAKMTVEIGEQVQIVGDDLLVTNPTRVAKAIKEKSCNALLLKVNQIGSVTESIEAVKMSKRAGWGVMTSHRSGETEDTFIADLAVGLSTGQIKTGATCRSERLXKYNQLLRIEEELGAI

SEQ ID NO: 8940 - protein, 230 aa, Corynebacterium efficiens
MAKASLDKDPFDVASMFDDVGDKYDLTNTVLSFGQDRVWRRRTRERLDLKPGEKVLDLAAGTAVSTVELAKSGAWCVACDFSQGMLAAGKHRNVPMVVGDGMTLPFADNSFDAVTISYGLRNIHDFRAGLREMARVTKPGGRLTVAEFSTPVIPVFGTLYKEYLMRLLPKVARVVSSNPEAYIYLAESIRAWPDQEDLAREINANGWSDCGWQNLTFGIVAMHSAIKPGN

SEQ ID NO: 8941 - protein, 375 aa, Archaeoglobus fulgidus DSM 4304
MDWIEREKKHILQTYTRQKVVIERGEGCYVYDVNGKRYLDLVAGIATVSIGHCNSHLVERLKEQLEKLIHISNLYYTTPQVELAEKLSEIAGMDRFFFCNSGAEAVEAALKFARRATGRKKFVSFTGDFHGRTMGALSVTHKEKFRKPFEPLVSPVEFAEFNNPESLEKVVDEETAAVIVELVQGEAGVYPADREFVKAIEELREKYGFLLIVDEVQTGFGRTGRWFAKDHYGIEPDMITMAKAMGSGVPIGCCALKEEVAEKIQVGDHGSTFGGNPLACTAALATIEVIEREGLVENSARMGEYFVKRLKESFENVIGVGLMIGFDVGDAAEFVRKCLENGLLVNNTSERRIRLVPPLVITEREVDKAVEIMLN

SEQ ID NO: 8942 - protein, 396 aa, Salmonella typhimurium LT2
MFENITAAPADPILGLADLFRADDRPGKINLGIGVYKDETGKTPVLTSVKKAEQYLLENETTKNYLGIDGIPEFARCTQELLFGKGSALINDKRARTAQTPGGTGALRIAADFLAKNTPVKRVWVSNPSWPNHKSVFNAAGLEVREYAYYDAENHTLDFEALQASLSEAQAGDVVLFHGCCHNPTGIDPTLEQWQVLAELSVEKGWLPLFDFAYQGFARGLEEDAEGLRAFAALHKELIVASSYSKNFGLYNERVGACTLVAADAETVDRAFSQMKSAIRANYSNPPAHGASIVATILSNDALRAIWEQELTDMRQRIQRMRQLFVNTLQEKGANRDFSFIIKQNGMFSFSGLTKDQVLRLREEFGVYAVASGRVNVAGMTPDNMAPLCEAIVAVL

SEQ ID NO: 8943 - protein, 300 aa, Chlamydomonas reinhardtii
MSLEVQSKYDRGYQDEGQGLVELGTAHDAVPKTTAQPKYGDDDDLLPVVLERYLEKAGVMQKLRPYLDPSGQVKNEFARCLMAEFFGTLLFQMFGGSAPAKDTTAPAANGFALVAVIYAFANISGAHINPAVTFALICTGHMKWWKGLLYMIAQILGAIFGALIYAALIPALHLGAGAGSPGCFSPTAGVKNGDVFGWEVMMTFLLVMTVYAAAVAKPGHGNTAPLAIGLSLYAAAISGGPYTGASLNPARTIGPAVVFTCNVGVSFLYIFAEFFGAACAAGLSIFLYGRAPDSVRRPAI

SEQ ID NO: 8944 - protein, 136 aa, Haemophilus influenzae
EDPTPALEGADVVLISAGVARKPGMDRSDLFNINAGIVRGLIEKVAITCPKACVGIITNPVNTTVAIAAEVLKKAGVYDKRKLFGVTTLDVLRSETFVAELKGLNVSRTSVPVIGGHSGVTILPLLSQVQYAKWNE

SEQ ID NO: 8945 - protein, 258 aa, Triticum aestivum
MPDVWYFLLDWIWKVIEHFNFAPLTAVLSVNYLDRFFSVYPLPEGKAWVTQLLAVACLSLASKMEETYVPLPVDLQVVEATSAFEGRTIKRMELLVLSTLKWRMQAVTACSFIDYFLRKFNDHDAPSMLAFSRSTDLILSTAKGADFLVFRPSEIAASVALAAFGERNTSVVERATTTCKYINKERVLRCYELIQDKIAMGTIVLKSAGSSMFSVPQSPIGVLDAAACLSQQSDDTAVGSPATCYQASSASKRRRIGR

SEQ ID NO: 8946 - protein, 467 aa, Neisseria meningitidis MC58
MKKIQADVVVIGGGTAGMGAFRNARLHSDNVYLIENNVFGTTCARVGCMPSKLLIAAAEARHHALHTDPFGVHLDKDSIVVNGEEVMQRVKSERDRFVGFVVADVEEWPADKRIMGSAKFIDEHTVQIDEHTQITAKSFVIATGSRPVILPQWQSLGNRLIINDDVFSWDTLPKRVAVFGPGVIGLELGQALHRLGVKVEIFGLGGIIGGISDPVVSDEANAVFGEELKLHLDAKTEVKLDADGNVEVHWEQDGEKGVFVAEYMLAAVGRRPNVDNIGLENINIEKDARGVPVADPLTMQTSIPHIFIAGDASNQLPLLHEAADQGKIAGDNAGRYPNIGGGLRRSTIGVVFTSPQIGFVGLKYAQVAAQYQADEFVIGEVSFKNQGRSRVMLVNKGHMRLYAEKATGRFIGAEIVGPAAEHLAHLLAWAHQMKMTVPQMLDMPFYHPVIEEGLRTALRDADAKLKA

SEQ ID NO: 8947 - protein, 131 aa, Haemophilus parainfluenzae
AFCDRVISGEWKGYTGKAITDVVNIGIGGSDLGPYMVTEALRPYKNHLNMHFVSNVDGTHIAETLKKVNPETTLFLVASKTFTTQETMTNANSARDWLLAAAKDNSAVAKHFAALSTNGKAVAEFGIDTNN

SEQ ID NO: 8948 - protein, 482 aa, Comamonas sp. NCIMB 9872
MNSSLHYNYVGGDWVNGATERHNLNPSDLSDSIGIYVGANEAQTQAAIDAAFDARTAWACWTAEQRADALDRIGTSILASAKELGHLLSREEGKTLAEGIGEAARAGRIFKYFAAEALRCGGDLLPAIRPGVSVEVTREPEGVVGIITPWNFPLAIPAWKIAPALAYGNTVVFKPADLVPGSAWALTEIIHRVGGLPPGVFNLVMGPGSKVGNTLANAPKVRALSFTGSATTGRQVGLACMERGAKVQMEMGGKNPLVVLNDADLQSAASVAIQGSFYSTGQRCTGSSRLIVEAGIHDAFVEAMRQQMSALSIGHALKQGTDIGPVASEDQLQQDLEYIRIGVAEGGRLYCGGSQLERETEGFYLSPALLTETDNSMRINREEIFGPVASVIRVGSYEEALHTANDTVFGLSSGICTTSLKYASDFKRRSAAGMVMVNVPTAGVDYHAPFGGRKGSSYGAREQGAYAREFYTVIKTAYTSAG

SEQ ID NO: 8949 - protein, 908 aa, Zea mays
  unsure (1)..(908): unsure at all Xaa locations
IRHEGYDRVMAYKFHEDEHGEVFAEITKPGIEPYIGLHYPATDIPQAARFLFMKNKVRMICDCRARSVKIIEDEALSIDISLCGSTLRAPHSCHLKYMENMNSIASLVMAVVVNENEEDDEPEPEQPPQQQKKKRLWGLIVCHHESPRYVPFPLRYACEFLAQVFAVHVNKEFELEKQIREKSILRMQTMLSDMLFKESSPLSIVSGSPNIMDLVKCDGAALLYGDKVWRLQTAPTESQIRDIAFWLSEVHGDSTGLSTDRLQDAGSLVPPPPXHPGAASLGDMICGMAVAKITSKDILFWFRSHTAAEIKWGGAKHDPSDKDDNRRMHPRLSFKAFLEVVKTKSLPWSDYEMDAIHSLQLILRGTLNDASKPAQASGLDNQIGDLKLDGLAELQAVTSEMVRLMETATVPILAVDGNGLVNGWNQKVAELSGLRVDEAIGRHILTLVEDSSVPIVQRMLYLALQGREEKEVRFELKTHGSKRDDGPVILVVNACASRDMHDHVVGVCFVAQDMTVHKLVMDKFTRVEGDYRAIIHNPNPLIPPIFGADQFGWCSEWNAAMTKLTGWHRDEVIDRMLLGEVFDSSNASCLLKSKDAFVRLCIIINSALAGEEAEKAPIGFFDRDGKYIECLLSVNRKVNADGVVTGVFCFIHVPSDDLQHALHVQQASEQTALRRLKAFSYMRHAIDKPLSGMLYSRETLKGTGLDEEQMRQVRVADNCHRQLNKILADLDQDNITDKSSCLDLDMAEFVLQDVVVSAVSQVLIGCQGKGIRVACNLPERSMKQKVYGDGIRLQQILSDFLFVSVKFSPAGGSVDISSKLTKNSIGENLHLIDFELRIKHQGAGVPAEILSQMYGEDNREQSEEGLSLLVSRNLLRLMNGDIRHLREAGMSTFILTAELAAAPSAAGH

SEQ ID NO: 8950 - protein, 410 aa, Agrobacterium tumefaciens str. C58
MATEIRVPTLGESVSEATVGTWFKKVGDTVKADEPLVELETDKVTVEVPAPASGVLTEIVAQNGETVGLDALLGQIAEGAAGAATSAPAAKPAAPAAAPAPAAAVAAAPGGSAMPPAPAAGKLLAENNLSADQVDGSGKRGQVLKGDVLAAVAKGVSAPAAAPAPVAAPRPVSAEQDQVREERVKMTRLRQTIARRLKDAQNTAAMLTTYNEVDMSAVMDLRNRYKDVFEKKHGVKLGFMGFFTKAVTHALKELPAVNAEIDGTDIIYKNYCHVGMAVGTDKGLVVPVIRDADQLSIAGVEKELGRLAKAARDGSLGMADMQGGTFTITNGGVYGSLMSSPILNAPQSGILGMHKIQERPVAIGGQVVIRPMMYLALSYDHRIVDGKEAVTFLVRVKESLEDPERLVLDL

SEQ ID NO: 8951 - protein, 205 aa, Glycine max
MEESSTTCVLCEKRAMMLCDSDQAKLCWECDEKVHSANFLVAKHSRVLLCRLCHSPTPWKASGMKLTPTVSFCNRCVAERNARWNRLVNNENEHQQQQQQQQQSDFVVDDGREYGSDHVFDDDDGDYSDDSGEEEEEDEDDEEENENQVVPMSSGSATSPPKVACLALKRLRNNSFLSILHMMRQRALHLRCLVLHCLVVMNHPL

SEQ ID NO: 8952 - protein, 393 aa, Neisseria meningitidis MC58
MIIDVKVPMLSESVSEGTLLEWKKKVGEAVARDEILIDIETDKVVLEVPSPQAGVLVEIVAQDGETVVADQVLARVDTAATAAAEAPAAAPAEAAPAAAPAATQNNAAMPAAAKLAAETGVDVNALQGSGRDGRVLKEDVQNAAAKPAGAAAPAVALPAGARPEERVPMSRLRARVAERLLASQQENAILTTFNEVNMKPIMDLRAKYKEKFEKEHGVKLGFMSFFVKAAVAALKKYPVVNASVDGKDIVYHGYFDIGIAIGSPRGLVVPILRDADQMSIADIEQAIVDYAKKAKDGKIAIEDLTGGTFSITNGGTFGSMMSTPIINPPQSAILGMHATKERAVVENGQVVVRPMMYLALSYDHRIIDGREAVLTLVAIKDALEDPARLLLDL

SEQ ID NO: 8953 - protein, 363 aa, Buchnera aphidicola (Pemphigus spyrothecae)
MTKIYNLAILPGDGIGPELLQKDLNFKVLKEQYKLKINTTEYDIGGIAIDKYGKALPKETLDGCKESDSILFGSVGGPKWQHLPPDQQPERAALLPIRKYFNLFSNLRPAKLYSTLNHLSPLRRDISEKGFDILCVRELTGGIYFGKPKGYIKNIIDKKAFDTEIYYASEIKRIAHIGFKLAQNRKYKITSVDKANVLESSVLWRETVNTISKEYPDVKLSHLYIDHAAMQIIKNPDKFDVILTSNLFGDILSDECAMITGSIGMLPSASLNDSNFGLYEPAGGSAPDIAGKNIANPIAQILSIAMLVRYTMKLPMISDHIESAVIDTLKKGYRTLDIANDKEKYVSTNDIGDIISDILKKRI

SEQ ID NO: 8954 - protein, 131 aa, Haemophilus pittmanii
AFCERVISGEWKGYTGKAIRDVINIGIGGSDLGPYMVTEALRPYKNHLNMHFVSNVDGTHIAETLKKVDPETTLVLVASKTFTTQETMTNALTARDWLLAAAKDQAAVAKHFAALSTNAKAVAEFGIDTDN

SEQ ID NO: 8955 - protein, 358 aa, Anabaena variabilis ATCC 29413
MKALILSGGRGTRLRPLTYTGAKQLVPVANKPILWYGIEEMVAAGITDIGIIISPETGAEVQSKTGDGKLFGANITYILQEQPAGLAHAVTVARPFLKDSPFVMYLGDNLIQQGDLSNFLQQFIQEQPDALILLREVINPSAFGVAKVDDTGRVLQLIEKPKVPPSNLALVGVYFFSPIIHDSIARIQPSNRGELEITDAIQRLIDDKRQVLACNLYGWWLDTGKKDDLLEANRLILDTCLTTSNLGEVDAKSQIIGRVQIGVNSQIINCTIRGPVVIGDNCYLENCFIGPYSSIANNTTLIDSDLEHSVILEGAKISGIDQRIIDSVIGQRAQLTIAPRRPKALRFLIGDDCQIELT

SEQ ID NO: 8956 - protein, 312 aa, Arabidopsis halleri subsp. halleri
TLRSTGADDVYIKVICCGICHTDIHQIKNDLGMSNYPMVPGHEVVGEVVEVGSDVSKFTVGDVVGVGVIVGCCGSCKPCSSELEQYCNKRIWSYNDVYTDGKPTQGGFADTMIVNQKFVVKIPEGMAVEQAAPLLCAGVTVYSPLSHFGLMASGLKGGILGLGGVGHMGVKIAKAMGHHVTVISSSDKKKEEAMEHLGADDYVVSSDPAEMQRLADSLDYIIDTVPVFHPLEPYLACLKLDGKLILMGVINTPLQFLTPLVILGRKVISGSFIGSIKETEEVLAFCKEKGLTSTIETVKIDELNTAFERLSK

SEQ ID NO: 8957 - protein, 131 aa, Haemophilus parahaemolyticus
DFCERVISGEWKGYTGKVITDVINIGIGGSDLGPYMVTEALRPYKNHLTMHFVSNVDGTHIAETLKKVNPETTLVLVASKTFTTQETMTNAHSARDWLLAAAKDESAVAKHFAALSTNAKEVEKFGIDTNN

SEQ ID NO: 8958 - protein, 416 aa, Oryza sativa
QRNGVVECSVCRSRLVVPSPRSVSRAYDKHRSKISSKFRALNVLLVVGDCILVGLQPILVFMSKVDGKFQFSPISVNFLTEVTKVVFAIVMLIIQSRKQKVGEKPLLARSTFIQAARNNALLAVPALLYAINNYLKFIMQLYFNPSTVKMLSNLKVLVIAVLLKFIMKRRFSVIQNCHVLSFNVDDHNLQSGLLVTHYVTEWEALALLLIGISINQLRTVPAGNTAFGLPVTAIAYIYTLIFVTVPSLASVYNEYALKSQYDTSIYLQNLFLYGYGAIFNFLGILGTALFQGPESFNILRGHSRATMFLICNNAAQGILSSFFFKYADTILKKYSSTVATIFTGLASAAFLGHTLTINFLLGISVVFISMHQFFSPLAKAKDDKPAELLELEDTQNHRSSESSFVNMTAGAAEDVV

SEQ ID NO: 8959 - protein, 312 aa, Arabidopsis halleri subsp. halleri
TLRSTGADDVYIKVICCGICHTDIHQIKNDLGMSNYPMVPGHEVVGEVVEVGSDVSKFTVGDVVGVGVIVGCCGSCKPCSSELEQYCNKRIWSYNDVYTDGKPTQGGFADTMIVNQKFVVKIPEGMAVEQAAPLLCAGVTVYSPLSHFGLMASGLKGGILGLGGVGHMGVKIAKAMGHHVTVISSSDKKKEEAMQHLGADDYVVSSDPAEMQRLADSLDYIIDTVPVFHPLEPYLACLKLDGKLILMGVINTPLQFLTPLVILGRKVISGSFIGSIKETEEVLAFCKEKGLTSTIETVKIDELNTAFERLSK

SEQ ID NO: 8960 - protein, 496 aa, Avicennia marina
MPTRQLFIDGEWREPVQRKRIPIINPANEQTIGDIPAATAEEMDIAVEAARKAFFRNSGKDWSSTTGAHRAKYLRAIAAKIKDRKVELVELEAIDSGKPLEEASLDMDNVIGCFEYFAGIAERLDSEQRTPVSLPMETFKCHLLKEPIGVVGLISPWNYPLLMAIWKVAPALASGCTAILKPSELASVTCLELAEVCMEVGLPPGVLNILTGLGPEAGAPLVTHPHVAKISFTGSDTTGVKIMTAAAQLVKPVTLELGGKSPIVVFEDVDLDTAAEWTLFGCFWTNGQICSATSRLLVHESIATTFLEKLVKWCEKIKISDPLEEGCRLGPIVSRRQYEKVMKYISTAKEEGATILCGGARPEHLEKGYFVQPTIITDVKTSMQIWIEEVFGPVLCVKTFATEDEAVELANDTHYGLAAAVISKDLDRCERMAKAFQVGAVWVNCSQPCFYQAPWGGKKRSGFGRELGERGLDIYLNVKQVTRYVSSEPWGWYKSP

SEQ ID NO: 8961 - protein, 224 aa, Bacillus anthracis str. A2012
MDKQIGFIGCGNMGMAIIGGMLNKKIVSSNKIMCSDLNTTNLENASEKYGISITTDNNEVAKNADILILSIKPDLYASVINEIKEEIKSDVIVVTIAAGKSVKSTEDSFDTKLKVVRVMPNTPALVGEGMSALCPNEMVTEKDLEDVLNIFNSFGQSEIVSEKLMDVVTSVSGSSPAYVYMIIEAMADAAVLDGMPRNQAYKFAAQAVLGSAKMVLETRNTSWE

SEQ ID NO: 8962 - protein, 270 aa, Corynebacterium glutamicum
MTTIAVIGGGQIGEALVSGLIAANMNPQNIRVTNRSEERGQELRDRYGILNMTDNSQAADEADVVFLCVKPKFIVEVLSEITGTLDNNSAQSVVVSMAAGISIAAMEESASAGLPVVRVMPNTPMLVGKGMSTVTKGRYVDAEQLEQVKDLLSTVGDVLEVAESDIDAVTAMSGSSPAYLFLVTEALIEAGVNLGLPRATAKKLAVASFEGAATMMKETGKEPSELRAGVSSPAGTTVAAIRELEESGIRGAFYRAAQACADRSEELGKH

SEQ ID NO: 8963 - protein, 584 aa, uncultured bacterium 577
MTQLIEIKVPDVGDFKEIPVIEILVQPGDNVEKETSLITLETDKATIEIPAPQNGTVKEIKVKIGDTVSEGSIILTLKPITNPTDSPPHTKKDTKAEFSPPTVNPISTQPTTIPRGDFHADVAILGAGPGGYTAAFRAADLGKKVILIERYPVLGGVCLNVGCIPSKALLHMAKVVTDAEETIHAGVNFNTPKLELDKLRKWKESIIGKLTNGLTALAKKRNVEVIQGNGKFITPNMISVTTPNGQKTVSFEYCVIAAGSSVAHPPGIIQNDPRIIDSTGALELEDIPKRMLIIGGGIIGLEMATIYDAFGSKVSVVEMKDQLISGADKDLIKPLYRRIKKRYEAIYLRTKVSEINPQKDGLEVTFEGEESPGTQTYDRILVAVGRRPNGHAIEAGNAGVHVTKQGFITVDNQLRTNVPNIFGIGDIVGEPMLAHKATHEGKLAAEIIAGQKAAFDVRTIPSVAYTDPEIAWMGLTEIEAKNQGIDYEKASFPWAASGRAIAMGRDEGMTKLLFDKNTRRLLGAGIVGINAGELISETVFALEMGTDMEDISLTIHPHPTLSETINFAAEIAEGSITDLYMPKK

SEQ ID NO: 8964 - protein, 541 aa, Vibrio cholerae O1 biovar eltor str. N16961
MKFQYDFVFLNQFSCKKLISFYRIIFPSKKVAVFYMIYPIPNSETSTVHFKDVYDNYIGGQWMKPHSGEYFSNTSPVNGLVFCRVARSSSQDVELALDAAHNALESWSTTSAVERSNILLRIADRIESNLETLAIVESWDNGKPIRETLAADLPLTIDHFRYFAACIRSQEGAASELDSRTLTYHLPEPIGVVGQIIPWNFPLLMAAWKLAPALAAGCTVVLKPAEQTPVSILFLMEIIGDLIPAGVINVVNGFGSEAGNALATSQRIDKLAFTGSTEIGNHILKCAADNLIPSTIELGGKSPNIYFPDIFSHEDQYLDKCIEGALLAFFNQGEVCTCPSRILVHESIYEKFIAKIIERVALIKQGNPLDTETQIGAQVSKEQYDKILGYIQIGKDEGAELIFGGHPNNQENYLSGGYYIKPTLFFGHNQMHIFQEEIFGPVIAITKFKDEIEALHLANDTVYGLGAGVWTRDINIAHRMAKNIKAGRVWVNCYHAYPAHAAFGGYKKSGIGRETHKLTLSHYQNIKNVLISHEIHPLGLF

SEQ ID NO: 8965 - protein, 567 aa, Streptococcus pneumoniae R6
MALEVIMPKAGVDMTEGQIVQWNKKVGEFVKEGEILLEIMTDKVSMELEAEEDGYLIAILKGDGETVPVTEVIGYLGEERENIPTAGAASPEASPVPVASTSNDDGKSDDAFDIVVIGGGPAGYVAAIKAAQFGGKVALVEKSELGGTCLNRGCIPTKTYLHNAEIIENIGHAANRGIVIENPNFTVDMEKLLETKSKVVNTLVGGVAGLLRSYGVTVHKGIGTITKDKNVLVNGSELLETKKIILAGGSKVSKINVPGMESPLVMTSDDILEMNEVPESLVIIGGGVVGIELGQAFMTFGSKVTVIEMMDRIVPAMDVEVSKNLRLILERKGMTILTGTKLQEIIEENGQLRIKVEGKDDIIASKALLSIGRMPDLEGIGEVEFELDRGCIKVNEYMETSVPGIYAPGDINGTKMLAHAAFRMGEVSAENALKGNHAVAKLNLTPAAIYTLPEVAAVGLTEEQAREKYDVAIGKFNFAANGRAIASDAAQGFVKVIADKKYGEILGVHIIGPAAAELINEASSIIEMEITVEEMLKTIHGHPTYSEVMYEAFADVLGMAIHSPKKK

SEQ ID NO: 8966 - protein, 375 aa, Streptococcus pneumoniae R6
MASSKPSSISYFSVAFDALCIINRIGEVMADDKLRATPAARKLADDLGINLYDVSGSGANGRVHKEDVETYKDTNVVRISPLAKRIALEHNIAWQEIQGTGHRGKIMKKDVLALLPENIENDSIKSPAQIEKVEEVPDNVTPYGKIERIPMTPMRKVIAQRMVESYLTAPTFTLNYEVDMTEMLALRKKVLEPIMEATGKKTTVTDLLSLAVVKTLMKHPYINASLTEDGKTIITHNYVNLAMAVGMDNGLMTPVVYNAEKMSLSELVVAFKDVIGRTLDGKLAPSELQNSTFTISNLGMFGVQSFGPIINQPNSAILGVSSTIEKPVVVNGEIVIRPIMSLGLTIDHRVVDGMAGAKFMKDLKELIETPISMLI

SEQ ID NO: 8967 - protein, 595 aa, Neurospora crassa
MAQYTASTGSSLRASPNLRQHHADTSAAPDTTEKFPDFDTSQTTNGYPSGNGRSTNAGSNAPSDQWRPRRESKVTWAPRDSPGPVNAYSHGRGHSRQTSISNAIHRMRSGSMSQNAHEIAEALRAPVSYKLIGLCMMWYWSSALTNTSSKSILTTFDKPATLTLIQFAFVCSYCLLASWLASTFPKLRTAVPALKHPIRKPSRDVIVTTLPLAAFQIFGHLLSSSATSKIPVSLVHTIKGLSPLFTVLAYRLIFDIRYPRATYYSLVPLTIGVMLACSGKHSFGEGQFLGILYALIATIIFVTQNIFSKRLFNEAARAEQEDGHSNGHRSKKLDKLNLLCYSSGMAFILTGPIWLWSEGFSIIGDFLWDGSVDLSETPNSFDHGRLTLEFIFNGTFHFGQNILAFVLLSMVSPVTYSVASLLKRVFVIIIAIIWFRSPTTNVQAVGIALTFLGLYLYDRSQEKNKADQRARSLSRSKMHESILPLNTKQTTETSSQYQPSSSLNTQIGGYGYMPSIQPTTSSADLGANKKDDGPNPSSVSTTAGGGRQRGASMAKANGGWLPPGTRQEHTWRVGDGRGQNGGAEVSGPAGVAVMS

SEQ ID NO: 8968 - protein, 268 aa, Zea mays
MDPKMTEVTQMFARFKAAYTRNDLDACVTLLSQLKVHLTKFPSLPPSFEQTPNAVEELKLARDIYEHAVVLSVKLEDQDAFERDFCQLKPYYMDTCGIIPPSPEEYPILGLNLLRLLVQNRIAEFHTELELLPVKALEHPCIKHAVELEQSFMEGAYNRVLSARQAVPHETYVYFMDLLAKTVRDEIAGCSEKGYDSLSVSDAKQMLMFSSDQDLHEYITEEHPGMGSLRMAPSFFQKAKESQPYKEIPSLQLINQTLSYARELERIV

SEQ ID NO: 8969 - protein, 453 aa, Streptococcus pneumoniae R6
MYKTKCLREKLVLFLKIFFPILIYQFANYSASFVDTAMTGQYNTMDLAGVSMATSIWNPFFTFLTGIVSALVPIIGHHLGRGKKEEVASDFYQFIYLALGLSVVLLGMVLFLAPTILNHIGLEAAVAAVAVRYLWFLSIGIIPLLLFSVIRSLLDSLGLTKLSMYLMLLLLPLNSGFNYLLIYGAFGVPELGGAGAGLGTSLAYWVLLGISVLVLFKQEKLKALHLEKRILLNMDKIKEGVRLGLPIGGTVFAEVAVFSVVGLIMAKFSSLIIASHQSAMNFSSLMYAFPMSISSAMAIVVSYEVGAKRFDDAKTYIGLGRWTALIFAAFTLTFLYIFRGNVASLYGNDPKFIDLTARFLTYSLFFQLADTFAAPLQGILRGYKDTVIPFYLGLLGYWGVAIPVATLFDSLTDFGAYSYWIGLIISLIVSGALYRWRLTVIMKRFESLAKSKR

SEQ ID NO: 8970 - protein, 296 aa, Klebsiella pneumoniae
MANLKAVIPVAGLGMHMLPATKAIPKEMLPIVDKPMIQYIVDEIVAAGIKEIVLVTHSSKNAVENHFDTSYELEALLEQRVKRQLLAEVQAICPPGVTIMNVRQAQPLGLGHSILCARPVVGDNPFVVVLPDIILDGGTADPLRYNLAAMIARFNETGRSQVLAKRMPGDLSEYSVIQTKEPMVAEGQVARIVEFIEKPDEPQTLDSDLMAVGRYVLSADIWAELERTEPGAWGRIQLTDAIAELAKKQSVDAMLMTGESYDCGKKMGYMQAFVTYGMRNLKEGAKFRESIKKLLA

SEQ ID NO: 8971 - protein, 111 aa, Glycine max
ISFNRDEEVNYFPSRYDPVRHAERFPIPPAICSGRREKCGIEKENTFKQPGERYRFWAPDRQDRFARRWVDALFDPRVTHEIRSVWISYWFQADRFLGQKIAFHFSTRPNI

SEQ ID NO: 8972 - protein, 518 aa, Medicago truncatula
MAGGGIPIGGGNKEYPGNLTPFVTITCIVAAMGGLIFGYDIGISGGVTSMDPFLKKFFPAVYRKKNKDKSTNQYCQYDSQTLTMFTSSLYLAALLSSLVASTITRRFGRKLSMLFGGLLFLVGALINGFANHVWMLIVGRILLGFGIGFANQPVPLYLSEMAPYKYRGALNIGFQLSITIGILVANVLNYFFAKIKGGWGWRLSLGGAMVPALIITIGSLVLPDTPNSMIERGDRDGAKAQLKRIRGIEDVDEEFNDLVAASEASMQVENPWRNLLQRKYRPQLTMAVLIPFFQQFTGINVIMFYAPVLFNSIGFKDDASLMSAVITGVVNVVATCVSIYGVDKWGRRALFLEGGAQMLICQVAVAAAIGAKFGTSGNPGNLPEWYAIVVVLFICIYVAGFAWSWGPLGWLVPSEIFPLEIRSAAQSVNVSVNMLFTFLVAQVFLIMLCHMKFGLFLFFAFFVLVMSIYVFFLLPETKGIPIEEMDRVWKSHPFWSRFVEHGDHGNGVEMGKGAPKNV

SEQ ID NO: 8973 - protein, 451 aa, Mesorhizobium loti MAFF303099
MNISSTLKTTGRAALLGSLALAALGSVAAFAQEAAPAAAAAAPAAAPTPVLDTGNTAWMLTSTALVLMMTIPGLALFYGGMVRKKNVLATIMQSFAITCLVTVLWFMFGYSLAFSDGGGMNAYLGGFSKFFHHGITVSTLWLPGVSNIPEFVFSMFQMTFAIITPALIAGAFAERMKFSALLLFMALWLIVVYCPIAHWVWGGGFLGTAGVLDFAGGTVVHINAGVAGLVCALVLGKREGYGTTNMAPHNLVYSVIGASLLWVGWFGFNAGSELAADGLAGAAMMNTQVATAAAALAWMFAEWIVAKKPSVLGIISGAVAGLVAVTPASGFVNPTGAFIIGIVAGVLCYISAVKVKHMFGYDDSLDAFGVHGVGGIIGALLTGALADPAINALGKGGSVVTQLYGIVFTILWTAIATFVILYIVKALVGLRPTTQEEVEGLDISQHGEVVP

SEQ ID NO: 8974 - protein, 372 aa, Chloroflexus aurantiacus
MEQRCLYDYNLSELTELLQSWGEPAFRARQLYRHLYVNLARQVDQMTDLPLALRSRLAEIPFSTLRCEQVQIGDNGMTRKALFRLPDGAVVETVLMVYPDRSTVCVSTQAGCGMGCVFCATGQLGLLRNLSSGEIVAQAIWASQELRAMGMAGPTGRVSNLVFMGMGEPFANYDRWWQAVERLHDPQGFNLGARSMTVSTVGLVKGIERLANERLPINLAISLHAPDDALRSELMPVNRRYPIADLMAATRNYIAKTRRRVSFEYVLLQGKNDHPHQAIALARLLRHSAPRGPLLFHVNLIPWNPVPGTPLGRSEWERVTTFQQILTDYGIPCTVRVERGVEIAAACGQLAGRHSVPLNTVEQEIPARNVTG

SEQ ID NO: 8975 - protein, 715 aa, Escherichia coli K12
  unsure (1)..(715): unsure at all Xaa locations
MKKVVTVCPYCASGCKINLVVDNGKIVRAEAAQGKTNQGTLCLKGYYGWDFINDTQILTPRLKTPMIRRQRGGKLEPVSWDEALNYVAERLSAIKEKYGPDAIQTTGSSRGTGNETNYVMQKFARAVIGTNNVDCCARVXHGPSVAGLHQSVGNGAMSNAINEIDNTDLVFVFGYNPADSHPIVANHVINAKRNGAKIIVCDPRKIETARIADMHIALKNGSNIALLNAMGHVIIEENLYDKAFVASRTEGFEEYRKIVEGYTPESVEDITGVSASEIRQAARMYAQAKSAAILWGMGVTQFYQGVETVRSLTSLAMLTGNLGKPHAGVNPVRGQNNVQGACDMGALPDTYPGYQYVKDPANREKFAKAWGVESLPAHTGYRISELPHRAAHGEVRAAYIMGEDPLQTDAELSAVRKAFEDLELVIVQDIFMTKTASAADVILPSTSWGEHEGVFTAADRGFQRFFKAVEPKWDLKTDWQIISEIATRMGYPMHYNNTQEIWDELRHLCPDFYGATYEKMGELGFIQWPCRDTSDADQGTSYLFKEKFDTPNGLAQFFTCDWVAPIDKLTDEYPMVLSTVREVGHYSCRSMTGNCAALAALADEPGYAQINTEDAKRLGIEDEALVWVHSRKGKIITRAQVSDRPNKGAIYMTYQWWIGACNELVTENLSPITKTPEYKYCAVRVEPIADQRAAEQYVIDEYNKLKTRLREAALA

SEQ ID NO: 8976 - protein, 391 aa, Acorus gramineus
PYEVPMTAAGALQSYKLAAKAIARLQSLPGGSMERLCDTMVREVFELTGYDRVMAYKFHEDDHGEVVAEITKQGLEPYLGLHYPATDIPQAARFLFMKNKVRMICDCRAKPVKVFQDEKLTIDLAFCGSTLRAPHSCHLQYMENMDSIASLVMAVVINDGDDDDDHVGDNNNDNSKKKRLWGLVVCHNTSPRFVPFPLRYACEFLTQVFAIHVHKELELENQMPEKNILRTQTLLCDMILRDAPLGIVSQTPNIMDLVKCDGAALLYKDKIWQLGTTPTERQIRDIAIWLTDYHMDSTGLSTDSLHDAGYPDALALGDVVCGMAAARITSKDILFWFRSPTTSEIQWGGAKHERSDQDDGRRMHPRSSFKAFLEVVKTRSLPWKDYEMDAI

SEQ ID NO: 8977 - protein, 407 aa, Acorus gramineus
ILHRIDVGLVIDLEPVNPSDVPVTAAGALKSYKLAAKAISRLQSLPSGNISLLCDVLVREVSDLTGYDRVMVYKFHEDEHGEVIAEQRKTDLEPYLGLHYPATDIPQASRFLFMKNKVRIICDCFTPPVKVVQDKKLGQPLSLCGSTLRAPHGCHAQYMANMGSIASLVMAVTINDDDDDDGNGNEQQQKGRKLWGLVVCHHTSPRFIPFPLRYACEFLIQVFSIQLNKEVELAAQMREKHILRTQTVLCDMLLRDAPVGIFTQSPNVMDLVMCDGAALYYKNQFWLLGTTPSEVQIKDLVDWLHECHNGSTGLSTDSLMEASYPGASALGNAACGMAAIKIGGTRDYMFWFRSQTAKEIKWGGAKHDPVDNDEEGQKMHPRSSFKAFLEVVKWRSLPWENAEMDAI

SEQ ID NO: 8978 - protein, 477 aa, Neisseria meningitidis MC58
MSQYDVVVIGAGPGGYVAAIRAAQLGFKTACVDAGVNKAGNAPALGGTCLNVGCIPSKALLQSSEHFHAAQHEFAEHGITVGDVKFDAAKMIERKDAIVTKLTGGVKFLFQKNKVTSLFGTASFAGKNGDAYQIEVDNKGEKTVIEAKHVIVATGSVPRPLPQVAIDNVNVLDNEGALNLTEVPAKLGVIGSGVIGLEMGSVWNRVGAEVTILEAAPTFLAAADQQIAKEAFKYFTKEQGLSIELGVKIGDIKSEGKGVSVAYETAAGEAKTEVFDKLIVAIGRIPNTKGLNAEAVGLEKDERGFIKVDGECRTNLPNVWAIGDVVRGPMLAHKASDEGVAVAERIAGQKPHIDFNNVPFVIYTDPEIAWVGKTEEQLKAEGVEYKKGTSGFGANGRALAMGKAKGTVKVLADAKTDRILGVHMIGPVVSELVTEGVTALEFFASSEDIARIIHAHPTLSEVVHEAALAADKRALHG

SEQ ID NO: 8979 - protein, 385 aa, Amborella trichopoda
PYEVPMTAAGALQSYKLAAKAISRLQSLPSGNIDRLCHTVVQEVHELTGYDRTMAYKFHEDDHGEVISEITKGGLEPYLGLHYPATDIPQAARFLFMKNGVRMICDCRARHVRVFQDEKLASDLTLCGSTLRAPHSCHLQYMENMDSIASLVMAVVVNEDEEENIADGPKRKRLWGLVVCHNTSPRFVPFPLRYACEFLMQVFAIHVNKEVELEALVREKNILRTQTMLCDMLLRDALLGIVTKNPNVMDLVKCDGATLLYENKLWRLGVTPSEVHIRDLARWLSEYHTDSTGLSTDSLVEAGYPDGVSLGDLVCGMAAVKITETDMLFWSRSHTASEIRWGGAKHDPNDKDDKRRMHPRSSFKAFLEVVKTRSFPWKDYEMDAI

SEQ ID NO: 8980 - protein, 181 aa, Fagus sylvatica
MASSMISSATVATVSRATPAQATMVAPFTGLKSTAAFPATQKSNNDITSLASNGGRVQCMKVWPPLGLQKFETLSYLPPLSLESLAKQIEYLILKGWIPCLEFELEHPFVYRENNRSPGYYDGRYWVMWKLPMFGCTDATQVLAELQEASKTYPTSHIRIIGFDNKRQVQCISFIAYKPPK

SEQ ID NO: 8981 - protein, 394 aa, Amborella trichopoda
DLEPVNPADVPVTAAGALKSYKLAAKAISKLQSLPSGNIELLCDVLVREVRELTGYDRVMAYKFHEDEHGEVVAEYRRADLDPYLGLHYPATDIPQASRFLFLKNKVRMICDCTASPVKVIQDKKLDKPLSLCGSTLRAPHGCHAQYMANMGSIASLVMSVTINENDEDSSPNEPSFHKGRKLWGLVVCHHTTPRFVPFPLRYACEFLLQVFGIQLNKEVELAAQLREKHILRTQTVLCDMLLRDAPVGIVTQSPNIMDLVKCDGAALYYQKQVWLLGTTPLEAQIRDISGWLLEYHCGSTGLSTDSLMEAGYPGALALGDAVCGMAAVKITSKDFLFWFRSHTAKVIKWGGAKHDPVDRDDGRKMHPRSSFKAFLEVVKQRSLPWEDVEMDAI

SEQ ID NO: 8982 - protein, 521 aa, Methanosarcina mazei Go1
MRISLHMTQARRPLMLMILDGWGYREEKEGNAILAASTPHLDRLQKERPSCFLETSGEAVGLPQGQMGNSEVGHLNIGAGRVVYQDLTKINVSIRNGDFFENPVLLDAISNVKLNNSSLHLMGLVSYGGVHSHMTHLYALIKLAQEKGLKKVYIHVFLDGRDVPPKAALGDVKELDAFCKENQSVKIATVQGRYYAMDRDKRWERTKLAYDALTLGVAPYKTSDAVTAVSEAYERGETDEFIKPTIVTDSEGNPEAVIQDTDSIVFLNFRPDRARQLTWAFVKDDFEGFTREKRPKVHYVCMAQYDETLDLPIAFPPEELTDVLGKVLSDRGLIQLRIAETEKYAHVTFFLNGGQEKCYSGEDRCLIPSPKISTYDLKPEMSAYEVTDEVVKRILSGKYDVIILNFANMDMVGHTGDFEAAVKAVETVDNCVGRIVEALRTAGGAALITADHGNAEQMENSHTGEPHTAHTSNPVKCIYTGNGEVKALENGKLSDLAPTLLDLLEIPKPEKMTGRSLIVRK

SEQ ID NO: 8983 - protein, 428 aa, Escherichia coli O157:H7 EDL933
MKIATIKTGLASLAMLPGLVMAAPAVADKADNAFMMICTALVLFMTIPGIALFYGGLIRGKNVLSMLTQVTVTFALVCILWVVYGYSLAFGEGNNFFGNINWLMLKNIELTAVMGSIYQYIHVAFQGSFACITVGLIVGALAERIRFSAVLIFVVVWLTLSYIPIAHMVWGGGLLASHGALDFAGGTVVHINAAIAGLVGAYLIGKRVGFGKEAFKPHNLPMVFTGTAILYIGWFGFNAGSAGTANEIAALAFVNTVVATAAAILGWIFGEWALRGKPSLLGACSGAIAGLVGVTPACGYIGVGGALIIGVVAGLAGLWGVTMLKRLLRVDDPCDVFGVHGVCGIVGCIMTGIFAASSLGGVGFAEGVTMGHQLLVQLESIAITIVWSGVVAFIGYKLADLTVGLRVPEEQEREGLDVNSHGENAYNA

SEQ ID NO: 8984 - protein, 131 aa, Haemophilus parahaemolyticus
DFCERVISGKWKGYTGKAITDVINIGIGGSDLGPYMVTEALRPYKNHLTMHFVSNVDGTHIAETLKKVNPETTLVLVASKTFTTQETMTNAHTARDWLLAAAKDESAVAKHFAALSTNAKEVEKFGIDTNN

SEQ ID NO: 8985 - protein, 316 aa, Glycine max
  unsure (1)..(316): unsure at all Xaa locations
MLRMERPMLICLMSLLLNIAVRPPWIPRTPMKGQIWFLIIPPTCPPTRPPTRPINGGSHAGNKLAMQEFMILPVGASSFKEAMKMGVEVYHHLKAVIKKKYGQDATNVGDEGGFAPNIQENQEGLELLKTAIAKAGYTGKVVIGMDVAASEFYDNKDKTYXYVTDYPIVSIEDPFDQDDWEHYAKLTAEVGQQVQIVGDDLLVTNPKRVEKAIKEKACNALLLKVNQIGSVTESIEAVRMSKQAGWGVMASHRSGETEDTFIADLSVGLATGQIKTGAPCRSERLAKYNQLLRIEEELGSAAVYAGAKFRAPVEPY

SEQ ID NO: 8986 - protein, 439 aa, Uncultured proteobacterium
MAAPEYPGLDTLALHAGSQPDPATGARATPIYQSASFCFPDSDYAASLFNIERAGHVYSRLSNPTNAVLEERIAALEDGVGAIATASGQAALTLAIMTLMGAGSHIVAAAALYGGSHNLLAYTLPRLGIETTFVDARDPQAFAAAIQDNTRLVFAETVGNPGLDVLNIPEVAAVAHQAGLPLMVDSTFTTPYLIKPFEHGADIIMHSATKFLSGHGIVIGGLLVDGGRFDWDASGKFPTLTEPYAGFHNLVFSEEFGPAAFIQRARKEGLRDFGACMSPTTAFHILQGVETLGIRMHRHVENTRRIVEFLNQHEQVSRVGYPELEGHPDQALASALLPKGCSAVFSFDLVGGREAGIAFVDALNLFSHLANVGDAKSLVIHPASTTHHRMDAAALAAGGIGEGTIRLSIGLEDAKDLIADLKQGLRAAGKVAAKQSVTP

SEQ ID NO: 8987 - protein, 248 aa, Magnetococcus sp. MC-1
MRDTTTHFGFTNVPTSEKVKKVRDVFDSVAPKYDLMNDLMSMGVHRLWKRHAISKLNLQPGDHALDLAGGTGDLALLMQKRMTRSGRVTICDINYSMLDQGRHRLTDEGWLCGMEWVQANAEELPYPSNCFDVVTIGFGIRNVTNIPQALSEMFRVLKPGGKLMVLEFSKIAIPALRPLYDLYSFKLLPEIGHIVTKDRDSYQYLVESIRMFPDQESFKAMIEAAGFFNVRYENLSAGISAIHLGYKV

SEQ ID NO: 8988 - protein, 131 aa, Haemophilus paraphrohaemolyticus
DFCERVISGEWKGYTGKAITDVINIGIGGSDLGPYMVTEALRPYKNHLTMHFVSNVDGTHIAETLKKVNPETTLVLVASKTFTTQETMTNAHTARDWLLAAAIDESAVAKHFAALSTNAKEVEKFGIDTNN

SEQ ID NO: 8989 - protein, 318 aa, Arabidopsis halleri subsp. halleri
TLRSTGADDVYIKVICCGICHTDIHQIKNDLGMSNYPMVPGHEVVGEVVEVGSDVSKFTVGDVVGVGVIVGCCGSCKPCSSELEQYCNKRIWSYNDVYTDGKPTQGGFADTMIVNQKFVVKIPEGMAVEQAAPLLCAGVTVYSPLSHFGLMASGLKGGILGLGGVGHMGVKIAKAMGHHVTVISSSDKKKEEAMEHLGADDYVVSSDPAEMQRLADSLDYIIDTVPVFHPLEPYLACLKLDGKLILMGVINTPLQFLTPLVILGRKVISGSFIGSIKETEEVLAFCKEKGLTSTIETVKIDELNTAFERLSKNDVRYR

SEQ ID NO: 8990 - protein, 131 aa, Haemophilus paraphrohaemolyticus
DFCERVISGEWKGYTGKAITDVINIGIGGSDLGPYMVTEALRPYKNHLTMHFVSNVDGTHIAETLKKVNPEATLVLVASKTFTTQETMTNAHTARDWLLNAAKDESAVAKHFAALSTNAKEVEKFGIDTNN

SEQ ID NO: 8991 - protein, 914 aa, Magnaporthe grisea
MDGHSNFTQPSDTSHASHTIPSSSSSQRRRLTKKPPPSTSARHHHSSLSIDSRVDAQSLVGKRSSTSLRRAPSAPPARTPTSTHASNSSSPRNPSSSTRLNNHSPIIPAASEFAASSLSPSARDRDSDPARNDHGHQLQNNNNYYYSAFTNAHHHNQYSAASHRRSNSYGHPHGPQSSNSLTFNHSEDFIGAPFDGSAILNRIEATKASPTLGSGAFPHISNPIPVGAAAPAQYSRGSPALEQSFTFPSAAMREKSQQVRGMEAQLPTSKRYSDETKEPKPGVLRKKSGFSGFMSGLVGTPKKPLISAPENPVHVTHVGYDSATGQFTGLPKEWQRLISESGITEKERRENPETLVNVIKFYKETTEKPAEDQVLEKFHDARPGLPSAPSAGSMISPGLAPHHYNPMSPMISPPASPRFPQVGHEGNFENPRSPPPVPKNKDVTLMPSRPAPRPPVSLPTRTAPHAPYAAKDSGIDMPPQHDDLTPTTYQPPKESQPILPEEHRSRSNSRVNGNTAYPASQQSPAVQAAYQQQLMQQQQEQALAQAQASMSGSMSRAPSKRQPQAQQPTPPQSQHQYSRPTDANGAQQTQRPQQPQIGPVPQSRPRHRSRQSNGLDVVAALKRICSEGDPREIYRSFTKIGQGASGGVYTGHERGSNRLVAIKQMNLEQQPKKDLIINEILVMKDSSHPNIVNFIDSYLCGGELWVVMEFMEGGSLTDVVTFNIMTEGQIASVCRETLLGLQHLHSKGVIHRDIKSDNILLSMEGNIKLTDFGFCATINEAQNKRTTMVGTPYWMAPEVVTRKEYGRKVDIWSLGIMAIEMIEGEPPYLTESPLRALWLIATNGTPQIKDEGNMSPVFRDFLYFALKVDPDKRASAHDLLRHEFMNLCVDLSHLSPLVRAAREARAQEKARKGQ

SEQ ID NO: 8992 - protein, 131 aa, Actinobacillus lignieresii
DFCERVISGSWKGYTGKAITDVINIGIGGSDLGPYMVTEALRPYKNHLNMHFVSNVDGTHIAEVLKKVNPETTLVLVASKTFTTQETMTNALTAREWLLAAAKDESAVAKHFAALSTNATEVAKFGIDTAN

SEQ ID NO: 8993 - protein, 224 aa, Zea mays
MATPATTPATMRAVQYDACGGGAAGLKHVEVPVPSAKKNEVLLKLQAATINPVDWKIQKGDMRPLLPRRLPFIPVTDVAGVVVDVGPGVKGLTAGDQVVAMLNSFNGGGLAEYAVASANLTVKRPAEVSAAEGAGLPIAAGTALQALRSIGAKFDGTGKPLNVLVTAASGGVGLYAVQLAKLANLHVTATCGARNMDLVKSLGADEVMDYRTPEGASLQSPSGR

SEQ ID NO: 8994 - protein, 131 aa, Actinobacillus pleuropneumoniae
DFCERVISGGWKGYTGKAITDVINIGIGGSDLGPYMVTEALRPYKNHLNMHFVSNVDGTHIAEVLKKVNPETTLVLVASKTFTTQETMTNALTAREWLLAAAKDESAVAKHFAALSTNATEVAKFGIDTAN

SEQ ID NO: 8995 - protein, 420 aa, Rhodopseudomonas palustris CGA009
MSQGVTAPFARHAMAYVLAGGRGSRLMELTDWRAKPAVYFGGKSRIIDFALSNALNSGIRRIAVATQYKAHSLIRHLQRGWNFFRPERNESFDILPASQRVSEEMWYRGTADAVFQNIDIIESYDPKFIVLLAGDHVYKMDYEKMLQQHVEQGADVTVGCLEVPRAEATAFGVMHTDTTDRIISFLEKPADPPAMPGKADKSLVSMGIYVFETKFLLDELRRDAADPNSSHDFGKDIIPYIVKHGKAVAHHFDKSCRRSSSEAVSYWRDVGTVDAYWAANIDLTDIVPELDLYDREWPIWTYGEITPPAKFVHDKEGRRGEAVSSLVSGGCIISGASLRHSLLFTGVRVHSFSHVENTVVLPYADIGRSCRLKNVVIDAEVKLPAGLVVGEDPEFDAKRFRRTENGICLITRAMIEKLDA

SEQ ID NO: 8996 - protein, 506 aa, Pseudomonas fluorescens PfO-1
MRYAHPGTEGAKVSFKSKYGNYIGGEFVAPVKGQYFTNTSPVNGQPIAEFPRSTAEDIEKALDAAHAAADAWGSTSAQARSLILLKIADRIEQNLETLAIIETWDNGKAIRETLNADIPLAADHFRYFAGCLRAQEGSAAEIDGNTVAYHIHEPLGVVGQIIPWNFPILMAAWKLAPALAAGNCVVLKPAEQTPLGISVLLELIGDLLPPGVLNVVQGFGKEAGEALATSKRIAKIAFTGSTPVGSHIMKCAAENIIPSTVELGGKSPNIFFEDIMQAEPSFIEKAAEGLVLAFFNQGEVCTCPSRALVQESIYPQFMEAVMKKVSQIKRGDPLDTDTMVGAQASEQQFDKILSYLEIAKGEGAELLTGGKVEKLEGSLATGYYIQPTLLKGTNKMRVFQEEIFGPVVSITTFKDEAEALAIANDTEFGLGAGLWTRDINRAYRMGRAIKAGRVWTNCYHLYPAHAAFGGYKKSGVGRETHKMMLDHYQQTKNLLVSYDINPLGFF

SEQ ID NO: 8997 - protein, 367 aa, Bacillus megaterium
MTKKVAVLPGDGGQSNQRRCCRLKAIGERLRHQFEFTYGLIGGAAIDEAGSSSSRSTIETCNEADAVLLGSVGGPKWDRFPSHLRPEKGLLAIRKELDLYANLRPVTFYDSLADASPLKKEYIEGVDFIIVRELTGGLYFGKPSDRRTEGNKETVVDTLFYKRTEIERIIASIDTAVNRRKKVTSVDKANVLESSRVWREVAEEVAKDYPDVELEHMLVDSAAMQLIRNPKYFDVVVTENMFGDILSDEASMLTGSLGMLPSASLTADGPSLYEPVHGSAPDIAGQNKANPIAAAILSAAMLLRHSFGLEKEAAVIEQAVESVLHAGHRTADLADGNHYLGTDKMVEVITAVIANDSAISSIMTASR

SEQ ID NO: 8998 - protein, 357 aa, Zea mays
  unsure (1)..(357): unsure at all Xaa locations
MVSAAAQAGVVASCVVXVLFVPMGLAGRHLSRNKVLFFSGALFISLAVGIHLSPYLPSLSLPHLASFLLLPHPVSASASSGSSCVQFLHRVSWSNAAGAADNGSGGGKARAWSWPPSLASACGFARLSRDDASLLLNGSWVMVAGDSQARLLVLALLRLLLDPAAAAAAEPELFRRHSDYRAAVPARDISVDFVWAPFESNLTRLLREDLRLAPRLPDVLVLGSGLWHMLHVTDAASYGDALASVAGAAKSLRSQLPEPPPHMFWLGLPHLVNHMLNTDAKRAHMNGTMVHAYDREVDRRGVLRGEGGSFLLLDVGKLTQGCGQQCTADGMHYDGDVYDAVMHIMLNALVIESQQRI

SEQ ID NO: 8999 - protein, 426 aa, Saccharomyces cerevisiae
MNILLQDPFAVLKEHPEKLTHTIENPLRTECLQFSPCGDYLALGCANGALVIYDMDTFRPICVPGNMLGAHVRPITSIAWSPDGRLLLTSSRDWSIKLWDLSKPSKPLKEIRFDSPIWGCQWLDAKRRLCVATIFEESDAYVIDFSNDPVASLLSKSDEKQLSSTPDHGYVLVCTVHTKHPNIIIVGTSKGWLDFYKFHSLYQTECIHSLKITSSNIKHLIVSQNGERLAINCSDRTIRQYEISIDDENSAVELTLEHKYQDVINKLQWNCILFSNNTAEYLVASTHGSSAHELYIWETTSGTLVRVLEGAEEELIDINWDFYSMSIVSNGFESGNVYVWSVVIPPKWSALAPDFEEVEENVDYLEKEDEFDEVDEAEQQQGLEQEEEIAIDLRTREQYDVRGNNLLVERFTIPTDYTRIIKMQSS

SEQ ID NO: 9000 - protein, 392 aa, Annona sp. SM-1999
PYEVPMTAAGALQSYKLAAKAIARLQALPSGNLQKLIDTVVEEVFELTGYDRAMAYKFHDDDHGEVISEITKPGLEPYLGLHYPATDIPQAARFLFMKNKVRMICDCNAKPVKVYQDEKLKLELTLCGSTLRAPHSCHLKYMENMGSIASLVMAVVINESDNEDDNSMVEQQQQQQPKRKRLWGLVVCHNTTPKFVPFPLRYACEVLMQVFAIHVNKELELENQIREKHLRTQTLLCDMLMRDAPLGIVTQSPNIMDLVKCDGAALLYNNKFWRLGLTPSEAHMRHIVSWLNEYHMDSTGLSTDSLHDAGYPGALALGDAVCGMAAVRITSKDILFWFRTHTAAEIRWGGAKHDPSDKDDGRRMHPRSSFKAFLEVVKSSSFPWKDYEMDAI

SEQ ID NO: 9001 - protein, 341 aa, Annona sp. SM-1999
EPVNPADVPVTAGGALKSYKLAAKAISRLQSLPSGNIPLLCDVLVREVSELTGYDRVKAYKFHEDEHGEVIAECRRSDLEPYLGLHYPATDIPQASRFLFMKNKVRMISDCLSPPVKVIQGKGLAQPLSLCGSTLRAPHGCHAQYMANMGSISSLVMSVTIDEDNDDTCSEQQQKGRRLWGLVVCHHTSPRFVPFPLRYACEFLMQVFGIQLNKEVELAAQSREKHILQMQTMLCDMLLRDAPVGILSQSPNVMDLVNCNGAALYYQNQFWLLGTTPTEAQIRDIVGWLLEYHNSTTGLSTDSLVEAGYPGAAELGDDVCGMAAVRITSKDFLFWFRSHTA

SEQ ID NO: 9002 - protein, 253 aa, Xanthomonas campestris pv. campestris
MSESPYTSGTTHFGFRDVAAKDKQKLVGEVFTSVARNYDLMNDLMSLGIHRAWKRYFVATAQVKPGDRVLDLAGGTGDIAVLLKERVGNEGAVVLGDINAGMLSVGRDRLTNRGLVAGFDYVQCNAEALPFPDQSFDLVTISFGLRNVTDKDAALREMYRVLKVGGQARVLEFSEVTADWFKPIYDFHSFKILPKLGQLFARDADSYQYLAESIRKHPPQDSLKGMMGEAGFARCHYKNLTGGIVAIHSGYKI

SEQ ID NO: 9003 - protein, 390 aa, Aquilegia sp. SM-1999
PYEVPMTAAGALQSYKLAAKAIARLQSLPSGSIDRLCDTVVEEVFQLTGYDRVMAYKFHDDDHGEVVSETTKEGLPPYLGLHYPATDIPQAARFLFMKNKIRMICDCRAKHVRVLQDEKLPFELTLCGSTLRAPHSCHLQYMENMDSIASLVMAVVINDGDEEEGTVEGASQSRKRKRLWGLVVCHNTTPRFVPFPLRYACEFLIQVFAIHVNKEFELENQILEKNILRTQTLLCDMLMRNAPIGIVSQSPNIMDLVKCDGAALLYQNKIWRLGLSPSESHIRDIASWLSEYHMDSTGLSTDSLYDAGFPGALSIGDTVCGMAAVRINSKDMLFWFRSHTAGEIRWGGAKHDPGEKDDGRKMHPRSSFKAFLEVVKTRSFPWKDYEMDAI

SEQ ID NO: 9004 - protein, 392 aa, Aquilegia sp. SM-1999
DLEPVNPADVPVTAAGAMKSYKLAAKAISKLQSLPSGNIPFLCEVLVQEISDLTGYDRVMVYKFHEDDHGEVIAEWKISDLEPYLGLHYPATDIPQASRFLFMKNKVRMIWDCTAAPVKVIQDTNLPQPLSLGGSTLRAPHGCHAQYMANMGSVASLVMSVTINDDDDDEVVNGQQKGRKLWGLVVCHHTCPRFVPFPLRYACEFLIQVFSMQINKEVELARQLREKHILQTKTVLCDMLLRDAPIGIFTQSPNVMDLVKCNGAALYYHQKFWLLGVTPTEAQIRDIVEWLVEYHNASTGLSTDSLVEAGYPGASILGNAVCGMAAAKITSKDFLFWFRSHTANEIKWGGAKHDPTEKDDGWKMHPRSSFKAFLDVVKHRSVPWEDIEMDAI

SEQ ID NO: 9005 - protein, 345 aa, Austrobaileya scandens
TGYDRVMAYRFHEDDHGEVVSEIRKSELEPYLGLHYPATDIPQAARFLFMKNKVRMICDCHAKSVTVHQDEKLQFDLTLCGSTLRAPHSCHLQYMANMGSIASLVMAVVVNEGEQDEEETAEPNQQPQLKRKRLWGLVVCHNTTPRFVPFPLRYACEFLIQVFAIHVNKEMELQNQLQEKNILRMQTLLCDMLLRDAPLGIVTQSPNIMDLVKCDGAAVLYGNKVWLLGVTPTESQIQDIASWLSESHMDSTGLSTDSLFEAGYPGALALGAKVCGMAAVKITLKDMLFWFRSHTAAEVRWGGAKHDPVDRDDGRRMHPRSSFKAFLEVVKSRSLPWKEYEMDGI

SEQ ID NO: 9006 - protein, 288 aa, Allium cepa
MEGKEEDVRVGANKYSERQPIGTSAQMTEDKDYKEPPPAPFFEPGELKSWSFYRAGIAEFMATFLFLYITILTVMGVVKSPSKCSTVGIQGIAWAFGGMIFALVYCTAGISGGHINPAVTFGLFLARKLSLTRAVFYMIMQCLGAICGAGVLKGYQKGLYMTQGGGANVVAPGYTKGSGLGAEIIGTFVLVYTVFSATDAKRNARDSHVPILAPLPIGFAVFLVHLATIPITGTGINPARSLGAAIIYNKGHAWNDHWIFWVGPFIGAALAAMYHQIVIRAIPFKSRS

SEQ ID NO: 9007 - protein, 360 aa, Austrobaileya scandens
PFYAILHRIDAGLIIDLEPVNPADVPITAAGALKSYKLAAKAISRLQSLPSGNIGLLCDVLVQEVSELTGYDRVMAYKFHEDEHGEVIAEYRRSNLEPYIGLHYPATDIPQASRFLFMKNKVRMICDCFAPPIKVIQDKKLAQPLSLCGSTLRAPHGCHAQYMANMGSVASLVMSITVNDDDDETIGEQQNQQKGRKLWGLVVCHHTSSRFVPFPLRYACEFLIQVFGIQLNKEVELAAWMREKHILQMQTLLCDMLLRDAPVGIMTQSPNVMDLIKCDGAALYYGKQLWLLGTTPTEAQIRDIAGWLLEYHGGTTGLSTDSLMEAGYPAAAALGDGVCGMAAAKLTSKDFLFWFRSHTA

SEQ ID NO: 9008 - protein, 974 aa, Saccharomyces cerevisiae
MNSMADTDRVNLTPIQRASEKSVQYHLKQVIGRGSYGVVYKAINKHTDQVVAIKEVVYENDEELNDIMAEISLLKNLNHNNIVKYHGFIRKSYELYILLEYCANGSLRRLISRSSTGLSENESKTYVTQTLLGLKYLHGEGVIHRDIKAANILLSADNTVKLADFGVSTIVNSSALTLAGTLNWMAPEILGNRGASTLSDIWSLGATVVEMLTKNPPYHNLTDANIYYAVENDTYYPPSSFSEPLKDFLSKCFVKNMYKRPTADQLLKHVWINSTENVKVDKLNKFKEDFTDADYHWDADFQEEKLNISPSKFSLRAAPAPWAENNQELDLMPPTESQLLSQLKSSSKPLTDLHVLFSVCSLENIADTIIECLSRTTVDKRLITAFGSIFVYDTQHNHSRLRLKFIAMGGIPLIIKFEHLAKEFVIDYPQTLIECGIMYPPNFASLKTPKYILELVYRFYDLTSTAFWCRWCFKHLDISLLLNNIHERRAQSILLKLSSYAPWSFEKILPSLIDSKLKKKILISPQITYVVFKSINYMITTNDDKIHKSAIPSSSSLPLSSSPTRNSPVNSVQSPSRSPVHSLMATRPSSPMRHKSISNFPHLTISSKSRLLIELPEGFFTWLTSFFVDMAQIKDLSVLKYFTKLCYLTVHINSTFLNDLLDNDAFFAFIRNIDTIIPFIDDAKTAAFIWKQITAICVEMSLDMDQMSASLFSTAMNFIRKKNNTSISGLEIILNCLHFTLRNVNDDVAPTVGSSESHSVFLIKVNNDAAIELPIDQLVDLFYALNDDDVNLSKLISIFTKICSLPGFENLTINIIFHPNFYEKIVSFFDTYFNSLLIQIDLLKFIKLIFSKSLLKLYDYTGQPDPIKQTEPNRRNKATVFKLRAILVQITEFLNNNWNNGCPKRNSNQVGGDSVLICQLCEDIRSLSKKGSLQKVSSVTAAIGSSPTKDERSNLRSSKDKSDGFSVPITTFQT

SEQ ID NO: 9009 - protein, 396 aa, Brasenia schreberi
PYEVPMTAAGALQSYKLAAKAIARLQSLPSGSVGRLIDTVVEEVHQLTGYDRVMTYKFHEDDHGEVVSEIRKPDLEPYLGLHYPATDIPQAARFLFMKNKVRMICDCRAKPVKVYQDENLKTDLTLCGSTLRAPHSCHLQYMDNMGSIASLVMAVVINEGEDEGDDEPEQNQGQQQQQQQKKKRLWGLVVCHNTTPRFVPFPLRYACEFLMQVFAIHVNKEVELENQMREKNILRTQTLLCDMLLRDAPLGIVTQSPNVMNLVKCDGAALLYGNKLWLLGQTPSESQMRDLAVWLSEYHRDSTGLSTDSLYEAGYPGALAIGDVVCGMAAVRITNSDMLFWFRSPTASEIRWGGAKHDPEEKDDGRRMHPRSSFKAFLEVVKTRSLPWKGFEMDAI

SEQ ID NO: 9010 - protein, 238 aa, Pyrobaculum aerophilum str. IM2
MTAGVIGAGKLGSQIALRLHGNSVRVIASVKTERSRQRLSALGLEVYTDNKIVVENSDVLFLAVKPANLAELNFYVDKPLISFVAGATLEYLKRLSARPYRAMTNVGLTAIAVAGPYDEEVNKLLSYIAPTFWVEERLIDPLTVLLGSGPAIVAELALALIRAGVNIGIPWDLSREIVLSLMASLPSLDDKFSMEKLAQYVATPGGTTIKALVELSPAGQLVGRAVEEAYLRISKLRQ

SEQ ID NO: 9011 - protein, 353 aa, Pseudomonas aeruginosa PAO1
MTLQIRGYAAQSASTPLTAHRFERRAPRADDLVIDILYCGVCHSDLHQARNEWHNSLYPLVPGHEIIGRVASVGEAVSGFAVGELVGVGCMVDSCRHCAACSEGLEQYCAEYPTLTYNGRDRHDGLPTFGGYSERIVVSARFVLRIPQGLDPKAAAPLLCAGITSYSPLRHWKVGPGSRVAVVGLGGLGHMGLKFARALGAEVALFTRSPGKEEEARRLGADQVILSTDPQRMAAVAGRFDLILDTVPHQHDLNPYLATLKRDGTLVLVGLLEPLEPAVHGAQLVMGRRSIAGSAIGGIAETQEMLDFCAAHGIACDIEMIEIQQINQAYERMLASDVKYRFVIDMASLQKSF

SEQ ID NO: 9012 - protein, 352 aa, Cabomba sp. SM-1999
DLEPVNPADMPSTAAGALKSYKLAAKAISRLQVLPSGNIGLLCDVLVREVSELTGYDRVMAYKFHEDEHGEVIAECKRPDLESYLGLHYPATDIPQASRFLFIKNKVRMICDCTAAPVKVIQNENLEPPLSLCGSTLRFPHGCHVQYMTNMGSIASLVMSVVINESDEATANDQPEAAATSEQPQKGRKLWGLVVCHHRKPRFIPYPLRYACEFLIQVFSVRLNKEVELAIQVREKHILRTQTVLCDMLLRDAPVGIVTQSPNIMDLVKCNGAALYYGKQFWLLGTTPTEAQIRDIIAWLHESHGSSTGLSTDSLMEAGYPRALVLGNAVCGMAAVKITSRDFLFWFRSHTA

SEQ ID NO: 9013 - protein, 390 aa, Calycanthus floridus
PYEVPMTAAGALQSYKLAAKAITRLQSLPSGSMERVVDTVVQEVFELTGYDRVMAYKFHEDDHGEVISEITKPGLEPYLGLHYPATDIPQAARFLFMKNKVRMICDCHAKPVKVCQDEKLTFDLTLCGSTLRAPHSCHLQYMENMGSIASLVMAVVINEGEEDDEVGISQQQQQRRKRLWGLVVCHNTTPRFVPFPLRYACEFLMQVFAIHVSKEIELENQLREKNILRTQTLLCDMLLRDALLGIVTQSPNIMDLVKCDGASLLYGNKMWRLGLTPTESQIHDIAMWVSEYHMDSTGLSTDSLYDAGYPKALSIGDVVCGMAAVRITAKDMLFWFRSHAAAEVRWGGAKHDPSDKDDGRRMHPRSSFKAFLEVVKTRSSPWKDYEMDAI

SEQ ID NO: 9014 - protein, 495 aa, Pirellula sp. 1
MSVATQHTLLPEVQSFLDQSPLASFVGGKHYPSEQGNVLATIDPGSGDQLAEIHDLNAAEIDRAVEIANEAFPAWAGLSQQERSSILLKLADAVESHKAIIAQIEALDAGKIEAQAAGDVQNFVDTMRYFVGLSDKVEKRTKLDVPGHDAYTVKQPWGACAFIFPWNFPFLLIGWGISPALAAGNTVVIKPAEDTSLSAIYLAQLAKEVGVPDGVINVVTGRGATAGAALTNNAEIKRMSFTGSPEVGRLVGESCGRNLVPVKLELGGKGAAVVFDDVDVKATAQALVGAITFHTGQVCCDATRWLIHENIYDEFVAECKQLMEKVRIGHPLDPNSDMGPVVNPKQRERVLGYQEKGTAGGAQCLCGGGPATVDGLNGNYVKPTLLAGSLDNVAAREEIFGPVAYLAKFSDEADAIAKANDTDYGLANSVWTTDVERANRVAESMIAGNSWINAHNVFAHGVPYGGVKKSGMGGGVLSPETLMDYYRSTSVVRPL

SEQ ID NO: 9015 - protein, 393 aa, Calycanthus floridus
DLEPVNPDDVPVTAAGALKSYKLAAKAISKLQSLPSGNISLLCDVLVREVSELTGYDRVMAYKFHEDDHGEVIAECRRSDLEPYLGLHYPATDIPQASRFLFMKNKVRMICDCLAPPVKVIQDKRLAQPLSLCGSTLRAPHGCHAQYMANMNSIASLVMSVMVHENDDRQEMSSSRKGRKELWGLVVCHHTTPRLSFPLRYACEFLIQVFGIQLNKEIELAAQMREKHILRTQTVLCDMLQRDAPVGIIRQTPNVMDLVKCDGAALYYRNQFWLLGTTPTDAQIRDIAEWLLEYHSSSTGLSTDSLMEAGYPGASVLGDAVCGMAAIRITSKDFLFWFRSHTAKEIKWGGAKHDPVDQDDDDRKMHPRSSFKAFLEVVKCRSLPWEDIEMDAI

SEQ ID NO: 9016 - protein, 131 aa, Haemophilus aphrophilus
TFCARVISGEWKGYTGKAITDVINIGIGGSDLGPYMVTEALRPYKNHLTMHFVSNVDGTHIAETLKKVNPETTLILVASKTFTTQETMTNALSARDWFLAAAKDPAHVAKHFAALSTNAKAVAEFGIDTDN

SEQ ID NO: 9017 - protein, 355 aa, Streptomyces griseus
MKALVLAGGTGTRLRPITHTSAKQLVPVANKPVLFYGLEAIRAAGIIDVGIVVGDTADEIVAAVGDGSRFGLKVSYIPQSKPLGLAHCVLISRDFLGEDDFIMYLGDNFVVGVVEDSVREFRAARPDAHLMLTRVPEPRSFGVAELSDSGQVLGLEEKPAHPKSDLALVGVYLFSPAIHEAVAAITPSWRGELEITDAVQWLIDAGRDVRSTVISGYWKDTGNVTDMLEVNRLVLETTEPRCDGLVDERSDLIGRVLVEEGAEVRNSRVMGPTVIGAGTRVTNSYVGPFTSLAEDCVVEDSEVEFSIVLRGASISGVRRIEASLIGRHVQVTSAPEVPHANRLVLGDHSRAQISS

SEQ ID NO: 9018 - protein, 464 aa, Brucella suis 1330
MTGFDYDLFVIGGGSGGVRAGRLAGAIGKKVGLAEEYRMGGTCVIRGCVPKKLFVYASQFPEHFEDSAGYGWSMGEAAFDWKKLIAAKDKEISRLEGLYRKGLENSHVDIFASRAELIDEHTIELKADGRRVTADKILIATGGRPNTHESLPGHEYCISSNEAFHLEELPKSIVIAGGGYIAVEFANIFHGLGVETTLVYRGKEILSRFDHDIRSLLHETMEAKGIRILCGAIFEKVEKKADGKLSVELSNGETLETDQAMLALGRIPNTDGLGLEKAGVKIDKSGAIEVDDYSRTNVENIWAVGDVTNRVQLTPVAIHEAMCFLETAFKDNPTKPDHELIATAVFSQPEIGTVGLSEDEAAKKYPELEIYRALFRPMKNTLSGRSEKTLMKLVVESKSRKVLGAHIMGPDAGEMAQLLGISLKAGATKDDFDRTMAVHPTATEELVTMYKPTYRVVDGKKIEG

SEQ ID NO: 9019 - protein, 131 aa, Haemophilus aphrophilus
TFCARVISGEWKGYTGKAITDVINIGIGGSDLGPYMVTEALRPYKNHLTMHFVSNVDGTHIAETLKKVNPETTLILVASKTFTTQETITNALSARNWFLAAAKDPAHVAKHFAALSTNAKAVAEFGIDTDN

SEQ ID NO: 9020 - protein, 512 aa, Bifidobacterium longum DJO10A
MGDPRGFLKVRTRRELAERPVEERIKDWFDVHAETGLQPWTQAQAARCMDCGTPFCMTGCPLGNLIPEWNDLVRQGKWEDACNRLSMTNNFPEVTGRICPALCEQACVLGIHQPPTMIRNDECTIIDQAWDLDIVKPLPPQRLTDQTVAVVGSGPAGLAAAQQLTRAGHTVVVYEKDDAIGGLMRYGIPNFKLEKGLIDRRVKQMEAEGTRFRTNVEIGKDITWDDLRDRYDAVVVAIGSRVPRDMKIPGRELDGIHFALDFLPDATRRIFGVKPVHDITAKDKHVVVIGGGDTGSDCLGTSIRQGAKDVTVLQIMPKEPSSRPDNSPWPTFARTYQKTSSMEEGGEYIYSTDSVNFEGTEEEKAKVTIDNSTTAEGFVADERGHVTGLKVVSVAPGENGPFTRQPGTERVLPADLVLISVGFLHPDTETILDQLPVELDKRGNIARNDKFATSQDGVFVCGDAGRGQSLVVWAIAEGRSCAAAVDEYLSSEQTSELPAPIKASQRPMMLPR

SEQ ID NO: 9021 - protein, 404 aa, Arabidopsis thaliana
MNPKGRTNLNRSIIGGHDHGSILQLLLFLLLLSSHGGFKFVAGQATHGGSDVSGDSSRFDPTMAILMIVLVSVFFFLGFFSVYIRRCLERVMGMDYGNPNDAGNWLATNRQQARGLDASIIETFPTFQYSTVKTLRIGKEALECSVCLNEFEDDETLRLIPKCCHVFHPGCIDAWLRSHTTCPLCRADLIPVPGESIVSIQIPGLVNDPPGSDPNGDRIRSLGSPDARLIESVALTCNQSMPRRSMSTGWNLAGMFTNSDRTGQHSENLDRFTLRLPQDIHNKLVNPNLSKVHVALPQVMSSTRGYRTGSLGSERNYFYYERFDQDGRLDRRPFSITPPYRTSSINHMSPGGSGGDKVRASSPKSLLLAMRSPFDRLFLGKNNNVGENSSDHLRSCDATPSNTV

SEQ ID NO: 9022 - protein, 318 aa, Magnetococcus sp. MC-1
MNLFATALQQHTGTPVMEAASLSLIQVNVGLTCNLQCRHCHVGAAPQRTEQMSWAVMQQVLALITQSGCKQVDITGGAPEMNAHIQPFIQALRARDVAVQLRTNLTLHRDPDWHAMAPWLRDHGVVLVGSMPCYVQENVDQQRGDGVYQASIAALQRLNQLGYGVAGGVPLNLVYNPGGAHLPPPQSSLEEAYKKAMWQQYGITFDQLLTLTNMPIGRFRADLRREGQEQAYWGLLQASFNPATVAGLMCRHQVSVRWDGVLFDCDFNLALDLPARVSGGARLGEVTVATLRSRRVVIEQHCLGCTAGCGSSCGGALV

SEQ ID NO: 9023 - protein, 131 aa, Haemophilus paraphrophilus
TFCARVISGEWKGYTGKAITDVINIGIGGSDLGPYMVTEALRPYKNHLTMHFVSNVDGTHIAETLKKVNPETTLVLVASKTFTTQETMTNALSARDWFLAAAKDPAHVAKHFAALSTNAKAVAEFGIDTDN

SEQ ID NO: 9024 - protein, 692 aa, Oryza sativa (japonica cultivar-group)
MARPRPPGLIAVAAAAALVAWCLCGPASAAAAAGGEAGGGGAGPEGDVLIAFRETLRGPDGAPPGPLRAWGTPAVPCRGKASQWFGVSCHGNGSVQGLQLERLGLSGAAPDLGLLAALPGLRVLSLANNAIAGAFPNVSALAMLKMLYLSRNRFSGVVPDGTFHTMRGLRKLHLSSNELSGPIPSSITSPRLLELSLAHNQFNGPLPDFSQPELRYVDVSSNNLSGPIPEGLSRFNASMFSGNEYLCGKPLDTPCDKLASPSNMSTFMTIAVVLIVVGVILAAAGIATGVIGRRRRKRRRRRPGPGEPGGDQTPSNPKLHTAPAVNINRGSATAAASTAAAAGTSASGGGGGAAAKRGGRRDEHGRLVFVQESRKRFEIEDLLRASAEVLGSGNFGSSYKATLQERPAVVVKRFKDMNGVGREDFSEHMRRLGRLSHPNLLPVVAYLYKKDEKLLITDYITNGSLAHFLHGNRGSELDWGKRLRIIRGTARGLGHLYDELPMLTVPHGHLKSSNVLLDGDMEAVLSDYALVPVVTASAAAQVMVAYKAPECVAAAAAGKPSKKSDVWSLGILILEVLTGKFPANYLRQGRQDNADLAGWVSSVVSEERTGEVFDKDMAAAGAGAEDDMLKLLHVGLGCCDADVDQRWELKTAIARIEEIRVPDPTPTPAAAADAAEPSPSTTTTTNSGETRS

SEQ ID NO: 9025 - protein, 297 aa, Clostridium tetani E88
MARLVECVPNFSEGKDKKIIETIVDEVRKIENVKLLDYSSDEDHNRSVVTMIGDPEDVKKAVLGLAKKSIELIDMTKHHGGHPRMGAVDVIPFTPVSDVTMEECVELANEVGKEIGSLGVPVYLYEDAATTPERQNLAKVRKGQYEGFFEKIKESEWKPDYGPQEMNAKSGCTAVGARVALVAFNVNLGTDNLEVADAIAKKVRFIGGGLRFAKAIGLKLEERNIVQVSMNLVNYEKTSVYRAFEMIKMEAKRYGVPVVGSEVIGTVPMKALLDCAEYYLQIENFDISQILEKRLLD

SEQ ID NO: 9026 - protein, 318 aa, Arabidopsis lyrata subsp. petraea
TLRSTGADDVYIKVICCGICHTDIHQIKNDLGMSNYPMVPGHEVVGEVVEVGSDVSKFTVGDVVGVGVIVGCCGSCKPCSSELEQYCNKRIWSYNDVYTDGKPTQGGFADTMIVNQKFVVKIPEGMAVEQAAPLLCAGVTVYSPLSHFGLMASGLKGGILGLGGVGHMGVKIAKAMGHHVTVISSSDKKKEEAMEHLGADDYVVSSDPAEMQRLADSLDYIIDTVPVFHPLEPYLACLKLDGKLILMGVINTPLQFLTPVVILGRKVISGSFIGSIKETEEVLAFCKEKGLTSTIETVKIDELNTAFERLSKNDVRYR

SEQ ID NO: 9027 - protein, 189 aa, Mycobacterium tuberculosis H37Rv
WGEPLANYARVLAAVQRITARPPSGFGISARAVTVSTVGLAPAIRNLADARLGVTLALSLHAPDDGLRDTLVPVNNRWRISEALDAARYYANVTGRRVSIEYALIRDVNDQPWRADLLGKRLHRVLGPLAHVNLIPLNPTPGSDWDASPKPVEREFVKRVRAKGVSCTVRDTRGREISAACGQLAAVGG

SEQ ID NO: 9028 - protein, 373 aa, Erwinia carotovora subsp. atroseptica SCRI1043
MQMIKTRAAIAWGPNQPLSVEEVDLMPPQKGEVLVRIVATGVCHTDAYTLSGKDPEGVFPAILGHEGGGIVEAIGEGVTSVAVGDHVIPLYTPECGECKFCRSGKTNLCQAIRSTQGKGLMPDGTTRFSKNGQPIFHYMGTSTFAEHTVVPEISLAKVNKEAPLEEVCLLGCGVTTGMGAVLNTAKVKAGDTVAIFGLGGIGLSAIIGAHMAGAGRIIGIDLNTSKFDLARKLGATDLLNPKDYDKPIQDVIVELTDGGVDFSFECIGNVNVMRSALECCHKGWGESIIIGVAGAGEEIATRPFQLVTGRVWRGSAFGGVKGRSELPGLVDRYLKGEFPLNDFITHTMGLDDINTAFDLMHEGKSIRTVIHFG

SEQ ID NO: 9029 - protein, 275 aa, Mycobacterium tuberculosis H37Rv
MVPELMFDEPRPGRPPRHLADLDAAGRASAVAELGLPAFRAKQLAHQYYGRLIADPRQMTDLPAAVRDRIAGAMFPNLLTASADITCDAGQTRKTLWRAVDGTMFESVLMRYPRRNTVCISSQAGCGMACPFCATGQGGLTRNLSTAEILEQVRAGAAALRDDFGDRLSNVVFMGMGGAAGQLRQGVGRSSAHYRAAAVRFRDFGPRGDGVDGGSGPCYPQPCRRAARRDPGAVAARPRRRVARYTSSGQQPVEDQRSARCGPVLRQCDRATGVY

SEQ ID NO: 9030 - protein, 286 aa, Beta vulgaris
MEGKDEDVRLGANKFSEKQGLGTVAQDRDYKEPPPAPLFEPGELTSWSFYRAGIAEFIATFLFLYISILTVMGYSRTANKCSTVGIQGIAWAFGGMIFALVYCTAGISGGHINPAVTLGLFLARKLSLTRAVFYMIMQCLGAICGAGVVKGFQPTPYMTAGGGANYVHHGYTKGDGLGAEIIGTFVLVYTVFSATDAKRSARDSHVPILAPLPIGLAVFLVHLATIPITGTGINPARSLGTAIIFNRHHNSWNDHWIFWVGPFIGAALAAVYHTVVIRAIPFKSKS

SEQ ID NO: 9031 - protein, 362 aa, Triticum aestivum
MVKAKLLAVLALVAVAAPFLRAAGQEEGEGGARPSELLPFAVGAAPAGCDVGQGEWVYDEAAAPAYDEEACPYIPAELTCQAHGRPDKSYQHWRWQPRGCSLPSFNGTVMLETLRGKRMLFVGDSLNRAQYVSLLCLLHRAMPEGSTSFETVDALSIFRAKAYDATIEFYWAPLLAESNADDGVEHQLNDRVIRGAPMDRHSGMGAEEAYRLVLRTRGRWLDGNVDPKRSRVFFVTASPTHATGQLWGDEAEGSNCHGQTKPIADASYWGSTSRAMLRVTGEVLAASARVPVGVVNVTQMSEYRRDAHTQVYREQWAPPTKEQLADPKSYADCTHWCLPGVPDAWNELLYWKLFFPANDQAL

SEQ ID NO: 9032 - protein, 352 aa, Enterococcus avium
MSKTMKGVSKQAPGYDQMAFIDLSVPEATDDKVLIKVAYTGICGSDIHTFKGEYKNPTTPVVLGHEFSGQVVEVGANVPKVKVGDRVTSETTFYVCGECDYCKEKQYNLCPHRKGIGTQQNGSMANYVLAREESIHLLPDHLSYEGAAMSEPLACCVHAMYQKSHLELKDTIIIMGPGPIGLYLLQIAKEIGAFVIMTGITKDAHRLALAKKLGADVIVDTMKEDLAKVVNEITDGYGVDKVYDASGAVPAVNASLPLIRKQGQFIQVGLFANKMVDLDTESIIQREIEYIGSRSQNPYDWPIAIHLLAKGAINIDEMITKKYPLTEWREAFDKVMEGNEIKVMIESNPEEF

SEQ ID NO: 9033 - protein, 503 aa, Oryza sativa (japonica cultivar-group)
MACVLRLASRSRSRSGLRPTLAAPRPSPVPPPPPRTLDIPVHVTLCVPPLMADLDFFHTVQWRRAGIGRRWFATEASAASTAAELVDVPLAQTGEGIAECELLRWFVTEGDQVDEFQRLCEVQSDKATIEITSRFKGKVHQIHFGPGDIVKVGETLLKMMVGDSQTVSHDSIASSTDHSHAVDAANPSGEGSVPSGTLSTPAVRHLAKQYGLNISDIQGTGKDGRVLKEDVLSYAASKGLCKEPTSALEENIDQVELLEGRGSLPDANSYEDRRISLRGYQRSMVKSMTLAAKVPHFHYLEEINCDALVELKASFQNANKDHTIKHTFLPFLIKSLSKALSKYPLLNSCFVEETNEVIFKGSHNIGVAMATEHGLVVPNIKNVQSLSILEITKELSRLHEMASHNRLSTEDIAGGTITLSNIGAIGGKFGSPLLNLPEVAIIALGRIQKLPRFDDDENVYPSSIINVTVGADHRVVDGATVARFCNEWKSLVEKPERLLLHMR

SEQ ID NO: 9034 - protein, 456 aa, Glycine max
MRPPVILKTTTSLLDSSSSSPPCDRRLNTLARHFLPQMASHDSISASPTSASDSVFNHLVRAPEDPILGVTVAYNKDPSPVKLNLGVGAYRTEEGKPLVLNVVRRVEQQLINDVSRNKEYIPIVGLADFNKLSAKLIFGADSPAIQDNRVTTVQCLSGTGSLRVGGEFLAKHYHQRTIYLPTPTWGNHPKVFNLAGLSVKTYRYYAPATRGLDFQGLLEDLGSAPSGSIVLLHACAHNPTGVDPTLEQWEQIRQLIRSKALLPFFDSAYQGFASGSLDADAQPVRLFVADGGELLVAQSYAKNLGLYGERVGALSIVCKSADVASRVESQLKLVIRPMYSSPPIHGASIVAAILKDRNLFNDWTIELKAMADRIISMRQELFDALCSRGTPGDWSHIIKQIGMFTFTGLNAEQVSFMTKEFHIYMTSDGRISMAGLSSKTVPLLADAIHAAVTRVV

SEQ ID NO: 9035 - protein, 419 aa, Glycine max
MASHDSISASPTSASDSVFNHLVRAPEDPILGVTVAYNKDPSPVKLNLGVGAYRTEEGKPLVLNVVRRVEQQLINDVSRNKEYIPIVGLADFNKLSAKLIFGADSPAIQDNRVTTVQCLSGTGSLRVGGEFLAKHYHQRTIYLPTPTWGNHPKVFNLAGLSVKTYRYYAPATRGLDFQGLLEDLGSAPSGSIVLLHACAHNPTGVDPTLEQWEQIRQLIRSKALLPFFDSAYQGFASGSLDADAQPVRLFVADGGELLVAQSYAKNLGLYGERVGALSIVCKSADVASRVESQLKLVIRPMYSSPPIHGASIVAAILKDRNLFNDWTIELKAMADRIISMRQELFDALCSRGTPGDWSHIIKQIGMFTFTGLNAEQVSFMTKEFHIYMTSDGRISMAGLSSKTVPLLADAIHAAVTRVV

SEQ ID NO: 9036 - protein, 187 aa, Zea mays
MATPPALLFPSPSSASSPPSSAQVEAVVLFNVCDSYVRRPDQADRVIGTLLGSLLPDGTVHVRNSYVVPHSESADQVAIDIDYHHNMYASHQKVNPKEVIVGWFSTGFGVSGGSTLIHEFYSREVQSPIHLTVDTGFTRGEASIKAYVSSNLSLGDRQLAAQFQEIPLDLRMIGAEKAGCMCHFPGC

SEQ ID NO: 9037 - protein, 149 aa, Zea mays
  unsure (1)..(149): unsure at all Xaa locations
MSPSPDLPSRILPRVLIVSRRTVRKNKFVDFVGEYHLDLVVSYGAVPVIVPRVAGVHAMLDSFEPIHGVLLCEGEDIDPSLYDAGGDGIDGDALSPEQLEAVRSLHPSDAAVDHEKDSIELLLERRCLERKXPFLGICRSSLTLKLLLI

SEQ ID NO: 9038 - protein, 349 aa, Canella winterana
DFEPVKPYEAPMTAAGALQSYKLAAKAIARLQSLPSGSMKRLVDTVVQEVFDLTGYDRVMAYKFHEDDHGEVISEITKPDLEPYLGLHYPSTDIPQAARFLFMKNKVRMICDCHALPVKVYQDDKLTFDLTLCGSTLRAAHSCHSQYMANMGSIASLVMAVVVNEREEEDENSESSEQQQQQKKKRLWGLVVCHNTTPRFVPFPLRYACEFLMQVFAIHVNKELELENQIQEKNILRTQTLLCDMLMRSAPLAIVTQNPNIMDLVKCDGASLLYQSKIWRLGVAPTESQIRDIARWLSDCHMDSTGLSTDSLHDAGYPGALLLGDVVCGMAAVKINSKDMPFWFRSHTA

SEQ ID NO: 9039 - protein, 746 aa, Chloroflexus aurantiacus
MKRRGWNPATWVSLVPNGLGHVKPNHYWEIVRTIWENRDNLGKAWRILHEGVCDGCALGTAGLRDFTMKGVHLCTVRLNLLRLNTMPPLDIHRLHDVADLQRLNGRELRALGRLPYPMLRRRGEAGFRRISWDDALNEIAARLRNTDPHRMAFYLTSRGITNETYYVAQKVARFLGTNNVDNAARLCHAPSTTAMKQALGVAASTCSYRDWIGTDLLIFIGSDAPNNQPVTTKYLYYAKQHGTRILVINPYREPGLERYWVPSVFESALFGTRLADRFFQIHTGGDIAFLNGTLKHLIERNWLDWDFISAHTRDFERVQVALAQQSWDDLERASGATRGEMLAFAEALAQAKSAVFVWSMGITQHEYGVENVKAILNLALARGFIGREYCGVMPIRGHSGVQGGGEMGCTATTFPGGKPITPDTAHWLGEQWGFAVPAWKGLSCGDMLDVAYNGELDVFYAVGGNFLDTMPDPAYIRTALARPALRVHQDIVLTTQMLVEPADTVILLPAATRYEQRDGGTETSTEREIIFSPYIAPPPAEARSEWEILLSVAERTKPEQAHLIHFADGQQIRNEIARIVPEYNGIQHLHQTGDHIQWGGRILCRDGRFGTPDGKAVFTPLKPPVTTLPPAMFVLKTRRGKQFNSLIHDERDPLNGALRDDVLINPVDAATLGVREGDWVILRSAVGEMRARIKFAPLKSGNIQVHWPEGNVLIDAHQRDPGAGVPSYKALVSIHPITEAVLQEQR

SEQ ID NO: 9040 - protein, 393 aa, Canella winterana
DLEPVNPTDVPVTAAGALKSYKLAAKSISRLQSLPSGNIQLLCDVLVREVSDLTGYDRVMAYKFHEDEHGEVIAECRRSDLEPYLGLHYPATDIPQASRFLFMKNKVRMICDCSAPPVKVIQDKRLAQSLSLCGSTLRAPHGCHAQYMANMGSIASLVVSVTVSEDDDETESEQQQKGRKLWGLVICHHTCPRFVPFPLRYACEFLIQVFGIQLNKEVDLASQIREKHMLRTQTMLCDMLLRDAPVGIVTQSPNVMDLVKCDGAALYYKNQFWLLGTTPTEAQIRDITNWLVEYHNSTTGLSTDSLAVAGYPGASVLGDAVCGMAAVKFTNKDLLFWFRSHTAKEIMWGGAKHDPVDKDDDGRKLHPRSSFKAFLEVVKRRSLPWEDVEMDAI

SEQ ID NO: 9041 - protein, 391 aa, Chloranthus spicatus
PYEVPMTAAGALQSYKLAAKAIARLQSLPGGSMEKLCDTVVQEVFELTGYDRAMAYKFHEDDHGEVISETTKPGLEPYLGLHYPATDIPQAARFLFMKNKVRMICDCHAKPVKVFKMKKLAFDLTLCGSTLRAPHSCHSQYMVNMNSIASLVMAVVVNEGEEGDSSEPGQQQLQQKKKRLWGLVICHNTTPRFVPFPLRYACEFLMQVFAIHVNKELELENQIQEKNIFRTQTLLCDMLMRDAPLGIVSQNPNIMDLVKCDGAALLYNKKIWRLGLTPSESQIHDISFWLSENHMDSTGFSTDSLNDAGYPGAVAIGNAVCGMAAVWITSKDMLFWFRSHTAAEVRWGGAKHDPEDKDDNRRMHPRSSFMAFLEVVKTRSLPWKDAEMDAI

SEQ ID NO: 9042 - protein, 397 aa, Chloranthus spicatus
DLEPVNPADVPVTAAGALKSYKLAAKAISRLQSLPSGNISLLCDVLVREVSELMGYDRVMAYKFHEDEHGEVIAECRRVDLEPYLGLHYPATDIPQASRFLFMKNKVRMICDCSAAPVKVIQDKRLGQPLSLCGSTLRAPHGCHALYMANMGSIASLVMSVTINEDDDETKSDPQQQQQENRRKLWGLVVCHHTSTRFAPFPLRYACEFLLQVFSLQLNKEVELAAQLREKNMLRMQTLLCDMLLRDTPTGILTQSPNVMDLVKCDGAALYYRNQFWLFGTTPTDVQIRDMAEWLLECHDGSTGLSTDSLMEAGYPCASILGNAVCGMAAVKITSKDFLFWFRSHTAKEVKWGGAKHDPIDKDGDGRKMHPRSSFKAFLEVMKQRSLPWEDMEMDAI

SEQ ID NO: 9043 - protein, 414 aa, Degeneria vitiensis
SGKPFYAIIHRVTGSLIIDFEPVKPYEVPMTAAGALQSYKLAAKAIAKLQALPSGSMEKLVDTIVQEVFELTGYDRAMAYKFHEDDHGEVISEVTKPGLEPYLGLHYPATDIPQAARFLFMKNKVRMICDCHAKPVEVYQDEKLTFDLTLCGSTLRAPHSCHLQYMENMDSIASLVMAVVINEGEDESGGPEQQQQQLKRKRLWGLVVCHNMTPRFVPCPLRYACEFLMQVFAIHVNKEFELENQIREKNILRTQTMPCDMLLRDAPLGIVTQSPNIMDLVKCDGAALLYNNKIWRLGFTPTESQIHDISIWLSEYHTDSTGLSTDSLRDAGYPDALALGDVVCGMAAVRISPKDMLFWFRSPTAAEVRWGGAKHDPCDKDDGRRMHPRSSFKAFLEVVKTRSLPWKDYEMDGI

SEQ ID NO: 9044 - protein, 393 aa, Degeneria vitiensis
DLEPVNPADVPVTAAGALKSYKLAAKAISRLQSLPSGNISLLCDVLVREVSELTGYDRVMAYKFHEDEHGEVIAESRRSDLEPYLGLHYPATDIPQASRFLFMKNKVRMICDCSAPPVKVIQDKRLAQPLSLCGSTLRAPHGCHTQYMANMGSISSLVMSVTINEDDDDMLSEQQQKGRKLWGLVVCHHTSPRFIPFPLRYACEFLIQVFGIQLNKEVELAAQMREKHILRMQTVLCDMLLRDTPVGIITQSPNVMDLVNCDGAALYYRNQFWLLGTTPTEAQIRDIAGWLVEYHDGTTGLSTDSLTEAGYPSAADLGDDVCGMATVKITSKDFLFWFRSHTGKEIKWGGAKHDPVDKDDDGRKMHPRSSFKAFLEVVKQRSLPWEDVEMDAI

SEQ ID NO: 9045 - protein, 388 aa, Drimys winteri
PMTAAGALQSYKLAAKAIARLQSLPGGSLKRLIDTVVLEVFELTGYDRVMAYKFHEDDHGEVISEVTKPDLEPYLGLHYPATDIPQAARFLFMKNKVRMICDCNAKPVKVYQDEKLTFDLTLCGSTLRAPHSCHLQYMENMGSIASLVMAVVINEREEQDENSGSEQQREQPRRKRLWGLVVCHNTTPKFVPFPLRYACEFLAQVFAIHVNKELELENQIQENNILRTQTLLCDMLMRAALLGIVTQSPSILDLVKCDGASLLYQNKIWRLGVAPTESQILDIALWLSEYHMDSTGLSTDSLQDAGHPGALSLGDVVCGMAAVRINSKDTLFWFRSHTAAEIRWGGAKHDPNQKDDGRKMHPRSSFKAFLEVVKTRSSPWADYEMDAI

SEQ ID NO: 9046 - protein, 394 aa, Drimys winteri
DLEPVNPVDVPVTAAGALKSYKLAAKAISKLQYLPSGNISLLCDVLVREVSELTGYDRVMAYKFHGDEHGEVIAECRRSDIEPYLGLHYPATDIPQASRFLFMKNKVRMICDCTARPVKVIQDKKLAQPLSLCGSALRAPHGCHAQYMANMGSIASLVMSVTISEDDDEASTEEQRQKGRKLWGLVVCHHVTPRFVPFPLRYACEFLIQVFGIQLNKEVELEAQLREKNMLRTQTMLCDMLLRDAPVGIVTQSPNVMDLVKCDGAALYYRNQFWLLGITPTEAQIRDIAEWLLEYHNSTTGLSTDSLMEAAYPGASILGDAVCGMAAVKITCKDFLFWFRSHTAKEIKWGGAKHDPGDKDGDGRKMHPRSSFKAFLDVVKQRSLPWEDVEMDAI

SEQ ID NO: 9047 - protein, 392 aa, Eupomatia laurina
PYEVPMTAAGALQSYKLAAKAIARLQALPSGSLEKLIDTVVQEVFELTGYDRAMAYKFHDDDHGEVISEITKPGLEPYLGLHYPATDIPQAARFLFMKNKVRMICDCYAKPVNVYQDEKLAFDLTLCGSTLRAPHSCHLQYMENMGSIASLVMAVVINDGEDEDESTGSGLQPPLLKKKRLWGLVVCHNTTPRFVPFPLRYACEFLMQVFAIHVNKELELENQICEKNILRTQTLLCDMLLRDAPLGIVTQNPNIMDLVKCDGVALLYDNKFWRLGLTPTESQMRDISAWLSEYHMDSTGLSTDSLYDAGYPGALALGDVVCGMAAVRITSKDMLFWFRSHTAAEVRWGGAKHDPNDKDDGRRMHPRSSFKAFLEAVKTRSLPWKDYEMDAI

SEQ ID NO: 9048 - protein, 393 aa, Eupomatia laurina
DLEPVNPADVPVTAAGALKSYKLAAKAISRLQSLPSGNISLLCDVLVRELSELTGYDRVMAYKFHEDEHGEVIAECRRLDLEPYLGLHYPATDIPQASRFLFMKNKVRMICDCSAPPVKVIQDKRLEQPLSLCGSTLRAPHGCHAQYMANMGTIASLVISVTINEDDDETPGEQQQKGRKLWGLVVCHHMSPRFVPFPLRYACEFLIQVFGIQLNKEVELAAQTREKHILRMQTMLCDMLLRDTPIGIVTQSPNVMDLVKCDGAALYYQNQFWLLRTTPTETQIRDIIGWLLEYHGDTTGLSTDSLTEAGYPGAADLGDDVCGMAAVKISSKDFLFWFRSHTAKEIMWGGAKHGPVDKDDDGRKMHPRSSFKAFLEVVKRQSLPWEDMEMDAI

SEQ ID NO: 9049 - protein, 352 aa, Xanthomonas axonopodis pv. citri str. 306
MSTAHAYAAQAADQPLAPFVFERRAPGPNDVQIDIAYCGVCHSDLHTARNEWHNTLYPSVPGHEIVGRVTAVGNAVTGFKVGDLAGVGCMVDSCRSCASCQEGEEQYCEAGFTGTYNGPMFGGGENTYGGYSDHIVVDQKYVLRITHSDNLAAVAPLLCAGITTYSPLAHWKVGPGQKVGVVGLGGLGHMAVKIAKAMGATVVLFTTSESKRADALRLGASEVVISKDEAQMAAQYNTLDFILNTVAAPHNLDPFLNALKRDGAIVLVGVPEQSHPSPAVFNLVMKRRTLAGSLIGGIRQTQEMLDFCAKHNIVSDIETIRADQINEAYERMLKSDVKYRFVIDMATLDQAA

SEQ ID NO: 9050 - protein, 493 aa, Xanthomonas axonopodis pv. citri str. 306
MSRKQAFQFLDLPRTMPTRIPVELRTSGDWGELYGRFDKADAQYQAGRCLDCGNPYCSWKCPVHNAIPQWLQLVQEDRIIEAAALCHSTNPLPEVCGRVCPQDRLCEGSCTLEEFGAVTIGAVEKYIVDTAFKMGWRPDLGNVQASGHRVAVIGAGPAGLACADRLARAGIEAVVYDRYEQIGGLLQFGIPSFKLDKSVIGKRREILEGMGVQFRLGVEVGRDVSIEQLLGEYDAVFLGTGAYRYTDGGLPGQDLKNVLPALPFLVQNSRIVSGNDPHGRPIAGWEDQLALPDLTGKRVVVLGGGDTGMDCVRSAIRLGAAKVTCAYRRDEASMPGSAREVANAREEGVRFLFNRQPLSIESGADDEAIGVTVVETKLGEPDASGRRNAVPVEGSESLLEADVVIIAFGFSPTLPDWLASQGVDAGSNGRIVAPSDGNGRLPYQTTNPRLFAGGDCVRGADLVVTAVAEGRDAAGSIVQLLGVKAQVKEPAAA

SEQ ID NO: 9051 - protein, 131 aa, Haemophilus segnis
SFCERVISGEWKGYTGKAITDVINIGIGGSDLGPYMVTEALRPYKNHLTMHFVSNVDGTHIAETLKKVNPETTLILVASKTFTTQETMTNALSARDWFLAAAKDPAHVAKHFAALSTNAKAVAEFGIDTNN

SEQ ID NO: 9052 - protein, 131 aa, Actinobacillus actinomycetemcomitans
SFCERVISGEWKGYTGKAITDVINIGIGGSDLGPYMVTEALRPYKNHLTMHFVSNVDGTHIAETLKKVNPETTLVLVASKTFTTQETMTNANSARDWFLATAKDEKHVAKHFAALSTNAKEVEKFGIDTDN

SEQ ID NO: 9053 - protein, 131 aa, Pasteurella multocida
DFCHRVISGEWKGYTGKAITDVVNIGIGGSDLGPYMVTEALRPYKNHLNLHFVSNVDGTHIAETLKKVNPETTLFLVASKTFTTQETMTNAHSARNWFLTTAKDESHVAKHFAALSTNSKAVAEFGIDTNN

SEQ ID NO: 9054 - protein, 333 aa, Zea mays
  unsure (1)..(333): unsure at all Xaa locations
MIRAVSSNASDNVYCTLLAHSALHGAMAGYTGFTVAPVNGRHAYIPFYRITLLDLKDPFPAAANSGAKASSASKWATKKKLVGGDAGYVLEDVPHLTDYMPQLPSPILLVCHVGFLTTYPNPLQDNPAYSVVKQYFVNPDDTVTQKIVVHKTSARGTHFRRAGPRQRVYFQSDEVNAAIVTCGGLCPGLNTVIRELVCGLYDMYGVSSVVGIEGGYKGFYSKNTXVALTPKSVNDIHKRGGTVLGTSRGGHDTAKIVDCLQDRGINQEVRRRGLKCSVVGVPKTIDNDIAVIDKSFGFDTAVEEAQRAINAAHVEAESAENGIGVVKLMGPHQ

SEQ ID NO: 9055 - protein, 306 aa, Streptococcus mutans UA159
MPSKKVRKAVIPAAGLGTRFLPATKALAKEMLPIVDKPTIQFIVEEALKSGIEDILVVTGKSKRSIEDHFDSNFELEYNLEQKGKTDLLKLVNDTTAINLHFIRQSHPRGLGDAVLQAKAFVGNEPFVVMLGDDLMDITDDKAIPLTRQLMNDYEETHASTIAVMEVPHEDVSAYGVIAPQGEGVSGLYSVDTFVEKPAPKEAPSNLAIIGRYLLTPEIFTILETQEPGAGNEVQLTDAIDTLNKTQRVFAREFKGKRYDVGDKFGFMKTSIDYALKHPQVKEDLKAYIIELGKKLDQKSTQKNSD

SEQ ID NO: 9056 - protein, 414 aa, uncultured bacterium 578
MPTQKNVELPDIGDFDSVDVIEVLVKVGDVINENDSIITLETDKATMEIPAPFAGKVTTLSIKVGDKIAKGELILTLESESEEIKSELDQVEGKSENVEKTIKQEDIEVKPDNSETPQDSIKNNDEPQEELSVKTEIDSHASPSIRKLARELGVSLAKIKGTGQKGRILDKDLKSFVKQIVSHGSTDDEVEIVPLSRIKKISGKHLAKCWSTIPHVTQFDEVNIEQMEKFRLHQKERNIKLSPLVFIMKAVVQTLKRHPNFNASLDESGENLVIKKYFNLGIAVDTPNGLVVPVVRNVGKKSLIELSDELTEISSRAREGLLEANEMKGASFTISSLGGIGGTQFTPIINSPEVAILGVSRSQIKPIWNGDSFEPTATLPLALSYDHRVIDGAEGARFMAELNQILRNIMEMLL

SEQ ID NO: 9057 - protein, 466 aa, Escherichia coli
MPHSYDYDAIVIGSGPGGEGAAMGLVKQGARVAVIERYQNVGGGCTHWGTIPSKALRHAVSRIIEFNQNPLYSDHSRLLRSSFADILNHADNVINQQTRMRQGFYERNHCEILQGNARFVDEHTLALDCPDGSVETLTAEKFVIACGSRPYHPTDVDFTHPRIYDSDSILSMHHEPRHVLIYGAGVIGCEYASIFRGMDVKVDLINTRDRLLAFLDQEMSDSLSYHFWNSGVVIRHNEEYEKIEGCDDGVIMHLKSGKKLKADCLLYANGRTGNTDSLALQNIGLETDSRGQLKVNSMYQTAQPHVYAVGDVIGYPSLASAAYDQGRIAAQALVKGEATAHLIEDIPTGIYTIPEISSVGKTEQQLTAMKVPYEVGRAQFKHLARAQIVGMNVGTLKILFHRETKEILGIHCFGERAAEIIHIGQAIMEQKGGGNTIEYFVNTTFNYPTMAEAYRVAALNGLNRLF

SEQ ID NO: 9058 - protein, 468 aa, uncultured bacterium 578
MIKTQVLVIGSGPGGYTAAFRAADLGKEVVLVEKYKSLGGVCLNVGCIPSKSLLHTAQIINEAKHASQLGISFGDTKIDINGVRKNKESIVNKLTAGIQALAKARKVKVVTGHAKFLSKNQVGLEGTDEVIEFEHCIIAAGSRVTKLPMFPFNDERVMDSTDALMLDDIPKRLLVVGGGIIGLEMATIYDALGSEITIVELEGQIIPAADKDIVSPLLKRIKKNYANIFLNTKVTKMTASKKRIKVNFEGKDAPKTDTFDKVLVAVGRSPNGQMIGAENAGVNVDQNGFISANNQMQTNVDNIFAIGDIVGQPMLAHKATHEAKVAAEVICGQKSGFDALTIPSVAYTDPEVAWTGKTEKELTEEGIKFDKGVFPWAASGRSLSIGRSEGVSKGLFDAKSGKILGMGICGTNAGDLISEASLAIEMGCDMSDIALTIHAHPTLSETTAFAAEMVEGTITDLMPPKKKK

SEQ ID NO: 9059 - protein, 136 aa, Haemophilus influenzae
EDPTPALEGADVVLISAGVARKPGMDRSDLFNINAGIVRGLIEKVAVTCPKACVGIITNPVNTTVAIAAEVLKKAGVYDKRKLFGVTTLDVLRSETFVAELKGLNVSRTSVPVIGGHSGVTILPLLSQVQYAKWNE

SEQ ID NO: 9060 - protein, 268 aa, Zea mays
MAAPMSAIDSAWQLLIANFTEFQLATVVTFLLHETVFFLSGLPSLLFERFGLFAKYKIQKKSNTSAYQNRCVLRLILYHVCVNLPVMIFSYPAFKFMGLRSSLPLPHWSVVVSQVLFYFVLEDFIFYWGHRALHTKWLYKHVHSVHHEYATPFGLTSEYAHPAEILFLGFATVVGPALTGPHLFTLWLWMVLRVLETVEAHSGYHFPWSPSNFLPLYGGSDFHDYHHRVLYTKSGNYASTFVYMDWLFGTDKDYRKAKTIEEKEGKNL

SEQ ID NO: 9061 - protein, 364 aa, Neurospora crassa
MSTEAKKTMKAVVFEGPKKVSVQERPIPEVQDPRDIIVKVQMTALCGSELHTYRGREASTPGFIMGHEFTGVAHAVGSSVKTIKVGDKVVAPFTVSCGTCFYCLHGFSSRCASSLLFGSPGLDGGQAEYVRIPLADGTAVVAPPEIEDERALVLMADIFPTGYFGAKNAFKLMHDLNPEEATVVVVGCGPVGLCAVVSALEYKPKHLFAVDCVESRLALAKELGAEPLNFAEVEKGGVGLEGMVKRIKEVTEGRGADAVVEVVGSRPALKTAYELLRPFGVISSIGVQGHYDLPWSGEDGYNKNLRVQMGRCPVRSIFPEALEVMGRNQHKFGFMYDKIMPLAEAVEGYDLFDNMKVQKVIFTP

SEQ ID NO: 9062 - protein, 118 aa, ASPERGILLUS NIDULANS FGSC A4
MAKLFIGGLAWHTTDDVLREGFSRYGTIEEAVVVKDRDTNRSRGFGFVRFASEPEADAAMGAMNNQEFDGRIIRVDKASERPAARNGGFQGRGGYNSPADGGYRGGGAGGWRNQAPGP

SEQ ID NO: 9063 - protein, 396 aa, Hedycarya angustifolia
DLEPVNPADVPVTAAGALKSYKLAAKAISKLQSLPSGNISVLCDVLVREVSELTGYDRVMAYKFHDDEHGEVIAECRRSNLEPYLGLHYPATDIPQASRFLFMKNKVRMICDCSAPPVKVIQDKSLAQPLSLGGSTLRAPHGCHAQYMANMGSIASLVMSVTINEDDDETSSGSEQQQQKGRKLWGLVVCHHTSPRFVPFPLRYACEFLIQVFGIQLNKEVELAAQMREKHILRTQTVLCDMLLLDAPVGIITKTPNVMDLVKCDGAALYYLNQFWLLGTTPTEAQIRDIVSWLQEYHNGSTGLSTDSLMEANYPGAFVLGDAVCGMAAVRITSKDFLFWFRSHTAKEIKWGGAKHNIVDKDDDGRKMHPRSSFKAFLEVVKRRSLPWEDIEMDAI

SEQ ID NO: 9064 - protein, 347 aa, Chloroflexus aurantiacus
MRAARLHEYDEHLNVQLQLEDVPLPKITKPGDVIVRIGAAGLCRTDLHIIEGVWKDIQDPQRTLLPYILGHENAGWVEEVGPGVTSVKVGDPVICHPLRSCGVCLGCRRGEDMYCEHGSFPGLNCDGGFAEYMLTNERALIKLNPNVAPVDVAPLADAGITAYRVAKKAARKLNPGQYCVILGVGGLGHIALQSVRELCGARIIAIDRSEAARQLARNLGAHYVLDGSDTIVQEVKELTHGGAHVVIDFVGELGAEQVSWQMLRQGGTHFVVGYGGAVHVPTVHMIITEIAIEGSLVGNYVELVELMELNAEGRVKLHGQQYRLDQINQAIDDFKNRRIAGRAVIVP

SEQ ID NO: 9065 - protein, 398 aa, Hernandia lychnifera
DFEPVKPYEVPMTAAGALQSYKLAAKAIARLQSLSSGSMQKLVDTVVEEVYELTGYDRVMAYKFHDDDHGEVISEIKKPDLEPYLGLHYPATDIPQASRFLFMKNKVRMICDCNMKPVKVYLDEKLTYDLTLCGSTLRAPHSCHLQYMANMGSIASLVMAVVINEGEEERIAQKLHNHHHSQKRKRLWGLVVCHHTTPRFVPFPLRYACEFLMQVVAIHVNKEFELENQIQEKNILRTQTLLCDMLLRDAPLGIVTQSPNIMDLVKCDGAALLYGNKIWKLGTTPTELQIRDISLWLSEYHMDSTGLSTDSLYDAGYPGALSLGDAICGMAAVTITPKDFLFWFRSHTAAKVRWGGAKHDPTDKDDGRTMHPRSSFKAFLEVVKTRSLPWKDYEMDAI

SEQ ID NO: 9066 - protein, 552 aa, Caulobacter crescentus CB15
MYQYDLIDKEFLADRSAEFRGQVARRLSGELTEDQFKPLRLMNGLYLQLHAYMLRVAIPYGSLNSTQARRLAQIARDFDKGYGHFTTRQNIQFNWIKLKDAPEILDKLAEVDLHAIQTSGNCIRNTTSDPYAGATAEEVDDPRVWSEVIRQWSTLHPEFSFLPRKFKIAITASAKDRTAAKVHDIGLMLRKGRDGTLGFEVIVGGGQGRTPYVGPTINEFLPTDRLLSYLEAVLRVYNRHGRRDNIYKARIKILVAALGAEEFARQVDEEWAKIDAARADLPTAELARIRAAFAKTPFETLPARSDAFETAKANDAAFARFVRNNVKPHKQPGYAIVEVSLKAQEQTPGDASAQQLEVVADLAERFSLNDLRVTHAQNLVLPHVKLDDLPTVFATLQASNLATPNIDLVSDIIACPGLDYCALANARAIPVAQDIARQFADLDRAEKVGELKIKISGCINACGHHHVAHIGILGVDKKGEEFYQLSLGGSGAEDASIGKILGPALPADKVATAVDQLVGAYLNVRNDGERFLDTYRRVGLEPFKEAVYAQAD

SEQ ID NO: 9067 - protein, 345 aa, Hernandia lychnifera
DLEPVNPAEVPVTAAGALKSYKLAAKAISLLLSLPSGNISVLCDVLVCEVSDLTGYDRVMAYKFHEDEHGEVIAECCRPDLEPYLGLHYPATDIPQASRFLFMKNKVRMICDCSAFPVKVVQDKRLAQPLSLCGSTLRAAHGCHAQYMANMDSVASLMMSVTIIEDDDEVGSDPQQQQKGRKLWGLVVCHHTSPRFVPLPLRYACELLIQVFGMQLNKEVELANQMREKHILRMQAVPCDMLLRDTPVGIMTRSPNIMDLVKCDGAALYYHNQFWLLGINPTEAQIRDIARWLLERHNGSTGLSTDSLMEAGYPGASFLGNAVCGMAAVRISSNDFLSWFRSHTA

SEQ ID NO: 9068 - protein, 392 aa, Houttuynia cordata
  unsure (1)..(392): unsure at all Xaa locations
DLEPVNPSDVPVTAAGALKSYKLAARAISRLQSLPSGDISLLCDVLVREVSDLTGYDRVMAYKFHEDEHGEVVAECKRADLEPYLGLHYPATDIPPASRFLFMKNKMRMICDCLAQPVKVIQDKRLPQPLSLAGSTLRAPHGCHAQYMSNMGSIASLVMSVVVSEGDDDSNNGEKTGRKLWGLVVCHHTSPRFIPFPLRYACEFLIQVFAIQLSKEVELAAQMKEKHILRMQTVLCDMLLRDAPMGIXTQSPNVMDLVKCDGAALYYRCQCWLLGTTPTENQIRDLAEWLLQYHNSSTGLSTDSLVDAGYPGAHELGDAVCGMAAIRITSRDFLIWFRSHTAKEIKWGGEKHDPSDKDAFESKMNPRTSFKTFLEVVKRRSLPWEDVEMDAI

SEQ ID NO: 9069 - protein, 414 aa, Idiospermum australiense
SGKPFYAIIHRVTGSLIIDFEPVKPYEAPMTAAGALQSYKLAAKAITRLQSLPSGSMERLVDTVVQEVFELTGYDRVMAYKFHEDDHGEVISEITKPGLEPYLGLHYPATDIPQAARFLFMKNKVRMICDCHARPVKVYQDEKLTFDLTLCGSTLRAPHSCHLQYMENMDSIASLVMAVVINEGEEDDEVESAQQQQQKRKRLWGLVVCHNTTPRFVPFPLRYACEFLMQVFAIHVSKEFELENQLREKNILRTQTLLCDMLLRDAPLGIVTQSPNIMDLVKCDGAALLYGSKIWRLGLTPTDSQIQDIAMWLSEYHMDSTGLSTDSLYDAGYPKALSIDDVVCGMAAVRITAKDMLFWFRSHAAAEVRWGGAKHDPSDKDDGRRMHPRSSFKAFLEVVKTRSLPWKDNEMDAI

SEQ ID NO: 9070 - protein, 477 aa, Sinorhizobium meliloti 1021
MTLHQNLIAGEWVGGDGVANINPSNTDDVVGEYARASAEDAKAAIAAAKAAFPAWSRSGILERHAILKKTADEILARKDELGRLLSREEGKTLAEGIGETVRAGQIFEFFAGETLRLAGEVVPSVRPGIGVEITREPAGVVGIITPWNFPIAIPAWKLAPALCYGNTIVFKPAELVPGCSWAIVDILHRAGLPKGVLNLVMGKGSVVGQAMLDSPDVQAITFTGSTATGKRVAVASVEHNRKYQLEMGGKNPFVVLDDADLSVAVEAAVNSAFFSTGQRCTASSRIIVTEGIHDRFVAAMGERIKGLVVDDALKPGTHIGPVVDQSQLNQDTDYIAIGKQEGAKLAFGGEVISRDTPGFYLQPALFTEATNEMRISREEIFGPVAAVIRVKDYDEALAVANDTPFGLSSGIATTSLKHATHFKRNAEAGMVMVNLPTAGVDFHVPFGGRKASSYGPREQGKYAAEFYTNVKTAYTLA

SEQ ID NO: 9071 - protein, 395 aa, Idiospermum australiense
DLEPVNPADVLVTAAGGLKSYKLAAKAISKLQSLPSGNISLLCDVLVREVSELTGYDRVMAYKFHEDEHGEVIAECRRSDLEPYIGLHYPATDIPQASRFLFRKNKVRMICDCLAPPVKVIQDKRLAQPLSLCGSTLRAPHGCHAQYMANMNSIASLVISVTVHEDDNETGSEQQQQPKGRKLWGLVVCHHTSPRFVPFPLRYACEFLIQVFGIQLNKEIELAAQMNEKHILRTQTVLCDMLQRNAPVGIITQTPNVMDLVKCDGAALYYRNQFWLLGTTPTEAQIRDIVEWLMEYHSSSTGLSTDSLMEAGYQGAAILGDAVCGMAAIRITSKDFLFWFRSHTAKEIKWGGAKHDPVDQDDDGRKMHPRSSFKAFLEVVKRRSLPWEDVEMDAI

SEQ ID NO: 9072 - protein, 197 aa, Oryza rufipogon
GQTPVFPRILGHEAGGIVESVGEDVTELAPGDHVLPVFTGECKECDHCKSEESNMCDLLRINVDRGVMIGDGKSRFTIKGKPIFHFVGTSTFSEYTVIHVGCLAKINPEAPLDKVCILSCGFSTGFGATVNVAKPKKGQTVAIFGLGAVGLAAMEGARLSGASRIIGVDLNPAKFEQAKKFGCTDFVNPKDHSKPVH

SEQ ID NO: 9073 - protein, 390 aa, Lactoris fernandeziana
PYEVPMTAGALQSYKLAAKAISRLQSLPSGSMERLVDTVVQEVFELTGYDRIMAYKFHEDDHGEVISEVTKPDLEPYLGLHYPATDIPQASRFLFMKNKVRMICDCRAKPVKVYQDEKLSFDLTLCGSTLKAPHSCHLQYMENMGFIASLVMAVVVNEGEEEVDSQESSQQQAPKRKRLWGLVVCHNTTPRFVPFPLRYACEFLMQVFAIHVNKEFELENQILEKNILRTQTLLCDMLFRDAPMGIVTQSPNIMDLVKCDGAVLLYQNKVYRLGLAPTESQIHDIAQWLSEYHKDSTGLSTDSFHDAGYTRARSLGDIVCGMAAVRINSGDMLFWFRSHTAAEVRWGGAKHDPDEKDDGRRMHPRSSFKAFLEVVKYRSFPWKDYEMDAI

SEQ ID NO: 9074 - protein, 457 aa, Eremothecium gossypii
MSYNNKKRNGSFKRRNGGDYYFPNKRPHHHHQPTGTTSRYNNQVRPPTEPEPAAPAPADVATSAAVAATRQSRFQPHRALPKAPRQVSRYNNGNLPAPPAGPASLRVPATIITHTHSVESSYQRITQVGEGTYGKVYKCRNIYTNKLVALKKLRLETERDGFPITSIREIKLLQHCQHENVSTIAEIMCEAQKTVYMIFEYADNDLSGLLMNKEIHFSDANCKHLFRQLLKGMEYLHECRILHRDIKGSNILIDNRGNLKITDFGLARKMKQEPDYTNRVITLWYRPPELLLGTTRYGTEVDMWGCGCLLVELFLKAAFFQGTNELEQLRCIFQVLGTPTIEQWPGLFDMPWWFMMIPQQKENYPSRFDEKVSGVLPTQSCRDLARGLLLYDQKKRFSASEALKSAYFYELPRPEPLNLGDFDGCHEFEARRQRRKEREETKKAAAASASSASKKSA

SEQ ID NO: 9075 - protein, 341 aa, Lactoris fernandeziana
DLEPVNPSDVPVTAAGALKSYKLAAKAISRLQSLPSGNIPLLCDVLVREVSDLTGYDRVMAYKFHEDEHGEVIAECKRSDLEPYLGLHYPATDIPQASRFLFTKNKVRMICDCSARPVKVIQDKRLAQPLSLGGSTLRAPHGCHAQYMLNMGSVASLVMSVTISEDDDDSASEQKGRKLWGLVVCHHTTPRFIPFPLRYACEFLIQVFGIQLNKEVELAAQVREKHILRTQTVLCDMLLRNAPVGIMTKSPNVMDLVNCDGAALYYRNRCWFLGTTPTESQIRDLAEWLLQYHNSTTGLSTDSLVEAGYPCAHGFGEAVCGMAAVKITSRDFLFWFRSHTA

SEQ ID NO: 9076 - protein, 454 aa, Haemophilus somnus 2336
MTIKTPVQATLASNQYFLDRQDIMESNVRSYPRKLPFAYQKAQGVWVTDVEGNEYLDFLAGAGTLALGHNHPKLIQAIKDVLDSGLPLHSLDITTPLKDAFTEELLSFFPKDKYILQFTGPSGADANEAAIKLAKTYTGRGNVIAFSGGFHGMTHGALSLTGNLGAKNAVQGLMPGVQFMPYPHEYRCPFGIGGEAGVKAVEHYFENFIEDVESGVVKPAAVILEAIQGEGGVVPAPISFLQKVREVTQKHGILMIVDEVQAGFCRSGKMFAFEHANIEPDIVVMSKAIGGSLPLAVLAIKKEFDAWQPAGHTGTFRGNQLAMATGYVSLKIMREENLAQNAKERGEYLTKALTELSQEFPCIGNVRGKGLMMGIDIVDEHQAKDATGAYPRDCDLAVAIQKYCFKNKLLLERGGRGGNVVRVLCAVNITQAECEEFIKRFKQSVAEAVKAVRG

SEQ ID NO: 9077 - protein, 197 aa, Oryza nivara
GQTPVFPRILGHEAGGIVESVGEGVTELAPGDHVLPVFTGECKECDHCKSEESNMCDLLRINVDRGVMIGDGKSRFTIKGKPIFHFVGTSTFSEYTVIHVGCLAKINPEAPLDKVCIFSCGFSTGFGATVNVAKPKKGQTVAIFGLGAVGLAAMEGARLSGASRIIGVDLNPAKFEQAKKFGCTDFVNPKDHSKPVH

SEQ ID NO: 9078 - protein, 393 aa, Lemna gibba
DLEPVNPSDVPVTAAGALKSYKLAAKAISRLQSLPSGNISLLCDVLVREVKDLTGYDRVMAYKFHEDEHGEVVSECRGSDLEPYLGLHYPATDIPQASRFLFLKNKVRMICDCSAQPVRIIQDKRLSQPLSLCGSTLRAPHGCHAQYMKNMGSIASLVMSVTINDEGVDHGGEEQQKSRKLWGLVVCHHSSPRFIPFPLRYACEFLMQVFAIQVNKEVEIAAQKREKHILKTQTFFCDMLLREAPVGIFTQSPNVMDLVKCDGAALYYRNQFRLLGVTPTEAQIKDLCDWLMDWHNNTTGLSTDSLSEAGFPGASSLGDAVCGMAAIKITGKDFVFWFRSHVAKEIKWGGAKDESVGRSEEGRKLYPRSSFQAFLEIVKRRSLPWEDVEMDAI

SEQ ID NO: 9079 - protein, 461 aa, Arabidopsis thaliana
MAKNVGILAMDIYFPPTCVQQEALEAHDGASKGKYTIGLGQDCLAFCTELEDVISMSFNAVTSLFEKYKIDPNQIGRLEVGSETVIDKSKSIKTFLMQLFEKCGNTDVEGVDSTNACYGGTAALLNCVNWVESNSWDGRYGLVICTDSAVYAEGPARPTGGAAAIAMLIGPDAPIVFESKLRASHMAHVYDFYKPNLASEYPVVDGKLSQTCYLMALDSCYKHLCNKFEKIEGKEFSINDADYIVFHSPYNKLVQKSFARLLYNDFLRNASSIDEAAKEKFTPYSSLTLDESYQSRDLEKVSQQIAKPFYDAKVQPTTLIPKEVGNMYTASLYAAFASLIHKKHNDLAGKRVVMFSYGSGSTATMFSLRLNDNKPPFSISNIASVMDVGGKLKARHEYAPEKFVETMKLMEHRYGAKDFVTTKEGIIDLLAPGTYYLKEVDSLYRRFYGKKGEDGSVANGH

SEQ ID NO: 9080 - protein, 355 aa, Gloeobacter violaceus PCC 7421
MRGLILSGGKGTRLRPLTYTGAKQLVPVANKPILWYGIEAMVASGIREIGIVISPETGEQVRALTGDGSRFAAQIEYILQSEPGGLAHAVRTARPFLGESSFAMYLGDNLIQSGLAAPIERFEASRPEALILLKRVSNPTAFGVAELDGQGRVMRLVEKPKIPPSDLALVGVYLFSSQIHAAIDAIRPSARGELEITDAIQQLIEVGQRVESVELTGWWLDTGKKDDLLEANRVILDEQMHCPMEGSLDEASKVSGRVCIGKGARLVRSMVRGPVTIGPECLIEDSYIGPYTSIAGGVQLKNVDIEHSVVMEKTCISGAGRIVDSLIGQRTVIARHNGKPEAHRFLLGDDSLIEL

SEQ ID NO: 9081 - protein, 419 aa, Eremothecium gossypii
MSLTAFNQLEILPPDALFDVKKRLTQDTRSFKVDLGLGAYRDENGKPWVLPCVREAEKQLMADPGYNHEYLGIAGLEEFRAAAARVLLGEDSEALAEGRVVSVQSISGTGALHVAAKLLAKTVPDATVYMSDPTWGNHFAVFETQGLRTATYPYWDAATRSLDMEGVLGALGAAPRGSVFVLHACAHNPTGLDPNEEQWVQILDAVAAREHTVLFDSAYQGFASGSLARDAYALRAGLRRLAEVTPVLVCQSFAKNIGMYGERVGALHVVLPRQPAESLAHVKAAVLSQLSHITRSELSNPPAYGAKIVTKVLTTPELAAQWKKDMITMSSRIARMRRVLRDRLVELGTPGNWDHIVQQCGMFSYTGLTKEMVARMEKDFAIYMVSSGRISIAGLNDSNVGHVANAIDNAVRHFSTPKL

SEQ ID NO: 9082 - protein, 418 aa, Porphyromonas gingivalis W83
MTIEQFNFAGKKAFVRVDFNVPLDDNFKITDDTRIRAALPTLRKIIADGGMTIIGSHLGRPKGVAPEFSLRHILPHVSELLGVDVLFADDCIGADAMDKAAKLKAGQVLLLENLRFYAEEEGKPRGLSDDASDEEKAAAKKAVKAAQKEFTQKLASMADCYVNDAFGTAHRAHASTALIADYFDRDHKMFGYLMEKEVKAVERVLHDIKRPFTAIMGGSKVSTKIEIIENLLNKVDNLILTGGMTYTFTKAAGGRIGLSIVEDDKLDLARDIVKKAAEKGVNLILSVDTKVADRFDNDAATQVCSNMEIPDDWMGMDIGPRSIEKFRKVILESKTILWNGPTGVFEFDNFSIGSKAVGEAIVEATANGAFSLVGGGDSVACVNKFGLADKVSYVSTGGGALLEAIEGKTLPGIAAIQG

SEQ ID NO: 9083 - protein, 551 aa, Agaricus bisporus
MTGSLASNYASWKQLQEIYDKDRAKIVLRDLFAADPQRFSKLSATYNSQSGPGVQILLDYSKHLVTEPILQKLFNLLREAKVEDARDKMFSGEHINTSEDRAVLHVALRNFNDFSIKEEGVDEVSKVLQHMKEFSESVRSGQWKGYTGKTINTIVNIGIGGSDLGPVMVTEALKPFSKRDLNAHFVSNIDGTHIAETLRLCDPERTLFIVASKTFTTQETITNAESARDWFLGFAKDKAHVAKHFVALSTNTSAVTAFGISEANMFQFWDWVGGRYSLWSAIGLSIALVIGFDNFEKLLRGAHAMDQHFKTTPLEKNLPAIMAALGIWCNDFYGAQTLALLPYDQYLHKFADYFQQGDMESNGKFITKNGDRVNYQTGPIIWGASGTNGQHSFYQLIHQGTKIIPADFMAPATSHNPIANSKHHRILLSNFFAQPEALAFGKTEEEVRKELGQNASEALVKSKVFEGNRPSSSLMFDKLDPATLGALIALYEHKIFVQGVVWGINSFDQMGVELGKVLAKQILAQLDKSDDVKGHDSSVRHLPFILQVDHC

SEQ ID NO: 9084 - protein, 231 aa, Streptococcus mutans UA159
MNKPIIGISGNERPHAKFPDITWSYTPSGYVKGVQEAGGLPLVIPISDPSFAEYYVSMIDKLILTGGQNVDPVFYGEDKDTSDNDFYLARDLFEFALVEETIKQEKPIFSVCRGTQLMNIALGGSLNQDIEHHWQDAPTDYLSQNMLIKPDTALEKIYGTSTSINSFHHQSIKRLADDLEIIAYDPTDDTIEAVTSRNSDITFLGVQWHPELLLESRKEDRELFNYVVREL

SEQ ID NO: 9085 - protein, 450 aa, Streptococcus pyogenes MGAS8232
MVIPYDYIVIGGGSAGIASANRAAMHGAKVLLAEGKEIGGTCVNLGCVPKKVMWYGAQVADILGTYAKDYGFDFKEKAFDFKQLKANRQAYIDRIHASYERSFEQNGVDRIYDYAVFKDAHTVEIAGQLYTAPHILIATGGHPVFPDIEGAQYGISSDGFFALDEVPKRTAVVGAGYIAVELAGVLHALGSKTDLFIRHDRPLRSFDKAIVDVLVEEMTVGGPCLHPHSEVAKVVKNTDESLTLYLKDGQEVEVDQLIWAIGRKPNLEGFGLDKTGVTLNDKGYIETDAYENTSVKGIYAVGDVNGKLALTPVAVAAGRRLSERLFNNKTDEKLDYQNVATVIFSHPVIGSVGLSEEAAVKQYGQEAVKTYQSRFTSMFTAITNHRQPCLMKLVTVGDTEKIVGLHGIGYGVDEMIQGFAVAIKMGATKADFDNTVAIHPTGSEEFVTMR

SEQ ID NO: 9086 - protein, 404 aa, Streptococcus pneumoniae TIGR4
MKEYNKSSKLEHVAYDIRGPVLEEAMRMRANGEKILRLNTGNPAEFGFTAPDEVIHDLIMNARDSEGYSDSKGIFSARKAIMQYCQLKKFPNVDTDDIYLGNGVSELIVMSMQGLLDNGDEVLVPMPDYPLWTAAVSLAGGNAVHYICDEAVEWYPDIDDIKSKITSNTKAIVLINPNNPTGALYPKELLLEIIEIARQNDLIIFADEIYDRMVMDGHVHTPVASLAPDVFCVSMNGLSKSHRIAGFRVGWMVLSGPKTHVKGYIEGLNMLSNMRLCSNVLAQQVVQTSLGGHQSVDELLLPGGRIYEQRNFIYNAIQDIPGLSAVKPKAGLYIFPKIDRNMYRIDDDEQFVLDFLKQEKVLLVHGRGFNWQEPDHFRIVYLPRVDELAQIQEKMTRFLKQYRR

SEQ ID NO: 9087 - protein, 400 aa, Bdellovibrio bacteriovorus HD100
MIQLSKRAQNLKPSPTLFLVAKAKELAAQGHDVISLTVGEPDWPTFKGASDAGIEAIQKGITKYTPANGTVELRKSISEKLKSELGFEYSPKEITVASGAKYIIFSALQMICSPGDEVVIATPYWVSYPAMVELADGVPHIVECGEMENFKITPEKLEAAINAKTKGFLFCSPSNPTGLQYSADELKALAEVLRKHPQVVIISDDIYNRLVFDGTKVAPHILTVAPDLKDRTVLVNGGSKAYSMTGWRIGWASGPERLITAMADYQSQSTGSPSSISQHALLAAIKTSEADIKGVVDKLVARKNSGLKELETVPGFKTAEPQGAFYFWVDIRAHLGKSYQDRVIRTSKDFCDVLLEKFFVATVPGAECGTEGFMRLSFAVSEETMKRGVARMKDLVSQLV

SEQ ID NO: 9088 - protein, 431 aa, Microbulbifer degradans 2-40
MKPLLRTLPLAALLLPSIALADDLNGANTAWILTATALVLFMTLPGLSLFYGGLVRTKNVLSVLMQCFAIACIASLIWFAFGYSLAFSEGNMIIGDLSKAFFNGMGKNSMSGDIPEPLFAMFQMTFVIITPALIVGAFAERMKFSSVLISTVLWIPLVYAPVCHWVWGGGWLASQFGVLDFAGGTVVHITAGVAALVTALMIGNRNGFPHTPMPPHNMTMTVTGAGMLWVGWFGFNAGSALSAGGDAAMAMLVTHISAAAGSLAWMTIEWLKFGKPSVLGIVTGMVAGLGTITPASGFVGPGGALVIGITAGVVCFYATQLIKRKLVIDDSLDVFPVHGVGGILGTMLAGVFASTSIGAFSGHGFADGIETMGAQVWSQFVGVITTIVFTAVMTYIIIKVTGWITGGIRVDKDEETQGLDLVLHDEAGYKL

SEQ ID NO: 9089 - protein, 391 aa, Magnolia x soulangeana
DFEPVKPYEVPMTAAGALQSYKLAAKAIARLQALSSGSMEKLVDTVVQEVFELTGYDRVMAYKFHEDDHGEVISEITKPGLEPYLGLHYPATDIPQAARFLFMKNKVRMICDCNAKPVKVYQDEKLTFDLTLCGSTLRAPHSCHSQYMENMSSIASLVMAVVINEGVDEEEGMEPAQQEQQQLKRKRLWGLVVCHNTTPRFVPFPLRYACEFLMQVFAIHVNKELELENQIQEKNILRTQTLLCDMLLRDALVGIRTQNPNIMDLVKCDGAALFYNNKIWRLGLTPTDSQMRDISVWLSEYHMDSTGLSTDSLYDAGYPGALALGDVVCGMAAVRINPKDMLFWFRSHTAAEVKWGGAKHDPSDKDDGRRMHPRSSFKAFLEVVKTKSLPW

SEQ ID NO: 9090 - protein, 358 aa, Magnolia x soulangeana
PFYAIVHRIDIGLVIDLEPVNPADVPVTAAGALRSYKLTAKAISRLQSLPSGNISLLCDVLVREVSELTGYDRVMAYKFHEDEHGEVIAECRGSDLEPYLGLHYPATDIPQASRFLFMENKVRMTCDCLAPPVKVIQDKKLAQPLILCGSTLRAPHGCHSQYMANMGSIASLVMSVTINEDDDDDTSVSNGRRRKLWGLVVCHHTSPSFVPFPLRYACEFLVQVFGIQLNKEVELPAQMREKHILRMQTVFCDMLLRDAPVGIITQSPNVMDLVKCDGAAFYYRNQFRLLGTTPTEAQIRDIAGWLLEYHDGTTGLSTDSLTEAGYPGAADLGDDVCGMAAIKITSKDYLFWFRSHTA

SEQ ID NO: 9091 - protein, 389 aa, Nelumbo nucifera
PYEVPMTAAGALQSYKLAAKAIARLQALPSGCMDRLCDTVVQEVFELTGYDRVMAYKFHEDDHGEVVSEITKPGLEPYLGLHYPATDIPQAARFLFMKNKVRMICDCRAKHVKVLQDEKLPFDLTLCGSTLRAPHSCHLQYMENMDSIASLVMAVVVNEGDEEGEASGSSQQQKRKKLWGLVVCHNTTPRFVPFPLRYACEFLIQVFAIHVNKEIELENQILEKNILRTQTLLCDMLMRDALLGIISQSPNVMDLVKCDGAALLYKNKIWQLGTTPTEFQIHDIASWLSEYHMDSTGLSTDSFYDAGFPGALSLGDAVCGMAAVRITSKDMLFWFRSHTAAEVRWGGAKHDPDEKDDGRRMHPRSSFKAFLEVVKTRSLPWKDYEMDAI

SEQ ID NO: 9092 - protein, 468 aa, Magnaporthe grisea 70-15
MNLLLSDDYLLQDYPENITNTIRSGHATCLRFNRKGDYLASGRVDGAVVVWDLDTMGVARKLRGHSKSVTSLSWSTCGRYLLSACQGWKAIIWDLRNGARHREVRFRAPVYIAEFNPRNPLQFVASIFEDQPVVVDATNPIDVKHILPCKPKRPATDDSALKDKWAKEDAKQMTTVAIYDSAGDYILAGTSKGWLNIIDAKTHEVIFSKKTCALVITTMRLTHNGKILLLNSQDRIIRTFHMPNLAAEDFDPDTIQLVDEHKFQDVVNRLQWNHVTFSATGEYVAASTYNNHELYIWERNHGSLVRMLEGTKEEQGTIEWHPHRAMLAACGLETGRINIWSVTSPQRWSALAPDFVEVEENVQYVEREDEFDILEQEEIAKRRLDLEDDDVEVLAMHANDGYTGDDTTFQVPILYNLGESDSEEEFVAVSTGTMRRRSPGDGEGDGSVDNRATAKKATTGKGRSRKKG

SEQ ID NO: 9093 - protein, 391 aa, Nelumbo nucifera
DLEPVNPADVPVTAAGALKSYKLAAKSISRLQSLPSGNISLLCDVLVREVSDLTGYDRIMVYKFHEDEHGGVVAECRRPDLESYLGLHYPATDIPQASRFLFMKNKVRMICDCLAPPVKVIHDKKLAQPLSLCASTLRVPHGCHAQYMANMGSIASLVMSVTINDDDNEMESDQPKGRKLWGLVVCHHTSPRFVPFPLRYACEFLVQVFGIQLDKEVELAAQLREKHILKTQTLLCDMLLRNAPVGIFTESPNVMDLVKCDGASLYYKNKFWLLGITPTEAQIRDIAGWLLEHHDGSTGLSTDSLMEAGYPGASVLGDAVCGMAAIKITSKDFLFWFRSHTAKKIKWGGAKHDPVVKDGGRKVHPRSSFKAFLEVVKRRSLPWEDVEMDAI

SEQ ID NO: 9094 - protein, 415 aa, Nymphaea odorata
GKPFYAIVHRVVSGLVMDFEPVKPSELPITAAGALQSYKLAGKAISRLQSLPGGSITRLCDTVVEEVHQLTGYDRVMTYKFHDDDHGEVVSEIRKPDLEPYLGLHYPATDIPQAARFLFMKNKVRMICDCRAKPVKVYQDENLKTDLTLCGSTLRAPHSCHLQYMENMSSIASLVMAVVINEGEDEGEDETDPNQRSQKRKRLWGLVVCHNTSPRFVPFPLRYACEFLAQVFAIHVNKEVELENQNALKKNILRTETLLCDMLLRGSPLGIVSQTPNIMDLVKCDGAAFLYGSKLYLLGRTPAESQIRDIAIWLSEYHKDSTGLSTDSLCEAGYPGALAIGSPVCGMAAVRITANDMLFWFRSHTASEIRWGGAKHDPEEKDDGRRMHPRCSFKAFLEVVKTRSLPWKDFEMDAI

SEQ ID NO: 9095 - protein, 370 aa, Bordetella bronchiseptica RB50
MSEQNRLLLIGGDGVGAEVVHEAGRIAQWFAARRGLPLSIGQAAFGVEVLNRTGRIMTDDTLAQIRAADAVLFGAIGGPEYDRLPLEQVREEGLLRIRRELGLYANLRPVRYWPALAELCPFVPERVEKVDMMIVRELAGGIYYASPRGIDQTGDGRRVGTNTQRYDDLEIRRIARVAFELARARGGRVCSVDKSNVLESGLLWREEVQACRDAEYPDVELEHILVDNCALQLCLRPARFDVLLADNLFGDILSDAAGAVAGSLGMLPSASFGAEDGGRRRGFYEPVHGSAPDIAGQGIANPLGAILSLALALRWTFRQPAEADLLERAVERALAGGARTLDLLAGAAAPALSTRAMADAVLQALETLAA

SEQ ID NO: 9096 - protein, 407 aa, Nymphaea alba
PFYGILHRIDVGLVIDLEPVNPTDVPVTAAGALKSYKLAAKAISRLQALPSGNIGLLCDVLVREVSELTGYDRVMAYKFHEDHHGEVIAECKKPDLEPYLGLHYPATDIPQASRFLFMKNKVRMICDCTAPSVKVIQDKQLEAAVELCGSTLRSPHGCHAQYMVNMGSIASLVMSVVIMNHDEEPANDNPQKGSKLWGLVVCHHTSPRFIPFPLRYACEFLIQVFAVQLNKEVELAAQLREKHILRTQTVLCDMLLRDAPVGIVTPSPNVMDLVKCDGAALYYGKQFWLLGTTPTETQVRDIAGWLYECHGGSTGLSTDSLMEAGYSGAVALGDAACGMAAVKITYRDFLFWFRSHTAKEIKWGGAKHDTVDKDAGKRMHPRSSFKTFLEVVKHRSHPWENAEMDAI

SEQ ID NO: 9097 - protein, 432 aa, Methanocaldococcus jannaschii DSM 2661
MRNPIIDVGAKELSYEIREIVDVAKKIEEFGINITWENIGDPVAKGEKIPDWIKDIIAEIVKNDCSYAYCPTKGLLETREFLAEQVNKRGGVQITAEDIIFFNGLGDAIAKIYGLLKRQVRVINPSPSYSTHSSAEASHAGSPPVTYFLDPYNYWYPDIDDLEKRIKYNPAVSGILVINPDNPTGAVYPKKILNEIVDLANEYDLFIICDEIYCNLVYNGKKQHLLCEVIDDVCGLSLKGISKELPWPGARCGWIEIYNADKDEEFKKYVESIYKAKLIEVCSTTLPQMAIPRIMGHRNYKKYLEERNRFFEKRSNTAYKKLKDLDGVIANKANGAFYMSVVFEDNYLNGNNSIKIENEKLKEFIEHQIKDASIDKKFVYYLLASTGICVVPLTSFCSQLNGFRVTLLERDDEKFEWIFDTLAEKIDEFLKT

SEQ ID NO: 9098 - protein, 355 aa, Streptomyces bluensis
MKALVLAGGSGTRLRPITHTSAKQLVPVANKPVLFYGLEAIAAAGIKNVGLIVGDMSGDISEAVGDGSKFGLSISYIEQREPLGLAHAVLISRDYLGEDDFAMYLGDNFIVGGIDEPVREFRRDRPDAHLLLTHVSDPQSFGVAELDATGRVRGLEEKPRHPKSDLALVGVYLFSPAIHEAVRAVKPSWRGELEITDAVQWLIDTGKDVRSRQITGYWKDTGNVSDMLEVNRLVLETIDPHCAGHVDEHSDLVGRVQVDDGAVVRNSRVVGPAVIGAGSVVVDSYVGPFTSIGEDCVIEDSEVEFSIVLRRASLSGVRRVEASLIGRHVQVTSAPPVPHAHRLVLGDHSMAQISS

SEQ ID NO: 9099 - protein, 411 aa, Streptococcus mutans UA159
MDSGSIAFIIICSALVFLMTPGLAFFYGGLGRRKNVINTMMMAVVPLALASLLWVVVGYSLSFSGVGKVFGDFSHVFLNGVKEGASSRGLTIPDTLFSGFQMMFSIITVAILTGAVAGRMRFTPLVIFIIFWLLLVYYPFAHMVWDDGLLAKWGTLDFAGGDVVHITSGVSGLVLALVVGKRRDYDRLEYRPHNIPFVLLGAGLLWFGWFGFNAGSALAANGLAVHALLTTHISAAAAMFSWLLLEKYLNGKPSLVGGSTGLVAGLVAITPGAGFVPLWSSLLIGLMVSPLCYFAIAVLKSKFGYDDALDAFGCHGIGGIFGGIVTGLFTTPHLALDKSNIGLIYGNARLFLVILAAILFTIIWSALISFLIIKVISLFMPIRVSDREEATGLDDKEHGETAYPTFMGLDS

SEQ ID NO: 9100 - protein, 448 aa, Piper nigrum
SGKPFYAIVHRVTGSLIVDFEPVKPLEVPMTAAGALQSYKLAAKAISRLQSLPSGGMERLVDTVVQEVFELTGYGRVMAYKFHEDDHGEVISEVTAPDLDPYLGLHYPATDIPQAARFLFMKNKVRMICDCHAKPVKVYQDEKLPFDLTLCGSTLRAPHSCHLHYMANMGSIASLVMAVVINEGACSSATDHAVEQHSSSSSSSASYAAATATAAAAGGGGGSNIDTTSATSRRKMLWGLVVCHNTKPRFVPFPLRYACEFLMQVFAIHVNKELELERQIREKNILRTQTLLCDMLLRDAPMGIVNQSPNIMDLIKCDGAALLYKQQVFPLGVAPSDAELRQLARWLSSSHRDSTGLSTDSLHDAGYPNASCLGNVVCGMAAVKITPSDLLFWFRRHTAAEVRWGGAKHHPTDRDDGKRMHPRSSFKAFLEVVKTRSLPWQNYEMDAI

SEQ ID NO: 9101 - protein, 341 aa, Piper nigrum
DLEPVNPADVPVTAAGALKSYKLAAKAISRLQSMPNGDIALLCDVLAREVSDLTGYDRVMAYKFHEDEHGEVIAECKRSDLEPYLGLHYPATDIPQASRFLFMKNKVRMICDCLAPPVKVVQDKRLGQPLSLAGSTLRAPHGCHSQYMSNMGSIASLVMSVMVCEGDEDSNGEKTARKLWGLVVCHHTSPRFIPFPLRYACEFLIQVFAIQLSKEVELAAQVKEKHVLRMQTVLCDMLLRDAPMGIMTQSPNVMDLVMCDGAALYYHSQCWLLGATPTENMVRDIAEWLQQYHGTSTGLSTDSLVEAGYPGAHELSDAVCGMAAITITNRDFSFWFRSHTA

SEQ ID NO: 9102 - protein, 253 aa, Pseudomonas aeruginosa PAO1
MSKLLSGQVALVTGGAAGIGRATALAFAAAGVKVVVADLDSAGGEGTVEAIRQAGGEALFIRCDVTRDAEVKALVEGCAAAYGRLDYAFNNAGIEIEQGKLADGNEAEFDAIMAVNVKGVWLCMKHQIPLMLAQGGGAIVNTASVAGLGAAPKMSIYAASKHAVIGLTKSAAIEYAKKGIRVNAVCPAVIDTDMFRRAYEADPRKAEFAAAMHPLGRVGRVEEIAAAVLYLCCDNAGFTTGIALPVDGGATAI

SEQ ID NO: 9103 - protein, 394 aa, Sagittaria sp. Mathews 383
PYEVPMTAAGALQSYKLAAKAISRLQSLPGGSMQKLCDTVVQEVFELTGYDRVMAYKFHEDDHGEVVSEVTKPGLDPYLGLHYPATDIPQAARFLFMKNKVRMICDCRAKPVKVYQDEKLAFDLTFCGSTLRAPHSCHLQYMENMDSIASLVMAVIVNEGDEEDEVLGSRAQQQQQQQQRRKRLWGLVVCHNRTPRFIPFPLRYACEFLMQVFAIHVNKEFELENQMREKNILRTQTLLCDMLFRDALLGIISQNPNIMDLVRCDGAALVYQSKIWRLGMAPTESQICDIAAWLSEYHMDSTGLSTDSLHDAGYPGVLALGDSVCGMAAARITSKDILFWFRSHTAAEIRWGGAKHDPADEDDGRRMHPRSSFKAFLEVVKTRSMPWKDYEMDA

SEQ ID NO: 9104 - protein, 421 aa, Glycine max
  unsure (1)..(421): unsure at all Xaa locations
MNNVAERPLNGDVEDDDEDDGGGLEAWERTYAEDRSWEALQXDESGLLRPIDTTAIYHAQYRRRLRTLAATAATARIQKGLIRYLYIVVDLSKAASERDFRPSRMAVMGKQVEAFIREFFDQNPLSHVGLVTIKDGIAHCITXRLGGSPESHIKALMGKLECSGDASLQNALELVLGYLNQIPSYGHREVLILYSALSTCDPGDLMETIQKCKKSKIRCSVIGLAAEMFVCKHLCQETGGTYSVALDESHFKELILEHAPPPPAIAEYATANSIKMGFPQRSAEGSVAICTCHEEAKTGGGYTCPRCKVRVCELPTECRVCGLTLISSPHLARSYHHLFPIVMFDEVTPSSQNDSNHSFPNTCFGCQQSLLSQGNKPGLSVICPKCKQQFCLDCDIYVHESLHNCPGCESSRHSKSVTASQ

SEQ ID NO: 9105 - protein, 397 aa, Sagittaria sp. Mathews 383
DLEPVNLSDVPVTAAGALKSYKLAAKAISRLQSLSSGNISLLCDVLVREVRDLTGYGRVMAYKFHEDEHGEVISESRRSDLEPYLGLHYPATDIPQASRFIFMKNKLRMICDCTAQPVKVIQDKKFTQPLSLCGSTLRAPHGCHAQYMANMGSIASLVMSATISDEDEDDASSGQQRKRRKLWGLVVCHLTSPRFVPFPIRYACEFFMQVFAIQLNKEVELAAQTMEKYIFRTQTFLCDMLLRDAPVGIFTQSPNAMDIVKCDDAALYYKNQFWLLGITPAEGQIRGIAGWLRDCHNTTTGLSTDSLTAFSEAGYRGASTLGDAVCGMTAIKFTSRDFIFWFRSHTAKEIKWRGAKHDPVDKDDDGRKMHPRSSLKAFLDVVKRRSLPWEDVEMDAI

SEQ ID NO: 9106 - protein, 584 aa, Caulobacter crescentus CB15
MESRFAKLYGADARGPAVLERLKTNLLKAAHARPEPLRALDAARAADPAWLHAPGQTAYTFYVDRFAGDLNGVRGKLDYLTELGVRWLHPLPLLEPRPGDSDGGFAVADYRKVDPRLGTIDDLEALAGDLRQRDMGLILDVVCNHTAREHAWAAKARAGDPAYRDYYIVLPDAQSAAARDRELIDVFPDTAPGSFTYDAAMGGYVWTTFYPFQWDLNYANPAVFAEMLEVLIFLAAKGAQGFRLDSAPFLWKQAGTTCRNLPQTYEIVEAWRAALSIVAPGVVLLAEAIESVEDVLPFFGGEESGCNLAYNNVVMTALWAALADGDAVIARRCLAVAARKPAQGAWLNYVRCHDDLIWNALAAYAPASDLRRWSNAYGNGEGFSRGRAFQTAEGGVPSTNGMAAALAGLTADADGDCLGARRLRLLYGIIHALDGWPLIYMGDEIGLDNDEAYQDDPLRAGDGRWLHRPQMDWSLAERRGEAGALQADLFATFARLGQRARRLATLGVAGPARPVEVSSPAVLAFLRDEGARPFLCVANVSDAPQDFELPPAFAQGAEDVLDGAPSPAGAVSLPPYGITWLVAR

SEQ ID NO: 9107 - protein, 414 aa, Magnaporthe grisea 70-15
MDANRHHPSLLLLPAPPSPATKESLSAAYRPPLEAAISKCRNPEHATVLIVALVAPILTGPYRFSKTLIWQHAQSLVAGLYAIASAVCAKLSVDAHIGAGPGSVDVRVLLVDRQNGGGDDGKKPAPLPADVAKAVAVPEPNNTAVADLPTFAASHRPWTTIYHCGTEAGLGLFADYLRLAEAGRLVLRQEQLVAVPGGVTMHDPSSTADGESGQTKGHGIVCIGGTFDYLHAGHKLLLTGGALLLDLPRMDEGEKPATFIVGITGDELLKNKKYAELVQSWDSRARSVIDFLATVLCLSPEEARPKIEEKDGLFVARLRGGAVEVNCVRIQDAFGPTITMQEVSSLVLSAETRAGGKAVNDKRAELGWAPLELFEVDVLDAGDVQSSDEPTKTAEFASKISSTTIRKLKAESRG

SEQ ID NO: 9108 - protein, 613 aa, Xanthomonas axonopodis pv. citri str. 306
MCGIVALRSFVAEAPLQALAERALDALSRRGPDAQGLLCLEQPVPTALGHRRLAILDLSAAATQPMRCAETGNVLVFNGEIYNFLELRRELEGLGHQFRTDSDTEVILHGWRAWGEGLFPRCNGMWALVLLEQASGDLIYCRDRLGVKPLYLHHDGRQLVLASEIRAIAASLGGYPPPNPAAVFDFLVTGLSDHTSDTFYAGIRAVPPGWLYRVSPAGHSRRTPYHQWPLPGAVAPLDAQATMELLEDSTRLRLRSDAPTVSLLSGGLDSSILTTLSVQAGALPRTCFAGAFTYGYDDTEQAGFDETEAAASLMQTLGQSERHFVHRARAIPDEEELLALVAAQEEPFCTPSILASFRMYRAIRAAGYKVVLNGEGADELFGGYVRLYLALSARSALHQARLPTAIRLLSTGAVDPRLLLNRLAWDLPAGALGALLRRQRPSVACMSSALWHDQAARLQSLQVDRRVDIEARLRRDVLSTNLPMVLRMTDRNSMSAGIEVRAPFLDYRVVERALSTPALQRMGDYHGKAMLRHAFAERLPARVTTQRKSTGFGHAEQFLVDRMPLQQALATLPEGVNELLNVARLRREFASGRSHSTLWFAVSVALWYRSVYA

SEQ ID NO: 9109 - protein, 644 aa, Arabidopsis thaliana
MAVAWLIWPIVLSLTALSANSITESESLLKFKKSLNNTKSLDSWTPESEPCGASQRWIGLLCNKNSVFGLQIEQMGLSGKVDVAPLKDLPSLRTISIMNNSFSGDIPEFNRLTALKSLYISGNRFSGNIPSDYFETMVSLKKAWLSNNHFSGLIPISLATTLPNLIELRLENNQFIGSIPNFTQTTLAIVDLSNNQLTGEIPPGLLKFDAKTFAGNSGLCGAKLSTPCPQPKNSTASITIEGTMKDANKSKYFLAFSTLGVLLIVVLVSLAFRKKKKKRRRKKARRTSEQDNSDDQQIQVTVEGSNSSRQSRSSRSGELNKGVAGTSDLVMVNKEKGVFRLSDLMKAAAHVLGNPGGGSNRPRSSGGVGSAYKAVLSNGVTVVVKRVTVMNQVSVDVFDKEIRKLGSLQHKNVLTPLAYHFRQDEKLLVFEFVPNLNLLHRLHGDHEEFQLDWPSRLKIIQGIARGMWYLHRELGFLNLPHGNLKSSNIFLAEDGEPLISEFGLQKLINPDAQSQSLVAFKSPEADRDGTVSAKSDVFSFGVVVLEILTGKFPSQYAGLNRAGGANLVEWLGSALEQGGWMDLLHPMVVTAAAEDKIMEEEIENVLRIGVRCTREDPDQRPNMTEVVDELTIEDSNDDFITIET

SEQ ID NO: 9110 - protein, 253 aa, Gnetum gnemon
MGRGRVQLRRIENKINRQVTFSKRRNGLLKKAYELSVLCDAEVALIIFSTRGKLYEFASSSMSKTLERYEKCSYSMQENASTDRDAQNWHHEVTKLKAKLESLHKAQRSLMGEDLGPLNIKELQSLEQQLEVALGHVRNRKTQLLIQTIDELRDKERTLQEVNKSLQKKLSETEGRNVIPALPHAPNGSGEWESSTLTTTTYALQTQQTSNIHHVDCEPTLHIGPYHQAVHHEAITAPPATHSEPHNQYIWWV

SEQ ID NO: 9111 - protein, 392 aa, SYNECHOCOCCUS SP. WH 8102
MALQPAAGARDLNPRQVESNRALSERLASVFRLWGYDEVSPPRVERLDTLMAGGAIASEDVVRLVADEPLGLRPEMTASIARAACTRLASRPRPLRLWASGTVFQSRAADEGGQCIEENLQCGVELFGVAPIEAEMELLSLLMAAVERLDFQAQHQPRLLMGHTGLMDLLLSPVPPVLRDAVRAALIQYDRLGLETIELEEGLRATLLSLLDCRGTPNEVLERLSSCFGAQALFDDLHRLCRQLQGPAAAQGVRLQLDPTFQPRFELYTGLVFQLVCDTHSAPVVVARGGRYDDLVRRCGAQPGQDFGAGFSLAIDPIRELLSDSSSNPTVAPQLMVAFSERSTLEAALERQRWWHQQGRSAVIELHPFSTRSLAEQQATDQGGFQLDWIDP

SEQ ID NO: 9112 - protein, 284 aa, Arcanobacterium pyogenes
MNERAGMLAQKEDLIDVDALICAYYDIEPDPDNPAQQVVFGTSGHRGSAFDGAFNEAHIVATTQAIVEYRAAQGIDGPLYIGRDTHALSEPAEHTALEVLAANDVEVRLDARNSWTPTPAVSLAILTANGADTAAGVRTQGPGLADGIVITPSHNPPRDGGFKYNPPHGGPADTDATEVIAARANEILRQGWKQVKRVPYEQARVAETTRGHDYLSAYVDDLQSIIDLEAIRTAGVRIGADPMGGASAEYWNAIGERYGLDLTVVNPVVDPAWPFMTLDWDGKI

SEQ ID NO: 9113 - protein, 190 aa, Arabidopsis lyrata subsp. petraea
HFLSFLLIPIMAIVAVELLRMGPEEILNVWNSLQFDLVQVLCSSFFVIFISTVYFMSKPRTIYLVDYSCYKPPVTCRVPFATFMEHSRLNLKDNPKSVEFQMRILERSGLGEETCLPPAIHYIPPTPTMDAARSEAQMVIFTAMDDLFKKTGLKPKDVDILIVNCSLFSPTPSLSAMVINKYKLRSNIKS

SEQ ID NO: 9114 - protein, 398 aa, Streptococcus pneumoniae R6
MAKLTVKDVDLKGKKVLVRVDFNVPLKDGVITNDNRITAALPTIKYIIEQGGRAILFSHLGRVKEESDKAGKSLAPVAADLAAKLGQDVVFPGVTRGAELEAAINALEDGQVLLVENTRYEDVDGKKESKNDPELGKYWASLGDGIFVNDAFGTAHRAHASNVGISANVEKAVAGFLLENEIAYIQEAVETPERPFVAILGGSKVSDKIGVIENLLEKADKVLIGGGMTYTFYKAQGIEIGNSLVEEDKLDVAKALLEKANGKLILPVDSKEANAFAGYTEVRDTEGEAVSEGFLGLDIGPKSIAKFDEALTGAKTVVWNGPMGVFENPDFQAGTIGVMDAIVKQPGVKSIIGGGDSAAAAINLGRADKFSWISTGGGASMELLEGKVLPGLAALTEK

SEQ ID NO: 9115 - protein, 455 aa, Psychrobacter sp. 273-4
MVFPLSFVDFKSYSLRLGVLALPILITQFCQAALGVVDAIMAGQVSALDLAAVAVGSGIWLPLFLLATGILIATTPLIGEAIGQKQLDKVPHITQQSLWTAAVIGILGFIIVNLAPNVLALMGVPENIQPIATQYLHGVSFGFPAIAVYAVLRSYCEALGRPEPVTVISIIGLLADIPLNYIFIHGLFGMPEMGGAGCGVATAIVLWINVLLLAAYTSFTKRHQFASTRFFYAFASPNRAQIKKLLKLGIPIGVSIFFEASLFSLGALVISPLGELATASHQVALSVTSQLFMIPISVAMALTIMVSNHFGEKNLMALRQVQATGLIWTVLIAMACMIGVWLFRPQLAAAFTDNPVVRAQAMHLLIFALAYQLFDGWQVNVAGILRGMQDTTIPMWVTLFCYWIVALPLGIYLVRFTDIGAQGFWMALITGLFLSSILLTIRLCYQQKRLLAMWS

SEQ ID NO: 9116 - protein, 187 aa, Solanum demissum
MAQVTGDDGESGGDQHASIFVLGRQLFVAMLMLDTWQYFMHRYMHQNKFLYKHIHAQHHRLIVPYAFGALYNHPLEGLILDTIGGALAFLVSGMSPRTSIFFFSFATIKTVDDHCGLWLPGNLFHIFFKNNSAYHDIHHQLYGTKYNYSQPFFVTWDRILGTYMPYELERRPEGGFEAKPVKDCKEH

SEQ ID NO: 9117 - protein, 292 aa, Salmonella enterica
MKTRKGIILAGGSGTRLYPVTMAVSQQLLPIYDKPMIYYPLSTLMLAGIRDILIISTPQDTPRFQQLLGDGSQWGLNLQYKVQPSPDGTAQAFIIGEEFIGHDDCALVLGDNIFYGHDLPKLMEAAVNKESGATVFAYHVNDPERYGVVEFDQAGTAVSLEEKPLQPKSNYAVTGLYFYDNSVVEMAKNLKPSARGELEITDINRIYMEQGRLSVAMMGRGYAWLDTGTHQSLIEASNFIATIEERQGLKVSCPEEIAFRKNFINAQQVIELAGPLSKNDYGKYLLKMVKGL

SEQ ID NO: 9118 - protein, 106 aa, Solanum demissum
MVGSVNIDQQGKGGYVSDEVLGTFLPIVVYWVYSGLYLMLGTMDNYRLHSKKDEDEKNLVSKKEVVKGVLLQQIVQAAVATVLFAEVIMHPGALDLYSLLLRLRWY

SEQ ID NO: 9119 - protein, 392 aa, Saruma henryi
PYEVPMTAAGALQSYKLAAKAISRLQSVPSGCLDRLIDTVVQEVYELTGYDRVMAYKFHEDDHGEVISEVTKPDLEPYLGLHYPATDIPQAARFLFMKNKVRMICDCRAKSVKVYQDEHLSFDLTLCGSTLRAPHSCHLQYMGNMSSIASLVMAVVINEGEEDDDGPDSTQQQAQPKRKRLWGLVVCHNTTPRFVPFPLRYACEFLMQVFAIHVNKELELENQIREKNILRTQTLLCDMLLRDAPLGIVTQSPNIMDLIKCDGAALLYENKVYRLGVTPTESQLHEIVQWLSEHHMDSTGLSTDSLHEAGYPKALSLGDIVCGMAAVRITTHDMLFWFRSHTAAEVKWGGAKHDPSDKDDGRRMHPRSSFKAFLEVVKTRSLPWKDYEMDAI

SEQ ID NO: 9120 - protein, 391 aa, Saruma henryi
DLEPVNPDDVPVTAAGALKSYKLAAKAISRLQSLPSGNISLLCDVVVREVSDLTGYDRVMAYKFHEDEHGEVIAECKRSDLEPYHGLHFPASDIPQASRFLFMKNKVRMICDCSAPPVKVIQDKRLAQPISLGGSTLRAPHGCHAQYMANMGSIASLVLSVTISEDDDETCSKQKGRKLWGLVVCHHTSPRFIPFPLRYACEFLIQVFGIQLNKEVELAAQMRETHILRTQTMLCDMLLRDAPMTIVTQSPNVMDLVKCDGAALYYRKESWLLGVTPTKAQIQDLAEWLLKDHNGTTGLSTDSLVEAGYPRAHNLGDMVCGMAAVRITNQDFLFWFRSHTAKEVKWGGAKHDPADKDDDRGKMHPRSSFKAFLEVVKRRSLPWEDVEMDAI

SEQ ID NO: 9121 - protein, 292 aa, Salmonella enterica
MKTRKGIILAGGSGTRLYPVTMAVSQQLLPIYDKPMIYYPLSTLMLAGIRDILIISTPQDTPRFQQLLGDGSQWGLNLQYKVQPSPDGLAQAFIIGEEFIGHDDCALVLGDNIFYGHDLPKLMEAAVNKESGATVFAYHVNDPERYGVVEFDQAGTAVSLEEKPLQPKSNYAVTGLYFYDNSVVEMAKNLKPSARGELEITDINRIYMEQGRLSVAMMGRGYAHLDTGTHQSLIEASNFIATIEERQGLKVSCPEEIAFRKNFINAQQVIELAGPLSKNDYGKYLLKMVKGL

SEQ ID NO: 9122 - protein, 484 aa, Chloroflexus aurantiacus
MDYPFFHVSHYIDGQFVDGGSRFDILYPATNQVIGSAPEAGADEVDAAVAAASRAFRQWSRMPAAERRLILKRFAQLIRDHEAELAAIETWDVGRPITENRSGYIPRIAANIEFFADFAVTHGSESYPMDNGYINYVLRQPVGVAALIAPWNIPLLQATWKMGPALAFGNTVVLKPAELTPIGTWRLAQLAHAAGVPAGVINVIHGFGPNSAGALLTRHPDVKLISFTGETTTGKIIMATAAPTLKRVSFELGGKGANIIFADADLDRAVAISLRSSFFNQGEFCLAGPRLLVQRPIYEAFLTRFQRATSQLQVGDPFDPQTRVGALISREHYERVTGFIDLARADGAHILTGGTDPVLPEPFAQGNFLQPTIITDVKPHDQVCQDEIFGPVVTVVPFDDEEEAIAIANGVSYGLSAVVQTRDVGRAVRMGSALEAGTIWINDFFVRDLRVPFGGMKQSGIGREGGHYSLEFYTEAKTICLSNQ

SEQ ID NO: 9123 - protein, 414 aa, Saururus cernuus
SGKPFYAIVHRVTGSLIIDFEPVKPFEVPMTAAGALQSYKLAAKAISRLQSLPSGSMERLVDTVVQEVFELTGYDRVMAYKFHEDDHGEVISEVTIPHLEPYIGLHYSATDIPQAARFLFMKNKVRMICDCHAKPVKVYQDDKLSFDLTLCGSTLRAPHSCHLQYMENMGSIASLVMAVVVNEGGDEDKGPDSSQQLGDNRRKRLWGLVVCHNTRPRFVPFPLRYACEFLTQVFAIHVSKELELERQIREKNILRTQTLLCDMLLRDAPMGIVNQSPNIMDLIKCDGAALFYKDKVFRLGNAPSETDIRDIAQWLFAHHMDSTGLSTDSLHDAGYPKAAFLGNLVCGMAAVKITCSDMLFWFRTHTAAEIRWGGAKHDHSERDDGKRMHPRSSFKAFLEVVKTRSLPWKDYEMD

SEQ ID NO: 9124 - protein, 391 aa, Saururus cernuus
DLEPVNPSDVPVTAAGALKSYKLAAKAISRLQSLPSGNISLLCDVLVREVSDLTGYDRVMAYKFHEDEHGEVVSECKRADLEPYLGLHYPATDIPQASRFLFMKNKVRMICDCLAQPVKVIQDKRLAQPLSLAGSTLRAPHGCHAQYMANMGSIASLVMSVMVSEGDDDSNEEKTGRKLWGLVVCHHTSPRFIPFPLRYACEFLIQVFAIQLSKEVELAAQMREKHILRMQTVLCDMLLRDAPMGIMTQSPNVMDLVKCDGAALYYRYQCCLLGTTPTENQIRDITEWLLQYHNSSTGLSTDSLVEAGYPGAHELSDAVCGMAAIRITSKDFLFWFRSHTAKEIKWGGEKHDPLDKDAFESKMNPRTSFKTFLEVVKRRSLPWEDVEMDAI

SEQ ID NO: 9125 - protein, 344 aa, Zea mays
  unsure (1)..(344): unsure at all Xaa locations
MVRMSSSSSASGVNLTEQIENVFDQLISKIEQADPDFDPRPFLKQLNVLGRYEPIKRNVYFTKRYIEDYGISCHCKPSPGSSVVCGRDCYCSMLFSCCSSQCECDIACTNKSFQHRPLTKTKLIKTEKCGHGLVAEDEIKKGEFVIEYVXEEVIDDRTCENRLWTMKRLDDTDFYLCEVSSNMVIDATNKGNLSRFINHSCEPNTAMQXKWTVDGETRVGIFALRDIKIGEELTYDYKFVQFGAAQVCHCGSSKCRKMLGTTKYSGSSQNHRTKKKKRKTSCENCIQQFLRLWHPRQKMYVGCWIVDFDQGTKMHTLQFIDHHTEKFDLKEEEWHFLEVDSDED

SEQ ID NO: 9126 - protein, 401 aa, Trochodendron aralioides
GKPFYAIVHRVTGSLIIDFEPVKPYEVPMTAAGALQSYKLAAKAIARLQSLPSGSIERLCDTLVQELFELTGYDRAMVYKFHEDDHGEVVSEITKPGLEPYLGLHYPATDIPQAARFLFMKNKVRMICDCRAKNVKVLQDEKLPFDLTLCGSTLRAPHSCHLQYMENMNSIASLVMAVVVQEGDEQARALVPHSLRRRKRLWGLLVCHHSTPRFVPFPLRYACEFLAQVFAIHVNKELELENQILEKNILRTQTLLCDMLMRDAPLGIVSQSPNIMDLVKCDGAVLLYKNRTWRFGSTPSELQIHDIALWLSEYHMDSTGLSTDSLYDAGFPGALTLGDGVCGMAAVRITSKDMLFWFRSHTAAEVRWGGAKHEPGEKDDGRRMHPRSSFKAFLEVVKSRS

SEQ ID NO: 9127 - protein, 390 aa, Trochodendron aralioides
DLEPVNPADVPVTAAGALKSYTLAAKAISRLQSLPSGNLSLLCDVLVREVSELTGYDRVMVYKFHEHKHGEVVAECRISDLEPYLGLHYPATDIPQASRFLFMKNKIRTICDCLAPPVKVIQDKRLVQPLSLCGSTLRAPHGCHAQYMENMGSIASLVMSVMNHEDEDEIESDRKGRKLWGLVVCHHTSPRFVPFLLRYACEFLIQVFGIQLNKEVELAAQLREKHILRTQTVLCDMLLRDAPVGIVTQSPNVMDLVKCDGAALYYRNTIWLLGVTPTEAQIRDIAGWLLEYHNGSTGLSTDSLMEAGYSDALLLGDAVCGMAAVKITSKDFLFWFRSHTAKEIKWGGVKHDPVDKDDGRKMHPRSSFKAFLEVVKRRSLPWEDVEMDAI

SEQ ID NO: 9128 - protein, 289 aa, Caulobacter crescentus CB15
MKGIILAGGSGTRLHPMTLVTSKQLMPVYDKPMIYYPLSTLMLAGIREILIISTPRDTPNFQALLGDGSQWGLDIQYAVQPSPDGLAQAYVIGADFVGRDPSALILGDNIYFGHGITNLFTRAMARPKGATVFAYHVNDPERYGVVEFDKQMTALSIEEKPKVPKSNWAVTGLYFYDGDVVDIARDLKPSARGELEITDVNRAYLERGDLSVELMGRGYAWLDTGTPDSLLEAAEFVRVLEKRQGFKIACPEEVAYQKGFIDAAQVERLADALGKSAYGSYLRTVIGVR

SEQ ID NO: 9129 - protein, 292 aa, Salmonella enterica
MKTRKGIILAGGSGTRLYPVTMAVSQQLLPIYDKPMIYYPLSTLMLAGIRDILIISTPQDTPRFQQLLGDGSQWGLNLQYKVQPSPDGLAQAFIIGEEFIGHDDCALVLGDNIFYGHDLPKLMEAAVNKESGATVFAYHVNDPERYGVVEFDQAGTAVSLEEKPLQPKSNYAVTGLFFYDNSVVEMAKNLKPSARGELEITDINRIYMEQGRLSVAMMGRGYAWLDTGTHQSLIEASNFIATIEERQGLKVSCPEEIAFRKNFINAQQVIELAGPLSKNDYGKYLLKMVKGL

SEQ ID NO: 9130 - protein, 254 aa, Gnetum gnemon
MGRGRVELKRIENKINRQVTFSKRRNGLLKKAYELSVLCDAEVALIIFSSRGKLYEFGSAGTLKTLERYQKCSYALQESNNSDRDAQTWHHEVSKLKTKVEILQRSQRHLLGEDLGPLSIRELQTLERQIEVALTQVRARKTQVMMDMMDDLKKKERLLQEVNKSLRKKLDETEGQVYSNAQLQAAPPPEWDSNAIANPVYALPPTPQNAVDCEPTCKLGIMLLLSQAFPGMIILRTTTYRGGWSNLIPDANNQ

SEQ ID NO: 9131 - protein, 490 aa, Xanthomonas axonopodis pv. citri str. 306
MPRFPDQLLYIGGRYVPARGGHTLEVVNPATGEVLANVHNAGVDDLDAAVDSAKAGQQRWAALTTVERSRILLRAVALLRERNDALAQLETLNTGKPLSETRSVDVVTGADVLEYYAGVAQALQGAQVPLREGSFFYTRHEPLGVVGAIGAWNYPIQIALWKAAPALAAGNAMIFKPSEVTPLTALKLAEIFTEAGLPDGVFNVLPGDGASVGTALTEHPQIEKISFTGGTATGRKVMASASSSSLKEVTMELGGKSPLIVCADADLDVAADIAMMANFYSSGQVCTNGTRVFVPRALRHAFEARLLARVQRIHIGDPLDERTTFGPLASAAHMQRVLEHIEQGKAEGARLLCGGERLQDGALVQGYYVAPTIFSDCTDVMTIVREEIFGPVLSLLTYDDEDEAVTRANATTYGLAAGVVTPDLARAHRLIHRLEAGICWVNTWGESPAPMPVGGYKQSGVGRENGLATLQAYTRTKSVQIELERYASVF

SEQ ID NO: 9132 - protein, 162 aa, Moraxella catarrhalis
MYAEDTKNIVEIKDIIAREILDSRGNPTIEADVILANGIRGRAAAPSGASTGSREALELRDGDTSRYLGKGVKKAVANANSQIRTVLLDKDVTQQTQIDNILIELDGTENKGNMGANAMLAVSLAVAKAAAIAQSLPLHQYIANLRGQTSLTMPVPMMNILN

SEQ ID NO: 9133 - protein, 469 aa, Methanosarcina mazei Goe1
MSKNVQKIEKLLIVICMIFIVLPSPALAVTAEENAEAIEGLQTTLTFLWLLIASGLVFFMHAGFSLVETGLTRSKNTANILMKNFMTVVLGILVYWAVGWGVMYGADAAGLIGTDQFFLAGADNATWNSWFFQMVFAATGATIVSGAMAERTNFKAYLVYCVLMVAVIYPIYGHWVWSGADTALLSGADSPIVKAIGVAHHDFAGSGVVHSIGGYSALAGVLLVGARIGKFRDGKAIPIPGHNLTIAFLGTLILALGWLGFNGGSTLNANDPYMNLVVVNTFLAGAVGAVTTMAITWMKTGKPDPSLTANGLLGGLVAVTAPCGSISNWGAIAIGIIAGIIIYAGVMFNENKLKLDDPVGAIAVHGYCGTWGLISVGLFSIGIGNGILADASYAAAVPGLFYGGGVSLLLIQLVAVLITIVWGFGLSFIIFKILDAVIGLRVSEEEEIMGLDICEHGIRAYPEYLMREE

SEQ ID NO: 9134 - protein, 602 aa, Porphyromonas gingivalis W83
MLSPKNYQYYPAALRQLYEELDGAPQAFEGGESPSRPVIGLTANYNTSGSCIARAYTESVIRAGGLPLLIPLTTDIEVIRHYATFIDGLILSGGDDLLPSYLGEDPIPTLGEVNPERDRGELLLVAEATRRNVPILGICRGHQLLATAFGGGMYQDIYAQSENPVGHNPKIPISFAAHQVRLQGDSVLARILGLSDGELLGVNSLHHQAVSRVPKPFRVTALSSDGVIEAMEAYPEKPILSVQWHPEQMAYAGDTRQQQLFEHLVAEASLFAQAKAVHRSVIVLDSHVDTPMHFCPEFDFTKRGNTLVDAPKMREGLVDACVMVAYLPQGERDDASLKQATDYATGKLEAIRSQVLSHPESLMQATNPEEVREAKRRGLCAIIPGIENGYAIGKELANIERFRDMGVCYITLCHNGDNDICDSARKTKHEHNGLSDFGREVVREMNRLGVMVDISHAAVSTVRDVLQISSAPVVASHSSSRALCNHTRNLTDEDALAIARSGGVVQVCLYAGFISEQEEEGSVQHAADHIDHFVRLLGIEHVGVGSDFDGDGELVGCRGANDLINLTVELLRRGYTRDQLGLLWGENFLRVMQNVQQKAKCQ

SEQ ID NO: 9135 - protein, 515 aa, Deinococcus radiodurans
MTVAEQQPQHQGYANPGTPGSVVTFKKRYDNFIGGQWVPPVKGQYFDNASPVDGKVFTQAARSTAEDVELALDAAHRAAPAWGRTSVTERSNILLKIADRMEQNLEMLAVAETWDNGKPVRETLAADLPLAIDHFRYFAGCIRAQEGGLSQIDDSTVAYHFHEPLGVVGQIIPWNFPLLMGVWKLAPALAAGNAVVLKPAEQTPASIMVLMELIADLLPEGVVNVVNGFGLEAGKPLASSPRIAKIAFTGETNTGRLIMGYAADNLIPVTLELGGKSPNIFFDDVMMEDDAFLDKAVEGMVMFALNQGEVCTCPSRALIQESIYDRFMERAVQRVEAITMGHPLDPGTMIGAQASTEQLDKILSYLDIGRAEGAEVLTGGERGQREGLEEGFYVKPTIFKGHNKMRIFQEEIFGPVLAAATFKDEAEALELANDTLYGLGAGLWTRDISRAYRMGRGIQAGRVWTNCYHVYPAHAAFGGYKQSGIGRENHRMMLDHYQQTKNLLVSYSPNKMGFF

SEQ ID NO: 9136 - protein, 188 aa, Oryza sativa
IIGDESGTVRKQPPALVIALQFIIAMFVMDTWQYFMHRYMHVNKFLYKHVHSKHHTLVVPYAFGALYNHPLEGLILDTIGGALSFLIAGMTPKTAIFFFSFATIKTVDDHCGLWLPGNILHVFFSNNSAYHDIHHQLYGNKYNFSQPFFVMWDKILGTYMPYTLENRKGGGFEARPIKLNVAEQSKTD

SEQ ID NO: 9137 - protein, 465 aa, Mycobacterium avium
MTSHYDVVVLGAGPGGYVAAIRAAQLGLSTAIVEPKYWGGVCLNVGCIPSKALLRNAELAHIFTKEAKTFGINGEATFDYGAAFDRSRKVAEGRVAGVHFLMKKNKITEIHGYGRFTDPHTLAVELNDGGTETVTFDNAIIATGSSTRLVPGTSLSANVVTYEEQILSRELPESIIIAGAGAIGMEFGYVLHNYGVEVTIVEFLPRALPNEDADVSKEIEKQFKKLGVKILTGTKVESISDDGSQVTVVVSKDGNSQELKAAKVLQAIGFAPNVEGYGLEAAGVALTDRKAIGITDYMRTNIEHIYAIGDVTGKLQLAHVAEAQGVVAAETIAGAETLALGDYRMMPRATFCQPNVASFGLTEQQARDEGHDVVVAKFPFTANGKAHGVGDPSGFVKLIADAKYGELLGGHLVGHDVSELLPELTLAQKWDLTATELARNVHTHPTMSEALQECFHGLTGHMINF

SEQ ID NO: 9138 - protein, 409 aa, Bartonella quintana
MTTEIRVPTLGESVTEATIGKWFKKLGEAVAVDEPLVELETDKVTVEVPSPVMGKLTEIIAKEGDIVEVNAVLGFVESGAAGISQSFSPSATSIPEAPSELEQSPSSSATPSGTMPPAPSAAKLMAENNIAKSDISGSGKRGQILKEDVLGALAQGTKASTSVATLTASSSSAAPIQEMREERVRMTKLRQTIARRLKDAQNTAAMLTTFNEVDMSAVMDLRKRYKDLFEKKHGVKLGFMGFFTKAVCHALKEFPTVNAEIDGTDIVYKNYVNAGIAVGTDKGLVVPVVRDADQMSLAEIEKEISRLGRLARDGKLAVSDMQGGTFTITNGGVYGSLMSTPILNAPQSGILGMHAIKERAMVVGGQIIICPMMYLALSYDHRIVDGQEAVTFLVRVKESLEDPERLVLD

SEQ ID NO: 9139 - protein, 655 aa, Rhodospirillum centenum
MTALRILLVEDSPTQALRLQDTLQRQGYEVDHVASAEEALEVLNRRLPHLLIVDHHLPGLQGADLCRQLRLHVATFSMPILILTADETPGRQREGLDSGADDFLPKSADSGVLLLRVRNLLRHASRDGEPDVLPHPQFRRPVALVVGTPDERFRLLDAHLREEGCIVDHRATAADALETLRHRAYDCAFVAETLPDMAGIDLCRAVQQSPPPGADDAPALILLRPGGPGGLDDPDPLDAVQGLLEAGVDDVFFLDRPLAPLRARLRAILRRRFLQEQNRRLLEDFRRRESLTLRLEAERNAAEARAALADQLQRANTRLADANRRLAEQALVTRTITDNVTSALLMTDAAGSVTFLNPPARALLGMSEADLRDGALVRRLGIPLPPGRTLPKPVREAAAMLERPEGGCVPVVYSVALLTGESGPSGMVLEIVDVTERRQAEERQALLMAELSHRVKNTLATVISIGAQTRRRHAELTSFWPTFEGRLRALSATHNLLADHHWEWVRLSEVVSHEVRPYAGPGGTDVRLSGPAVALRPKAALALALVFHELATNAAKYGAFLRGGYVEIGWGLRRGEGGDRLHITWKEHGGPPIQAPPQNGFGSVLIRQSVAYELGGRAMLDFQADGLLCRLELPLSEEIQPAPAETLPAAPASTA

SEQ ID NO: 9140 - protein, 296 aa, Psychrobacter sp. 273-4
MIQTNRKGIILAGGSGSRLHPITLGTSKQLLPIYDKPMIYYPLSVLMLAGIREILIISTPEDLPNFEKLLGNGDDLGIKLSYKVQPSPDGLAQAFILGEEFIGDDNVCLVLGDNIFYGQSFSQQLLRATEQETGATVFGYYVSDPERFGVVEFDQDGKALSIEEKPNHPKSHYAVTGLYFYDNQVVDIAKNVQPSHRGELEITDINNAYLEQQQLNVELLGRGFAWLDTGTHDSLLEAGQFVQTIEHRQGLKVACLEEISYHNGWIDDAQLLERANFFKKTGYGHYLLKLHQEHQH

SEQ ID NO: 9141 - protein, 492 aa, Glycine max
MDPYKNRPSSAFNSPFWTTNSGAPIWNNNSSLTVGSRGPILLEDYHLVEKLANFDRERIPERVVHARGASAKGFFEVTHDISHLTCADFLRAPGVQTPLIVRFSTVIHERGSPETLRDPRGFAVKFYTREGNFDLVGNNFPVFFVRDGLKFPDMVHALKPNPKSHIQENWRILDFFSHHPESLHMFSFLFDDVGIPQDYRHMDGFGVNTYTLINKAGKALYVKFHWKTTSGEKSLLDDEAIRVGGSNHSHATQDLYDSIAAGNYPEWKLYIQTLDPENEDRLDFDPLDVTKTWPEDVLPLQPVGRMVLNKNIDNFFAENEQLAFCPAIIVPGVYYSDDKLLQTRVFSYADTQRHRLGPNYLQLPANAPKCAHHNNHHDGFMNFMHRDEEVNYFPSRYDPVRHAEKVPVPPRILGGKREKCMIEKENNFKQPGERYRSWPSDRQERFVRRWVDALSDPRVTHEIRSIWISYWSQADRSLGQKIASHLNLKPSI

SEQ ID NO: 9142 - protein, 353 aa, Burkholderia fungorum LB400
MEFLRNTWYAAGWSQDLAAGAMLGRTMLNEQLVLFRADDGTVSALSDICPHRFAPLHLGKIVDGCRIQCAYHALEFDGTGACVKNPHGKQKIPAAAKLQAYPVVEKHSLIWVWMGEQAAADPSVIPDFSMLDPDSGFQVSRRDWLHMDASYDLVVDNLMDLSHTAFLHDGILGSKYTIKADTSLEQTGETVKVTRLMPNVPVPGFFDLMFNRDGGIVDYWTEIRWNLPGCLMNNTGVTLPGAPRSEGTGVYGMHFLTPETDVSCWYHFAAVRQNPRTWGEPIDTEIKEKISDLRRYAFEEQDQWIIKAQQQTILRAKGNLQPVSLETDIGIERYKRILKAALVAERSGSTMAA

SEQ ID NO: 9143 - protein, 416 aa, Lactobacillus crispatus
MINQTNTLFVFVASVLVFFMTPGLAFFYGGMVSKKNAVNTMISVFMITGVAIVLFIAFGYNLALGKDVGGIFGLSKSVFLNGFDLKTLYSKDSGITILTYLMFQMMFSIITPALFVGAVVGRMKFKFLLAFVAIWSILIYYPMVHMVWTPDGILAKTGMLDFAGGTVVHITAGITALFLSIFVGPRIDFDPNGEVKHYNLPWVLMGTSILWIGWYGFNVGSALTVSDVATQAFLTTTVATGTSFVVWMFLDMFIKEKTTMIGLCTGALCGLVGITPAAGYVTVAGAFAIGFICTLASYGFIHVIKPKLKLDDPLDVFGCHGVSGIVGSILTGLFATKIVNPQIENGLLYGGGLHLITAQILGTLFTIIFVGIMTTIIVLLLKRIIPIRVSKEDELMGLDLAEHGEQADYGIEFEEK

SEQ ID NO: 9144 - protein, 841 aa, Glycine max
RNNKVRMIVDCHAKHVRVLQDEKLPFDLTLCGSTLRAPHSCHAQYMANMDSIASLVMAVVVNDNEEDGDTDAIQPQKRKRLWGLVVCHNTTPRFVPFPLRYACEFLAQVFAIHVNKEIELEYQIIEKNILRTQTLLCDLVMRDAPLGIVSESPNIMDLVKCDGAALIYKNKVWRLGVTPSESQIREIAFWLSEYHMDSTGFSTDSLSDAGFPSALSLGDVVCGMAAVRVTAKDVVFWFRSHTAAEIRWGGAKHEAGEKDDGRRMHPRSSFKVFLDVVKARSLPWKEYEIDAMHSLQLILRNAFKDTESMDLNTKAINTRLSDLKIEGMQELEAVTSEIVRLIETATVPILAVDVDGLVNGWNIKIAELTGLPVGEAMGKHLLTLVEDSSTDRVKKMLNLALLGEEEKNVQFEIKTHGSKMDSGPISLVVNACASRDLRDNVVGVCFVAHDITAQKNVMDKFTRIEGDYKAIVQNRNPLIPPIFGTDEFGWCCEWNPAMTKLTGWKREEVMDKMLLGELFGTHMAACRLKNQEAFVNLGVVLNKAMTGLETEKVPFGFFARNGKYVECLLSVSKKLDVEGLVTGVFCFLQLASPELQQALHIQRLSEQTALKRLNALSYMKRQIRNPLCGIIFSRKMLEGTALGTEQKQLLRTSAQCQQQLSKILDDSDLDSIIDGYLDLEMAEFTLHEVLVTSLSQVMTKSNGKSIRIVNDVAEQIVMETLYGDSLRLQQVLADFLLISINFTPNGGQVVVAGTLTKEQLGKSVHLVKLELSITHGGSGVPEALLNQMFGNNGLESEEGISLLISRKLLKLMNGDVRYLREAGKSAFILSAELAAAHNLKG

SEQ ID NO: 9145 - protein, 398 aa, Streptococcus mutans UA159
MAKLTVKDVDLKGKKVLVRVDFNVPVKDGVITNDNRITAALPTIKYIIEHGGRAVLFSHLGRVKEEADKKGKSLAPVAADLAKKLVQEVVFPGVTRGEQLEAAINALKNGEVLLVENTRFEDVDGKKESKNDPELGKYWASLGDGIFVNDAFGTAHRAHASNVGISANVDKAVAGFLLENEIAYIQEAVDNPVRPFIAILGGSKVSDKIGVIENLLKKADKVLIGGGMTYTFLKAQGIEIGDSLVEEDKLDIAKDLLAKANGKLILPVDSKEANAFADYTEVKDTEGAAVDPGFLGLDIGPKSIAKFDDELTGAKTVVWNGPMGVFENPDFQAGTIGVMDAIVKQPGVKSIIGGGDSAAAAINLGRADKFSWISTGGGASMELLEGKVLPGLAALTEK

SEQ ID NO: 9146 - protein, 269 aa, Salmonella typhimurium LT2
MEKKIGFIGCGNMGKAILGGLIASGQVLPGQIWVYTPSPDKVAALHDQYGINAAQSAQEVAQVADIVFGAVKPGIMVKVLSEISSSLNKDSLVVSIAAGVTLDQLARALGHDRKIIRAMPNTPSLVNAGMTSVTPNALVTPEDTADVLNIFRCFGGAEVIAEPMIHPVVGVSGSSPAYVFMFIEAMADAAVLGGMPRAQAYKFAAQAVMGSAKMVLETGKHPGELKDMVCSPGGTTIEAVRVLEERGFRAAVIEAMTKCMEKSEALSKS

SEQ ID NO: 9147 - protein, 327 aa, Spiroplasma citri
MLKKIGILTSGGDSQGMNAAIAGVIKTAHAKGLETYIIRDGYLGLINNWIEVVDNNFADSIMLLGGTVIGSARLPEFKDPEVQKKAVDILKKQEIAALVVIGGDGSYQGAQRLTELGINCIALPGTIDNDITSSDYTIGFDTAINIVVEAIDRLRDTMQSHNRCSIVEVMGHACGDIALYAGIAGGADIISINEAALSETEIADRVAMLHQAQKRSVIVVVSEMIYPDVHKLAKLVESKSGYITRATVLGHTQRGGNPTAMDRYRAFQMAQFAVEQIIAGVGGLAIGNQGDQIIARPIMEALSIPRSSRKEIWAKFDQLNQNIYQKS

SEQ ID NO: 9148 - protein, 560 aa, Oryza sativa
MNSAAAAAACASAPAWVVGGGAGGGARSARGPCGIRGAAVRRAAVAARAAAENGVAGSGGFDYDLVIIGAGVGGHGAALHAVEEGLKTAIIEGDVVGGTCVNRGCVPSKALLAVSGRMRELHDEHHMKSLGLQVSSPGYDRQAVADHANNLASKIRSNLTNSMKALGVDILSGFGAIVGKQKVRYGKVGFPDKEITARNIIIATGSVPFVPKGIEVDGKTVFTSDHALKLESVPDWIAIVGSGYIGLEFSDVYTALGSEVTFVEALDQLMPGFDPEIAKLAQRVLINPRNIDYHTGVFASKITPAKDGKPVQIELIDAKTKEHKETLEVDAALIATGRAPFTKGLGLENINVVTQRGFIPVDERMRVMDADGNVVPNLYCIGDANGKLMLAHAASAQGISEISMVGLTEPQAREKADKEGFEISVVKTSFKANTKALAENEGDGLAKLIYRPDTGEILGVHILGLHAADLIHEASNAIALGTRLQDIKFAVHAHPTLSEVLDELFKAAKVVMRETWNTLIFVFRVEHSKIFVFGIKRHFIKFANSHGSRRRSFARPFIPK

SEQ ID NO: 9149 - protein, 410 aa, Methanosarcina mazei Goe1
MFFNSMKAIILAAGEGLRCRPLTLTRSKVMLPVANRPILEHVISSLEKNEIKEIILVVGYEKERIMNYFEDGLNFGVNISYVEQKAQLGTAHAIEQAKKLIGPEDSEFLVLNGDNLVEPKTIADLLNNYEGDASLLTVRMEDTAGYGVVLKEKKKVTQILEKRPGGLSRLVNTGIYIFTPQVFETIEKTPISENGEYAITDTLQLMIDEGKMVTSIPTESKWLDAVHSWDLLKANATVLNASKNLKQEGELEEGVIIRGNVAIGKNTIIRSGTYIVGPVVIGENCDIGPNVVILPSTTIGDNVSIRSFTEIQNSIIMNDCRISSHGQISNSIIGSNNTLGPGFTAEEKENLEININCKVHKAPKLGTILGDDNRIGGRVLVKAGVMIAVNCQVESGNTIYRDLSRDSVVL

SEQ ID NO: 9150 - protein, 364 aa, Streptococcus mutans UA159
MTEDYKLDTILAHAGINTDKTTGALTAPIHLSTTYQHPQFGQSTGFDYTRTKNPTRTVLEETLAKIEKAKYALVTSSGMAALVLLFTGFPIGSKVVAARDLYGGSFRWFNEQEKAGRFSFVYTNTETDMIAAISDETDYVFIETPTNPLMIEFDISKVAQAAHKHGAKVIVDNTFYSPIYQNPLVLGADVVLHSATKYLSGHNDVLAGVLMTSDQEIYDKLFYDQNTTGPTLSPLDTYLLMRGLKTLKLRMEKATQNAKTVVAYLEKSPAVKEVLYTGKGGMISFKVVDEKKIPQILNHLQLFTFAESLGGVESLITYPATQTHLDIPEEVRHSYGLTDDLLRLSIGIEDAEDLIDDLKAALEA

SEQ ID NO: 9151 - protein, 334 aa, Staphylococcus aureus subsp. aureus Mu50
MIETFKAFVIDKDESGKVTPTFKQLSPTDLPKGDVLIKVHYSGINYKDALATQDHNAVVKSYPMIPGIDLAGTIVESEAPGFEKGEQVIVTSYDLGVSHYGGFSEYARVKSEWIIKLPDTLTLEESMIYGTAGYTAGLAIERLEKVGMNIEDGPVLVRGASGGVGTLAVLMLNELGYKVIASTGKQDVSDQLLELGAKEVIDRLPVEDDHKKPLASSTWQACVDPVGGEGINYVTKRLNHSGSIAVIGMTAGNTYTNSVFPHILRGVNILGIDSVFTAMKLRQRVWRRLAKDLKPENLHEIKQVITFDELPEQLNKVINHENKGRIVIDFGVDK

SEQ ID NO: 9152 - protein, 397 aa, Methanosarcina mazei Goe1
MKAVVLVAGKGTRMEPLTSDCPKVMLQVANKPVLEHILDSAVEAGIEGFVFITGYLEDQIKTHFGDGSRWGVSIEYVQQKEQLGTANAIGYARGHVEGAFLVLNGDMLIEKSDLQSLLERKEEAVICVKEVENPSDFGVLETEGERVIRIIEKPKNPPTKLANAGIYLFRESIFGFIDRTELSVRKELEITDSIQMLIDSGAPAGYSLLGDSWIDIGYPWDLLKANEHLLKTLKGYCRGNVEPNVTLRGEVAIGKGSLIRSGAYIEGPVVIGDYCDIGPNCFIRPSTAIGNKVRIGNAVEVKNTIVMEGTHIGHLSYVGDSVIGRRCNFGAGTKVANLRHDGKNIKVMLKGRIIDSGRRKLGVIMGDDVHTGINTSINIGVVMGKGRATVPGEVVKH

SEQ ID NO: 9153 - protein, 429 aa, Crocosphaera watsonii WH 8501
MIHDIFMPALSSTMTEGKIVSWTKSPGDKVSKGETVVVVESDKADMDVESFYDGYLATILVEAGQEAPVGDAIALIAETEAEIAQAQQKSPSSPQKSPEPSPPQKEELATATAPVSTATATVTAPPSTNGKSNRIVASPRAKKLAKQLGIALNTVEGSGPYGRIVAEDIEKAAGKTPTPPAIATQTPVTTPTPKVAVTPTPTPVTAGETVPLNTLQKAVVQNMMATLQVPTFHVGYTITTDELDKLYKQLKPKGVTMTALLAKAVAVTLEKHPVVNANYGEQSIRYPQSINIAIAVAMPDGGLITPVLQNADKIDIYSLSRTWKDLVDRARSKQLQPEEYSSGTFTLSNLGMFGVDRFDAILPPGQGSILAIGASSPQVVATADALLGVKRQMAVNITCDHRVIYGSDAAAFLQEFANLLENNVQSLTM

SEQ ID NO: 9154 - protein, 260 aa, Caulobacter crescentus CB15
MTPILLLGAGRMGGALIQGWQAAGAFDAADLIIRDPHVDAAAFAGAVVNPPLETLGAAKTVLLAVKPQIWREAIADVVPHLAPDAVIVSIAAGVRAADISQAFGGRRVARVMPTTAVAIGQGAASLYADDAEALARARALFAPLAAVAELASEDLMHAATAVSGSAPAYLYAFIEALEAAGAAQGLDPAQSARLARATIIGAAALMAQSGEEPAELRKQVTSPGGTTAAALSVLMGAGGFGDLLPKALDAAVARSKELGG

SEQ ID NO: 9155 - protein, 149 aa, SYNECHOCOCCUS SP. WH 8102
MAFDQLLLTAAPWLAWSGLGLGVLTIVAFLTGWGLRFRLVGVSSFTLLLAVSCWAFALSYTPPVVVDGAIRAPVVFDNGNDLVVAQVKPDLDPITVDATLQQLAGNLRGSGRGSNFVTVRLRALQPIADGVSQPVILGETERDFRRSAS

SEQ ID NO: 9156 - protein, 180 aa, Spinacia oleracea
MASSVLSSAAVATVSRTPAQASMVAPFTGLKSTVGFPATKKNDDITSLASNGGRVQCMKVWPTQNMKRYETLSYLPPLTTDQLARQVDYLLNNKWVPCLEFETDHGFVYREHHNSPGYYDGRYWTMWKLPMFGCTDPAQVLNELEECKKEYPNAFIRIIGFDSNRQVQCVSFIAYKPAGY

SEQ ID NO: 9157 - protein, 272 aa, Leptospira interrogans serovar lai str. 56601
MEELFSKLGYSGLFGIIWTSFLIRYLLFSGISFWVVWILFEKKFFHKLIQGKKPAKENIIHEVKYSFVTFFIFALSGVFVVWAKRNGYNQIYENVEDYGILYLIFSLLALIFLHDFYFYWTHRMMHHKFLFKHVHLAHHKSINPSPWAAFSFHPLEAIIEAGIVPIVSFVLPLHPGVMIVFFVYMTSLNVLGHLSYEFFPSWFLRNKFTNWHNTTTHHNMHHKYFNCNYSLYFNFWDKIMRTNHEKYKETFEEVSSRSPNKEYILEKSKILT

SEQ ID NO: 9158 - protein, 753 aa, Escherichia coli
MSQHNEKNPHQHQSPLHDSSEAKPGMDSLAPEDGSHRPAAEPTPPGAQPTAPGSLKAPDTRNEKLNSLEDVRKGSENYALTTNQGVRIADDQNSLRAGSRGPTLLEDFILREKITHFDHERIPERIVHARGSAAHGYFQPYKSLSDITKADFLSDPNKITPVFVRFSTVQGGAGSADTVRDIRGFATKFYTEEGIFDLVGNNTPIFFIQDAHKFPDFVHAVKPEPHWAIPQGQSAHDTFWDYVSLQPETLHNVMWAMSDRGIPRSYRTMEGFGIHTFRLINAEGKATFVRFHWKPLAGKASLVWDEAQKLTGRDPDFHRRELWEAIEAGDFPEYELGFQLIPEEDEFKFDFDLLDPTKLIPEELVPVQRVGKMVLNRNPDNFFAENEQAAFQPGHIVPGLDFTNDPLLQGRLFSYTDTQISRLGGPNFHEIPINRPTCPYHNFQRDGMHRMGIDTNPANYEPNSINDNWPRETPPGPKRGGFESYQERVEGNKVRERSPSFGEYYSHPRLFWLSQTPFEQRHIVDGFSFELSKVVRPYIRERVVDQLAHIDLTLAQAVAKNLGIELTDDQLNITPPPDVNGLKKDPSLSLYAIPDGDVKGRVVAILLNDEVRSADLLAILKALKAKGVHAKLLYSRMGEVTADDGTVLPIAATFAGAPSLTVDAVIVPCGNIADIADNGDANYYLMEAYKHLKPIALAGDARKFKATIKIADQGEEGIVEADSADGSFMDELLTLMAAHRVWSRIPKIDKIPA

SEQ ID NO: 9159 - protein, 265 aa, Triticum aestivum
MEGSSSGKHFMLVHGLCHGAWCWYKLVPMLRAAGHRVTALDMAASGAHPARMDEVPSFEDYSRPLLDAVAAAPAGERLVLVGHSLGGLNIALAMERFPRKVAAAVFLAACMPCVGRHMGVTTEEIMRRIKPDFFMDMKRMVLNTSQGPRPALVFGPKLLAAKLYDRSSAEDQTLATMLVRPGCQFLDDPTMKDEAMLTDANYGSVNKVYVVAMADASNSEEMQRWMVDLSPGTVAEEIAGADHMAMCSKPRELCGVLLRIADKYE

SEQ ID NO: 9160 - protein, 503 aa, Zea mays
MMLAILARRRAAEAVLRRPQAAAGAAVSAWRAYAAAGEESDVVVVGGGPGGYVAAIKAAQLGLKTTCIEKRGTLGGTCLNVGCIPSKALLHSSHMYHEAKSSFAHHGVKFSNLEVDLPAMMAQKDKAVAGLTKGIEGLFKKNKVTYVKGFGKLSSPSEVSVDLIDGGSTVVKGKNIIIATGSDVKSLPGITIDEKKVVSSTGALCLSEIPKKLVVIGAGYIGLEMGSVWNRLGSEVTVVEFAPDIVPSMDGEVRKQFQRMLEKQKFKFMLKTKVVGCDTSGDGVKLTLEPAAGGEQNILEADVVLVSAGRTPFTSGIGLETLGVETDKAGRILVDKRFMTNVKGVYAIGDAIPGPMLAHKAEEDGVACVEFIAGKEGHVDYDTVPGVVYTHPEVASVGKTEEQVTALGIPYRVGKFPLLANSRAKAIDDAEGVVKVIAEKETDKILGVHIMAPNAGEIIHEAVIALQYGASSEDVARTCHAHPTVSEALKEACLQTFNKAIHI

SEQ ID NO: 9161 - protein, 547 aa, GIBBERELLA ZEAE PH-1
MSSSILNNRSARSTPAGANPAFNPPAEASSSSTQSGVPYIRENSPEAESIPSNPAMTPIITHGDSLASPGGRNSEADTVVPLQPAVSQDAIRSRPGSRTGNFVTPKAARFSQDGAEPIMQYSSGSVKSARRRTREREDYDFDQAADYAPMSEYERYYRNEGRNDRDRYTRRGPYPPPTFMNRRRAPPLDSDEEFYSSDDPRIPPNDRRRMMDEEAGYPGRPHAFRRTSTLNGFNITTGKLQWNELSRQEKSEIMRLPLTQWMNSNFKNHFVAGVGEFIGTTMFLFFAFAGTEVANIQADTTNRTTTGESTGSLNVSKLLYISIIFGFSLMVNVWVFFRISGGLFNPAVTMAMLMVKAISVTRAIVLFLAQILGSMLASVVVRYLFPETFNVRTTLGGGASLVQGVFIEALLTAELVFTIFMLAKEKHRATFIAPVGIGLALFIAEMVGVQFTGGSLNPARSFGPCVITGSFDTEHWIYWVGPAIGSLIAVCFYWFIKTLEYEMANPGADGDDLNDPTKNPEKRAEIQASKPVPTAAFGSGKTASILS

SEQ ID NO: 9162 - protein, 424 aa, Xylella fastidiosa Dixon
MSNSPQTPLVTRQRLSEVRYEIRGELARRARELEAEGRKLIKLNIGNPGAFGFRAPEHLQRAIADDMGRTDPYTHQQGLPIAREAIAAAYARRHYPDADADRVFVGNGVSELIDLSLRALLNPGDEVLVPSPDYPLWSAATILNDGRPVYYRCAPENGFQPDAVEIETLVSSRTRAIVLINPNNPSGANYSQELLERIAAIAVKHHLLLLVDEIYDQILYDGAVFVPVAPLAGTHPCITFSGLSKVHRACGWRVGWALLSGSSIQVDNLRNAMDLLGALRLCANVPGQYAIDAAVNGPDTITPLCSPGGPLYETRRAVIDACAASEHLSLVVPAGALYAFPSVVGPAARHFDDYAFALELMNEEGVLVVPGSSFNVPYRDHFRVTLLPDAGLIREVFSRIDRALSRRAEVAEKVVPLKLRSAAA

SEQ ID NO: 9163 - protein, 374 aa, Synechocystis sp. PCC 6803
MPLDNGSITDDTRIRAALPTIKDLLSKGAKVILGSHFGRPKGKVVDSMRLTPVGDRLGELLGQPVVKCDDCIGAEVTAKIASLPNGGVALLENLRFHAGEEGNDAEFAKALAANADLYVNDAFGTAHRAHASTEGVTHFLSPNVAGYLIEKELQFLQGAIEAPKRPLVAIVGGSKVSSKIGVIETLLDKCDKLIIGGGMIFTFYKAQGLNTGKSLVEEDKLDLAKSLMAKAKEKGVEFLLPTDVVVADNFAPDANAQTVGVDAIPDGWMGLDIGPDSVKTFQDALAGCGTVIWNGPMGVFEFDKFAVGTEAIACSLAELTASGTVTIIGGGDSVAAVEKVGVAEKMSHISTGGGASLELLEGKVLPGIAALDDR

SEQ ID NO: 9164 - protein, 246 aa, Burkholderia fungorum LB400
MQLSKRLAAELFGTFWLVLGGCGSAVLAASFDGPVHGLGIGFVGVALAFGLTVLTMAYAIGHISGCHLNPAVSVGLTVAGRFPARDLLPYIVAQVIGAVLGAFVLSLIATGKPGFDLVASGFASNGYGERSPGHYSLAAAFICEVVMTGFFLFVILGATDKRAPAGFAPIAIGLCLTLIHLISIPVTNTSVNPARSTGPALFVGGAAVDQLWLFWLAPILGAVIAGVLYPALAESRDSNSQKLALD

SEQ ID NO: 9165 - protein, 105 aa, Zea mays
MEHGSLTDSTSSTFSIMYEDHTLANSARFVLNQELCSSKPPTNNCYRMMATKDDAQRMKQAAKYPRVAFCGYTIPHPSEKKVNIRLQTTGDAAKDVLKDALQNLM

SEQ ID NO: 9166 - protein, 165 aa, Desulfovibrio vulgaris
MSTIVSVWAREILDSRGNPTVEVEVSLESGHTGGAAVPSGASTGSREALEMRDGDKGRYKGKGVEKAVDNVMGEIAEAIVGLNSLRQVQVDNTLLDLDGTDNKSRLGANAMLAVSLAHRAAASSFLGLPLYQYLGGVNAKVLPVPLMNIINGGAHAPNNLDIQEF

SEQ ID NO: 9167 - protein, 478 aa, Streptococcus mutans UA159
MADPFGFLKYERKDNPYRPVNERIKDFEELQTTLSVEERQKQAARCMNCGIPFCHEGTFYGGGRAVSGCPNDNLIPEWNDLIYKGDFRRAFERLTRTNPLPEMTGRVCPAPCEKACTEGLNGSGVTIHDNERFIIDNAFEEGWVADSGRPIERTGFKVAVVGSGPAGLSAAWRLNQLGHSVTVFERSDRFGGLLMYGIPNMKLDKKIVQRRIDTMASIGINFVANTEIGRDITAEELLEKFDRVILATGASVPRDLDIPGRDLKGIRFAVDFLTETTKNLLDSDTHELPPLLEGKHVLVIGGGDTGNDCIGTAVRLGAASVRQLEITPQLPEKRLPTNPWPQYPMINRTGYGQEEADFVQQTDLTDYITSTVEFLGENGQVTAVKTIKVGPGFKAIEGTEEVIKADLVLLAMGFTGAEKALFDQFRVECVYDDYSTRNEKVFVAGDARRGPSLVIWGIREGRKTAEKIDQNLRMMVTE

SEQ ID NO: 9168 - protein, 605 aa, Mucor racemosus
MADFTDSLIKNIGVHSSSPVMTSVNMGQLGEKLRQARTTTLASLSQALSKKPEAAAAAATAPNAVNESTTTPTTMQLPASEKATSQLEINVVEARNLTIADARKADTYCIVHYEGNTTSTLDKVDDGILPSTPLVIKSQVASGAFKAFEIMMSASSPKWMHRVNFDVTAGNKEITVFVYDRGNKLPNGEDRFLGMSSIVPNLVNKKTVELIFPLHGRPDDDQEVTGDVRLQVTFIDPKKANLKPEDFRIVRMIGQGSVGKVYEVIKRDSGRTYAMKVLSKRLLLAENEVDTAFNERNVLVQSLSSPFIANLKYSFQTTNHLFLVMDYFPGGELFDFLERERCLSEKRCQFFAAEIVCAFDNIHARNIVYRNLKPESILLDAHGHIALTDFGLCKQLKNKMDLIQGVPQVITQEYLAPEMVMQKPYGMAADWWSLGVLMFELLTGSPPFHSVEQGELFRQILEAPIKFPAGGCITEEAKDFICQLLERDPAKRLGSHGDVAQVKAHPFFKDLNWDVVYKKQMQLPFVPEVEEQLREEAIAAAAAISIPVTNSKTESTNANVMPVADQSKFKGFSYIREDVMAKKGEHRLGVNPEDEDPEVDFWFRQ

SEQ ID NO: 9169 - protein, 223 aa, Thermus thermophilus HB27
MELYLDTASLEEIREIAAWGVLSGVTTNPTLVAKVFAAKGEALTEEAFAAHLRAICETVGGPVSAEVTALEAEAMVAEGRRLAAIHPQIVVKLPTTEEGLKACKRLSAEGIRVNMTLIFSANQALLAARAGASYVSPFLGRVDDISWDGGELLREIVEMIQVQDLPVKVIAASIRHPRHVTEAALLGADIATMPHAVFKQLLKHPLTDIGLKRFLEDWEKVKP

SEQ ID NO: 9170 - protein, 229 aa, Robinia pseudoacacia
AHRAHASTEGVAKYVRPAVAGFLMQKELDYLVGAVSNPKKPFAAIVGGSKVSTKIGVIESLLAKVDILLLGGGMIFTFYKAQGHSVGSSLVEEDKLDLANSLMEKAKAKGVSLLLPTDVVIADKFAADANSKVVPASSIPDGWMGLDIGPDAIKTFSETLDKTQSIIWNGPMGVFEFDKFAAGTEAIAKKLAELSGKGVTTIIGGGDSVAAVEKVGLADKMSHISTGGG

SEQ ID NO: 9171 - protein, 581 aa, Bromus inermis
MVFSVAKKDTTPYEGQKPGTSGLRKKVTVFQQPHYLANFVQSTFNALPAEEVKGATIVVSGDGRYFSKDAVQIIAKMAAANGVRRVWVGQGSLLSTPAVSAIIRERIAADGSKATGGFILTASHNPGGPTEDFGIKYNMGNGGPAPESVTDKIFSNTKTISEYLIAEDLPDVDISVIGVTTFTGPEGPFDVDVFDSATEYVKLMKTIFDFESIKKLLASPKFSFCFDGMHGVAGAYAKRIFVDELGASESSLLNCVPKEDFGGGHPDPNLTYAKELVDRMGLGKTSNVEPPEFGAAADGDADRNMILGKRFFVTPSDSVAIIAANAVQSIPYFASGLKGVARSMPTSAALDVVAKNLNLKFFEVPTGWKFFGNLMDAGMCSVCGEESFGTGSDHIREKDGIWAVLAWLSILAYKNKDNLGGDKLVTVENIVLQHWGIYGRHYYTRYDYENVDAEAAKELMANLVKMQSSLSDVNKLIKEIQPNVADVVSADEFEYTDPVDGSVSKHQGIRYLFGDGSRLVFRLSGTGSVGATIRIYIEQYEKDSSKTGRESSDALSPLVDVALKLSKIQELTGRSAPTVIT

SEQ ID NO: 9172 - protein, 268 aa, uncultured marine bacterium
QPNAMGRREVGGLANQLAAHMDFATRMQSNWSSAFGQAPNMAQENGLKAIDMFQAVEQGKIKVLWIMSTNPMVSLPDTEQVRRALEKCELVIVSDCKQSTDTTAYADVLLPALPWSEKDGTVTNSERRISRQRGLLPARGEAKADWWAICQVAGAMGYQSAFSYRSVHDIFREHAALSGFENHGKRDLDISLFSNISEQAYQDLLPIQWPVTKESPNGTARMFTDGRFFTADRKANFIPIDVKEPQIAPDEDWPFVLNTGRVRDQWHT

SEQ ID NO: 9173 - protein, 271 aa, uncultured marine bacterium
QPNAMGGREVGGLANTLAAHFEFGDPQSHQTVSEFWQADNLATHAGLKAIDLFDAMNEGKIKAVWIMATNPVVSLPDSEKIKTALEKCPFVVVSDCIVDTETTRLADVVLPAQGWSEKSGTVTNSERRISRQRRVLPSPGEAKPDWWILKEVAQKMGFKDQFDYRHEGQIFKEYCEMTALGNETGKARDLCLIGLTKLDEQGYGELTPHEWPVMEYQPEIIEQRMFTNGEFFTEPGKAQFIAVEHDKPIADTSVEFPLIMNTGRIRDQWHT

SEQ ID NO: 9174 - protein, 313 aa, Psychrobacter sp. 273-4
MSALQQLRTMTTIVADTGDLAAIERLKPIDATTNPSLITKALIHPDNEAVLSETMSRHRNDIDAVIDELTIQIGCNILSLIEGRVSTEVDARLSYDTQATIDKALAFMEAYQKSGIDSERVLIKMAATWQGIEAARYLETQGIHCNLTLLFGQHQAIACADAGVTLISPFVGRILDWQKRQQNRQNIPVSDDMGVQSVKLIYQYYKQHGYKTQVMGASFRSTEQILALAGCDLLTIAPNLIDELAAMDIEVTRQLSESMSMDMTDMTRVSLSAEEFSHAYQQDTITQDLLPKGIDGFISARDELAHMLASMRS

SEQ ID NO: 9175 - protein, 268 aa, uncultured marine bacterium
QPNAMGGREVGGLANMLAAHMDIENPEHRQWVQEFWDSPTICTEPGLKAIDLFDSMEQGKVKAVWIMATNPLVSMPNRGKITRALENCDFVVVSDCVEQNDTLALADVKLPATAWSEKEGTVTNSERSISRQRAFKAATGGAKNDWQIICDVAQKMGYSEGFDFQTPHQIFVEHARLSGVNNFGDRDFDISALADLSLKDYQQLKPVQWPVNQRYPDGCKRLFTDGRFFTPSGKARFIPLHPELPQQQTCKDYPLILNSGRIRDQWHT

SEQ ID NO: 9176 - protein, 259 aa, uncultured marine bacterium
QPNAMGGREVGGLANQLAIHRGFDPDSIKLISEFWQTDNLATRPGLKAIELFEAVERGDIEVIWIMATNPVVSMPDNVFIQRALQKCPLVIVSDVTHDSDITQYADLLLPAAGWGEKQGMVTNSERMLTRQRKFLTSKGEAKPDWKIIAEVGKKLCERLDKPNAFDFKSESSVVREYAAMTGLNKDTPLLLDLSKYAEISDEEYESWNPVQWGSSRPFADGKFSTENRKARFVVTTAPLIKGESRLWLNTGRQRDQWHT

SEQ ID NO: 9177 - protein, 541 aa, Oryza sativa
MASPPTASASASEAAESGRRSAPGPIDVPSPRDHLHHLLDRRDTPRVVHVEGTTMQRQRGEAAGDAGAAAAAKPEVKLVTGDGGYVLEDVPHVCDYLPDLPTYSNPLQDNPAYSVVKQYFVNPDDTVCQKAIVHKDGPRGNHFRRAGPRQRVFFESDEVHACIVTCGGLCPGLNTVIREIGGYRGFYACNTIDLSPKSVNDIHKRGGTVLGTSRGGHDTMKIVDSIQDRGINQVYVIGGDGTQRGAGVIFEEIRRRGLKVAVAGIPKTIDNDIPVIDRSFGFDTAVEEAQRAINAAHVEAGSAENGIGLVKLMGRHSGFIAHYATLASRDVDCCLIPESPFYLEGEGGLFRYLEKRLKENGHMVIVVAEGAGQKLINETKESMGKDASGNSILLDVGLWLSQKIKEHFKKIKTTINLKYIDPTYMIRAIPSNASDNVYCTLLAHSVVHGAMAGYTGFTVGQVNGRHCYIPFYRITEKQNKVSITDRMWARLLSSTNQPSFLSKKDVEDAKMEEERASKFFDGPPPNPKVEDKVASNGKAVK

SEQ ID NO: 9178 - protein, 259 aa, uncultured marine bacterium
QPNAMGGREVGGLANQLPIHRGFDPDSIKLISEFWQTDNLATRPGLKAIELFEAVERGDIEVIWIMATNPVVSMPDNVFIQRALQKCPLVIVSDVTHDSDITQYADLLLPAAGWGEKQGMVTNSERMLTRQRKFLPSKGEAKPDWQIIAEVGKKLCERLDKPNAFEFKSESSVFREYAAMTGLNKDTPFLLDLSKYAEISDEEYESWNPVQWGSSRPFADGKVSTENRKARFVVTTAPLIKGESRLWLNTGRQRDQWHT

SEQ ID NO: 9179 - protein, 436 aa, Archaeoglobus fulgidus DSM 4304
MAIEVELHKLREWMWKYSLGRDGGNNSDHFLRIKIPGGIISPDRLRGVAELSDKYGRGYAEITTRQDIQLHWIEAEDALEIFAEMEKLGFTTDLCSQAFAETCHGDVRNAVCCPLSGKKGYDAYWLVREITDFFSGNPDYVSLPHKFKIGISTCESNCIREEAQDLAMQWNGEGFVPLVGGGLGASKPGVRKAKSLRIVVYEEDAFDFIRTVIDIYKDFRAERKAEARFKNFFETAGCEWLRREIELRMGVKFDLADDFNCNPPSEHTEGLQDDGSNYYTLPVFAGILDSERLSFIAEVAEEFDGGIRLTPWQNVVFTDIDDLKALKERLSEQFDLSAPRMHIACASNFCGKTLVHAKDVLRHIPASDRFVGVSGCSNACACHPLAEIGLCGKVKAGKQLYDVFIHGWKEAENLSVEEAVELIKKHLGDGYGAKAD

SEQ ID NO: 9180 - protein, 181 aa, Xanthomonas campestris pv. campestris str. ATCC 33913
MSQSIHDIPVTDINGGATSLAAHRGKVLLVVNVASKCGLTPQYEGLEALYRDKQAQGLEVLGFPANDFNGQEPGSEAEIAQFCQLTYDVTFPLFSKIAVTGAEIHPLYQALTSAQPQATGDGPMREKLAGYGIAANPAPGVLWNFEKFLIGRDGQVIERFAPDVAADDVRLRQAVDAALAH

SEQ ID NO: 9181 - protein, 408 aa, Bordetella bronchiseptica RB50
MSSNEQTRRGFLADRVLGAKPSATKEMTRLANQLRQEGRDVIALSQGEPDFPTPEHVREAAKAAIDQGESRYTEVAGTLALREAVARKFERDNGLAYSPEQIQVGCGAKQILYNALQATINPGDEVVVPTPAWVSYPEMVLLAGGQPVIVRCGASSGFKLSPRQLEESITPRTKWLMLNSPSNPSGAVYSAEELAALAEVLARHPQVWVMADDIYEKIRYDDTPFATPAAIAPELAARTLTINGVSKAYAMTGWRVGFGAGPAALIKAMNLVQSQSTSHTSSISQAASIAALDGPMDFLPAFVAAFRRRRDSVVARLNAIEGLACDLPPGAFYAFPGCQALLGRRDPSGTLVSTDLDFALYLLREAGVAIVPGSAFGLSGHFRVSYAASDEQLAQAMARIAAACARLS

SEQ ID NO: 9182 - protein, 335 aa, Xanthomonas campestris pv. campestris str. ATCC 33913
MKAIAYPQHGLPIDDPRALVALDLPLPTPGPRDLRVRIHAISVNPVDTKVRATAPVEAPRVLGWDASGVVDAVGDEVTLFQPGDAVYYAGALTRPGTNAEYHLVDERLVGRKPATLDDASAAALPLTAITAWELLFDRLGIVEGGGAGQTLLVVGAAGGVGSILVQLARALTQLTVVGTASRPQTQDWVYALGAHHVIDHTEPLAAGLQRIGIAQVQHVASLTHTDQHFAQLVEVLAPQGQLALIDDPATLDALPLKRKSLSLHWELMFTRSLFATDDMIAQHHLLNRVAALVESGVLRTTLGEHYGRITVDNLRRAHAALESHRTRGKLVLEGF

SEQ ID NO: 9183 - protein, 407 aa, Flaveria trinervia
MESRVLSSGATAISGVPRLTKPAGRITTTTVAVAFPARLNATGGNVVWGRQLRPSLLNLDHSSPVSLVTKPVKRDVLKPCSATASDSAGDAAPVGFLAKYPFLVTGFFFFMWYFLNVIFNILNKKIYNYFPYPYFVSVIHLAVGVVYCLGSWTVGLPKRAPVDSNILKLLIPVGFCHALGHVTSNVSFAAVAVSFTHTIKALEPFFNAAASQFVLGQSIPISLWLSLAPVVIGVSMASLTELSFNWLGFISAMISNISFTYRSIYSKKAMTDMDSTNLYAYISIIALLFCIPPAVLFEGPQLLKHGFNDAIAKVGMIKFISDLFWVGMFYHLYNQIATNTLERVAPLTHAVGNVLKRVFVIGFSIIVFGNKISTQTAIGTSIAIAGVAIYSLIKARIEEEKRRMKSA

SEQ ID NO: 9184 - protein, 408 aa, Flaveria pringlei
MESRVLSSGATTISGIPRLTRPAGRTTTTTVVAVASPAKLNTNGGNLVWGRQLRPSLLNLDHSSPVSLVTKPVKRDVLKPCTATASDSAGDAAPVGFFAKYPFLVTGFFFFMWYFLNVIFNILNKKIYNYFPYPYFVSAIHLAVGVVYCLGGWAVGLPKRAPMDSNLLKLLIPVAFCHALGHVTSNVSFAAVAVSFTHTIKSLEPFFNAAASQFILGQSIPITLWLSLAPVVIGVSMASLTELSFNWLGFISAMISNISFTYRSIYSKKAMTDMDSTNLYAYISIISLLFCIPPAIILEGPQLLKHGFSDAIAKVGMTKFISDLFWVGMFYHLYNQLAINTLERVAPLTHAVGNVLKRVFVIGFSIIVFGNKISTQTAIGTSIAIAGVAVYSLIKAKIEEEKRGLKSA

SEQ ID NO: 9185 - protein, 242 aa, Petrotoga miotherma
MGDPQGFLKYERKNPEERPPKMRINDWEELYIEMEKDELRIQAARCMNCGTPFCHSGILINNMVSGCPLNNLIPEWNDLAYRNLWREAYERLIETNSFPEFTGRVCPAPCEKACVNNLVKDPVSIKSIEYYIIEEAFKNGWVEEDKPSYSTGKKVAVVGSGPAGLSCAWELNRYGHEVTVFEKNEYPGGLLTYGIPNMKLDKKIAKRRIELMGKSGIQFKTNVNVGKDYPVQKLKEEFDAVT

SEQ ID NO: 9186 - protein, 194 aa, Synechocystis sp. PCC 6803
MPTLIVATGNPGKLAEMQTYLEPLGCQLTLKPTEIEVEETGSTFYENACLKASQVAKAVNQWAIADDSGLAVDALDGAPGLYSARYGNTDRERIAKLLQALEGVSQRQAQFICVVSIAAPDGSIQLSTKGICSGEITHSPRGDQGFGYDPIFWLPEHKKTFAEMTKVEKQKVSHRGKAFNKLIHQWPGLKFDSF

SEQ ID NO: 9187 - protein, 355 aa, Zea mays
MAPSSYEVAASILLCAEDSSSILDLEAEAEEEALLARSGEPGGGAEFPVPSEECVAGFLESEAAHMPREDYAERLRGGGMDLRVRTDAIDWIWKVHTCYGFGPLTACLAVNYLDRFLSLYQLPEGKAWMTQLLSVACLSLAAKMEETYVPSSLDLQAGDARYVFEAKTIQRMELLVLSTLKWRMQAVTPLSYVDYFLHRLRGGAAPSRRAVLRSAELILCIARGTHCLDFRPSEIALAVAATVAGEERAVDIDRAFTHRVHKERVSRCLEAIQQATATMALPQPLKSEGPSSSGRRASSSSATVPRSPTGVLDAGCLSYRRAAAAAASHASSSWRDEDDDDCPPAVCSKRRKISR

SEQ ID NO: 9188 - protein, 299 aa, Streptomyces venezuelae
MRLGTPEERTVKGIFLAGGHGTRLHPITLGTSKQMLPVYDKPMIYYPLSVLMLAGIRDIQIISSPDDIENFRRLLGDGSPLGISLSYAVQEQPRGLAEAFLISADHIGDDSVALVLGDNIFHGPGFAGILQDKAVDVDGCVLFGYPVRDPERYGVGEVDADGRLVSLEEKPEHPRSDLAITGLYFYDNDVIDIAKNLTPSARGELEITDVNRIYLERGKAELVSLGRGFVWLDAGTHDALTEAGQYVQILEHRQGVRLACLEEIAWRMGFIDREACLRLGEELSKSPYGQYVMEIARAG

SEQ ID NO: 9189 - protein, 668 aa, Shigella flexneri 2a str. 301
MRIADDQNSLRAGNRGPTLLEDFILREKITHFDHERIPERIVHARGSAAHGYFQPYKSLSDITKADFLSDPNKITPVFVRFSTVQGGAGSADTVRDIRGFATKFYTEEGIFDLVGNNTPIFFIQDAHKFPDFVHAVKPEPHWAIPQGQSAHDTFWDYVSLQPETLHNVMWAMSDRGIPRSYRTMEGFGIHTFRLINAEGKATFVRFHWKPLAGKASLVWDEAQKLTGRDPDFHRRELWEAIEAGDFPEYELGFQLIPEEDEFKFDFDLLDPTKLIPEELVPVQRVGKMVLNRNPDNFFAENEQAAFHPGHIVPGLDFTNDPLLQGRLFSYTDTQISRLGGPNFHEIPINRPTCPYHNFQRDGMHRMGIDTNPANYEPNSINDNWPRETPPGPKRGGFESYQERVEGNKVRERSPSFGEYYSHPRLFWLSQTPFEQRHIVDGFSFELSKVVRPYIRERVVDQLAHIDLTLAQAVAKNLGIELTDDQLNITPPPDVNGLKKDPSLSLYAIPDGDVKGRVVAILLNDEVRSADLLAILKAMKAKGVHAKLLYSRMGEVTADDGTVLPIAATFAGAPSLTVDAVIVPCGNIADIADNGDANYYLMEAYKHLKPIALAGDARKFKATIKVADQGEEGIVEADSTDGSFMDELLTLMAEHRVWSRIPKIDKIPA

SEQ ID NO: 9190 - protein, 549 aa, Agrobacterium tumefaciens str. C58
MFWGQEFVALYNDIYAPTIGNKHPHAFGRPAREYWNELWDDLEPLLKRVLDKGETIAAKDRPFYIERHGYPETVYFDISYSPVTDQDGIVRGVFCIVNETTERVKADAALRESEERLRAIFAQSAVGIALGDLTGKLISVNDHFCQIVGRRRDELIGIQMQDITFAEDLPENQRLFKHMVETGESFEIEKRYVRGDGSLVWVLNSVSAIRDDQGNMSQAVAISADIGERRHAQEVERHLASMIASSNDAILGIDLDMTITSWNAAAEKLYGYSEDEVVGRTVLMLVPDDRQEEEPTILRQIKAGRIVEPYETQRLRKDGRLVEVLLSVSPIRDVNGRVIGASKTAHDITARKDADRLRSILVNELHHRVKNILATVTAIARQTIGRDKANHEDMEAFTSRLGSLSRAQDLLVHADWQHADLRAVLQQALSPYPAESFQISGPGVSLPPRAVVSLSLALHELATNAAKYGALSVPEGQVSISWQRQGTDGERLRVVWEERGGPEVMSPQRKGFGSTLVERLLSAELNGETKLFYEKNGVICVIEAEINHV

SEQ ID NO: 9191 - protein, 299 aa, Medicago truncatula
QSFGLPYLSPYLNSLGSNFTHGANFATAGSTIKIPNSIIPNGMFSPFSLQIQSIQFKDFIPKAKFIRDQGGVFATLIPKEDYYSKALYTFDIGQNDLTAGFFGNKTIQQVNTTVPDIVKSFIDNIKNIYNLGARSFWIHNTGPIGCVPLILANFPSAIKDRYGCAKQYNEVSQYFNLKLKEALAQLRKDLPLAAITYVDIYSPKYSLFQNPKKYGFELPLVACCGNGGKYNYNIRAGCGATININGTNTVVGSCKKPSTRIIWDGTHYTEAANKIVFDQISNGAFTDPPIPLNRACYKK

SEQ ID NO: 9192 - protein, 385 aa, Medicago truncatula
MEKFELLRHMSLVSLIVLILCIITPPIFATRNCDFPAIFSFGASNVDTGGLAAAFQAPPSPYGETYFHRSTGRFSDGRIILDFIAQSFGLPYLSPYLNSLGSNFTHGANFATGGSTINIPNSIIPNGIFSPFSLQIQYIQFKDFISKTNLIRDQGGVFATLIPKEDYFSKALYTFDIGQNDLIGGYFGNKTIKQVNATVPDIVNNFIVNIKNIYNLGARSFWIHSTVPSGCTPTILANFPSAIKDSYGCAKQYNEVSQYFNLKLKKALAQLRVDLPLAAITYVDIYSPNYSLFQNPKKYGFELPHVACCGYGGKYNIRVGCGETLNINGTKIEAGSCKNPSTRIIWDGSHFTERRYKIVFDQISTGAFSDPPISLNRACTSFVVY

SEQ ID NO: 9193 - protein, 381 aa, Medicago truncatula
MAKIELSRHIPLVTLIVLVLCITPPIFATKNCDFPAIFSFGASNVDTGGLAAAFRAPPSPYGETYFHRSTGRFSDGRIILDFIARSFRLPYLSPYLNSLGSNFTHGANFASGGSTINIPKSILPNGKLSPFSLQIQYIQFKEFISKTKLIRDQGGVFATLIPKEDYFSKALYIFDIGQNDLTIGFFGNKTIQQVNATVPDIVNNYIKNIKNIYNLGARSFWIHGTGPKGCAPVILANFPSAIKDSYGCAKQYNEVSQYFNFKLKEALAELRSNLSSAAITYVDIYTPKYSLFTNPEKYGFELPFVACCGYGGEYNIGVGCGASININGTKIVAGSCKNPSTRIIWDGVHYTEAANEIVFSQILTGVFNDPPISLDRACYRK

SEQ ID NO: 9194 - protein, 583 aa, Betula pendula
MSSLSVRFLSPPLFSSTPAWPRTGLAATQAVPPVVAEVDAGRLEPRVEEREGYWVLKEKFREGINPQEKLKLEREPMKLFMEGGIEDLAKMSLEEIDKDKISKSDIDVRLKWLGLFHRRKHHYGRFMMRLKLPNGVTTSAQTRYLASVIRKYGKDGCADVTTRQNWQIRGVVLSDVPEILKGLDEVGLTSLQSGMDNVRNPVGNPLAGIDIHEIVATRPYNNLLSQFITANSRGNLAFTNLPRKWNVCVVGSHDLFEHPHINDLAYMPAIKDGRFGFNLLVGGFFSPRRCAEAVPLDAWVSADDIILVCKAILEAYRDLGTRGNRQKTRMMWLIDELGIEGFRSEVVKRMPNQELERAAPEDLIEKQWERRELIGVHPQKQEGLSYVGLHIPVGRVQADDMDELARLADTYGCGELRLTVEQNIIIPNIENSKLEALLGEPLLKDRFSPEPPILMKGLVACTGNQFCGQAIIETKARALKVTEEVQRQVAVTRPVRMHWTGCPNSCGQVQVADIGFMGCMARDENGKPCEGAAVFLGGRIGSDSHLGNLYKKGVPCKNLVPLVVDILVKHFGAVPREREESED

SEQ ID NO: 9195 - protein, 127 aa, Medicago truncatula
AQSFGLPYLSAYLDSSGTNFSHGANFATTSSTIRPPPSIIPQGGFSPFYLDVQYTQFRDFKPRTQFIRQQGGLFASLMPKEEYFSKALYTFDIGQNDLGAGFFGNMTIQQVNASVPEIINSFSKNVK

SEQ ID NO: 9196 - protein, 294 aa, Vigna unguiculata
MEQYEKVEKIGEGTYGVVYKARDRVTDETIALKKIRLEQEDEGVPSTAIREISLLKEMQHRNIVRLQDVVHSEKRLYLVFEYLDLDLKKHMDSSPEFVKDPRQVKMFLYQILCGIAYCHSHRVLHRDLKPQNLLIDRRTNSLKLADFGLARAFGIPVRTFTHEVVTLWYRAPEILLGSRHYSTPVDVWSVGCLFAEMVNRRPLFPGDSEIDELFKIFRILGTPNEETWPGVTALPDFKSTFPKWPPKDLATMVPNLDAAGLNLLSSMLSLDPSKRITARIAVEHEYFKDIKFVP

SEQ ID NO: 9197 - protein, 267 aa, Clostridium oceanicum
QPNAMGGREVGGLANQLAAHMGFSAEKTDRVQRFWQSPRIARQPGLNAVALFQAIAAGQVKAVWIMGTNPAVPLPDADAVRQALKQCPLVVVSDVMAMTDTAELAHIHLPALAWGEKEGSVTNSERCISRQRAFLSPPGQARADWWILSQVAQRMGYGEAFGYQHPSEIFSEHAALSAFENNGTRAFDIGLLAGWDKQQWLGMTPVQWPVNEQHPAGCLRLSGDKRFFHADGKARLLPVTPRLPQNAVSQRYPLVLNTGRIRDQWHT

SEQ ID NO: 9198 - protein, 453 aa, Agrobacterium tumefaciens str. C58
MKEYDAIFIGAGQAGPFLAARMAAMGRKVVLIERKFLGGTCVNAGCMPTKTLVASAKTAQVARRASEFGVRIDGEPVVDMKAVAARARKVTLDARSGLASWFDSLETMDVVYGHARFVGAKVVSVGGSLYTAPQIFINVGARPHIPDVPGLANVPYLTSTSVIALEELPKHLVVLGGSYIGLEFAQMYRRFDAQVTVIERGQYLASREDEDISQAIADILTRDGIKVLLSHKIVSVTTDSAEITVRTDQGDVRGSHVLVAVGRQPNTDDLGLDQAGVETDRRGYITVDERLQTNVEGIWALGDCNGRGAFTHTSYNDFEIAAANLLDGGDRKVSDRILGYGLYIDPPLGRVGMTERQAKEAGHRIKVATRPMNRVGRAVEKGETLGLMKLVTEADTDRVLGAAFLGVGGDEAVYGVLDAMNLGATTEKLRWAVPIHPTVGELVPTLISDLKET

SEQ ID NO: 9199 - protein, 388 aa, Vibrio vulnificus CMCP6
MSHRKPATIAVRTGIESDTQYRAVVPPIYLSTNYGFSAFGEVPKYDYTRSGNPNRGLLEQALFELESGKGAVVTNCGTSALNLWVSAFLSPDDLIVAPHDCYGGTYRLFNTRAKKGDFKVRFVDQSDSAALDAALALNPKLVLLETPSNPLVRVVDIAEVCEKAHKVGALVAVDNTFLTPVYQKPLELGADFVIHSTTKYINGHSDVIGGVVITKTEEHATELSWWGNCLGATGTPFDSYMTLRGIRTLGARMRVHEESSQQILSYLQTQELVGTIYHPSLPAHPGHEIAKKQQSGFGSMLSFEFAGSFEQLKVFVKALDLFSLAESLGGVESLVCHPASMTHRAMGEEALAEAGVTQQLLRLSVGLEDAQDLIADLKQAFQQAKESC

SEQ ID NO: 9200 - protein, 268 aa, Fischerella sp. AEA-2001/1
QPNAMGGREAGGLAHLLPGYRLVKNPQHRAEVEEIWGLKRGQISPNPGLTAWDMITGLEDGNVGLLWIAATNPAVSMPDLERTKAALMRSPFTIYQDAYYPTETATYAHVLLPAAQWSEKTGVMTNSERRVTLCPAFRRPPGQAEPDWEIFAEVGRRLGFVGEFAFANSAEVFAEFVKLTCDRPCEMTGLSHEQLQPQGPTQWPHPDKEIEKRGNGESKRLYTDLRFHTPDGRARFGAYHSRGLAEPPDPDYPFVLTNGRLYGHWHTL

SEQ ID NO: 9201 - protein, 273 aa, Klebsiella pneumoniae
QPNAMGGREVGGLANMLAAHLDLDNEDHVQAVQTYWNAPLMPAQQGLKAVDLFNAVEQGKVKFIWIMGTNPVVSMPNRLQVKRALRKCDMVVVSDIVASNDTLNFAHVALPATGWSEKNGTVTNSERRISRQRGILAAPGEAKHDWQIMCEVAKAMGFANAFSFSHPAQIFSEYAGLTAYQNNGKRLLNLSPLQGLSEAQYDELSPIQWPIRHAFEQGNELVSLRLSPINKFSTANGKAPVSTRKNLTHRCNLPNAAYPFIVNSGRVRDQWHT

SEQ ID NO: 9202 - protein, 174 aa, Spiroplasma kunkelii
MQIDKLELYLPEDKIQNKIKDYAEKLNKLYEGKTLYCIGLLNGALFFMSDLLKQLKIQIVIDTMSISSYIGTHSTNKLTIHKNISKDITGQDVLLIEDLIDTGKTLSAVIEQIQAKKPNSLQVVCLADKIAMHPNFNYPYDALFIVPNEFIVGYGFDYNDQFRQLPNVYIWRGE

SEQ ID NO: 9203 - protein, 267 aa, uncultured marine bacterium
QPNAMGGREVGGLANQLAAHMGFSAEETDRVQRFWQSPRIARQPGLNAVALFQAIAAGQVKAVWIMGTNPAVSLPDADAVRQALKQCPLVVVSDVMAMTDTAELAHIRLPALAWGEKEGSVTNSERCISRQRAFLSPPGQARADWWILSQVAQRMGYGEAFGYQHPSEISSEHAALSAFENNGTRAFDIGPLAGRDKQQWLGMTPVQWPVNEQHPAGCLRLFGDKRFFHADGKARLLPVTPRLPQNAVSQRYPLVLNTGRIRDQWHT

SEQ ID NO: 9204 - protein, 273 aa, uncultured marine bacterium
QPNAMGGREAGGLCNILPGYRLVNNPQHRAEVEQFWGVRPGTIQPQRGRTAWEMIQGLETGEVGFLWIAATNPAVSMPDLKRTQAALKRSPFTVYQDAYYPTETAAYAHILLPAAQWSEKTGVMTNSERVVNLCPQFRDPPGVARADWEIFAEVGQRLGFEKQFSFPNSAQVYAEFVKITEGRPCDSSGLSYEKLRRYGPLQWPYADTWPYLEGEELDRQNRTNMRLYTDFCFNTPDGRARFGAYHSRGLAEPSDQAYPFVLTTGRLYGHWHT

SEQ ID NO: 9205 - protein, 431 aa, Bordetella bronchiseptica RB50
MSEPKQPSWRLETIAVHGGYRPDPTTRAVAVPIYQTVAYAFDDTQHGADLFDLKVPGNIYTRIMNPTTDVLEQRVAALEGGVAALALASGQAAVTYAILTIAEAGDNIVSSSTLYGGTYNLFAHTLPQYGITTRFADPRNLASFEALIDERTKAIFAESVGNPLGNVTDIAALAEIAHRHGVPLIVDNTVPSPYLLRPIEHGADIVVQSLTKYLGGHGTSLGGAIIDSGKFPWAEHKARFKRLNEPDVSYHGVVYTEAFGAAAYIGRARVVPLRNTGAAISPFNAFQILQGIETLALRVDRIVENSVKVAGFLRDHPKVEWVNYAGLPDHADHALVRKYMGGKAPGLFTFGVKGGREAGARFQDALQLFTRLVNIGDAKSLATHPASTTHRQLNPEELEKAGVREETVRLSIGIEHIDDLIADLEQALAQV

SEQ ID NO: 9206 - protein, 421 aa, Bradyrhizobium japonicum USDA 110
MKTAKRSPIWHPFTQHALQRDMTKVVRGEGAYLYTEDGRRLIDAISSWWVVTHGHCHPCIVNAIREQAGKLNQVIFAGYTHDPAEQVATELLKVTSPALEHVFFSDSGSTSVEVALKMALGYWRNTGRERTKIVVMQHSYHGDTIGAMSVGSRGIFNAAYGALMFEVTSIPFPARDCEQRALDALENACRNEHPAAFIVEPLILGAGGMLMYSPSVLREMKRICEAFDVLFIADEVMTGWGRTGTLFACEQADVTPDIACYSKGLTAGALPLAVTLCRADIFDAHYSEDRTRTFFHSSSYTANPVACAAAKANLDLWQDQEYRWRLASLARMQEQALAPFRLDSRFANVRRTGTVTAVELNTRDAGYLADIGPRLLAFFQARDLLLRPLGNTIYVMPPYCVTAADLDEIYTAIRDAADLLM

SEQ ID NO: 9207 - protein, 426 aa, Streptococcus pyogenes SSI-1
MKLQKPKGTQDILPGDAAKWQYVESVARDTFSQYNYGEIRTPMFEHYEVISRSVGDTTDIVTKEMYDFYDKGDRHITLRPEGTAPVVRSYVENKLFAPEVQKPVKLYYIGSMFRYERPQAGRLREFHQIGVECFGAANPATDVETIAMAYHLFEKLGIKDVTLHLNSLGSPESRSAYRQALIDYLTPMRDQLSKDSQRRLDENPLRVLDSKEKEDKLAVEKAPSILDYLDEESQAHFEAVKAMLEALDIPYVIDTNMVRGLDYYNHTIFEFITSVEGSDLTICAGGRYDSLVGYFGGPETPGFGFGLGLERLLMVIEKQGITLPIETEMDVYLAVLGDGANSKALELVQAIRRQGFTAERDYLGRKIKAQFKSADTFKAKLVMTLGESEVEAGKAVIKNNRSRQEVEVSFEDMMTNFANISEQLLS

SEQ ID NO: 9208 - protein, 165 aa, Escherichia coli B
TANEIAALAFVNTVVATAAAILGWIFGEWALRGKPSLLGACSGAIAGLVGVTPACGYIGVGGALIVGVVAGLAGLWGVTMLKRLLRVDDPCDVFGVHGVCGIVGCIMTGIFAASSLGGVGFAEGVTMGHQLLVQLESIAITIVWSGVVAFIGYKLTDLTVGLRVP

SEQ ID NO: 9209 - protein, 422 aa, Vibrio parahaemolyticus RIMD 2210633
MAKTIQAIRGMNDCLPTQSPLWQKLENTVKNVISAYGYNEVRMPIVEETNLFSRAVGEETDVVSKEMYTFDDRNGDSLTLRPEGTAGCVRSCIQNSLINRDEQRLWYMGPMFRHERPQKGRYRQFHQCGVEVFGLNGPDVDAELIMMTARLWRELGIDKHVRLELNSIGSQEDRADYRTALVAFLEQHIDVLDEDCKRRMHTNPLRVLDTKNPDIQAILGDAPRLSEYLGEESKAHFAGLCELLDAAGIEYTVNERLVRGLDYYNRTVFEWITESLGAQGTVCGGGRYDGLVEQLGGKPTPAVGFAMGLERLVLMLETLELTDVRRSVDVYVVTAGEGTMMAGMKLAEQLREAISGVRVMNHFGGGNFKKQFKRADKVGAVVALVLGENEVADNTVVLKDLVGGEQETYNQAEVAEKIAALI

SEQ ID NO: 9210 - protein, 519 aa, Staphylococcus aureus subsp. aureus Mu50
MKIKAQVAMVLNLDKCIGCHTCSVTCKNTWTNRPGAEYMWFNNVETKPGVGYPKRWEDQEHYKGGWVLNRKGKLELKSGSRISKIALGKIFYNPDMPLIKDYYEPWNYNYEHLTTAKSGKHSPVARAYSEITGDNIEIEWGPNWEDDLAGGHVTGPKDPNIQKIEEDIKFQFDETFMMYLPRLCEHCLNPSCVASCPSGAMYKRDEDGIVLVDQDACRGWRYCMTGCPYKKVYFNWKTNKAEKCTFCFPRIEAGMPTVCSETCTGRMRYLGVLLYDADRVHEAASAVDEKGLYEKQLDIFLNPFDEEVIAQAEKDGIGYDWIEAAQNSPIYKLAIEYKLAFPLHPEFRTMPMVWYCPPLSPIMSYFEGKNTTQNPDAIFPAIEEMRLPIEYLANIFTAGDTEPVKGALQRMAMMRSYMRSQVTQQPFDTSRLERLGITERQTKDMYRLLGLAKYEDRFVIPTSHKETYLDTYHAQGSTGYNYGGEHFGDNCEGCGVAVGSGKTGQEIYNENFYGGIFRD

SEQ ID NO: 9211 - protein, 262 aa, Eremothecium gossypii
MNHDPFEWGRPLDSHYGAYNAAIANAGPSQHTQQPIVTGTSVIAMKYNNGTIIAADRLGSYGSLLRFTDMDRLFAVGESTVVGVSGDVSDMQYLQRLLQDMEIENNYDNSHADGAEALKPSYIFEYLASLMYQRRSKLNPLWNAIIVAGVEDGQAFLRYVDLKGVKYSAPSLATGFGAHMAIPLMRKVADAEKDVAGVDLSIARATILESMKVLFYRDARSSRRFSLAIIDNDAGVSMEQLEVENMTWGFAKDIRGYGTQNV

SEQ ID NO: 9212 - protein, 454 aa, Asparagus officinalis
MGPPDVVPSEHVEFDFSDVFGPSPTPTSTGVNVFASDGSTPAASDDIVYTEPAVILARSHSLVGPTALVCQSPRLRKHILHEADLELVECPSGVEGEQDKPFSCVAEEHEVPSSENVERVGLEDFDFLKVVGQGAFGKVFQVMKKGTSEIYAMKVVRKDTILEKNHSEYMKAERDILTKIDHPFIVQLRYSFQTKYRLYLVLDFVNGGHLFYQLYHQGLFREDLARIYTAEIVSAVSHLHANGIMHRDLKPENILLDADGHVMLTDFGLAKEFEENTRSNSLCGTIEYMAPEIIQGKGHDKVADWWSVGILLFEMLTGKPPFIGGNRDKIQQKIVKDKLKLPAYLTSEAHSLLKGLLQKEASKRLGGGPAGSNEIKNHKWFKLINWRKLEAREIQPSFKPNVAGKICVANFEERWTSMPLTVSPVASPVAGSGNFSGFTYVKPSVFLQKPSPLG

SEQ ID NO: 9213 - protein, 497 aa, Rhodopseudomonas palustris CGA009
MSPTAAARAADQAASLRDRLKDPSLLREQCYIDGAWSGTSTIAVTNPASGQTIAKVPHLGAAEATQAVEAAAQAFPAWAKLTAKQRSNILRKWFELIIANREDLALILTSEQGKPLTEALGEVDIGAAYVEFFAEEARRVYGETIPTQRADARLIAIKQPIGVCGAITPWNFPSSMITRKVSPALAAGCTVVLKPAEETPLSAFALAALAEKAGVPKRVFNVLTGDAPAIGKVLCEHPAVRFVGFTGSTEVGKILYKQASVGVKKLGLELGGNAPFIVFDDADVDAAVEGAMVSKYRNMGQTCVCANRLYVQDGVYDAFVEKLAAKVKAMKVGDGTEQGVTQGPLINEAAVEKTERHIADALSNGAKIITGGKRHALGGTFFEPTVLADVRPDALVAHEETFGPLAPVFRFKDEAEVIKLANNSPFGLASYFYARDLGRVWRVAEALESGMVGVNTGLITTEVAPFGGVKESGLGREGSHHGIEEYVEIKYVMMAGI

SEQ ID NO: 9214 - protein, 500 aa, Beta vulgaris subsp. vulgaris
MSMPIPSRQLFIDGEWREPIKKNRIPIINPSNEEIIGDIPAGSSEDIEVAVAAARRALKRNKGREWAATSGAHRARYLRAIAAKVTERKDHFVKLETIDSGKPFDEAVLDIDDVATCFEYFAGQAEAMDAKQKAPVTLPMERFKSHVLRQPIGVVGLITPWNYPLLMATWKIAPALAAGCTAVLKPSELASITCLEFGEVCNEVGLPPGVLNIVTGLGPDAGAPLAAHPDVDKVAFTGSSATGSKVMASAAQLVKPVTLELGGKSPIIVFEDVDIDQVVEWTMFGCFWTNGQICSATSRLLVHESIAAEFIDRLVKWTKNIKISDPFEEGCRLGPVISKGQYDKIMKFISTAKSEGATILCGGSRPEHLKKGYFIEPTIISDISTSMQIWREEVFGPVLCVKTFSSEDEALELANDTEYGLASAVFSKDLERCERVSKLLESGAVWVNCSQPCFVHAPWGGIKRSGFGRELGEWGIENYLNIKQVTSDISNEPWGWYKSP

SEQ ID NO: 9215 - protein, 286 aa, Triticum aestivum
PDVRGLIHAALRLGYRHLDCAADYQNEAEVGDALAEAFQTGLVKREDLFITTKLWNSDHGHVLEACKDSLKKLQLDYLDLYLIHFPVATRHTGVGTTSSALGDDGVLDIDTTISLETTWHAMEELVSMGLVRSIGISNYDIFLTRDCLAYAKIKPAVNQIEVHPYFQRDSLVKFCQKHGICVTAHTPLGGSTANTEWFGSVSCLDDPVIKSLAEKYGKTPAQLVLRWGLQRNTVVIPKTSKLERLQENFEVFDFDISGEDMEKMKAVDRKYRTNQPAKFWGIDLFA

SEQ ID NO: 9216 - protein, 187 aa, Equisetum arvense
DEHGEVVAEIRRADLEPYLGLHYPATDIPQASRFLLMKNRVRMIHDCRAPPIRVIQDEHLPQPLSLAGSALRAPHGCHAQYMENMGSIASLVMAVTLNDNEFDNANESLKRRKLWGLIVCHHTSPRAVPFLRSACEFLMQVFGLQLNMEVELAAQMREKHILRTQTLLCDMLLRDAPIGIVTQSPNI

SEQ ID NO: 9217 - protein, 500 aa, Beta vulgaris
MSMPIPSRQLFIDGEWREPIKKNRIPIINPSNEEIIGDIPAGSSEDIEVAVAAARRALKRNKGREWAATSGAHRARYLRAIAAKVTERKDHFVKLETIDSGKPFDEAVLDIDDVATCFEYFAGQAEAMDAKQKAPVTLPMERFKSHVLRQPIGVVGLITPWNYPLLMATWKIAPALAAGCTAVLKPSELASITCLEFGEVCNEVGLPPGVLNIVTGLGPDAGAPLAAHPDVDKVAFTGSSATGSKVMASAAQLVKPVTLELGGKSPIIVFEDVDIDQVVEWTMFGCFWTNGQICSATSRLLVHESIAAEFIDRLVKWTKNIKISDPFEEGCRLGPVISKGQYDKIMKFISTAKSEGATILCGGSRPEHLKKGYFIEPTIISDISTSMQIWREEVFGPVLCVKTFSSEDEALDLANDTEYGLASAVFSKDLERCERVSKLLESGAVWVNCSQPCFVHAPWGGIKRSGFGRELGEWGIENYLNIKQVTSDISNEPWGWYKSP

SEQ ID NO: 9218 - protein, 684 aa, Methanobacterium formicicum
MDIKYVPTICPYCGVGCGMNLVVKDEKVVGVEPWKRHPVNEGKLCPKGNFCYEIIHREDRLTTPLIKENGEFREATWDEAYDLIASKLGAYDPNEIGFFCCARSPNENIYVNQKFARIVVGTHNIDHCARLCHGPTVAGLAASFGSGAMTNSYASFEDADLIFSIGANSLEAHPLVGRKLMRAKMNGAYFIVADPRYTPTAKQADQYIPFKTGTDVALMNAMMNVIISEGLEDKEFIEKRTKNYEELKEVVSKYTPEMAEEITQVPADVIRDIAIKYAKADKAAIVYSLGITEHSHGVDNVMQTANLAMLTGNIGRLGTGVNPLRGQNNVQGACDMGALPTDYPGYRKVADQEVMEDVTCTWGCSDLGCEPGLKIPEMIDAAAKGDLKVLYITGEDPVISDPDTHHVEEALNNLDFFVVQDIFMTDTAEFADVVLPAACWAEQEGTFTNGERRVQLIRKAVDAPGESKYDWEIFCDLAKKMGADPEMFTYESAQDIFEEVRTVTPQYAGMNRERLDRPEALHWPCPSEDHPGTAMMHIEKFAHPDGLGIFMPLEEQGPMETPDDEYPLILTTTRLLFHYHAAMTRRAATLDREVPTGYVEINTEDAAELGIANKEKVKVKSRRGEIEIAARVTDDIVKGIVNIPMHFRECSANILTNAAAIDPKSGMPEYKACAVAISKMEGSK

SEQ ID NO: 9219 - protein, 268 aa, Leptolyngbya boryana
QPNAMGGREAGGLSHLLPGYRSVTNPGHRAELETFWQLPTGSISSNPGLTAWEMITGLETGNLGMLWVAATNPAVSMPDIERTKAALRQSPFTVYQECYYPTEMADYAHVLLPTTQWSEKTGVMTNSERRVTLCPQFRVAPGEARSDWEIFAEVGRRLGYRKQFAFNYAAEVYAEFVRLTRDRPCDQSGLSHTYLREMGATQWPFSSKAEPTQQKVEKAKRLYTDLKFHTPDGRARFSLVYSRGLAEPPDDNYPFVLTTGRLYGHWHT

SEQ ID NO: 9220 - protein, 259 aa, uncultured marine bacterium
QPNAMGGREVGGMANLLAAHRNLASADDRQEVADYWGVDKISDKPGLTATEMFKALESGEMKAVWIVCTNPLVSLPDARQAERALKNAKFVVVQDISSKSDTADYADLVLPAAGWTEKEGTMTNSDRRISYLPQINEAPGEAIPDTDILLKFAKAMGWEGFDYDSTEAVFNEHRELTRGTNIDITGLSYDYLKTKGTAQWPFVEGATEGTKRLFEDKVCWTPNQRAQIHTSLAANQSEKLTPDHPLVLTTGRIRDQWHT

SEQ ID NO: 9221 - protein, 546 aa, Bacillus licheniformis
MKKYRVNVQGMTCTGCEEHVAVALENMGAKRIEVDYRRGEAVFELPNGLEVETAKKAIAEAKYQPGEAEEVQSQELIQLGDEGDYDYIIIGSGGAAFSSAIEAVKYGAKVAIIERGTVGGTCVNIGCVPSKTLLRAGEINHLAKNNPFVGLHTSADDVDLAPLIKQKNELVTDLRNSKYVDLIDDYGFELIKGERKFVDEKNVEVNGIQLSAKRFLIATGASPAVPNIPGLDEVDYLTSTTLLELKKVPKRLTVIGSGYIGMELGQLFHNLGSEVTLIQRSERLLKEYDPEISEAITKALTEQGINLVIGAIYERVEQDGDMKKVHIEINGKKRIIEAEQLLIATGRKPNTESLNLHAAGVEVGSRGEIIIDDYLKTTNSRIYAAGDVTLGPQFVYVAAYEGGVAAGNAIGGMNKKLNLEVVPGVTFTTPAIATVGLTEQQAKEKGYEVKTSVLPLDAVPRALVNRETTGVFKLVADAKTLKVLGAHIVAENAGDVIYAATLAVKFGLTVEDLRGTMAPYLTMAEGLKLASLTFDKDVSKLSCCAG

SEQ ID NO: 9222 - protein, 558 aa, Spiroplasma kunkelii
MSYLDNLKLWKDAKNLDPTLATEFQQMSEADLIAAFSDDLEFGTAGLRGLLGPGTGKMNLYTIRRATLAFMQYLRTIYSATDLKSKGIVIGHDNRHFSAEFAQEVANIFASNNIKAILFTNNDLRPTPIVSYTIRKIKALAGVIITASHNSREYNGYKIYDHNGSQFLPVATDIIGENYLKIKEEVFTLTLNPDSTLITYVAKEVEDNYVSDVKAMHFYPNQKRNIKIVFSNLHGTSKEWTPRILKECGYDVTIVEEQFDNDPNFTFAPNPNPELTECYDLALKYAKKINADVIILNDPDADRLGIGVKIKDYEYYLMTGNETAPVLIEYLFSHYQRQKTLPKNGVMYNTFVTGNLSDKVAESYGVQVIKTLTGFKWIGDQMSKAADKGLEFLFGFEEAYGYVLKDITRDKDGIQSSLVLAEACWYYHNQGKTLYDVLVEQYNKFGFFYCKTVNLVRDGIDGKKIINNMLKKLRQKTITSLEKIKCIKKEDYLYGLYEMPGQDLLKFYFADGSWFAVRASGTEPKIKFYFVCVDKTNEEAKRKMEAMYQELETNYLKE

SEQ ID NO: 9223 - protein, 702 aa, Oryza sativa
  unsure (1)..(702): unsure at all Xaa locations
MDLESRIVASEDIGRQVLTYGERKPIEYFLKTVEEITLNDISSTAKKIISSPLTLASWGDVACCVFVQTHANIVLPVLHFNIESDVMASWLSHLPIHRCQLSFPAAQASYATPGIDSALLLDVDDMAGGDAGLNEGLKKQAKPRLRLPKPAAKRSESEFLRSRPLALLMASSHIILPPDDDDEEQRRLEEEEDEDPWARSGPPPAAPEHAMKAALPFSATCVRISRDSYPNLRALRNASSVSLADAAYVKISEGDFGYVLDDVPHLVDHLPDAPTYPNPLQDHPAYSTVKQYFVNEDDTVPQKVVVQKNSRRGVHFRRAGPRQKVYFESDEVKACIVTCGGLCPGLNTVIRELVCGLAHMYNVSKIYGIQVSXNGYKGFYSSNYLTLTPKSVDDIHKRGGTVLGTSRGGHDTKKIVDNIQDRGINQVYIIGGDGTQKGAYEIFKEIRKRGLKVSVAGIPKTIDNDIAIIDKSFGFDTAVEEAQRAIDSAHVEACSAENGIGLVKLMGRYSERRLKENKHMVIVVAEGAGQDLIAKSLSTSEQQDASGNKLLLDIGLWLTHKIKDHFKSKKMEMTIKYIDPTYMIRAIPSNASDNVYCTLLAHSAIHGAMAGYSFTVGNVNGRHAYIPFYRVTSTRNKVKITDRMWARLLSSTNQPSFLSQKDIDEAKENDRTANKPPLPTGLSHHVANSFDQSASSSSNSQI

SEQ ID NO: 9224 - protein, 382 aa, Zea mays
MENQGPKPIRCKAAVCRAAGEPLAIEEVVVDTPKAHEVRIRIICTSLCHSDVTFWRMKDLPDNIPRIFGHEAFGVVESVGEQVDEFAAGDAVVPTFLGQCSECVDCRSARSNMCSKYRFAVRPGMPRDGTTRFTDGQGRPLHHFFGVSSFAEYTVVDVNQVVKLNPAVPPALACLLSCGASTGVGAAWKQAKVEPGSSVAIFGLGAVGLAVAEGARICGASKIIGVDINPDKCELGKKFGVTHFINPKELGEEKPVHQAIAEMTDGGADYCFECIGLAALMNDAFRSSRDGWGKTIILGVEMHGAPLCISPHEILHGKSVIGSMFGGVKPKQDIPILADKYMNKELELDKFITHEVGLKDINQAFDLLLQGKSLRCTIWMDK

SEQ ID NO: 9225 - protein, 202 aa, Glycine max
  unsure (1)..(202): unsure at all Xaa locations
MSNEYDYLFKLLLIGDSSVGKSCLLLRFADDSYVDSYISTIGVDFKIRTVELEGKTVKLQIWDTXAGQERFRTITSSYYRGAHGIIIVYDVTEMESFNNVKQWLNEIDRYANDTVCKLLVGNKSDLVDNKVVDSLTAKAFADELGIPFLETSAKDSINVEQAFLTMAAEIKKKMGSQTTTGKSAESVQMKGQPIPQKSNCCG

SEQ ID NO: 9226 - protein, 262 aa, Trichodesmium sp. IMS101
QPNAMGGREAGGLAHLLPGYRMVKNSQHRAEVEKLWELTPGKISDVPGRSAWEMIMALERKEIGCLWIAATNPAVSMPDLKRTKAALLRSPFTIYQDAYNPTETAEYAHLLLPAAQWGEKTGTMTNSERVVTLCPAFREPHREAKADWEILAEVGRRLGFTNHFNFADSEAVRAEFLELTRDRPCDMTGITYQRLQEKGPTQWPCPDSSGVSQERLYTDFRFNTPDGRARFAAYYSQGLAEPPNPDYPFILTTGRLYGHWHT

SEQ ID NO: 9227 - protein, 617 aa, Spiroplasma kunkelii
MTKIIFEADDNCKGIVDKIFVTNKQVVQKGDKLSNIITQNKVYEIKAPITGEVLNIIVYENKVINSGDVLLNLLPFEATLNEHDNNFEQPYNTIYFNGSGKYNVQNRPPIDVKKSETEIFREELIETLLAREVAGENSQDDFEDSIEIDLSEENIVQDSTPFFSQNNDSKTFLFKNKVENVLENIPSEENIETLQKDLGDLKEDLAIVKDDLATIRIEEEEVIEELENLERDLSFTAGMAARKQVDYKKIDPLHHQPFDREEYKEENYTKEELKSNFSQSINNVDDSKIEPIINLEQDKLVENNPKDHHSQHSKSHSTVHLSVSSHYEKHKPVEDKSKGHHGEHSKSHSTVHSSVSSHLKKHKSEDITSREHSISSEHKIKENPQTLQVDKIKLNQEAIIRAKEIMESKKNIVNGFIDVEVDVSELVSLLLIMREAYSQNDIELTLLPFYVKAVYDGLKKFPVLNASFISQKNKILLKWFYNIAFSVDSYTAVKMPVLYNLKNVSIKEIASKVTKLISKSINNELKEKDCQNASFSIINYGEYGITRGTFTIPYDNVAGIAMGIIFKKPVVVEKNDIAIRDIMVITLGYNEAVIDITEASKFIHYVAYLLSNPGLLL

SEQ ID NO: 9228 - protein, 405 aa, Shewanella oneidensis MR-1
MSVDMKLNRAQFDAVMVPNYAPAAVIPVRGEGSRVWDQEGNEFIDFAGGIAVNCLGHCHPALVNALKTQGEKLWHLSNVMTNEPALELATKLVNSTFAERVYFANSGAEANEAALKLARRYALEKHGVEKDEIIAFDKAFHGRTFFTVSVGGQAAYSDGFGPKPQSITHLPFNDVAALEAAVSDKTCAIMLEPLQGEGGIIDADPAFLKAVRELANKHNALVIFDEVQTGVGRTGELYAYMGTDIVPDILTTAKALGGGFPIAAMLTTTEIAEHLKVGTHGSTYGGNPLACAIGNAVLDVVNTPEVLNGVKHREQLLRDGLNKINEKYHVFSEVRGKGLLLGAVLNEQYQGRSRDFLVASVAEGLMSLMAGANVVRFAPSLVIPEADIAEGLARFERAVASIAAA

SEQ ID NO: 9229 - protein, 428 aa, Magnaporthe grisea 70-15
MLSTMRIASRQVAGRRMAVRPLAALRPASTWANVQMGPPDAILGITEAFKADSNNKKINLGVGAYRDDAGKPYVLPSVRQAEEKVIAARMNKEYAGITGVPEFTSGALTLAYGKDSTALDRTAITQSISGTGALRIGAEFLSKFYPGAKNIYIPTPSWANHGAVFTQAGLKVEKYRYYNKDTIGLDFEGLVADVKAAPKGSIFLFHACAHNPTGVDPTPEQWREIETVVKSAGHYAFFDMAYQGFASGDIHKDAFALRHFVAQGHNVCLAQSFAKNMGLYGERVGAFSIVCDSAEEKKRVDSQLKILVRPMYSNPPIHGARIAAQILNTPALYDQWLAEVKGMADRIITMRALLKENLEKLGSKHDWSHITSQIGMFAYTGLTPEQMEQLAKSHSVYATKDGRIRSLVSPARTLAVLLRLSSRSRVRW

SEQ ID NO: 9230 - protein, 405 aa, Oryza sativa
MQRGGAGGRSGRGGGGGVRSRGGVARAYDKHRSKISSKFRALNVLLVVGDCILVGLQPILVFMSKVDGKFQFSPISVNFLTEVTKVVFAIVMLIIQSRKQKVGEKPLLARSTFIQAARNNALLAVPALLYAINNYLKFIMQLYFNPSTVKMLSNLKVLVIAVLLKFIMKRRFSVIQWEALALLLIGISINQLRTVPAGNTAFGLPVTAIAYIYTLIFVTVPSLASVYNEYALKSQYDTSIYLQNLFLYGYGAIFNFLGILGTALFQGPESFNILRGHSRATMFLICNNAAQGILSSFFFKYADTILKKYSSTVATIFTGLASAAFLGHTLTINFLLGISVVFISMHQFFSPLAKAKDDKPAELLELEDTQNHRSSESSFVNMTAGAAEDASHRIGTDERQPLLPT

SEQ ID NO: 9231 - protein, 260 aa, Vibrio diazotrophicus
QPNAMGGREVGGLANQLAVHRGFDTESVRLVKEYWQSPSIAAKPGLKAVELFEAVEAGKIKVLWIMATNPVVSLPNSDQVRRALKGCDFVVVSDITEQSDVAEYADLVLPAAGWGEKQGMVTNSERRMSRQRAFLPAPGEAKPDWWAVTQVGKKLRTKLNCESGFEFDSEAAVFREFAGLSAINTNSNYLFDLSKFASISDEEYANWQPTQWPLEKEAPYHDGVFSTPSGKAQFVAVTAPSTVMNGWWLNTGRLRDQWHT

SEQ ID NO: 9232 - protein, 267 aa, uncultured marine bacterium
QPNAMGGREVGGLANQLAAHMDFSEQDIETVKTYWNSPNIAKNPGLKAVDMFNAIATGQIKAIWIMPTNPLVSMPEVNQVRKALEQCELVIVTDCVKQTDTTELADILLPALAWGEKDGTVTNSERRISRQRAFLPSPGEAKADWWIINEVAKRMGFNDSFNYQSPDAIWREHAALTAANNDLQRDLDLSGLKDLSKLEYNRLQPVQGPCQDNSATNKNHMFEDRRFFHPDGKARFIPVKRCDSFPKTSLEYPLVLNSGRIRDQWHT

SEQ ID NO: 9233 - protein, 99 aa, Zea mays
  unsure (1)..(99): unsure at all Xaa locations
MAVTTGMMMRLLKHRLLTRTTTXTRGEPPTKEXFKXSFMSFATEXEKDADNXSGXXEXLYKAFLHEINTFELPLLKXXXXGXMXXXXEKEXFNXXXXEX

SEQ ID NO: 9234 - protein, 300 aa, Klebsiella pneumoniae
MKMNIANLKAVIPVAGLGMHMLPATKAIPKEMLPIVDKPMIQYIVDEIVAAGIKEIVLVTHSSKNAVENHFDTSYELEALLEQRVKRQLLAEVQAICPPGVTIMNVRQAQPLGLGHSILCARPVVGDNPFVVVLPDIILDGGTADPLRYNLAAMIARFNETGRSQVLAKRMPGDLSEYSVIQTKEPMVAEGQVARIVEFIEKPDEPQTLDSDLMAVGRYVLSADIWAELERTEPGAWGCIQLTDAIAELAKKQSVDAMLMTGESYDCGKKMGYMQAFVTYGMRNLKEGAKFRESIKKLLA

SEQ ID NO: 9235 - protein, 262 aa, Oryza sativa
MMTSTVPAAATATASRLILVHGAGHGGWCWYRVATMLRAAGHRVHAPDLAASGADARRLRDAPTFADYSRPLLDAVRALPGGERAVLVGHSLGGMSVALAAEELPERVAAAVFVAAFMPDCASPRPSVIDKLPWLDWMDSVRDEEHAPPSVKLGPELMRRKFYQLSPEEDFTLAQSLVRMGSSYVDDMRRRPPFSEARYGAARKVYVVCGEDLAIVEAYQRRMIADCPVEEVREIAGADHMAMFSAPAALAGHLADVANTYA

SEQ ID NO: 9236 - protein, 914 aa, Mycobacterium tuberculosis H37Rv
MSFVIAVPETIAAAATDLADLGSTIAGANAAAAANTTSLLAAGADEISAAIAALFGAHGRAYQAASAEAAAFHGRFVQALTTGGGAYAAAEAAAVTPLLNSINAPVLAATGRPLIGNGANGAPGTGANGGDAGWLIGNGGAGGSGAKGANGGAGGPGGAAGLFGNGGAGGAGGTATANNGIGGAGGAGGSAMLFGAGGAGGAGGAATSLVGGIGGTGGTGGNAGMLAGAAGAGGAGGFSFSTAGGAGGAGGAGGLFTTGGVGGAGGQGHTGGAGGAGGAGGLFGAGGMGGAGGFGDHGTLGTGGAGGDGGGGGLFGAGGDGGAGGSGLTTGGAAGNGGNAGTLSLGAAGGAGGTGGAGGTVFGGGKGGAGGAGGNAGMLFGSGGGGGTGGFGFAAGGQGGVGGSAGMLSGSGGSGGAGGSGGPAGTAAGGAGGAGGAPGLIGNGGNGGNGGESGGTGGVGGAGGNAVLIGNGGEGGIGALAGKSGFGGFGGLLLGADGYNAPESTSPWHNLQQDILSFINEPTEALTGRPLIGNGDSGTPGTGDDGGAGGWLFGNGGNGGAGAAGTNGSAGGAGGAGGILFGTGGAGGAGGVGTAGAGGAGGAGGSAFLIGSGGTGGVGGAATTTGGVGGAGGNAGLLIGAAGLGGCGGGAFTAGVTTGGAGGTGGAAGLFANGGAGGAGGTGSTAGGAGGAGGAGGLYAHGGTGGPGGNGGSTGAGGTGGAGGPGGLYGAGGSGGAGGHGGMAGGGGGVGGNAGSLTLNASGGAGGSGGSSLSGKAGAGGAGGSAGLFYGSGGAGGNGGYSLNGTGGDGGTGGAGQITGLRSGFGGAGGAGGASDTGAGGNGGAGGKAGLYGNGGDGGAGGDGATSGKGGAGGNAVVIGNGGNGGNAGKAGGTAGAGGAGGLVLGRDGQHGLT

SEQ ID NO: 9237 - protein, 895 aa, Oryza sativa (indica cultivar-group)
MASSSSKASDSSSQRPKRPDQGPSGKDAAGLVVLHGKLAQLKRQVQSTRLAAIKERVEANRKALQVHTCALFDVAAAAEVASRGAEGGNALSRGAAEGHCRLVGWDSASGPGERELVHVQEENLVAGTLVLSSSGGSGASHRTVVQLAKLPVVDKIPPYTTWIFLDKNQRMADDQLVCRRRIYYDPIVNEALICSESDDDVPEPEEEKHVFTEGEDQLIWKATQDHGLSREVLNVLCQFVDATPSEIEERSEVLFEKYEKQSQSSYETDFQLFLGKTMDVALDSFDNLFCRRCLVFDCRLHGCSQNLVFPSEKQPYGHGLDENKRPCGDQRYLRRREVYQDTCNDDRNACTTYNTDSRSSSLKVSATILSESEDSNRDEDNIKSTSIVETSRSKITNSEYADKSVTPPPGDASETENVSPDMPLRTLGRRKISKHASKSNDHSPDKRQKIYSSPFPFAMSVLNKQSVPEIGETCPDSIESAVDQLPSLDDPNKKISTKDMCAGSTTNTTENTLRDNNNNLFISNKEHSISHWSALERDLYLKGIEIFGKNSCLIARNLLSGLKTCMEVASYMYNNGAAMAKRPLSGKSILGDFAEAEQGYMEQDLVARTRICRRKGRARKLKYTWKSAGHPTVRKRIGDGKQWYTQYNPCGCQQMCGKDCACVENGTCCEKYCGCSKSCKNRFRGCHCAKSQCRSRQCPCFAASRECDPDVCRNCWVSCGDGSLGEPLARGDGYQCGNMKLLLKQQQRILLGKSDVAGWGAFIKNPVNRNDYLGEYTGELISHREADKRGKIYDRANSSFLFDLNEQYVLDAYRKGDKLKFANHSSNPNCYAKVMLVAGDHRVGIYAKDRIEASEELFYDYRYGPDQAPAWARRPEGSKKDEASVSHHRAHKVAR

SEQ ID NO: 9238 - protein, 645 aa, Deinococcus radiodurans
MRSAHSGEQTPVPPMSAAAPVVAPVPAPAPAAATSIRVPAARLEGLMDQLGELVTARARMTQLLSRLDELQGSMTASQERFQRTVRDFEERYLNPDMVREEGAAPTTRMGGLDLSQQFAELEFDTYNDLNILSRSITELSADFAEVRRRLSDTAAELSEENEQLGKLVRRLRLDVNQTSRVAFSQTTARLRRWAREQQADLTLQVEGEDVLIESGILQRISDPLLHLLTNAAYHGLASESAESRRAAGKNPQGTVWIRAAEQGNFLEVTVADDGQGLDYARIRERALERGLRSAQELEQLSSDELGRLILLPGFSTAREVGNVAGRGVGLDVVATAVRQLGGELLISSERGVGTAFTLRVPTTQRIMDVLHLDLGAGHHAALPVGSVRSLRDVPLGDLRRDDGQLWLDFGGQPVPVVDARPIWGHAPQDTDTEAHLAVVSSISGLLALRVHDFGDIEEVAVTAPSGLLAPLDYLAGMAVSGTGQVLAILDPAGVLRLSRRPATWLGQAQRQVQATGNQRLLLVDDSLSVRRLVGRMLERGGYQVVTASDGQEALDLLQQDADFGAVVTDLEMPRVNGYELLSAVRARPATAGLPMLVMTTRAGEKHQRLAFQLGADDYFTKPVNEALLLRRLGTLQQAQQAGVSA

SEQ ID NO: 9239 - protein, 296 aa, Streptomyces rishiriensis
MRGILLAGGTGSRLWPVTRAVSKQLIPVFDKPMIYYPLTTLMMAGIREILVITRPEDQRQFRHLLGDGSQLGLCLEYAVQEKPEGIAQAFVLGADFIGDQSVALVLGDNIFHGAGLGTRLRQYSDPAGGRIFAYVVADPRAYAVVEFDEAGTAVSIEEKPASPKSRYAVPGLYFYDNRVLEVARDLMPSQRGELEITAVNETYLKWGQLRVTTLDRGAAWLDTGTFTSLVQASEYVRVVEERQGLKIGCVEEVAWRCGLIGNDQLRELSRPLLKSGYGRYLLDLLADQELKELKSS

SEQ ID NO: 9240 - protein, 201 aa, Clostridium tetani E88
MKTVLLATNNENKVNEIKDILCELNLKVVSLKEVGINVEVEEDELTFMGNALKKALTLYNMIDDKKYMVLADDSGLSVDVLGGAPGVFSARYAGEHGNSKANNEKLLEDMKGLKNRKGKFICAMALVIDKDNIIKVQGEVEGSIGYEEKGDNGFGYDPLFFVSKYNMTFAEMDKDIKNSISHRRDALNKIKEKLKSYIEDK

SEQ ID NO: 9241 - protein, 182 aa, Triticum aestivum
  unsure (1)..(182): unsure at all Xaa locations
YSPWAPTVMASSATSVAPFQGLKSTAXGLPVSRRSNGASLGSVSNGGRIRCMQVWPIEGIKKFETLSYXCPPLSTEALLKQVDYLIRSKWVPCLEFSKVGFIFREHNAXPPGYYDGRYWTMWKLPMFGCTDATQVINEVEEVKKEYPDAYVRIIGFDNMRQVQCVSFIAFKXPPGCEESGKA

SEQ ID NO: 9242 - protein, 464 aa, Cytophaga hutchinsonii
MSTKFDVIVIGSGPGGYVAAIRASQLGKKVAVVEKAELGGICLNWGCIPTKALLKSAQVYEYIKHAKEYGINVGNAEADFTAVVKRSRDVAAGMSKGVQFLMKKNKIEIIAGFGKLVKGKQVEVTDDKGNKSLYGADHIILATGGRARELPNVKIDNNKIIGYRKAMVLESKPESMVIMGSGAIGVEFAYFYATMGTKVTIVEYLPNIVPVEDEEISKQLEKEYKKMGINIMTGAAVESVDTAGKGCKVTVKKGDATEVIECDIVLSAVGVATNLEGIGLEDVGVATDKGRVLVDDYYKTNIPGVYAIGDIVKGPALAHVASHEGIICVEKIAGLNPEPMDYGNIPGCTYCTPEIASVGLTEKAAKEKGYELKVGKFPFSASGKASAAGAKEGFVKVIYDAKYGELLGVHMIGANVTEMIAEAVVARKLEATGHEIINAVHPHPTMSEAIMEATAAAYGEVIHL

SEQ ID NO: 9243 - protein, 479 aa, uncultured bacterium 314
MSDKMLKFVNVGMQMPAKRAGGLRTKDFKEIYDQFIHEKAKEQSSRCSQCGVPFCQVHCPLHNNIPDWLKLTAEGRLQEAHELVHSTNNMPEICGSICPQDRLCEGNCVIEKAGHGTVTIGSVEKYITDTAWEKGWIKPIKVLKEIDQSVGIIGAGPAGLACAEELRKSGYKITIYDRYDRPGGLLIYGIPNFKLEKFTVERRTNLLKESGIKFKQDFEVGKDISLDELRKKHDTILIATGVYKPREIDLPGSDLKNIFPAMEFLTASNRKGLGDRVNNFDNGTLNAEGKNTIIIGGGDTGMDCVRTAVRQNAKSVKCLYRRDRENMPGSAREVHNAEEEGIEFIWLSNPKKFIGTSQISSVLVERMKLGKTDSSGRKKPEPIPNSGFEMKADMVINALGFDPEDLPKLFNSPDLSISKLGTIKINLKTMETNLSGVFAAGDIVRGASLVVWAIRDGRDATISIRKYLEHKRSKNVKAA

SEQ ID NO: 9244 - protein, 306 aa, Psychrobacter sp. 273-4
MNLIILFSGQGLQSQRHIDEVLKVTNENDQSLLHTVIPELFANDSDNIFDNETLFDNRFAQPFIYTLQYYRWQQLRQLLEKPSAFAGYSLGEINAFCCSSQLDFEVGLTLINHRAKFMEEGVSESSGLLAIQGLHNSELENLLLKTDTHLSIKINEDQFIIGGHRDNLSQADTLAQSLGARNTQLLKVTVPSHTKMMQKAAEKFCEYIDSITLPAMQIPIISATNGMKYNDTNQGLNILSSQIDHPLDWYFCMENIEEYQPSMIIEIGPGNALSKMINNLLPHVPCRSWDDFRHADGLLEWILKNK

SEQ ID NO: 9245 - protein, 631 aa, Bacillus macroides
MKKYRVNVQGMTCSGCEQHVAVALENMGAKGIEVDFSHGEAIFELPEQVEVEAAKKAIADANYQPGEAEEVQPQQQANSMKKYRLNVQGMTCTGCEEHVAVALENAGAKGIEVDFRRGEALFELPYDVDMDIAKKAITEAKYQPGEAEEIQAQSQETEDVSLVDQGNYDYDYIIIGSGGASFSSAIEAVSYGVKVAMIERGTVGGTCVNVGCVPSKTLLRAGEINHLAKNNPFVGLHTSASNVDLAPLVKQKNELVTGMRNEKYVNLIDDYGFELIKGEAKFTNENTVEVNGNHITAKRFLIATGATSSVPNIPGLDEVDYLTSTSLLELKKVPNRLTVIGSGYIGLELGQLFHNLGANVTLVQRSERLLKEYDPEISEVITQALTEQGINLDSGATYERVEQVGDIKKVHVEINGKKRIIEAEQLLIATGRKPNTESLNLHAAGVEVGSRGEIVIDDYLRTTNSRIYSAGDVTLGPQFVYVAAYEGGLAARNAIGGLNQKVNLEVVPGVTFTSPSIATVGLTEQQAKEKGYEVKTSVLPLDAVPRALVNRETTGVFKLVADAKTLKLLGAHVVAENAGDVIYAATLAVKFGLTIENIRETLAPYLTMAEGLKLAAITFDKDVSKLSCCAG

SEQ ID NO: 9246 - protein, 268 aa, uncultured marine bacterium
QPNAMGGREVGGLANQLAVHMDIDNVQDQKDLKTFWQSPTMCEKQGLKAVDLFNAIGDGKVKAVWIMATNPVVSLPDADKVKSALSNCELVVVSDCIAETDTTAFAHIKLPATTWGEKDGTVTNSERRISRQRSFLSPPGQARHDWRIICDVAKRMGFGEQFDYQGPVDIFREYAKLSDYKNDGKRDFDISLVADISEEGYDNWTPTQWPITRRAPTGTQRMFDDGRFFTPDKKARFIPVTAALPANASDSDFPLTLNTGRSRDQWHT

SEQ ID NO: 9247 - protein, 706 aa, Oryza sativa
MDEGLVSVDKFSGGSQAYFLTHLHQDHTRGLGAAGGWRHGPLYCSPVTARLLPTRFPGVDASLLRPLAPGASASLSLSSPSTGRAVSVVVTAIPALHCPGSLMYLFRGDLGCMLYTGDFRWELRCKRARAAKKALLDALAGDTVDVLYLDNTYCHPSLSFPPRPIVAEQEIFTTQTSLTRIRAVPRYSLTIESLDALNTVCPTIGIMPSGIPWLWKNSKGKAKSGVKSPAKSIRCKGLDEGAIEMDYDPLSPPKLFEKDSYNNVYSDKTPEKNKVNKSPQVSTHERVKEAFQIASGSWNLDLLVCKCKGVGRTSPGIYAAGPPPALLLNADSIPTSESRTFTLCLVLPSGSGSRSEGLGTKPTSDPTASFRWAHLSATATPTPTTSSSSSLELSAERTHADREGIPPLLASARGSETSRERSNTKPEHPPALLDLSGAARSERFAFGQAQDSMKNNLVKNNMLKEFYIPTYIFVPESPVEKVSQIPSCPVIVFINTKSGGQLGHDLIVTYRKLLNNSQVFDLLEEAPDKVLHKLYGNMERLMRDGDTVAAEIHRRLRLIRDLVMPPLVDDGLLEIVGFKDAWHGLVLLSPKGHGTRLAQAHRVQFKFHKGATDHAYMRLDGEPWNQPLPKDDGKVLVEISHAGQVKMLATKNCIAKGIHEALSMSTVHPESSSSSDDTDDDDDFAEERKNFGAALSFRYMDDVTKE

SEQ ID NO: 9248 - protein, 268 aa, uncultured marine bacterium
QPNAMGGQEVGGLANQIAAHMDIANDKHRDLVTRFWNAPNIATEDGLKAVDMFAAIERGDIRAVWIMGTNPVVSMPEANGVRQALEKCDLVVVSDLFANTDTAAVADVCLPALGWGEKEGMVTNSERRISRQRKFLTAPGEARADWRIICDVATRMGYSEAFQFSSVDEIFREHAALSAFENNGSRDFNLELAQNLSSQAYEDWQPIQWPFTATSPTGQKRMFSDGQFFTAHKKAKMLPVAAPVTPSQPDQDYPFVLNTGRIRDQWHT

SEQ ID NO: 9249 - protein, 268 aa, uncultured marine bacterium
QPNAMGGREVGGLANQLAAHMDFTPDAIDRVQRFWQAPNMATQPGLKAVDLFNAVEQGKIKAVWIMGTNPVVSMPNADQVKRALQGCPLVIVSDCIASTDTTALAHVLLPAAGWGEKDGTVTNSERRISRQRALVECAGEARQDWRILADVATAMGYGETFAYRSNADIFREHVALSSFENDAAGFRQFNLAALKNITDTAYDSLQPVQWPLLQPEQGTQRLYADGFFSTADGKARFIAVSVRAPANAPDADWPLILNTGRVRDQWHT

SEQ ID NO: 9250 - protein, 260 aa, Cytophaga sp. AEA-2001/3
QPNAMGGRKVEGMASLLAAHRDLGNPRHREEVRQFWGGKEINGEPGLTATEMFDALESGKMKAIWITCTNPIVSLPNAKKIEKALEKANFVIVQDISHNSETTKYADLLLPAAGWLEKEGTMTNSERRISYLPKVIDAPGEALPDAEILWRFAQKMGYGGFDYNNVSEVYDEYCLMTKGTNIDISGLSHERLQKEGSFQWPVPSPEHKGTPRLFQDQKYFTANGKVHFNAPRNLYNKSEITTTDFPLVLNTGRVRDQWHT

SEQ ID NO: 9251 - protein, 244 aa, Enterococcus faecium
MDYSLMTRLAAEMIGTALLIVLGNGAVANVDLKGTKGYGSDWMLIAVGYGFGVMMPAMIFGGISGNHINPAFTIALASNGLFPWAEVVPYIIAQLIGAAIGQLIVVACYKPYYDQTEDVNHVLGTFSTINSVGSKFNGFVNEFFGSFVLFFGALGITKAPFFQDNLGTAHLALGFLVWTLVASLGGPTGPGLNPARDFAPRLVHALLPLKHKGSSQWGYAWVPVVAPICAGVVAVFLYKLLFMA

SEQ ID NO: 9252 - protein, 259 aa, Pseudoalteromonas sp. AEA-2001/4
QPNAMGGREVEGMASLLAAHRDLGNPRHREEVRQFWGGKEINGEPGLTATEMFDALESGNEGHMDHLHQSHCEFAQCQKIEKALEKANFVIVQDISHNSETTKYADLLLPAAGWLEKEGTMTNSERRISYLPKVIDAPGEALPDAEILWRFAQMGYGGFDYNNVSEVYDEYCLMTKGTNIDISGLSHERLQKEGSFQWPVPSPEHKGTPRLFQDQKYFTANWEKYISIAPRNLYTNQKSQQPDFHWCFNTGRVRDQWHT

SEQ ID NO: 9253 - protein, 552 aa, Haemophilus somnus 129PT
MTALFTTAQNWLAQDPDAETRAELQTLLNQAKAGDMNAQKELHNRFNGRLQFGTAGLRGRLQAGSMGMNRVLVAQAAGGLAEYLKGYDSEPSIVLGYDGRKNSNVFVRDTAEIMAGAGIKTFLLPRKLPTPVLAYAIKYLNTTAGVMVTASHNPPEDNGYKVYLGKANGGGQIVSPADVDIAKLIDKVANGDIRDLPRSQHYTVLDDEIVEAYIAKTASIAKEPQANINYVYTAMHGVGYEVLSKTLAKAGLPQPHLVEEQIQPDGSFPTVKFPNPEEKGALDLAIKLAKAKNAEFIIANDPDADRLAVAVPDSEGNWKPLHGNVIGCFLGWYLAKQYHAQGKQGKLACSLVSSPALAEIAKKYGFQSEETLTGFKYIGKVNDLLFGFEEALGYLVDPDKVRDKDGISAAIAFLDLVRSLKKEGKTLTDYANDFTAEFGAYVSGQISIRVNELSDIGKMMTALRKEPLTELGGFKVTQFIDHSKTDRASDILVFVLENGSRLIVRPSGTEPKVKFYLDVCGTDPKNAGEVLAEFDENVRQILRQEKYGKQDC

SEQ ID NO: 9254 - protein, 126 aa, Glycine max
  unsure (1)..(126): unsure at all Xaa locations
LVHNHYYSLTSRCQLHRCAWLPVVSIKARQIFNSQGNPTVEVDLTCSDGTCAIAAGLSGAFTGMYEALELRDGGSDYLGQAGXYAASYANISLRPALIVKKIPEQTDIDNLMLYQRDGTAIERGRS

SEQ ID NO: 9255 - protein, 83 aa, Zea mays
ARSYHHLFPVPPFDEVTPVPNRIQRGGQICFSCQQSLYNPDGQSNLHVRCPKCNQHFCLDCDIYIHESLHNCPGCESQRSIAS

SEQ ID NO: 9256 - protein, 383 aa, Glycine max
  unsure (1)..(383): unsure at all Xaa locations
PRVRSNTCIIRILTVIAICIPRAKSFHLDFPAVFNFGDSNSDTGALIAAAFESLYPPNGQTYFQKPSGRYSDGRLTIDFLMDAMDLPFLNAYLDSLGLPNFRKGCNFAAAAATILPATASSLCPFSFGVQVSQFLRFKARALELIAKGRKFDKYVPDENVFEKGLYMFDIGQNDLAGAFYSKTLDQILASIPTILLELEKGIKNLYDQGARYFWIHNTGPLGCLPQNIAKFGTDSSKLDELGCVSSHNQAAKTFNLQLHALCTKLQGQYPDSNVTYVDIFTIKSNLISNFSRYGFEQPIMACCGYGGPPLNYDSRVSCGETKXFNGTTITAKACNDTSEYISWDGIHYTETANQYVASXQILTGKYSDPPFSDKMPFLLKLKF

SEQ ID NO: 9257 - protein, 245 aa, Gymnosporia polyacantha
ALSIAGAVQSQKLAVRAISQLQSLPGGDIKLLCDTVVESVRNLTGYDRVMVYKFHEDEHGEVVAESKRSDLEPYMGLHYPASDIPQASRFLFKQNRVRMIVDCHASPVRVIQDDGLMQPLCLVGSTLRAPHGCHAQYMENMGSLASLAMAVIINGNEEEAIGGRSPTRLWGLVVCHHTSARCIPFPLRYACEFLMQAFGLQLNMELQLAAQLLEKHVLKTQTLLCDMLLRDSPTGIVTQSPSIMD

SEQ ID NO: 9258 - protein, 245 aa, Gymnosporia polyacantha
ALSIAGAVQSQKLAVRAISQLQSLPGGDIKLPCDTVVESVRNLTGYDRVMVYKFHEDEHGEVVAESKRSDLEPYIGLHYPASDIPQASRFLFKQNRVRMIVDCHASPVRVIQDDGLMQPLCLVGSTLRAPHGCHAQYMENMGSLASLAMAVIINGNEEEAIGGRSPTRLWGLVVCHHTSARCIPFPLRYACEFLMQAFGLQLNMELQLAAQLLEKHVLKTQTLLCDMLLRDSPTGIVTQSPSIMD

SEQ ID NO: 9259 - protein, 302 aa, Eremothecium gossypii
MEICHHKGLLILFSRTELSESRSTGHIEVVMVSLHELVKGLKAAFQIRDYRTCVDLLGPIKIELIKTRLLVPDLLAASEGNATYLEDLEVAKKILEIGALSSINLLDFAGFENYYAQLRAFYFGLPENHTLADSENKKKLISLYLLILLSQGDVTKFHSELEFLSKRDLGNIEENKYLSYPVRLEKLLMEGSYQKAWDMLQNGREDDKIEEFNIFDETLMNAIRDSIARNTEVAYARLPLSNVKALLFFKSEKDTEAFAKARGWNIVNGCVLFDEDDVSEKKEQTSIVSKALSYATNLESIV

SEQ ID NO: 9260 - protein, 245 aa, Porphyromonas gingivalis W83
MQSPERITPYDTECPKNEQVEAMFNHIAGHYDRLNHLFSWGMDRVWRQKAIRMIEPFAPHTVLDVATGTGDLAIEICRHIPSVKQVTGVDLSLEMMRIGEQKVRSENLDNRITFMQKDCLDLPFADHSFDAVTVAFGLRNFQNIKLGLEEMYRVLNEGAPLMILELSRPVSFPWKQGYNFYASHVIPVVGRFLSQDAEAYTYLPESIAAMPQREELADLMLSVGFREAYYRSLSLEVATVYMGLK

SEQ ID NO: 9261 - protein, 180 aa, Salmonella typhimurium
GSMQTIKCVVVGDGAVGKTCLLISYTTNKFPSEYVPTVFDNYAVTVMIGGEPYTLGLFDTAGQEDYDRLRPLSYPQTDVFLVCFSVVSPSSFENVKEKWVPEITHHCPKTPFLLVGTQIDLRDDPSTIEKLAKNKQKPITPETAEKLARDLKAVKYVECSALTQKGLKNVFDEAILAALE

SEQ ID NO: 9262 - protein, 358 aa, Hippocratea volubilis
QSQKLAVRAISQLQSLPGGDIKLLCDTAVESVRDLTGYDRVMVYKFHEDEHGEVVAESKRPDLEPYIGLHYPATDIPQTSRFLFKQNRVRIIVDCHASPVNVIQDDGLMQPLCLVGSTLRAPHGCHAQYMENMGSIASLAMAVVINGNDEDGIGGRNPTRLWGLVVCHHTSARCIPFPLRYACEFLMQAFGLQLNMELQLAAQLLEKHVLKTQTLLCDMLLRESPTGIVTQSPSTMDLVKCDGAALYYQANYYPLGVTPTEAQIKDIVEWLLVFHGDSTGLSTDSLADAGYPGATLLGDAVCGMAVAYITNRDFLFWFRSHTAKEIKWGGAKRHPEDKDDGLRMHPRSSFKAFLEVVK

SEQ ID NO: 9263 - protein, 455 aa, SYNECHOCOCCUS SP. WH 8102
MAIESTFDLIVLGAGSGGLAAAKRAARHGAKVAIVEGDRVGGTCVIRGCVPKKLLVYGAQARHQLNDAPAYGLTLGSVESSVAELFRRVRAEVDRLNHLHLGFLEKAGVARIDGWGRFLSDQCIGIATERGGPIQRELSAAHYLVAVGGRPVRPDIPGIEHTWISDDMFNLEQLPKEVVVVGAGFIACEFACILRGLGVEVTQVVRGSGLLRGFDRELADAVLEGLREQGIHVLLERTVSAVSGQPGDLTVQMSDGLALPCGGVLMATGRRPWLEGLGLDAAGVAVEQGRINVDADSRTSVAHIYAVGDVTDRVNLTPVAIDEGRAFADSTFGTRPRQVNHDLLASAVFSDPELATVGLSEEAAIDRHGVDGVVIHRARFRSMSRALPATGPRCLLKLVVETSTDRVIGCHMVGEHAAEIIQMAAIAVGMGATKADFDRTMALHPSVSEEFVTMG

SEQ ID NO: 9264 - protein, 374 aa, Hippocratea volubilis
ALSIAGAVQSQKLAVRAISQLQSLPGGDIKLLCDTAVESVRDLTGYDRVMVYKFHEDEHGEVVAESKRPDLEPYIGLHYPATDIPQASRFLFKQNRVRIIVDCHASPVNVIQDDGLMQPLCLVGSTLRAPHGCHAQYMENMGSIASLAMAVVINGNDEDGIGGRNPTRLWGLVVCHHTSARCIPFPLRYACEFLMQAFGLQLNMELQLAAQLLEKHVLKTQTLLCDMLLRESPTGIVTQSPSTMDLVKCDGAALYYQANYYPLGVTPTEAQIKDIVEWLLVFHGDSTGLSTDSLADAGYPGATLLGDAVCGMAVAYITNRDFLFWFRSHTAEEIKWGGAKHHPEDKDDGLRMHPRSSFKAFLEVVKSRSLPWEN

SEQ ID NO: 9265 - protein, 177 aa, Agropyron cristatum
LGGKSPIVVFDDVDIDKAVEWTLFGCFWTNGQICSATSRLLIHKNIAKEFVDRMVAWSKNIKVSDPLEEGCRLGPVVSEGQYEKIKKFVANAKSEGATILTGGVRPKHLEKGFFIEPTIITDINTSMEIWREEVFGPVLCVKEFSTEEEAIELANDTHYGLPGAIISGDRERCQKII

SEQ ID NO: 9266 - protein, 374 aa, Hippocratea volubilis
ALSIAGAVQSQKLAVRAISQLQSLPGGDIKLLCDTAVESVRDLTGCDRVMVYKFHEDEHGEVVAESKRPDLEPYIGLHYPATDIPQASRFLFKQNRVRIIVDCHASPVNVIQDDGLMQPLCLVGSTLRAPHGCHAQYMENMGSIASLAMAVVINGNDEDGIGGRNPTRLWGLVVCHHTSARCIPFPLRYACEFLMQAFGLQLNMELQLAAQLLEKHVLKTQTLLCDMLLRESPTGIVTQSPSTMDLVKCDGAALYYQANYYPLGVTPTEAQIKDIVEWLLVFHGDSTGLSTDSLADAGYPGATLLGNAVCGMAVAYITNRDFLFWFRSHTAKEIKWGGAKHHPEDKDDGLRMHPRSSFKAFLEVVKSRSLPWEN

SEQ ID NO: 9267 - protein, 481 aa, Prochlorococcus marinus subsp. marinus str. CCMP1375
MSKTKFDFDLIVIGAGYGGFDAAKHAAENGLKVGIVESRELGGTCVNRGCVPSKALLAASGKVRELANADHLALFGIHAAPVRFERQKIADHANNLVANVRNNLTKTLERAGVIILRGQGRLEGPQRVGVRESSGVDKVLTAKDVILATGSDPFVPPGIETDGRTVFTSDEAISLEWLPRWIAIIGSGYIGLEFADVYTALGCEVTMIEALERVMPTFDPDITKIASRNLIAGRDIDAKSGVLASKVKPGCPVKIELADVNTRVVVEELEVDAVLVATGRVPSSKDLNLESMSVETHKGFIPIDESMRVLVDGKPLPHLWAVGDVTGKLMLAHTAAAQGTVAVDNILGNKRKIDYRSIPAATFTHPEISSVGLSEEQAKEISAKENFSLGIIRSYFKANSKALAELESDGLMKLLFRKDNGQILGAHIYGLHAADLIQEVANALARKQSVVDLALEVHTHPTLSEVVEVAYKQAVQQMKKL

SEQ ID NO: 9268 - protein, 303 aa, uncultured bacterium 314
MSDKKQIISASPKVRKFARELGANLYQIHGSQREGRVSENDVRSFIKESLSGEIAKKRTVTPQEYEHSEFGEIDVQPIPRIKKIARSHLEKSWNEIPHVTHHDEADITEMDKFRKTLRDLYTGEKISITPLAFIIRAVVKALKDYPNFNASLDLENGKVIYKKYFHVGIAVDTPHGLMVPKIRDADKKDITALGKELKKVSKLCKELKIDKKEFFGGSITISSLGNIGGSFFTPIINQPEVAILGVGRAETKQVFMDGKYQSRIMLPLSLSYDHRIINGAEGARFCVHLRESLGKDFAYKLAV

SEQ ID NO: 9269 - protein, 207 aa, Elymus trachycaulus
LGAKSPIVVFDDVDIDKAVEWTLFGCFWTNGQICSATSRLLIHKNIAKEFVDRMVAWSKNIKVSDPLEEGCRLGPVVSEGQYEKIKKFVANAKSEGATILTGGVRPKHLEKGFFIEPTIITDINTSMEIWREEVFGPVLCVKEFSTEEEAIELANDTHYGLAGAVISGDRDRCQRLAEEIDAGCIWVNCSQPCFCQAPWGGNKRAAL

SEQ ID NO: 9270 - protein, 395 aa, Prochlorococcus marinus subsp. marinus str. CCMP1375
MLDTYKRLPLKIVKGNGCWLWDETGKKYLDAVAGIATCSLGHSDKKLSKVLSQQLRKIQHVSNLYRIPEQEDLAQWLVNQSCADSVFFCNSGAEANEAAIKLARKYGQIKRGIKRPIILSAKSSFHGRTLAALSATGQTKYQKGFEPLVEGFEFFSFNDSNSVQDLYENLEKDEPRVAAILIEPIQGEGGLNLGDQKFFYFLRDYCNKNNILLLFDEVQSGMGRTGKLWGYEHFNVEPDAFTLAKGLGGGHSIGALLVKENASIFEPGDHASTFGGNPFACKAGLTVAKEIQNRNLLENTYCRGNQLREGLQKLINNYPHHLEEVRGIGLMLGLAIKKNSNLTSQKIVELAIKEGLLVIGAGEKVIRMLPPLIITKREIETLLTRLNACFRKLNN

SEQ ID NO: 9271 - protein, 208 aa, Pascopyrum smithii
LGGKSPIVVFDDVDIDKAVEWTLFGCFWTNGQICSATSRLLIHKNIAKEFVDRMVAWSKNIKVSDPLEEGCRLGPVVSEGQYEKIKKFVANAKSEGATILTGGVSPKHLEKGFFIEPTIITDINTSMEIWREEVFGPVLCVKEFSTEEEAIELANDTHYGLAGAVISGDRDRCQRLAEEIDAGCIWVNCSQPCFCQAPWGGNKRSGFG

SEQ ID NO: 9272 - protein, 131 aa, Triticum aestivum
  unsure (1)..(131): unsure at all Xaa locations
MAATIQSVKARXIFDSRGNPTVEVDVCCSDGTFARAAVPSGASTGVYEALELRDGGSDYLGKGVSKAVDNVNLIIAPALIGKDPXTAQTEAPTNFMVQAXLIGTQKTEMGFGWQKQKAWVAKWQSLGVCQS

SEQ ID NO: 9273 - protein, 187 aa, Psychrobacter sp. 273-4
MTQISNQEIEKTLRNSECLISSIEVAAAYERLAAQLNLHYAGLNPIVMVVMNGGLIPAGQLLTHLTFYHRMHYIHASRYRDNEGTNELDWKFKPDVSIAGEYVLLIDDIFDEGITLKSIVEELSKENPLSIESCVLLNKEHDRKVVDFDVDFVGINVADRYVYGCGMDFHGYLRHLPGIYAIKEDKI

SEQ ID NO: 9274 - protein, 175 aa, Bacillus cereus ATCC 14579
MNIEIKDTLISEEQLQAKVKELALQIERDFEGEEIVVIAVLKGSFVFAADLIRHIKNDVTIDFISASSYGNQTETTGKVKLLKDIDVNITGKNVIVVEDIIDSGLTLHFLKDHFFMHKPKALKFCTLLDKPERRKVDLTAEYVGFQIPDEFIVGYGIDCAEKYRNLPFIASVVTE

SEQ ID NO: 9275 - protein, 216 aa, Oryza sativa
MAGLGFDETELRLGLPGAGELAARSSGKRGFAETIDLKLKLQPAAPAAVSGEEGAQEDKEDADAAAAAADEKMSMKRAQVVGWPPVRSFRKNVLAEKCKAAALVKVSMDGAPYLRKIDVAMYKSYPELSMAFQNMFTSFTIGSCSGKCGSHQQLKESNKLRDDLEYVPTYEDKDGDWMLVGDVPWEMFVESCKRLRIMKGSEAIGLAPRAVEKCKS

SEQ ID NO: 9276 - protein, 271 aa, Marinobacter sp. AEA-2001/5
QPNAMGGREVGGLANTLAAHMDYDSPGARSRVADFWGTGTVADGPGLKAVDMFEAVHRGDIRVIWIMGTNPAVSLPDSARVREALARCPTVIVSDCVAHTDTTDLADILLPAAGWGEKDGTVTNSERCISRQRCFLPLPAEVKPDWWIMSSVAGKLGFGEAFNYKRPADIFREHAALSAHENNGERLFNLAGLANLSDAGYEALIPVQWPVMEGAGMEAEGSTRLVFRWPFCHRQPACPLCRHQHPIARQRTSDDYPMVVNTLRIRDQWHT

SEQ ID NO: 9277 - protein, 550 aa, Vibrio vulnificus CMCP6
MLKTINPTQTQAWNALTAHFESAQDMDLKDLFAQDAARFDKFSARFGSDILVDYSKNLINEETLKHLFALAKETELSAAIKAMFSGEAINQTEGRAVLHTALRNRSNQPVLVDGEDVMPAVNAVLEKMKSFTDRVIGGEWKGYTGKAITDIVNIGIGGSDLGPYMVTEALAPYKNHLNLHFVSNVDGTHIVETLKKVDPETTLFLIASKTFTTQETMTNAHTARDWFLATAGDQAHVAKHFAALSTNAPAVSEFGIDTDNMFEFWDWVGGRYSLWSAIGLSIALAVGYDNFIELLEGAHEMDNHFVSTELESNIPVILALIGIWYNNFHGAESEAILPYDQYMHRFAAYFQQGNMESNGKYVDRNGNPVTYQTGPIIWGEPGTNGQHAFYQLIHQGTKLIPCDFIAPAVSHNPAGDHHQKLMSNFFAQTEALAFGKNEETVKAELVKAGKNAEEVAAIAPFKVFEGNRPTNSILVKQITPRTLGNLIAMYEHKIFVQGVIWNIFSFDQWGVELGKQLANQILPELADGSEISSHDSSTNGLINAFKAFKA

SEQ ID NO: 9278 - protein, 267 aa, Pseudoalteromonas sp. AEA-2001/6
QPNAMGGREVGGLANQLAAHLDIENEAHQSLVQRFWLAPTIAKKAGSNAIDMFDEIAAGKIKAVWIMATNPMVSLPNNTAIKKALETCELVVVSDCIAKSDTLKFADVAFPSTGWGEKNGTVTNSERRISRQRPLVAPYSGAKNDWQIMCEVAKKMGFEGFDFTDPSGIFEEWAQLTDFENNGSRVLNLSGLVGLTKSQYDNLKPIMWPVVKNQPYKNGQVFTDNQFSTADKKARFIPITPQLPIQQTSSDYPFVMNSGRIRDQWHT

SEQ ID NO: 9279 - protein, 258 aa, Vibrio sp. AEA-2001/7
QPNAMGGREVGGLANQLAVHRGFDDESIAKVEQFWQAPNMATEPGLKAVELFDVVSRGDIKVLWIMATNPVVSMPNSIEVRKALKACDFVIVSDISADSDVAEYADLLLPAAGWGEKQGMVTNSERAISRQRQFRPIPGEAKPDWWAINQVGQKWCAQNHWQNGFGFQTPAEIFREYAALTGINRKSRFQLDLSMFQTLSDSDYQNWQPTQWGGERPFTDHQFSTPLGKAQLVVTKPLKRDVSGLWLNTGRLRDQWHT

SEQ ID NO: 9280 - protein, 580 aa, Candida albicans SC5314
MSFVLAAKPRFVYLTNKQLQTIGKRLLTQSAKSSFKSSQCLLSEPNTMIKTASPKKNQQQYRKSVALVSGVIIVGSYIVFNQSNYFNLDTLPSNLPPPQQSKKLLQDNQKKYFSTSTSSLHQKDSISHQQHKEGIFLLNEEQVSTKLRQFEESYTVNRGKGVTRYDICQLPSNSPIEDDRAEEIVQVPILQDNNIKTSTDWMFFGVFDGHGGWTTSSKLRDQLIGYVINELGTIYKPVQGEENLRYVPNSATIDQAMKNGFLKLDHELVNKNIEKLLTDGNKAKAAELLMPALSGSCALLSFYDTNSQMLKVAVTGDSRAILGSFKDNHWTVRQLSIDQTGANPSEVARIISEHPNEPKVIRNGRVLGSLEPTRAFGDCRYKLPAVIQERIYKQFFGRPLPNQLKSPPYVTAEPIITTTKINPNEHDFLVMASDGLYEMLTNEEIVGLVVKWMEKADMIKPRKSWFGFGSADSKLPEVKDVTNDKASKKPLNNKLGNSFLLEDNNVSTHLIRNALSNGGSREQTSMLISIPNPVSRRYRDDLTVTVVFFGKDTKGEDENGTLEVNWNATAGGLNSAKPKL

SEQ ID NO: 9281 - protein, 257 aa, Vibrio sp. AEA-2001/8
QPNAMGGREVGGLANQLAVHRGFTSEDISAVAQFWQAPNVATQPGLKAVDLFSAAERGEIKVLWIMATNPAVSMPDNQQVRRALEKCDFVIVSDITADTDTARYADLLLPASGWGEKHGMVTNSERRLSRQRQFLPAPGETRPDWWQIARVGSALCDYLGVADAFDYSTPAQIFREFAAMTGLNSGTPLKLDLSQFAHLSDEAYDNWLPWQWGGNKPFGDHHFSTDTGKARFAVTVPCVRRSDLWLNTGCQRDQWHT

SEQ ID NO: 9282 - protein, 532 aa, Oryza sativa
  unsure (1)..(532): unsure at all Xaa locations
MATAATLPSSSSSAAAAVQTISRVLSFPRRGGGGFLHLRRHPLAAAAAATRGRGPLLRLGPRRPFSASASAXDYDYDLFTIGAGSGGMRASRVAASLYGARAAVCEMPFATVASDSLGGVGGTCVLRGCVPKKLLVYASKYSHEFEESHGFGWRYGTEPKHDWSTLMTNKNLELQRLVGVQTNMLKNSGVTIIEGRGKVVDPHTVSVDGKLYTAKNILIAVGGRPSMPDIPGIEHVIDSDAALDLPSRPEKIAIVGGGYIALEFAGIFNGLKSGVHVFIRQKKVLRGFDEEVRDFVADQMSLRGITFHTEETPQAVMKSDDGLLTLTTNKGSINGFSHNLGLEEVGVKMDKHGAIVVDEFSRTSVDSIWAVGDVTNRVNLTPVALMEGWGISKXTFFGNEPTKPDYSAVPSAVFSQPPIGQVGLTEEKAIEKYGDVDVYTSNFRPLRATLSGLPDRVYMKVIVCANTNKVLGVHVCGEDAPEIIQGIAIAVKAGLMKQNFDATIGVHPTTAEELVTMRSPTRKVRRDAVDEV

SEQ ID NO: 9283 - protein, 490 aa, Xylella fastidiosa 9a5c
MTLQLNKNRKTAMSEHYDVVVIGAGPAGYHAAIRAAQLGLKVACVDAALGKDGKPALGGTCLRVGCIPSKALLDSSRQYWNMGHLFNEHGISFKDAKIDVATMIARKDKIVKQFTGGIAMLFKANKITPYYGFAQLQPGNVVKVKQHEGKNIELKGANVILAAGSDSVELPFATFDGETIVDNIGALDFIKVPKRLAVIGAGVIGLELGSVWKRLGAEVTILEAMPDFLAAVDADVAKTAAKEFKQQGLDIKLGAKVSRTEISSKNNKKEVIVTYTDASGKQTFTVDKLLVAVGRKAATKGLLADGTGVQLNERGQIVVDEHCHTGVDGVWAIGDCVRGPMLAHKGFEEGIAVAELIAGLPGHVNFETIPWVIYTEPEIAWVGKTEQELKANNIPYKAGSFPFAAVGRAVAMAEPSGFVKVLAHAETDRVLGLHLIGVNVSELVHEGVLAMEFSGSADDLARICHAHPTLSEAIHDAAMAVSKRAIHKAN

SEQ ID NO: 9284 - protein, 261 aa, uncultured marine bacterium
IAATNPAVSMPDLERTKAALLQSPFTVYQDAYYPTETAEYAHLLLPAAQWGEKTGTMTNSERMVTFCLAFREPLGEAKADWEIFAEVGRRLGFTNQFNFADSEAVRAEFLEFTRDRPCDMTGITYQRLQEQGPTQWPCPDSSGVSQERLYTDLQFNTPDGKARFAAYYSQGLAEPPNPDYPFVLTTGRLYAHWHTQTRTGHIEKIRKLHPLPFIEIHPQDAQRLEISEKDWVEVRSRRGYSRFPAKITRSITPGTVFIPMH

SEQ ID NO: 9285 - protein, 1533 aa, Magnaporthe grisea 70-15
MAAAPGSISTPEEAVARIAYISSDVVISVQPSLATETDFSRYLKSAAARKEPSLVAKNPNNVPEIQSVRHNADPLLSVFTPIRSGRFVSVTTTSNILLPSIAHLYKLAEYPVVIHVALHPDRFPDFSSITAIRNSGWTFLQSESIQEAQDMAMTAHALAIRSGKGVIHFYSPWVLSNDEPVEREGLAVIREILDIDSVRRYQSAPISASGLYADDGRTVLASDQPEQVPSGAASAPLNGLSSGAISHATSQANSSQVSVKSSENSTSATPHSTSSATTIEAPPTAVSSDDIYKYVTSIWAQLESLSGRKYSPFEYSGPPTPENCLFVFGADAGLLGSAIDEAKSGDVYAKAGILTPRLYRPWLGAKLLEAIPKSVKKIAVLEQISKRTTKWGPILIDVLTSVKSGPGGVETIVGYHVGYINNETVKQALRGICQNLALDKPVQNLEVGSREGPQKADKYALEKPKLETAYTKILDQLFGTRLYTANAIDSDNAGISATISATPEFGFGALLARKEHRHRFVSEAKEAATSGVFLTEKPKRLLTNWAIHSDDPKKIDAAAEDLISELTLENSTAARKLLKNQAFFRRQSLWLVGSDAWAYDLGNSGVHHVLASGENVNMLIIDSQPYSEHTAADANKRKKDIGLYAMNFGNAYVASVAAYSSYTQVLQAMDEADKFNGPSIVLAYLPYNGEHDSPLTVLQETKKAVDLGYWPLYRWNPDNEKQGLPTFSLDSERIKKELKAFLDRDNHLTQLMKKEPSFGASLAQDFGTEVRAQQKRRARDAYNQLLEGLFGAPLTILFGSDNGNAQSLAKRLGNRGRQRGLKTTVMAMEDYPVEDLPTEENIVILTSTAGQGEFPQNGKPFWDAIKDSTELDLASVRFSVFALGDSHYWPRKEDKIYYNKPGKDLDRVLANFGAQRLAEIGLGDDQDPDGYQTGYAEWEPKIWQALGVDNVEGLPEEPAPITNEDIKLASNYLRGTIVEGLNDNSTGAISAADGQLTKFHGTYMQDDRDVRDERKAQGLEPAYSFMIRCRLPGGVSTPQQWVQMDDIATKLGNETMKLTTRQTFQFHGVVKGKLKPAMQAINRALMTTIAACGDVNRNVMCSSLPTQSEYHREVYACSQKISDHLLPSTTAYHEIWLTDDNDKKTMVAGDAVQDFEPLYGPTYLPRKFKITIAIPPHNDTDVYAHDIGLIAIKGKDGHLEGFNLLAGGGMGATHNNKKTYPQTGRSFGYVSKDQVHIACEKVMLVQRDHGDRKNRKHARLKYTIDDMGVDVFRGKVEELWGQKFEEARPFHFDSNIDTFGWQRDEKGLNHFTLFIENGRIEDTAEFQMKTGLREIAKVHKGEFRLTGNQHVILSNVADEDLDNMKALLKKYKLDNIQFSGLRLSSSACVAFPTCGLAMAESERYLPVLIDKLEACLEENGLKQDSIVMRMTGCPNGCARPWLAEVAFVGKAYGAYNMYLGGGYHGQRLNKLYRSSIKEDEILAIMKPLLKRYALEREEGERFGDFCIRAGVIKATTDGQNFHNDVAEEESDEE

SEQ ID NO: 9286 - protein, 527 aa, Triticum aestivum
MALEAAFHYLQLAGIHGTSTPAVLLTILLLLIIRLAWVRTTTASTRFGKQQQLPPSPPGKLPIIGHLHLLGSQTHISIRDLDAKHGRNGLLLLRIGAVPTLFVSSPSAAEAVLRTHDQIFASRPPSMAADIIRYGPTDIAFAPYGEYWRQARKLLTTHMLSAKVVHSFRHGRQEEVRLVINKIHEAATRGTAVDMSELLSGYTNDVVCRAVLGESHRKEGRNRLFSELTEINVSLLGGFSLENYIPPNMVMADVLLRLVSVKARRLNKRWDELFNEIIEEHLHPSKPSSGDQQAVDFIDLLLSLKEEYGLTTDNIKAILVDMFEAGIETSYLTLEYGMAELMNNRHILKKLQEEVRSQGKKLDMITEEDLGSMAYLRATIKETLRLHPPAPFLLPHFSTADCKIDGYLIPSNTRVLVNAWALGRDPSSWERPEDFLPERFLQDQDGDVDTQMRGKDLRFLPFGFGRRICPGMNFGFATMEVMLANLMYHFDWDVPNMVGTGAGVDMAESFGLTLRRKEKLQLVPRIP

SEQ ID NO: 9287 - protein, 369 aa, Proteus vulgaris
MKSRAAVAFAPGKPLEIVEIDVAPPKKGEVLIKNTHTGVCHTDAFTLSGNDPEGVFPVVLGHEGAGVVVEVGEGVTSVKPGDHVIPLYTAECGECEFCQSGKTNLCVSVRETQGKGLMPDGTTRFSYNGQPLYHYMGCSTFSEYTVVAEVSLAKINPEANHEHVCLLGCGVTTGIGAVHNTAKVQPGDSVAIFGLGAIGLAAVQGARQAKAGRIIAIDTNPAKFELARQFGATDCINPNDHDKPIKDVLLEINKWGIDHTFECIGNVNVMRAALESAHRGWGQSIVIGVAGAGQEISTRPFQLVTGRVWKGSAFGGVKGRTQLPAMVEDAMKGEIELEPFVTHTMTLDEINEAFDLMHEGKSIRTVIRY

SEQ ID NO: 9288 - protein, 319 aa, Geobacillus stearothermophilus
MKRIGVLTSGGDSPGMNAAIRSVVRKAIYHGVEVYGVYHGYAGLIAGNIKKLEVGDVGDIIHRGGTILYTARCPEFKTEEGQKKGIEQLKKHGIEGLVVIGGDGSYQGAKKLTEHGFPCVGVPGTIDNDIPGTDFTIGFDTALNTVIDAIDKIRDTATSHERTWVIEVMGRHAGDIALYSGLAGGAETILIPEADYDMNDVIARLKRGHERGKKHSIIIVAEGVGSGVDFGRQIQEATGFETRVTVLGHVQRGGSPTAFDRVLASRLGARAVELLLEGKGGRCVGIQNNQLVDHDIAEALANKHTIDQRMYALSKELSI

SEQ ID NO: 9289 - protein, 374 aa, Loeseneriella africana
ALSIAGAVQSQKLAVRAISQLQSLPGGDIKLLCDTAVENVRNLTGYDRVMVYKFHEDEHGEVVAESRRPDLEPYIGLHYPATDIPQASRFLFKQNRVRIIVDCHASPVSVIQDDGLMQPLCLVGSTLRAPHGCHAQYMENMGSIASLAMAVIINGNDEDGMGGRNPTRLWGLVVCHHTSARCIPFPLRYACEFLMQAFGLQLNMELQLAAQLLDKHVLKTQTLLCDMLLRESPTGIVTQSPSIMDLVKCDGAALYYQANYYPLGVTPTEAQIKDIVEWLLAFHGDSTGLSTDSLADAGYPGATSLGDAVCGMAVAYITNKDFLFWFRSHTAKEIKWGGAKHHPEDKDDGQRMHPRSSFKAFLEVVKSRSLPWEN

SEQ ID NO: 9290 - protein, 363 aa, Loeseneriella africana
QSQKLAVRAISQLQSLPGGDIKLLCDTAVENVRNLTGYDRVMVYKFHEDEHGEVVAESRRPDLEPYIGLHYPATDIPQASRFLFKQNRVRIIVDCHASPVIVIQDDGLMQPLCLVGSTLRAPHGCHAQYMENMGSIASLAMAVIINGNDEDGMGGRNPTRLWGLVVCHHTSARCIPFPLRYACEFLMQAFGLQLNMELQLAAQLLEKHVLKTQTLLCDMLLRESPTGIVTQSPSIMDLVKCDGAALYYQANYYPLGVTPTEAQIKDIVEWLLAFHGDSTGLSTDSLADAGYPGATSLGDAVCGMAVAYITNKDFLFWFRSHTAKEIKWGGAKHHPEDKDDGQRMHPRSSFKAFLEVVKSRSLP

SEQ ID NO: 9291 - protein, 365 aa, Loeseneriella africana
AVQSQKLAVRAISQLQSLPGGDIKLLCDTAVENVRNLTGYDRVMVYKFHEDEHGEVVAESRRPDLEPYIGLHYPATDIPQASRFLFKQNRVRIIVDCHASPVSVIQDDGLMQPLCLVGSTLRAPHGCHAQYMENMGSIASLAMAVIINGNDEDGMGGRNPTRLWGLVVCHHTSARCIPFPLRYACEFLMQAFGLQLNMELQLAAQLLEKHVLKTQTLLCGMLLRESPTGIVTQSPSIMDLVKCDGAALYYQANYYPLGVTPTEAQIKDIVEWLLAFHGDSTGLSTDSLADAGYPGATSLGDAVCGMAVAYITNKDFLFWFRSHTAKEIKWGGAKHHPEDKDDGQRMHPRSSFKAFLEVVKSRSLP

SEQ ID NO: 9292 - protein, 208 aa, Psathyrostachys juncea
LGGKSPIVVFDDVDIDEAVEWTLFGCFWTNGQICSATSRLLIHKNIAKGFVDRMVAWSKNIKVSDPLEEGCRLGPVVSEGQYEKIKKFVANAKSEGATILSGGVRPKHLEKGFFIEPTIITDINTSMEIWREEVFGPVLCVKEFSTEEEAIELANDTHYGLAGAIISGDRERCQRLAEEINAGCIWVNCSQPCFCQAPWGGNKRSGFG

SEQ ID NO: 9293 - protein, 314 aa, Gossypium hirsutum
MEGGGSDDHHHHHHSHHHHHQQPLHHHHHHHHRPTFPFQLLEKKEEDNQPCSSSSSLPFPSLPVSSSSADQHTSTRSISTHQISPETSKTPPPKRTSTKDRHTKVDGRGRRIRMPALCAARVFQLTRELGHKYNGETIEWLLQQAEPAVIAATGTGTIPANFTSLNISLRSSGSSMSVPSQLRSSGFSSNFSMQQRRSLFPGIGLETTPTPTTFLNFQSSSTSLGISEEAEESSLGRKRRPEQDLSSQHHQNGELLVASSTVHSGESPRSSSGNFWMVTNSNNQAMSGGDPIWTFLQLITVVCIGELCLVGCIS

SEQ ID NO: 9294 - protein, 208 aa, Phalaris arundinacea
LGGKSPIVVFDDVDIDKAVEWTLFGCFWTNGQICSATSRLLIHKNIAKEFVDRMVAWSKNIKVSDPLEEGCRLGPVVSEGQYEKIKKFVANAKSEGATILTGGVRPKHLEKGFFIEPTIITDINTSMEIWREEVFGPVLCVKEFSTEEEAIELANDTHYGLAGAIISGDRERCQRLAEEINAGCIWVNCSQPCFCQAPWGGNKRSGFG

SEQ ID NO: 9295 - protein, 364 aa, Maytenus fournieri
VQSQKLAVRAISQLQSLPGGDVKLLCETVVESVKDLTGYDRVMVYKFHDDEHGEVVAERKRPDLEPYIGLHYPATDIPQASRFLFKQNRVRMIVDCHALPVRVIQDDGLMQPLCLVGSTLRAPHGCHAQYMENMGSIASLAMAVIINGNDEEVIGGRNPTRLWGLVVCHHTSARCIPFALRYACEFLMPAFGLQLNMELQLAAQLLEKHVLKTQTLLCDMLLRDSPTGIVTQSPSIMDLVKCDGAALYYQGSYYPLGVTPTEAQIKDIVEWLLAFHGDSTGLSTDSLADAGYPGAALLGDAVCGMAVAYITNRDFLFWFRSHTAKEIKWGGAKHHPEDKDDGQRMHPRSSFKAFLEVVKSRSMP

SEQ ID NO: 9296 - protein, 217 aa, Medicago sativa
MAGYRADDDYDYLFKVVLIGDSGVGKSNLLSRFTKNEFNLESKSTIGVEFATRTLNVDSKVIKAQIWDTAGQERYRAITSAYYRGAVGALLVYDVTRHGTFENVRQMAERTAKPHRFQHCCVLVGNKADLRHLVAVSTEDGKSYAEKESLYFMETSALEATNVENSFAEVLTQIYRILSKKAVEGAENGNASVPAKGEKIDLKNDVSALKRVGCCSS

SEQ ID NO: 9297 - protein, 476 aa, Arabidopsis thaliana
MALQRQLLKRATSDIYHRRAISLLRTDFSTSPSIADAPPHIPPFVHQPRPYKGPSADEVLQKRKKFLGPSLFHYYQKPLNIVEGKMQYLYDESGRRYLDAFAGIVTVSCGHCHPDILNAITEQSKLLQHATTIYLHHAIGDFAEALAAKMPGNLKVVYFVNSGSEANELAMMMARLYTGSLEMISLRNAYHGGSSNTIGLTALNTWKYPLPQGEIHHVVNPDPYRGVFGSDGSLYAKDVQDHIEYGTSGKVAGFIAETIQGVGGAVELAPGYLKSVYEIVRNAGGVCIADEVQTGFGRTGSHYWGFQTQDVVPDIVTMAKGIGNGLPLGAVVTTPEIASVLASKILFNTFGGNPVCSAGGLAVLNVIDKEKRQEHCAEVGSHLIQRLKDVQKRHDIIGDVRGRGLMVGIELVSDRKDKTPAKAETSVLFEQLRELGILVGKGGLHGNVFRIKPPMCFTKDDADFLVDALDYSISRL

SEQ ID NO: 9298 - protein, 208 aa, Schedonorus arundinaceus
LGGKSPIVVFDDVDIDEAVEWTLFGCFWTNGQICSATSRLLIHKNIAKEFVDRMVAWSKNIKVSDPLEEGCRLGPVVSEGQYEKIKKFVANAKSEGATILTGGVRPKHLEKGFFIEPTIITDINTSMEIWREEVFGPVLCVKEFSTEEEAIELANDTHYGLAGAVISGDRERCQRLAEEIDAGCIWVNCSQPCFCQAPWGGNKRSGFG

SEQ ID NO: 9299 - protein, 363 aa, Maytenus fournieri
QSQKLAVRAISQLQSLPGGDVKLLCETVVESVKDLTGYDRVMVYKFHDDEHGEVVAERKRPDLEPYIGLHYPATDIPQASRFLFKQNRVRMIVDCHALPVRVIQDDGLMQPLCLVGSTLRAPHGCHAQYMENMGSIASLAMAVIINGNDEEVIGGRNPTRLWGLVVCHHTSARCIPFPLRYACEFLMQAFGLQLNMELQLAAQLLEKHVLKTQTLLCDMLLRDSPTGIVTQSPSIMDLVKCDGAALYYQGSYYPLGVTPTEAQIKDIVEWLLAFHGDSTGLSTDSLADAGYPGAALLGDAVCGMAVAYITNRDFLFWFRSHTAKEIKWGGAKHHPEDKDDGQRMHPRSSFKAFLEVVKSRSMP

SEQ ID NO: 9300 - protein, 256 aa, Streptococcus agalactiae NEM316
MKIGIIGVGKMASAIIQGLKQTQHDIVISGSCLERSKEIAERLDVTYAESHQSLINQADIIMLGIKPQLFEKVLLPLDITKPIISMAAGISLARLSQLTRSDLPLIRIMPNINAQILQSCTAICYNNHVSDELRQLTKEITDSFGSSFDIAETNFDTFTALAGSSPAYIYLFIEALAKAGVKYGFPKEQALSIVGQTVLASSQNLLQGQNSTSDLIDNICSPGGTTIAGLLDLEKNGLTHSVISAIDATIEKAKKL

SEQ ID NO: 9301 - protein, 242 aa, Streptococcus pneumoniae TIGR4
MIGLSLAFERRGIMARTVVGVAANLCPVDAEGKIIHSSVSCRFAEIIRQVGGLPLVIPVGDESVVRDYVEMIDKLILTGGQNVHPQFYGEKKTVESDDYNLVRDEFELALLKEALRQNKPIMAICRGVQLVNVAFGGTLNQEIEGHWQGLPFGTSHSIETVEGSVVAKLFGKESQVNSVHRQSIKDLAPNFRVTAIDSRDQTIEAIESIDEHRIIGLQWHPEFLVNEEDGNLELFEYLLNEL

SEQ ID NO: 9302 - protein, 407 aa, Oryza sativa
MASSSVFAGLAQAPEDPILGVTVAYNKDPSPVKVNLGVGAYRTEEGKPLVLNVVRRAEQMLINNPSRVKEYLPITGLADFNKLSAKLIFGADSPAIQENRVATVQCLSGTGSLRVGGEFLARHYHERTIYIPQPTWGNHPKVFTLAGLTVRSYRYYDPATRGLDFQGLLEDLGSAPSGAIVLLHACAHNPTGVDPTLDQWEQIRQLMRSKALLPFFDSAYQGFASGSLDQDAQSVRMFVADGGELLMAQSYAKNMGLYGERVGALSIVCGSADVAVRVESQLKLVIRPMYSNPPIHGASIVATILKDSAMFNEWTVELKGMADRIISMRQQLFDALKTRETPGDWSHIIKQIGMFTFTGLNSDQVAFMRQEYHIYMTSDGRISMAGLSGRTIPHLADAIHAAVTKLK

SEQ ID NO: 9303 - protein, 407 aa, Streptomyces coelicolor A3(2)
MDSARTHTSPPDDVRFTAPAGRALATEAVHAGRDDLAAQGLHAPPIDLSTTYPSYDSRGEAARIDAFAATGAEPDGPPVYGRLGNPTVARFETALARLEGTEAAVAFASGMAALSAVLLVRGSMGLRHVVAVRPLYGCSDHLLTAGLLGSEVTWTDPAGVADALRPDTGLVLVESPANPTLAEVDLRAVAHACGSVPLLVDNTFATPVLQRPAEHGARLVLHSATKYLGGHGDVLAGVVACDEEFAGRLRQVRFATGGVLHPLAGYLLLRGLSTLPVRVRAASANAADLAGRLAADPRVARVHYPRIGGAMVSFEVHGDPHAVIGGVRLITPAVSLGSVDTLIQHPASISHRIVDADDRRGAGVGDRLLRLSVGLEDVDDLWADLDRALGERAAGAVSPREALSRAD

SEQ ID NO: 9304 - protein, 494 aa, Triticum aestivum
  unsure (1)..(494): unsure at all Xaa locations
MSYNKTASITAETINPKVKIFDYEXAGEIARHAERLEQEMEKSPGSRPFPEITYCNLGNPQALGQRPITFFREVLSLCDNPALLRRDETRMLFSPCAINRARKIIESMPGRNSGAYTNSQGIRSLREAVASGIAARDGFPSRPEDIFLTDGASSAINLSMQILIRSQEDGVLCPLPEYPLYSASIILHGGTMVPYNLSEDGDWGLEIFEVKRCLEEARIAGLTVRAMVIINPGNPTGQVLSVTNQEEIVEFCRKEGLVMLADEVYQDNVYVEDRKFHSFKKVARSLGYDENDISIVSFHSVSMGFSGECGRRGGYMEICGFGDDVMGEICKVASVTLCPNIGGQILTSLAMDPPKLGDGCFENFMAEKEDIRLSLAKRAKTLAGAFSSLEGMTCNRVEGAIYAFPRIHLPAAAIKAAKAEGMSPDLFYACRLLDATGIAVVPGSGFHQVSGRNKATGTWHIRCTILPGEDKIKVMIPRLKEFHESFMNEFRDRS

SEQ ID NO: 9305 - protein, 578 aa, Vibrio vulnificus CMCP6
MTFSIENNKQVVLGEELGKLSDNERLKTQSNFLRGTIEQDLQDRITGGFTADNFQLIRFHGMYQQDDRDIRNERAKQKLEPLHNVMLRARMPGGIITPKQWLAIDKFATEHSLYGSIRLTTRQTFQFHGVLKPNIKLMHQTLNSIGIDSIATAGDVNRNVLCTTNPVESELHQEAYEWAKKISEHLLPKTKAYAEIWLDGEKVETTEDDEPILGKTYLPRKFKTTVVIPPQNDVDVHANDLNFVAIAEKGKLIGFNVLVGGGLAMTHGDTSTYPRRADDFGYIPLEKTLDVAAAVVTTQRDWGNRSNRKNAKTKYTLDRVGTDVFKAEVEKRAGIKFEVSRPYEFTERGDRIGWVEGIDGKHHLTLFIENGRLLDYPGKPLKTGVAEIAKIHKGDFRMTANQNLIVAGVSKSNKAKIEKLAREHGLMDEGVSEQRKNAMACVAFPTCPLAMAEAERFLPQFVTDVEGILDKHGLDKEDNIILRVTGCPNGCGRAMLAEIGLVGKAPGRYNLHLGGNRGGTRVPKMYKENITDKQILEEIDQLVGRWANERLPNECFGDFTVRVGIIEEVIISKRDFYA

SEQ ID NO: 9306 - protein, 394 aa, Zea mays
MALSIYTPTSSSLVPPSIQEVRLTSRPPKPATFSLRRPHLAARAAAGNAPTSPVREVVTELDAVAGFSEIVPDTVVFDDFERFAPTAATVSSSLLLGITGLPDTKFKSAIDTALADGECNALEKAEDRMSCYLTKALANVGAELAHQVPGRVSTEIDARLAYDTQGIIHRVHELLNLYNQHDVSTDRLLFKIPATWQGIEASRLLESEGIQTHLTFVYSFAQAAAAAQAGASVVQMFVGRLRDWARHHSGDPEIDEALKNGEDAGLSLAKKVYAYIHRNGYKTKLMAAAIRNKQDVFSLLGIDYIIAPLKILQSLEESVTDPDVKYGYVPKLTPAIGKTYNFTEEELVKWDQLSLSAAMGPAAEELLASGLEGYVNQARRVEELFGKIWPPPNV

SEQ ID NO: 9307 - protein, 391 aa, Xylella fastidiosa 9a5c
MTIEVKVPVLPESVSDATIASWHKKAGEIVKRDENIVDLETDKVVLEVPSPVDGVLKEIKFDTGSTVTSNQVLAIIEEGSIVAAPSPAPSPVIDQKPVAVSAPAAKSSVDSLPPGARFTATTEGIDPAQIEGSGRRGAVTKEDIINFAKQNGAARASGTRLEERVPMTRIRQRIAERLMQSKNSTAMLTTFNEINLAKVSNIRKELQEEFQKAHGIKLGFMSFFVKAAANALQRFPLVNASIDGTDIIYHGYSDISIAVSTDKGLVTPVLRNVERMSFADIEHHIADYAKKARDGKLSLEELQGGTFTVTNGGTFGSLLSTPIVNPPQSAILGMHTIKERPIAENGHIVIAPMMYVALSYDHRIIDGKDSVQFLVDIKNQLEAPGRMLFGL

SEQ ID NO: 9308 - protein, 304 aa, Streptococcus pyogenes SSI-1
MTKVRKAIIPAAGLGTRFLPATKALAKEMLPIVDKPTIQFIVEEALKSGIEEILVVTGKAKRSIEDHFDSNFELEYNLQAKGKNELLKLVDETTAINLHFIRQSHPRGLGDAVLQAKAFVGNEPFVVMLGDDLMDITNASAKPLTKQLMEDYDKTHASTIAVMKVPHEDVSSYGVIAPQGKAVKGLYSVDTFVEKPQPEDAPSDLAIIGRYLLTPEIFDILERQVPGAGNEVQLTDAIDTLNKTQRVFAREFKGNRYDVGDKFGFMKTSIDYALEHPQVKEDLKNYIIKLGKALEKSKVPTHSK

SEQ ID NO: 9309 - protein, 385 aa, Candidatus Blochmannia floridanus
MKNNKSTVSVRSGLNNDKQHGCVVSPITLSTTYNFFEFNKPRLYDYSRRKNPTRDIVQKTVADLEQGKNAIITSSGMSAIYLICIALLNSDDCLIAPYDCYGGTYRLLNALNSKKVCRVQFVNQNDTELMLKCLKQKDVKLVFIETPSNPMLRVVDIRYMCSLKERDDIVYVVDNTFMTPIFQNPLNLGADLVVHSCSKYLNGHSDVILGAVISKDIYLHEKLMWWSNALGITGGAFDSYQLLRGIRTLSIRVCQQQCNTKNIVDFLLKQPQIKSIYYPGLYSHVGYKIACQQQTGFGSIFSFELKGTEGVVSKFLKSLKLFTLAESFGGVESLIAHPETMTHAAMSKQSRDTAGINNMLLRVSVGLEDSVDLINDLDQALQSIS

SEQ ID NO: 9310 - protein, 209 aa, Triticum aestivum
  unsure (1)..(209): unsure at all Xaa locations
MVPREHGDEAIVADGHGKEEEVGVMGVSSGGADGDEEQHGGGGGKFSVTSFLWHGGSVWDAWFSCASNXVAQVLLTLPYSFSQLGMLSGILLQLFYGFLGSWTAYLISVLYVEYRSRKEKEGVSFKNHVIQWFEVLDGLLGPYWKAAGLAFNCTFXLFGTVIQLXACASNIYYINXDRLDKRXXTYIFXRLAANSSFFTTTRELRLSLH

SEQ ID NO: 9311 - protein, 547 aa, Magnetococcus sp. MC-1
MSSLTQLPQWQALQTHLEENRSVQMRDLFDQDSQRFSRFSLQQGELLFDYSKNRITAETMARLLDLARAQDVEGWRDRMFAGEAINETEGRAVLHVALRNRSGRPIRVAGEDVMPAINQVLQQMRQFSEAVRSGAWKGQSGQAITDVVNIGIGGSDLGPVMVCEALKPYHQPGLSVHFVSNVDGTHMAETLKGLNAETTLFIVASKTFTTQETLTNAHTARDWLVAQLGEAAVRKHFVALSTNAEAVSAFGIDTDNMFAFWNWVGGRYSLWSAIGLPIAIAVGFEGFMALHDGAYAMDEHFRTAPLASNMPVIKALIGIWNHNFLGAESFAVLPYDQYLHRLAAYLQQADMESNGKYVTRDGARVDYTTGPVLFGEPGTNGQHSFYQLIHQSTRLVPADFIAAAHTHNPVGDHHAKLLSNFFAQTEALMTGKTAAQVRQELEAAGLHGAALEALVPHKVFDGNRPTNSILVRQFTPYTLGQLIALYEHTIHVQGMVWGINPYDQWGVELGKQLAKKILPELTTPGEVHSHDGSTNGLINHYKAWLAE

SEQ ID NO: 9312 - protein, 261 aa, Craterostigma plantagineum
MAFLGRIIIFATFLAITSSSHFARAYYGGDGGWTDAHATFYGGSDASGTMGGACGYGNLYSQGYGTNTAALSTALFNNGLSCGSCFEIKCASSISGGGKWCLPGGSITVTATNFCPPNNALPNNAGGWCNPPLQHFDLSQPVFQHIAQYRAGIVPVSYRRVPCRRRGGIRFTINGHSYFNLVLITNVGGAGDVHAVSIKGATTDWQPMSRNWGQNWQSNANPNGQRLSFKVTTSDGRTLVSNNVAPPNWSFGQTFAGAQFN

SEQ ID NO: 9313 - protein, 260 aa, Zea mays
MPQGDHIELHQKRHGKRLDHDERKRKREAREVHRRSKDARNLIGAKGKRFAKKRYAEKAQMKKTLKMHDESNKRQKVDDDVQEGALPPYLLDRDQTQRAKVLSNTIKQKRKEKAGKWDVPLPKVRPVAEEEMFKVLRTGKRKTKQWKRMVTKATFVGAGFTRKPPKYERFIRPTGLRFTKAHVTHPELKCTFNLDIISVKKNPNGPMYTSLGVMTRGTIIEVNVSELGLVTPAGKVVWGKYAQVTNNPENDGCINAVLLV

SEQ ID NO: 9314 - protein, 320 aa, Candidatus Blochmannia floridanus
MIKKIGVLTSGGDSPGMNAAIRGVVRAGLSEGIEVYGIYDGYLGLFQNRMMLLSYCSVSDIINKGGTVLGSSRFPELKKDMIRSVVMNNISKSHLDALVIIGGDGSYIGARRLSDLGCPCIGIPGTIDNDVAGTDYTIGYFTALETIIEAIDRLRDTSSSHQRISIVEVMGRYCGDLTISAAIAGGCEFVIIPELKFQMQDLVDKIKLNISKGKKHAIVAITERICNVFDLAQYIENETGKETRATVLGHIQRGGKPVAYDRILASRMGAYSIELLLKGYGRHCIGIENEKLVHHDINDATKYMRRSFRQDLLTTAKKLC

SEQ ID NO: 9315 - protein, 363 aa, Pseudomonas fluorescens
MNDIQLDQASVKKRPSGAYDATTRLAASWYVAMRSNELKDKPTELTLFGRPCVAWRGATGRAVVMDRHCSHLGANLADGRIKDGCIQCPFHHWRYDEQGQCVHIPGHNQAVRQLEPVPRGARQPTLVTAERYGYVWVWYGSPLPLHPLPEISAADVDNGDFMHLHFAFETTTAVLRIVENFYDAQHATPVHALPISAFELKLFDDWRQWPEVESLALAGAWFGAGIDFTVDRYFGPLGMLSRALGLNMSQMNLHFDGYPGGCVMTVALDGDVKYKLLQCVTPVSEGKNVMHMLISIKKVGGILRRATDFVLFGLQTRQAAGYDVKIWNGMKPDGGGAYSKYDKLVLKYRAFYRGWVDRVASER

SEQ ID NO: 9316 - protein, 563 aa, Xylella fastidiosa Dixon
MCSIFGIFNLQPSDNLQILRHQALECSQRQRHRGPDWSGVYVDVGAILVHERLAIVDPAGGAQPLLSEDGTLALAVNGEIYNHAVLKGTLQQPYAFQTHSDCEVINALYREETPTSFLNRLNGIFAFVLWDKTTGRGLIARDPMGVVPLYWGHDQDGRLRVASEMKALVEHCSDVAQFPPGHWYDTTTGTLVKYYERPWKNYSAVEGVQVSLQELREAFERAVHRQLMTDVPYGVLLSGGLDSSLVAAVAARYARHRIETNDQSEAWWPRLHSFAIGLKDSPDLSAANVAAEALNTVHHRFEYTFQEGLDVLPEVIRHIETYDVTTIRASTPMFLLARRIKAMGVKMVLSGEGSDEIFGGYLYFHKAPNAREFHEELVRKLNALYYYDCLRANKAMMAWGVEPRVPFLDREFLDVAMRMDAQHKMVDKTSNGPQRMEKGILRAAFDGYLPPSILWRQKEQFSDGVGYGWIDGLKAHAETQVSDHALATAETRFQVNPPQTKEAYYYRSIFERFFPSPAAAETVPGGKSIACSSPAAIAWDASFATMADPSGRAVSGVHQQALL

SEQ ID NO: 9317 - protein, 358 aa, Maytenus undata
SQKLAVRAISQLQSLPGGDIKLLCDTVVESVRDLTGYDRVMVYKFHEDEHGEVMAESKRPDLEPYIGLHYPASDIPQASRFLFKQNRVRMIVDCHASPVLVIQDDRLMQPLCLVGSTLRAPHGCHAQYMENMGSIASLAMAVIINVNDGEGIGGRNPTRLWGLVVCHHTSARCIPFPLRYACEFLMQAFGLQLNMELQLAAQLLEKHVLKTQTLLCDMLLRDSPTGIVTQSPSIMDLVKCDGAALYYQGNYYPLGVTPTEAQIKDIVEWLLAFHGDSTGLSTDSLADAGYPGAALLGDAVCGMAVAYITNRDFLFWFRSHTAKEIKWGGAKHHPEDKDDGQRMHPRSSFKAFLEVVKS

SEQ ID NO: 9318 - protein, 245 aa, Maytenus undata
ALSIAGAVQSQKLAVRAISQLQSLPGGDIKLLCDTVVESVRDLTGYDRVMVYKFHEDEHGEVMAESKRPDLEPYIGLHYPASDIPQASRFLFKQNRVRMIVYCHASPVLVIQDDRLMQPLCLVGSTLRAPHGCHAQYMENMGSIASLAMAVIINVNDGEGIGGRNPTRLWGLVVCHHTSARCIPFPLRYACEFLMQAFGLQLNMELQLAAQLLEKHVLKTQTLLCDMLLRDSPTGIVTQSPSIMD

SEQ ID NO: 9319 - protein, 310 aa, Oryza sativa
MASAAVPEWLNKGDNAWQMLSATLVALQGFPGLALFYVGAVPRKWALTSAFMALYAMAATMPCWALWAHNMAFGRRLLPFVGRPAPALAQDYMLSQALLPSTAAVAPLYPSASMVFFQWAFAGVTVGLVAGAVLGRMSVKAWMAFVPLWTTLSYTVGAYSIWGGGFLFHWGVMDYSGGYVVLLAAGVSGYTAAYWVGPRRKEEDEEEMATASGGNLVVMVAGAGILWMGWTGFNGGDPFSANTDSSVAVLNTHICATTSIVAWVCCDVAVRGRPSVVGAVQGMITGLVCITPRSNYVVAWRGVISRNMLG

SEQ ID NO: 9320 - protein, 245 aa, Mortonia greggii
ALSIAGAVQSQKLAVRAISQLQSLPGGDIKLLCDAVVENVRNLTGYDRVMVYKFHEDEHGEVVAESKRPDLEPYIGLHYPATDIPQASRFLFKQNRMRMIVDCHSTPVSVIQDDGLMQPLCLVGSTLRAPHGCHAQYMANMGSIASLAMAVIINGNDEDGIGGRNTTRLWGLVVCHHTSARCIPFPLRYACEFLMQAFGLQLNMELQLASQLLEKHVLKTQTLLCDMLLRDSPTGIVTQSPSIMD

SEQ ID NO: 9321 - protein, 427 aa, Oryza sativa
  unsure (1)..(427): unsure at all Xaa locations
MENGGGDASAAAWRFGAANPAMEAARSQSIRALVYRVYACLDRGDARSVAPLGHGDPAAFACFRAAPAATGAVVAAAASGAHNSYAPAAGIAEACSAVAAHLSRELPYAVSPADVVLTAGCNHAVEIMMSVLASPGANVLLPRPGYPLYASRAALSGLEFRHFDLLPDSEWEVDLAGVEALADANTVAMVIVNPNNPCGCVYSRDHLAKIAETARKLGIMVISDEVYDHFAFGSKPFVPMGVFGDVAPVMTLGGISKRWMVPGWRLGWIAAXDPNGILRNKKIIDSVIDYRAISVDPVTFVQGALPDILAKTDDAFFTNALGVVKKAAEICYEKLKEIDCITCPHKPEGSMFVMAKLDLSSLDGIEDDVDFCSKLAKEESVVICPGSGLGMKNWLRITFAVDPQLLEDGLERTKCFCKRHGKIKEAS

SEQ ID NO: 9322 - protein, 501 aa, Chorispora bungeana
MAIPMPTRQLFIDGEWREPILKKRIPIVNPATEEVIGDIPAATTEDVEVAVNAARRAFSRNKGKDWAKAPGALRAKHLRAIAAKVTERKSDLAKLEALDCGKPLDEAVWDMEDVAGCFEFYADLAEGLDAKQKAPVSLPMENFKSYVLKQPIGVVGLITPWNYPLLMAVWKVAPSLAAGCTAILKPSELASVTCLELADICREVGLPPGVLNVLTGYGAEAGGPLASHPGVDKIAFTGSFATGSKVMTAAAQLVKPVSMELGGKSPLIVFDDVDLDKAAEWALFGCFWTNGQICSATSRLLVHENIAPQFIEKLVKWSKNIKISDPMEEGCRLGPVVSQGQYEKILKFISTAKSEGATILHGGSRPEHQEKGFFIEPTIITDVTTSMQIWREEVFGPVLCVKTFGSEDEAIELANDSHYGLGAAVISNDTERCDRVSQAFEAGIVWINCSQPCFTQAPWGGVKRSGFGRELGEWGLDNYLSVKQVTLYTSNEPWGWYKSPN

SEQ ID NO: 9323 - protein, 245 aa, Mortonia greggii
ALSIAGAVQSQKLAVRAISQLQSLPGGDIKLLCDAVVENVRNLTGYDRVMVYKFHEDEHGEVVAESKRPDLEPYIGLHYPATDIPQASRFLFKQNRVRMIVDCHSTPVSVIQDDGLMQPLCLVGSTLRAPHGCHAQYMANMGSIASLAMAVIINGNDEDGIGGRNTTRLWGLVVCHHTSARCIPFPLRYACEFLMQAFGLQLNMELQLASQLLEKHVLKTQTLLCDMLLRDSPTGIVTQSPSIMD

SEQ ID NO: 9324 - protein, 294 aa, Azotobacter vinelandii
MLADQAARYPLIGTTFAEASESLGYDLWALVQQGPEGLLNQTDKTQPAILAASVALWRLWQAEGGGLPAFVAGHSLGEYSALVAADSLPFADALRLVECRGQLMQQAVPAGQGGMAAILGLDDADVLAACAESEQGEVVSAVNFNAPGQVVIAGSAAAVGRAIEACKARGAKRAMALPVSVPSHCALMRPAAERFAEAVEAIAWQAPRIPLVQNVSAAVVSDLDVLKRDLLAQLYSPVRWVESMICLAGRGVTDLLECGPGKVLSGLNKRCVKGINTHNLDTPEAFAAARAALA

SEQ ID NO: 9325 - protein, 830 aa, Hordeum vulgare
RAPHGCHAQYMANMGSIASLVMSVTVNEDDDEDGDTGSDQQPKGRKLWGLVVCHHTSPRFVPFPLRYACEFLLQVFGIQLNKEVELASQAKERHILRTQTLLCDMLLGDAPVGIFTQSPNVMDLVKCDGAALCYQNQIMVLGSAPSEGEIKKIAAWLLECHDGSTGLSTDSLLEAGYPGASALGEVVCGMAAIKISSKGFIFWFRSHTAKEIKWSGAKHEPGDADDNGRRMHPRSSFRAFLEVVKWRSVPWEDVEMDAIHSLQLILRGSLQDEDANDNNVGSIVEAPSDDVRKIQGLLELRVVTNEMVRLIETATAPILAVDIVGSINGWNGKVAEITGLPTTEAIGMLLVDLVEGDSVEVIKQMLNSAMQGTEEQNFEIKLKTFHQQEGNGPVVLMVNACCSRDLSDKVVGVCFVAQDLTGHKMVMDKYTQIQGDYVAIVKNPNELIPPIFMINDLGSCLEWNEAMQKITGIKREDAIDKLLIGEVFTLHDYGCRVKDQATITKLSILMNTVISGQEPEKLAFGFFSTDGKYMESLLTANKRTDAEGKITGALCFLHVPSPELQHALQVQKMSEQAAARSFKELTYIRQELKNPLNGMQFTRKLLEPSDLTEEQRQLFASNVLCQEQLKKILHDNDLEGIEQCYMEMNTVEFNLEEALNTVLMQGMSLSKEKQISLDRDWPVEVSSMYLYGDDLRLQQVLADYLACTLQFTRPAEGPIVLQVIPKKEHIGSGMQIAHLEFRVVHPAPGVPEALIQEMFRHGPGVSREGLGLHISQKLVKTMSGTVQYLREAESSSFIVLVEFPVAQLNSKRSKPSTSKWSKPSTSKSNF

SEQ ID NO: 9326 - protein, 237 aa, Zea mays
QCPLFRQNGGGLAEYAVASENLTVKRPPEVSAAEGAGLPIAAGTALQALRTIGAKFDGTGKAMNVLVTAASGGVGLYAVQLAKRAGLHVTATCGARNVELVKSLGADEVLDYRTPEGASLQSPSGKKYDGVVHCTVGTSWSTFEPVLAATGKVIDITPNLTAILKSALHSVTFARKRLVPLLLSPNKADLEFLVGLLKDGKLKTLIDSRFPLSEVSKAWEKSIEGHATGKIIVEMAD

SEQ ID NO: 9327 - protein, 438 aa, Mycobacterium bovis AF2122/97
MHFARHGAGIQHPVIVRGDGVTIFDDRGKSYLDALSGLFVVQVGYGRAELAEAAARQAGTLGYFPLWGYATPPAIELAERLARYAPGDLNRVFFTSGGTEAVETAWKVAKQYFKLTGKPGKHKVISRSIAYHGTTQGALAITGLPLFKAPFEPLTPGGFRVPNTNFYRAPLHTDLKEFGRWAADRIAEAIEFEGPDTVAAVFLEPVQNAGGCIPAPPGYFERVREICDRYDVLLVSDEVICAFGRIGSMFACEDLGYVPDMITCAKGLTSGYSPLGAMIASDRLFEPFNDGETMFAHGYTFGGHPVSAAVGLANLDIFEREGLSDHVKRNSPALRATLEKLYDLPIVGDIRGEGYFFGIELVKDQATKQTFTDDERARLLGQVSAALFEAGLYCRTDDRGDPVVQVAPPLISGQPEFDTIETILRSVLTDTGRKYLHL

SEQ ID NO: 9328 - protein, 87 aa, Oryza sativa
  unsure (1)..(87): unsure at all Xaa locations
GFSCLMDDEATLGGGXKNHRRATQDLYDFIADGNFPEWKLFVQVIDPEEEERFDFDPVDDTKTWPEDEVPLXSVGRLVLNPIVYHFF

SEQ ID NO: 9329 - protein, 499 aa, Clarkia lingulata
  unsure (1)..(499): unsure at all Xaa locations
MASPALISETEAWKDLKAHLEGIKMTHLRELMGDTERCQSMMVEFDNIFLDYSRQQASPDTISKLYKLADAAHLKQKIDRMYNGDHINTTENRSVLHVALRAPRNSAICSDGKNVVPDVWNVLDKIKDFSDRVRNGSWIGATGKELKDVIAVGIGGSFLGPLFVHTALQTDPEASKNARGRELRFLANVDPIDVARNISGLNPETTLVVVVSKTFTTAETMLNARTLREWISSALGPSAVAKHMVAVSTNLPLVEKFGIDPNNAFAFWDWVGGRYSVCSAVGVLPLSLQYXXXXXXKFLQGAHSIDQHFSSAPFEKNIPVLLGLLSVWNVSFLGYPARAILPYSQALEKLAPHIQQVSMESNGKGVSIDGLPLPFESGEIDFGEPGTNGQHSFYQLIHQGRVIPCDFIGVVKSQQPVYLKGEVVNNHDELMSNFFAQPDALAYGKTPEQLKKENVSEHLIPHKTFTGNRPSVSILLPTLDAYRIGQLLAIYEHRVAVQG

SEQ ID NO: 9330 - protein, 457 aa, Magnaporthe grisea 70-15
MSAKATRGSTSSSTPQNSSSSSQSQSQSTAVSRIRNIANHMMASPSTIFTADVVPQAPEDPLFGLMAAYRADESPDKVDLGIGAYRDDNAKPWVLPVVKKADEIIRNDPSANHEYLPITGLASFTSKAGELMLGADTPAKGRVTSVQTISGTGALHLGALFLQKFYRKVYSNSVVHLSNPTWANHNQIFSNVQVPTTTYPYFDKGTKGLDFEGMKATLNNAAEHSIILLHACAHNPTGVDPTQGQWREIAEIMKAKKHFPFFDCAYQGFASGDLDRDAWAVRYFVEQGFELVIAQSFAKNFGLYGERAGCFHYVSAPAAEAAETTKRVASQLAILQRSEISNPPIYGARVASIVLNDPALMSEWRENLRTMSGRIITMRNELRAKLEALGTPGTWNHITDQIGMFSFTGLTEAQVLKIRSDYHVYMTKNGRISMAGLNSRNIDYFAKAVDKVVRETQ

SEQ ID NO: 9331 - protein, 502 aa, Mycobacterium bovis AF2122/97
MTTLWQPHRNDYSPIPGRGVHARRGARRPRPRGGRAERPGTGQLTRSGRRALLVGLTAASVGVLYGYDLSAIAGALLSLSEEFELTTREQELLTTTAVLGQIAGALGGGILANAIGRKKSVVLIVAGYAVFALLGATSVSVPMLVVARLLLGVTIGLSVVVVPVYVAESAPAAVRGSLVTAYQLATLSGIVVGYLVGYLLAGSHGWRAMFGLAAAPATLLLPLLWRMPDTARWYLLKGRIADARSALRRIQPEADIDAELADMAAAVDERGGGIGEMVRRPYLRATLFVIALGFLVQITGINAIIYYSPRLFAAMGFAGYFAMLALPAMVQVAGLAAVCASLFLVDRLGRRPILLSGIATMITADAVLITVFANDSDGGTGLVLGFAGVLLFIIGFNFGFGSLVWVYAAESFPSRLRSMGSSLMLTSTLTANAIVAAFSLTMLRVLGGAGVFAVFGTFAVVAFVVVYRFAPETKGRKLEEIRHFWENGGRWPAERSPAADEP

SEQ ID NO: 9332 - protein, 499 aa, Clarkia lingulata
  unsure (1)..(499): unsure at all Xaa locations
MATPALISDTEAWKDLKAHLEGIKHTHLRELMGDTERCQSMMVEFDNIFLDYSRQQASPDTINKLYKLAEAAHLKQKIDSMYNGDHINSTEHRSVLHVTLRAPRNSAICSDGKNVVPDVWNVLDKIKDFSERVRNGSWVGATGKELKNVIAVGIGGSFLGPLFVHTALQTDPEASKNARGRELRFLANVDPIDAARNISGLNPETTLVVVVSKTFTTAETMLNARTLREWISSALGVSAVAKHMVAVSTNLPLVEKFGIDPNNAFAFWDWVGGRYSVCSAVGVLPLSLQYXXXXXXKFLQGAHSIDQHFSSAPFEKNIPVLLGLLSVWNVSFLGYPARAILPYSQALEKLAPHIQQVSMESNGKGVSIDGLPLPFESGEIDFGEPGTNGQHSFYQLIHQGRVIPCDFIGVVKSQQPVYLKGEVVNNHDELMSNFFAQPDALAYGKTPEQLKKENVSEHLIPHKTFTGNRPSLSILLPTLDAYRIGQLLAIYEHRVAVQG

SEQ ID NO: 9333 - protein, 290 aa, Vibrio vulnificus CMCP6
MIKKCLFPAAGYGTRFLPATKSMPKEMMPVVNKPLIEYGVEEAIQAGMDGMCIVTGRGKHSIMDHFDKNYELEHQISGTNKEALLEDVRALIDSANFTYIRQREMKGLGHAILTGRELVGDQPFAVVLADDLCVNEEQGVLAQMVALFKQFRCSIVAVQEVPENETHKYGVISGEMIKDDLFRVDNMVEKPEPGTAPSNLAIIGRYILTPDIFDLIEQTEPGKGGEIQITDALLKQAKAGCVLAYKFKGRRFDCGSVEGYIEATNYCYQNLYLKDEKTSELGKFSTQKEK

SEQ ID NO: 9334 - protein, 82 aa, Clarkia biloba subsp. biloba
TNLPLVEKFGIDPNNAFAFWDWVGGRYSVCSAVGVLPLSLQYGFAVVEKFLQGAHSIDQHFSSAPFEKNIPVLLGLLSVWNV

SEQ ID NO: 9335 - protein, 561 aa, uncultured bacterium
MTHLKITGMTCDSCAAHVKEALEKVPGVQSALVSYPKGTAQLAIVPGTSPDALTAAVAGLGYKATLADAPLADNRVGLLDKVRGWMAAAEKHSGNEPPVQVAVIGSGGAAMAAALKAVEQGAQVTLIERGTIGGTCVNVGCVPSKIMIRAAHIAHLRRESPFDGGIAATVPTIDRSKLLAQQQARVDELRHAKYEGILGGNPAITVVHGEARFKDDQSLTVRLNEGGERVVMFDRCLVATGASPAVPPIPGLKESPYWTSTEALASDTIPERLAVIGSSVVALELAQAFARLGSKVTVLARNTLFFREDPAIGEAVTAAFRAEGIEVLEHTQASQVAHMDGEFVLTTTHGELRADKLLVATGRTPNTRSLALDAAGVTVNAQGAIAIDQGMRTSNPNIYAAGDCTDQPQFVYVAAAAGTRAAINMTGGDAALDLTAMPAVVFTDPQVATVGYSEAEAHHDGIETDSRTLTLDNVPRALANFDTRGFIKLVIEEGSHRLIGVQAVAPEAGELIQTAALAIRNRMTVQELADQLFPYLTMVEGLKLAAQTFNKDVKQLSCCAG

SEQ ID NO: 9336 - protein, 270 aa, Magnaporthe grisea 70-15
MALSPILRNHGTAALAELVGTFLFLFFAFSAAGVANAVPPEFSDGIAVPNIAALLYISFAFGISLMVNVFAFYRISGGQFNPAVSTALCLVGAIPPLRAGFCIVGQIVGGIIAAAAVDGLYPTFLNVETTLGSGVSPAQGVFIEMFLTTQLILVILLLAVEKHRLTYLAPLGIGFALFVTHLAGVYFTGASLNPARSLGPAVINRSFPSYHWIYWIGPMLGALLASGFYTLLDFCKWKQVNPGQDWDGIGEKEAQRDDFDGARDPLTRVA

SEQ ID NO: 9337 - protein, 454 aa, Zea mays
MASLIPPCLSVPTAPGRARLAAPGAPRRRRMAVVRAKIREIFMPALSSTMMEGKIVSWTAAEGDRVGKGDPVVVVESDKADMDVETFQDGIVAVVLVPAGGTAPVGAPIALLAESEEEVALARARAQALSQGQSQAPSPPHAAAALGPPPPAPVAPPATKGIATPYAKKLAKQHRVDIAGVVGTGPHGRVTAADVEAAAGIKHKRPPPPPPPASVDAAPLVPASAVLPPVPGGTVVPFTTMQAAVSKNMVESLRVPTFRVSYSMITDKLDALYEKVKSKGVTKTVLLVKAAAVALTQHPVVNASCRDGKSFSYNNDVNIGVAVALEGGLLTPVLEDADKMDIYLLARKWRVLLKKARMKQLQPNEYNSGTFTLSNLGMFGVDKFDAILPAGQGAIMAVGASRPTVVADKDGFFSIKSEMLVNVTADHRIIYGADLAAFLQTFAKIVEDPECLTL

SEQ ID NO: 9338 - protein, 245 aa, Paxistima canbyi
ALSIAGAVQSQKLAVRAISQLQSLPGGDIKLLCDTVVESVRDLTGYDRVMVYKFHEDEHGEVVAESKRPDLEPYIGLHYPATDIPQASRFLFKQNRVRTIVDCHASPVRVIQDDGLMQPLCLVGSTLRAPHGCHAQYMENMGSIASLAMAVIINGNDEEVIGGRNATRLWGLVVCHHTSARCIPFPLRYACEFLMQAFGLQLNMELQLAAQLSEKHVWKTRTLLCDMLLRDSPPAIVTQSPSIMD

SEQ ID NO: 9339 - protein, 320 aa, Enterococcus faecium
MKRIGILTSGGDAPGMNAAVRAVVRKGIYEGLEVYGINYGFAGLVAGDIRRLDVADVGDKIQRGGTFLYSARYPEFATEEGQLKGIEQLKKFGIEGLVVIGGDGSYHGAMALTKRGFPAVGIPGTIDNDIPGTDFTIGFDTAINTVLESIDRIRDTATSHVRTFVIEVMGRNAGDIALWSGVAGGADEIIIPEHDFDMASVAKKIQEGRDRGKKHCLIILAEGVMGGNEFAEKLSEFGDYHTRVSILGHVVRGGAPSARDRVLASKFGAYAVELLQEGKGGLCVGIHDNEIVASDIIDTLENNKHKPDLSLYDLNNSLSF

SEQ ID NO: 9340 - protein, 503 aa, Ostreococcus tauri
MNGDGGVESSRASGGTDVPGEDAARTRATPSATSRKDKSLWTLCERFLTIYGDGSKESVSLDDAATRLGVERRRIYDVANVLESVEVLERKAKNQYTWHGVRRLPECLKRLKESGLREFGTDVELDGSTSEGRDGEKEDGTARGGDASDRSSPTNSSTINLDAKQRGEKVTGTKFFGQGRFAVSSASYDSRREKSLGLLSQKFVQLFLASKMNVVSLETAARIIMGEDDDDEAKLKTKIRRLYDIANILCSLRLIRKVHVGETRKPAFLWLQRENSIAELIAQGKGLMWFDKLNEEEEMRLQASIIESKLDGNEVLMVDAENKRRGAFYDSQTKSGSKRPRGRPRLPGGDVDALPSSVPPLGASSMTPEEAARFNQLFAFTTSQLMAQYPLDVRADVNSIMAQSAMGNANYLHLLAQSSVAQAHAARRMENTAKGMSSDSSIDNTAMFVPPLPAFPAMLPAWGMSGLSYHSNHMEHMMRMYETSLATISDNDPSHPDGKIAEQ

SEQ ID NO: 9341 - protein, 245 aa, Paxistima myrsinites
ALSIAGAVQSQKLAVRAISQLQSLPGGDIKLLCDTVVESVRDLTGYDRVMVYKFHEDEHGEVVAESKRPDLEPYIGLHYPATDIPQASRFLFKQNRVRTIVDCHASPVRVIQDDGLMQPLCLVGSTLRAPHGCHAQYMENMGSIASLAMAVIINGNDEEIIGGRNATRLWGLVVCHNTSARCIPFPLRYACEYLLQLFGLQLNMELQLAAPLSKKHVLKTQTILYDMLLHDSPTGIVTQSPSIMD

SEQ ID NO: 9342 - protein, 245 aa, Paxistima myrsinites
ALSIAGAVQSQKLAVRAISQLQSLPGGDIKLLCDTVVESVRDLTGYDRVMVYKFHEDEHGEVVAESKRPDLEPYIGLHYPATDIPQASRFLFKQNRVRTIVDCHASPVRVIQDDGLMQPLCLVGSTLRAPHGCHAQYMENMGSIASLAMAVIINGNDEEVIGGRYATRLWGLVVCHHTSARCIPFPLRYACEFLMQAFGLQLNMELQLAAQLSEKHVWKTRTLLCDMLLRDSPPAIVTQSPSIMD

SEQ ID NO: 9343 - protein, 289 aa, Streptococcus pneumoniae
MKGIILAGGSGTRLYPLTRAASKQLMPVYDKPMIYYPLSTLMLAGIKDILIISTPQDLPRFKDLLLDGSEFGIKLSYAEQPSPDGLAQAFLIGEEFIGDDSVALILGDNIYHGPGLSTMLQKAAKKEKGATVFGYQVKDPERFGVVEFDTDMNAISIEEKPEYPRSNYAVTGLYFYDNDVVEIAKQIKPSARGELEITDVNKAYLNRGDLSVELMGRGFAWLDTGTHESLLEASQYIETVQRMQNVQVANLEEISYRMGYISREDVLELAQLLKKNEYGQYLLRLIGEA

SEQ ID NO: 9344 - protein, 756 aa, Claviceps purpurea
MKFLAVSSILFASSLAVPTSHGGGSCRPRRPPPVNYPGGDYPGGQGGDKPPGGGYPGTTYPGGDYPGGDHPGGYGGGGYGGGDYPGGDYPGGDYPGGDYPGGDYPGGDYPGGNHGGGNHGGGNGGNNGGGNGGGNGGGGNNGNGTDPGGNNGGGNGGGGNVPYKPCPSGLYSNPQCCSTNVLGVAALNCKTPSFAPTSFQSFKSACSGGQPQCCVVPAAGQGVLCQAPIGGGNGGNNGGNNGGNNGGNNGGNNGGNNGGNNGGNNGGNGGNGGNNGGNNGGNGGNNGGNGGNGGDGGDYSACPSGLYSNPQCCATDVLGVASLDCVNPSSKPRSGDDFKSTCGAEGKHASCCAIPVAGQGVLCQPAMGGGGNGGNNGGGNGGNGGNGGNGSNDGGNGGNGGNNGGNNGGNGGNGGDGGDYSACPSGLYSNPQCCSTDVLGVASLDCVNPSSKPRSGDNFKSTCAAAEKHASCCVIPVAGQAVLCQPAMGGGGNGGNNGGNGGNNGGNNGGNNGGNNGGNNGGNNGGNNGGNGGNGGNNGGNNGGNGGNGGNNGGNNGGNGGNGGGNGGDYSACPSGLYSNPQCCSTDVLGVASLDCVNPSSKPRSGDNFKSTCAAAGKHASCCVIPVAGQGVLCQPAMGGGGNGGNNGGGNGGNGGNNGGNNGGNGGNNGGNNGGNGGNNGGNGGGSHEVCPSGLYSVPQCCATGLLGVLDLDCQSPSRTSFSSSDFKSTCRSEGRKARCCVLPVAGQDVLCTNPL

SEQ ID NO: 9345 - protein, 361 aa, Peripterygia marginata
QKLAVRAISHLQSLPGGDIKLLCDTVVESVRDLTGYDRVMVYKFHEDEHGEVVAESKRPDLEPYIGLHYPATDIPQASRFLFKQNRVRMIVDCHASPVRVIQDDGLMQPLCLVGSTLRAPHGCHAQYMENMGSIASLAMAVIINGNDEEVIGGRNATRLWGLVVCHHTSARCIPFPLRYACEFLMQAFGLQLNMELQLAAQLSEKHVLKTQTLLCDMLLRDSPTGIVTQSPSIMDLVKCDGAALYYQGNYYPLGVTPTEPQIKDIVEWLLAFHGDSTGLSTDSLADAGYAGAALLGDAVCGMAVAYITNRDFLFWFRSHTAKEIKWGGAKHHPEDKDDGQRMHPRSSFKAFLEVVKSRSLP

SEQ ID NO: 9346 - protein, 374 aa, Perrottetia ovata
ALSIAGAVQSQKLAVRAISQLQSLPGGDIKLLCDAVVENVRNLTGYDRVMVYKFHEDEHGEVVAESKRPDLEPYIGLHYPATDIPQASRFLFKQNRVRMIVDCHSTPVSVIQDDGLMQPLCLVGSTLRAPHGCHAQYMANMGSIASLAMAVIINGNDEDGIGGRNTTRLWGLVVCHHTSARCIPFPLRYACEFLMQAFGLQLNMELQLASQLLEKHVLKTQTLLCDMLLRDSPTGIVTQSPSIMDLVKCDGAALYHQGKYYPLGVTPTEAQIKDIVEWLLAFHGESTGLSTDSLADAGYPGAALLGDAVCGMAVAYITDRDFLFWFRSNTAKEIKWGGAKHHPEDKDDGQRMHPRSSFKAFLEVVKSRSLPWEN

SEQ ID NO: 9347 - protein, 353 aa, Pseudomonas fluorescens
MYPKNAWYVACTPDELQGQALGPARSAAKRMVFYRAHEGRVAAVEDFCPHRGAPLSLGYVENGNLVCGYHGLVMGCDGKTVEMPGQRVRGFPCNKTFAAVERYGFIWVWPGDQALADPALIHHLEWADNDQWAYGGGLFHIQCDYRLMIDNLMDLTHETYVHASSIGQKEIDEAPPQTTVDGDQVVTARHMHNVMPPPFWRMALRGNQLADDVPVDRWQICRFSPPSHVLIEVGVAHAGHGGYDASAQYKASSIVVDFITPESDTSIWYFWGMARNFNPQDQALTESIREGQGKIFSEDLEMLERQQQNLLAQPQRSLLKLNIDAGGVQSRRVLERLIAQEPEPREALIAASR

SEQ ID NO: 9348 - protein, 443 aa, Azotobacter vinelandii
MNAVKAGRKVAVVDDRPQVGGNCTHLGTIPSKALRHSVRQIMQYNNNPLFRQIGEPRWFSFADVLKSAEQVIAKQVSSRTGYYARNRIDTFFGTASFCDEHTIEVVHLNGMVETLVAKQFVIATGSRPYRPADVDFTHPRIYDSDTILSLGHTPRRLIIYGAGVIGCEYASIFSGLGVLVDLIDNRDQLLSFLDDEISDSLSYHLRNNNVLIRHNEEYERVEGLDNGVILHLKSGKKIKADAFLWSNGRTGNTDKLGLENIGLKANGRGQIQVDEHYRTEVSNIYAAGDVIGWPSLASAAYDQGRSAAGSITENDSWRFVDDVPTGIYTIPEISSVGKTERELTQAKVPYEVGKAFFKGMARAQIAVEKAGMLKILFHRETLEILGVHCFGYQASEIVHIGQAIMNQKGEANTLKYFINTTFNYPTMAEAYRVAAYDGLNRLF

SEQ ID NO: 9349 - protein, 499 aa, Clarkia heterandra
  unsure (1)..(499): unsure at all Xaa locations
MASPALISETEAWKDLKAHLEGIKMTHLRELMGDTERCQSMMVEFDNIFLDYSRQQASPDTISKLYKLADAAHLKQKIDRMYNGDHINSTENRSVLHVALRAPRNSAICSDGKNVVPDVWNVLDKIKNFSDRVRNGSWIGATGKELKDVIAVGIGGSFLGPLFVHTALQTDPEASKNARGRELRFLANVDPIDVARNISGLNPETTLVVVVSKTFTTAETXXXXXXXXXXXSSALGPSAVAKHMVAVSTNLPLVEKFGIDPNNAFAFWDWVGGRYSVCSAVGVLPLSLQYGFAVVEKFLQGAHSIDQHFSSAPFEKNIPVLLGLLSVWNVSFLGYPARAILPYSQALEKLAPHIQQVSMESNGKGVSIDGLPLPFESGEIDFGEPGTNGQHSFYQLIHQGRVIPCDFIGVMKSQQPVYLKGEVVNNHDELMSNFFAQPDALAYGKTPEQLKKENVSEHLIPHKTFTGNRPSISILLPTLDAYRIGQLLAIYEHRVAVQG

SEQ ID NO: 9350 - protein, 464 aa, Agrobacterium tumefaciens str. C58
MKELVDGKFAGLFGGVHVLPFFNPIDGADAGFDPTDHTIVDPRLGDWEDVRALSGSVEIMADLIVNHVSSQSGAFTDFIAKGSASEFADMFMTFDKVFPDGATEEDLLRIYRPRPGLPFSKVTLADGTQRMLWTTFTPEQIDIDVHSAKGTTYLETILDRFSEANVTAIRLDAAGYAIKKAGSSCFMIDDTYAFLEEVAGKARNRGMEVLVEIHSYHRDQIEIAKKVDRVYDFALPPLILHALFTGDATPLAKWLAISPRNAITVLDTHDGIGVIDVGAHSDGRAGLLEPQAIDNLVGEIHRRSDGQSRQATGAAASNLDLYQVNCTYYDALGRNDNDYLIARAIQFFAPGIPQVYYVGLLGGVNDMDLLAKTGVGRDINRHYYGNDEIGTALETPLFHRLSNLIRFRNTHPAFGGALKATIADAGALVLSWQHGDAFAELKISFADRKASIAASGQSEMQIVE

SEQ ID NO: 9351 - protein, 625 aa, Oryza sativa
  unsure (1)..(625): unsure at all Xaa locations
MASISGAAAPPSSSAACRLRLRRQLLLRPSHLRLRAPHSIADLSRSSSSSSEQQPSSTPAAPLASRPGQNGSTRGAVEKDPIKLWERYVEWLYQHKELGLFVDVSRMGFTEEFLRRMEPRMQRAFAAMRELEKGAIANPDEGRMVGHYWLRDPGLAPNSFLRTTSGTPGGGPLAFSXDVVSGKIKPPSSPAGRFTQILSIGIGGSALGPQFVSEALAPDNPPLKIRFIDNTDPAGIDHQIAQLGPELASTLVIVISKSGGTPETRNGLLEVQKAFRDAGLDFSKQGVAVTQENSLLDNTARIEGWLARFPMFDWVGGRTSEMSAVGLLPAALQGIDIKEMLVGAALMDEETRNTVVKENPAALLALCWYWASEGIGNKDMVVLPYKDSLLLLSRYLQQLVMESLGKEFDLDGNRVNQGLTVYGNKGSTDQHAYIQQLREGVHNFFVTFIEVLRDRPPGHDWELEPGVTCGDYLFGMLQGTRSALYSNDRESISVTVQEVTPRAVGALVALYERAVGIYASLVNINAYHQPGVEAGKKAAGEVLALQKRVLTVLNEASCKDPAEPLTLDQIAERCHCPEDIEMIYKIIQHMAANDRALIAEGSCGSPRSIKVYLGECNVDEDMLAA

SEQ ID NO: 9352 - protein, 559 aa, Clarkia heterandra
MATPTLISETEAWKDLKAHLDGIKRTHLRELMGDTERCQSMMVEFDNIFLDYSRQQASPDTINKLYKLAEAAHLKQKIDRVYNGDHINSTENRSVLHVALRAPRNSAICSDGKNVVPDVWNVLDKIKDFSERVRNGSWVGATGKELKDVIAVGIGGSFLGPLFVHTALQTDPEASKNARGRELRFLANVDPIDAARNISGLNPETTLVVVVSKTFTTAETMLNARTLREWISSALGISAVAKHMVAVSTNLPLVEKFGIDPNNAFAFWDWVGGRYSVCSAVGVLPLSLQYGFAVVEKFLQGAHSIDQHFSSAPFEKNIPVLLGLLSVWNVSFLGYPARAILPYSQALEKLAPHIQQVSMESNGKGVSIDGLPLPFESGEIDFGEPGTNGQHSFYQLIHQGRVIPCDFIGVVKSQQPVYLKGEVVNNHDELMSNFFAQPDALAYGKTPEQLKKENVSEHLIPHKTFTGNRPSLSILLPTLDAYRIGQLLAIYEHRVAVQGFVWGINSFDQWGVELGKSLATQVRKQLHASRVKGEPVEEEGFNFSTKTLLTRYLQATSDV

SEQ ID NO: 9353 - protein, 380 aa, Clarkia dudleyana
MASPALISETEAWKDLKAHLEGIKTTHLRELMGDTERCQSMMVEFDNIFLDYSRQQASPDTISKLYKLADAAHLKQKIDRMYNGDHINSTENRSVLHVALRAPRNSAICSDGKNVVPDVWNVLDKIKDFSDRVRNGSWIGATGKELKDVIAVGIGGSFLGPLFVHTALQTDPEASKNARGRELRFLANVDPIDVARNISGLNPETTLVVVVSKTFTTAETMLNARTLREWISSALGPSSVAKHMVAVSTNIPLVEKFGIDPNNAFAFWDWVGGRYSVCSAVGVLPLSLQYGFAVVEKFLQGAHSIDQHFSSAPFEKNIPVLLGLLSVWNVSFLGYPARAILPYSQALEKLAPHIQQVSMESNGKGVSIDGLPLPFESGEI

SEQ ID NO: 9354 - protein, 380 aa, Clarkia dudleyana
MATPSLISETEAWKDLKAHLEGIKRTHLRELMGDTERCQSMMVEFDNIFLDYSRQQAAPDTINKLYKLADAAHLKQKIDRMYNGDHINSTENRSVLHVALRAPRSSAICSDGKNVVPDVWNVLDKIKDFSERVRSGSWVGATGKELKDVIAVGIGGSFLGPLFAHTALQTDPEASKNARGRELRFLANVDPIDAARNISGLNPETTLVVVVSKTFTTAETMLNARTLREWISSALGVSAVAKHMVAVSTNLPLVEKFGIDPNNAFAFWDWVGGRYSVCSAVGVLPLSLQYGFAVVEKFLQGAHSIDQHFSSAPFEKNIPVLLGLLSVWNVSFLGYPARAILPYSQALEKLAPHIQQVSMESNGKGVSIDGLPLPFESGEI

SEQ ID NO: 9355 - protein, 380 aa, Clarkia dudleyana
MATPALISETEAWKDLKAHLEGIKRTHLRESMGDTERCQSMMVEFDNIFLDYSRQQASPDTINKLYKLADAAHLKQKIDRMYNGDHINSTENRSVLHVALRAPRNSAICSDGKNVVPDVWNVLDKIKDFSERVRNGSWVGATGKELKDVIAVGIGGSFLGPLFVHTALQTDPEASKNARGRELRFLANVDPIDAARNISGLNPETTLVVVVSKTFTTAETMLNARTLREWISSALGVSAVAKHMVAVSTNLPLVEKFGIDPNNAFAFWDWVGGRYSVCSAVGVLPLSLQYGFAVVEKFLQGAHSIDQHFSSAPFEKNIPVLLGLLSVWNVSFLGYPARAILPYSQALEKLAPHIQQVSMESNGKGVSIDGLPLPFESGEI

SEQ ID NO: 9356 - protein, 698 aa, Collimonas fungivorans
MTIATTRTIRAACPHDCPDTCALLVTVTDGVATEVRGDPDHPTTAGVLCTKVARYTERTYHKDRLLHPLKRIGNKGEGKFVQISWDEAIATIAGRLGEIAARNPQAILPYSYAGTMGLVQGESMAMRFFNRIGASLLDRTICASAGGTGYKYTIGARVGTDLEQFQNAKLILIWGGNPIASNLHFWMRAQEAKRRGAKLIAIDPYRSLSADKCHQHIALLPGTDSALALGMMHVLIAEDLLDHDYIAQYTLGFEQLKQQVSSWTPQKTAEVCGIGADEVLELARSYGAAAQRGEAAAIRVNYGLQRVRGGGMAVRNITCLPALVGAWRHAAGGVQLSTSDSFPKNNQFLQRPDFLLKQGMAPRTINMSTIGDDLLREASPEFGPKIEALIVYNSNPVAVAPESGAVARGFAREDLFTVVLEHFQTDTADYADIVLPATTQLEHVDAHSAYGHLYMLANNAAITPLGEAKPNTEIFRLLAARMGFDDACFRETDDEIAAQAFDRKNERAIHFDWDALKQKGWQKLNVPDAPFAHGGFPTPSGKCEFYSAQMLKDGLDPLPTYIAPYESPASNPQLARKYPLAMISPPARNFLNSSFVNVKSLRDTEGEPHLDMHPTDAAARALASGDAVRIYNDRGSFNARLRVTDKARIGLVVGLSIWWKKMASDGKNANEVTSQRLTDMGRAPTFYDVLVEVEKAPA

SEQ ID NO: 9357 - protein, 392 aa, Methanosarcina mazei Goe1
MKACIMCGGAGTRLRPLTFKHPKPSIPILNKPSVRHLIEHLSREGFNEIVMTLGYMGERIEEQLGDGHIFGVHIEYVYEKEKMGTAGGVKNAEEYLKNEPFIVLGGDHVLNLDLREMYRFHETNDAIVTIGLLSIDDPREFGIADMDINNRIHRFLEKPKSGQIFSNLASTGIYICDPEIFDWIPENKKYDFAKDLFPSLLAADEKINGMLVRGKWTDVGSSAAYRQAQRWMLDALPGTTIEGNFTTRNARIRGPLSIGNNVCIGSNSSLVGPIVIGENTVIGDNVLVGPYSVIGANCTIDDNAKILSSYLFDYVSIGKGSNISGSVVADETAVGEKCSLENGTVIGHRVTIGDNSTIHSGVKIWPEVIIDNDSSIEETIVNLNYDTSQEGS

SEQ ID NO: 9358 - protein, 539 aa, Mycobacterium bovis AF2122/97
MVMSLMVAPELVAAAAADLTGIGQAISAANAAAAGPTTQVLAAAGDEVSAAIAALFGTHAQEYQALSARVATFHEQFVRSLTAAGSAYATAEAANASPLQALEQQVLGAINAPTQLWLGRPLIGDGVHGAPGTGQPGGAGGLLWGNGGNGGSGAAGQVGGPGGAAGLFGNGGSGGSGGAGAAGGVGGSGGWLNGNGGAGGAGGTGANGGAGGNAWLFGAGGSGGAGTNGGVGGSGGFVYGNGGAGGIGGIGGIGGNGGDAGLFGNGGAGGPGPRACRVPPASTAATAATAATAEPAATAGAAGYWLATAGPAGPAASAATVVRAALAIRVSPSTTVPAVTAVTAATPAWAGPVGPAACWRVRTVPPAPPPPAAATAAMAASAPPPTHPYKPAGPAVMAVMAGWSATAAPAAPAVPVMRVPPALPVPPYNRRAVTAPMAAPGATAVMAEMAAPSTATAASAARAVPAVAAAPAETDSTPPPWVRPVPMAVWAATAARAVTAVVAAPAAPRSPAPPARPGTAAPAVTAARPVMAEPVPPVM

SEQ ID NO: 9359 - protein, 552 aa, Ustilago maydis 521
MSVVTVQTKPFEGQKPGTSGLRKRVKVFSQQHYTENFVQAILSAIPTGAPNSTLVVGGDGRYFSKPAIQAIIRLAAGNGVSKLIIGQDGILSTPAASHVIRSYKATGGILLTASHNPGGPENDFGIKYNMDNGGPAPESITNKIFDITKTITEYKIVEGPPVDLSKIGETTFGKLEIQIIDNVKDYVDYLSQIFDFALIKHFLKTSGFTVRFDALHGVTGPYGRALFVEQFGLDESSIQNCIPSEDFGGGHPDPNLTYAKSLVDAVEKENISFGAASDGDGDRNMIIGKGAFVNPSDSVAIIADWAQKAIPYFKSGIKGLARSMPTSGAIDRVAAKNGYECFEVPTGWKFFGNLMDAGRLSICGEESFGTGSDHIREKDGLWAVVAWLSILAAANKEKPGTSVSDVLLAFYKQYGRNFFSRYDYEEVDSDGANKLMAHLRDQFESASFKGSKLGDFQVAESGDFSYTDPIDGSVSKNQGLYIKFVDGSRIIFRLSGTGSAGATIRLYVEKYSNDDNEFGADAQVGLKPLIEQALAVSKLQEFTGRSKPTVIT

SEQ ID NO: 9360 - protein, 291 aa, Bradyrhizobium japonicum USDA 110
MKIRKAVFPVAGLGTRVLPATKAMPKEMLTIVDKPLIQYVYDEAREAGIEHFIFVTGRNKNVIEDHFDKMFELDATLAARGKKAEQEILAQNQPEAGAVSFTRQQAPLGLGHAVWCARDIVGNEPFAVVLPDELVLNTPGCLKQMIETASSLGDKSNLIAVEAVPDHLTHQYGICGVGKRTGKMFEVDGMVEKPAKGTAPSNLSITGRYILQPEIFKILETQERGAGGEIQLTDAMIGLARSQKFYGVEFEGERHDCGSKPGFLRANIAYGLKRPELRDGLIAEMKKYLGQ

SEQ ID NO: 9361 - protein, 362 aa, Streptomyces coelicolor A3(2)
MAQEVRGVIAPGKDEPVRIETIVVPDPGPGEAVVKIQACGVCHTDLHYKQGGINDEFPFLLGHEAAGVVESVGAGVTDVAPGDFVILNWRAVCGKCRACRRGRPWYCFDTHNAEQRMTLASTGQELSPALGIGAFAEKTLVAAGQCTKVDPAVPAEVAGLLGCGVMAGIGAAINTGNVGRGDTVAVIGCGGVGDAAIAGSYLAGASKVIAVDIDDRKLETARTMGATHTVNSRGTDPVEAIRELTGGFGADVVIEAVGRPETYRQAFYARDLAGTVVLVGVPTPEMKLELPLLDVFGRGGSLKSSWYGDCLPSRDFPMLVDLHLQGRLDLGKFVTETIRLDEVEQAFDRMHAGDVLRSVVVL

SEQ ID NO: 9362 - protein, 254 aa, Candidatus Blochmannia floridanus
MYKKKIKKNTITHFGFQNVPTFIKSYLVSNVFHKVATKYDLMNDLMSFGIHRIWKQFLIQQSEVHNGYKVLDLAGGTGDLSIKFSKLVGKKGIVILLDNNDTMLRLGQKKLRNLGILNNVHYIQANAEFLPFSENTFNCVAISFGLRNFTYKQKSLYEIYRVLRPGGKLLILDFSIPTSKLLTILYDLYSFHIIPKIGKIIAQDSKSYQYLVESIRMHPDQETLKNMILSIGFNDVQYFNMTGGIAALHCAYKY

SEQ ID NO: 9363 - protein, 214 aa, Azotobacter vinelandii
MSYYQQAFDVTSLPSWRALQEHRLAMQNFHMREAFLSDPGRFDEFSTSSCGLFLDYSKNLITPETRDLLVNLAREAGVEQAARAMFDGEPVNASERRPALHTALRRPVGDSLLIDGHNIMRDVHAALAQMTDIVGRIHNKLWRGYSDRAITDVVNIGIGGSYLGPELVSEALLPYTQHGVRCHYLANIDGSEFHELTARLNAETTCSSSPARPS

SEQ ID NO: 9364 - protein, 374 aa, Perrottetia ovata
ALSIAGAVQSQKLAVRAISQLQSLPGGDIKLLCDAVVENVRNLTGYDRVMVYKFHEDGHGEAVAESKRPDLEPYIGLHYPATDIPQASRFLFKQNRVRMIVDCHSTPVSVIQDDGLMQPLCLVGSTLRAPHGCHAQYMANMGSIASLAMAVIINGNDEDGIGGRNTTRLWGLVVCHHTSARSIPFPLRYACEFLMQAFGLPLNMELQLASQLLEKHVLKTQTLLCDMLLRDSPTGIVTQSPSIMDLVKCDGAALYHQGKYYPLGVTPTEAQIKDIVEWLLAFHGESTGLSTDSLADAGYPGAALLGDAVCGMAVAYITDRDFLFWFRSNTAKEIKWGGAKHHPEDKDDGQRMHPRSSFKAFLEVVKSRSLPWEN

SEQ ID NO: 9365 - protein, 497 aa, Oryza sativa
  unsure (1)..(497): unsure at all Xaa locations
MATCADTLGPLLGTAAANATDYLCNQFADTTSAVDSTYLLFSAYLVFAMQLGFAMLCAGSVRAKNTMNIMLTNVLDAAAGALFYYLFGFAFAFGAPSNGFIGKHFFGLKQVPQVGFDYSFFLFQWAFAIAAAGITSGSIAERTQFVAYLIYSAFLTGFVYPVVSHWIWSADGWASASRTSGSLLFGSGVIDFAGSGVVHMVGGXGRTLGRPHRGPPHWXRFDHAGRSVALRGHSASLVVLGSFLLWFGWYGFNPGSFLTILKSYGPPGSIHGQWSAVGRTAVTTTLAGSTAALTTLFGKRLQTGHWNVIDVCNGLLGGFAAITAGCSVVDPWAAIICGFVSAWVLIGLNALAARLKFDDPLEAAQLHGGCGAWGVIFTALFARKEYVDQIFGQPGRPYGLFMGGGGRLLGAHIVVILVIAAWVSFTMAPLFLVLNKLGLLRISAEDEMAGMDQTRHGGFAYAYHDDDASGKPDRSFGGFMLKSAHGTQVAAEMGGHV

SEQ ID NO: 9366 - protein, 167 aa, Ostreococcus tauri
MTVTLRSSDDETFVVDDDVALSETIKSIIEGARDGRDGVNGAKDGVRDADTEDESMVPLPNVSSKILAKVIEYAKFHVDAKKANEAEAKIKEFNTEFVKVDQATLFEIILAANYLNMKGLLDLTCMTVANMMKGKTPEEIRKTFNIKNDFTPEEEEEVRKENQWAFD

SEQ ID NO: 9367 - protein, 438 aa, GIBBERELLA ZEAE PH-1
MAIKKVFARSVYDSRGNPTVEVDVVTETGLHRAIVPSGASTGQHEACELRDGDKSKWNGKGVTKAVENVNTVIAPALIEKNLDVKDQSAVDAFLNELDGTTNKTKLGANAILGVSLAVAKAGAAEKGVPLYAHVSDLAGTKKPYVLPVPFMNVLNGGSHAGGRLAFQEFMIVPTDAPTFSEALRQGAEVYQALKGLAKKRYGQSAGNVGDEGGVAPDIQTAEEALELITDAIEQAGYTGQMKIAMDVASSEFYKESEKKYDLDFKNPESDPTKWITYEELANMYSELCKKYPIVSIEDPFAEDDWEAWSYFSKTQDIQVVGDDLTVTNPLRIKKAIELKSCNALLLKVNQIGTLTESIQAAKDSYADGWGVMVSHRSGETEDVTIADIAVGLRAGEIKTGAPARSERLAKLNQILRIEEELGDQAIYPGKDFRKSVNL

SEQ ID NO: 9368 - protein, 295 aa, Xylella fastidiosa Dixon
MLSEFAVLYPEILDTFAEASEGAGVDLWTLSQRGPEEMLNRTEYTQPALLAASVALWRLWQARGGRAPDLLAGHSLGEYSALVAAGALSLKDGAYLVRLRGQLMQDAVAVGVGAMAAVLGAEDALVAEVCAQVAGSEIVVAANFNSPGQVVIGGHATAVDRALVLLAERGVSKTVKLAVSVPSHTPLMRDAAHRLAEAMLGLVLKVPQIPVVQNVDGRVHDGVEAIREALVKQLYLPVQWTDCVRELATCGVVRIAECGPGKVLMGLIRRIDKTLDVRSLATPTGFSDVLDEWGF

SEQ ID NO: 9369 - protein, 374 aa, Plagiopteron suaveolens
ALSIAGAVQSQKLAVRAISQLQSLPGGDIKLLCDTVVQSVRDLTGYDRVMVYKFHEDEHGEVIAESKRPDLEPYIGLHYPATDIPQASRFLFKQNRVRIIVDCHASPVSVIQDDGLMQPLCLVGSTLRAPHGCHAQYMDNMGSIASLAMAVIINGNDEDGTGGRNPTRLWGLVVCHHTSARCIPFPLRYACEFLMQAFGLQLNMELQLAAQLLEKHVLKTQTLLCDMLLRESPTGIVTQSPSIMDLVKCDGAALYYQANYYPLGVTPTEAQIKDIVEWLLAFHGDSTGLSTDSLADAGYPGATLLGDAVCGMTVAYITNRDFLFWFRSHTAKEIKWGGAKHHPEDKDDGQRMHPRSSFKAFLEVVKSRSLPWEN

SEQ ID NO: 9370 - protein, 374 aa, Plagiopteron suaveolens
ALSIAGAVQSQKLAVRAISQLQSLPGGDIKLLCDTVVQSVRDLTGYDRVMVYKFHEDEHGEVIAESKRPDLEPYIGLHYPATDIPQASRFLFKQNRVRIIVDCHASPVSVIQDDGLMQPLCLVGSTLRAPHGCHAQYMDNMGSIASLAMAVIINGNDEDGTGGRNPTRLWGLVGWHHPSARCIPFPLRYACEFLMQAFGLQLNMELQLAAQLLEKHVLKTQTLLCDMLLRESPTGIVTQSPSIMDLVKCDGAALYYQANYYPLGVTPTEAQIKDIVEWLLAFHGDSTGLSTDSLADAGYPGATLLGDAVCGMAVAYITNRDFLFWFRSHTAKEIKWGGAKHHPEDKDDGQRMHPRSSFKAFLEEVKSRSLPWEN

SEQ ID NO: 9371 - protein, 249 aa, Bradyrhizobium japonicum USDA 110
MLLSGKTAIISGAASPRGIGLATARRFAAEGARVAILDIDAGAATDAAASLGNSHIGLGCDVADKSSCEQAVARVIESFGGTDVLINNAGITQPVKFLEISAADWDRIQDVNLKGILFLSQAVIPHMRGRKAGSIACMSSVSAQRGGGIFGGPHYSAAKAGVLGLAKAMAREFGPDGIRVNCVTPGLIGTDITAGKLTDEMRAKILEGIPLNRLGTAEDVAGIYTFLASDLSAYVTGAVIDVNGGMLIH

SEQ ID NO: 9372 - protein, 211 aa, Synechocystis sp. PCC 6803
MEIFNNWQIIAKGWYIVCPSRTLRRGQAKSLALCGQKIVVFRGEDGKARALHGYCPHLGTDLGLGQVEDSWIRCNFHRWAFDETGKCRHIPCQSEIPPKAQLAPYATAEKYGFIWIFPEEIAPNDLPEFDELQGQKLVTQADKAFERKCHHHICMMNGIDAQHLKTVHHLDIKMDLSLRQNASGTQIDFTMKGNVPNTTLRESFIHYSSFK

SEQ ID NO: 9373 - protein, 365 aa, Pleurostylia opposita
VQSQKLAVRAISQLQSLPGGDIKLLCDTVVESVRDLTGYDRVMVYKFHEDEHGEVVAESKRPDLEPYIGLHYPATDIPQASRFLFKQNRVRIIVDCHASPVRVLQDDGLMQPLCLVGSTLRAPHGCHAQYMENMGSIASLAMAVIINGNDEEAIDGKNPTRLWGLVVCHHTSARCIPFPLRYACEFLMQAFGLQLNMELQLAAQVLEKHVLKTQTLLCDMLLRDSPIGIVTQSPSIMDLVKCDGAALYYRGNYYPLGVTPTEAQIKDIEEWLLAFHGDSSGLSTDSLADAGYPGAALLGDAVCGMAVAYITNRDFLFWFRSHTAKEIKWGGAKHHPEDKDDGQRMHPRSSFKAFLEVVKSRSLPW

SEQ ID NO: 9374 - protein, 374 aa, Pristimera andina
ALSIAGAVQSQKLAVRAISQLQSLPGGDIKLLCDTAVESVRDLTGYDRVMVYKFHEDEHGEVVAESKRPDLEPYIGLHYPATDIPQASRFLFKQNRVRIIVDCHASPVNVIQDGGLMQPLCLVGSTLRAPHGCHAQYMENMGSIASLAMAVVINGNDEDGIGGRNPTRLWGLVVCHHTSARCIPFPLRYACEFLMQAFGLQLNMELQLAAQLLEKHVLKTQTLLCDMLLRESPTGIVTQSPSIMDLVKCDGAALYYQANYYPLGVTPTEAQIKDIVEWLLVFHGDSTGLSTDSLADAGYPGATLLGDAVCGMAVAYITNRDFLFWFRSHTAKEIKWGGAKHHPEDKDDGLRMHPRSSFKAFLEVVKSRSLPWEN

SEQ ID NO: 9375 - protein, 271 aa, Cucumis sativus
MSIQLLPAIARRLEGKVAVITGGARGIGEQTAKLFFKHGAKVVIADIQDHLGQTLCKDLGQSSSVFVHCDVTKEKDVETAVDTAVSKYGKLDIMLNNAGVFEESPNFDILKDDPLTFQRVVNVNLVGASLGTRHAARVMKPAGRGSIVTTASICSVIGGIGTHAYTSSKHGVLGLMRNAAVDLGRYGIRVNCVSPNVVPTEMGRKLFKVKDGGEFPSFYWSLKNGDILREEDVGEAVVYLGSDESKCVSGLNLIVDGGFTVVNQALCSFRS

SEQ ID NO: 9376 - protein, 274 aa, Phaseolus lunatus
MAHVSAVSAAVKRLEGKVAIITGGASGIGAATARLFSEHGAHVVIADIQDDLGLSVCNELKSAVYVHCDVTKEEDVEKCVNVTVSKYGKLDIMLNNAGTCHELKDSIVDNITSEFERVISVNVVGPFLGTKHAARVMIPAKRGCIINTSSIAGCRGTGSPHAYVVSKHGLEGLTKNTAVELGQFGIRVNCVSPYLVATPMLKKYFNLDEEGVREAYSNLKGSYLVPNDVAEAALFLAGDESNYVSGHSLLLDGGYTITNAGFSPNAGFSPGQSE

SEQ ID NO: 9377 - protein, 444 aa, Capsella bursa-pastoris
MATITVVKARQIFDSRGNPTVEVDIHTSNGVKVTAAVPSGASTGIYEALELRDGGSDYLGKGVSKAVGNVNNIIGPALIGKDPTQQTAIDNFMVHELDGTQNEWGWCKQKLGANAILAVSLAVCKAGAVVSGIPLYKHIANLAGNPKIVLPVPAFNVINGGSHAGNKLAMQEFMILPVGASSFKEAMKMGVEVYHHLKSVIEKKYGQDATNVGDEGGFAPNIQENKEGLELLKTAIEKAGYTGKVVIGMDVAASEFYSSDKTYDLNFKEENNNGSQKISGDALKDLYKSFVAEYPIVSIEDPFDQDDWEHYAKMTTECGKEVQIVGDDLLVTNPKRVAKAIAEKSCNALLLKVNQIGSVTESIEAVRMSKKAGWGVMTSHRSGETEDTFIADLAVGLSTGQIKTGAPCRSERLAKYNQLLRIEEELGSEAVYAGVNFRTPVEPY

SEQ ID NO: 9378 - protein, 217 aa, Glycine max
MASLALETEDVISDIYLSLGLKESDKGVGVPRVLSLLSSLLERSVQRNETALEAKHVKDVVTVFHGLRAPTLSVRKYIDRIFKYSGCSPSCFVVAHIYVDRFIQHTEIKLTSLNVHRLLITSIMLAAKFIDDAFYNNAYYAKVGGVSTSELNRLEMSFLFGIDFRLQFSVDTFGRYCRQLEKEAAEVVQIERPMQACRIKESWSNKDDPTCASTIAR

SEQ ID NO: 9379 - protein, 516 aa, Shewanella oneidensis MR-1
MTTPVDAPKWPRQIPYIIASEACERFSFYGMRNILTPFLMTALLLSIPEELRGAVAKDVFHSFVIGVYFFPLLGGWIADRFFGKYNTILWLSLIYCVGHAFLAIFEHSVQGFYTGLFLIALGSGGIKPLVSSFMGDQFDQSNKSLAQKAFDMFYFTINFGSFFASLSMPLLLKNFGAAVAFGIPGVLMFVATVFFWLGRKRYIHMPPEPKDPHGFLPVIRSALLTKVEGKGNIGLVLALIGGVSAAYALVNIPTLGIVAGLCCAMVLVMGFVGAGASLQLERARKSHPDAAVDGVRSVLRILVLFALVTPFWSLFDQKASTWILQANDMVKPQWFEPAMMQALNPLLVMLLIPFNNFVLYPAIERMGVKLTALRKMGAGIAITGLSWIVVGTIQLMMDGGSALSIFWQILPYALLTFGEVLVSATGLEFAYSQAPKAMKGTIMSFWTLSVTVGNLWVLLANVSVKSPTVTEQIVQTGMSVTAFQMFFFAGFAILAAIVFALYARSYQMQDHYRQAT

SEQ ID NO: 9380 - protein, 360 aa, Zea mays
MVKENKRKQPPADAAPPPGDEGEGRSGRKGKKARKEKAEAILPSQIKNKDKRREVHAKLKREKKAQKRALARERGQAARRAEELGEQPPERQVPRTIENTREPDETVCRPDDQELFAGNDADEFSAVLKQHITPKILITTCRFNSGRGPAFIDELMQVIPNSQYVKRGTYELKKIVEYANNRDFTSLVVVHTNRREPDALLIIGLPDGPTAHFKLSKLVLRKDIKNHGNPTSHKPELVLNNFTTRLGHRVGRMIQSLFPQDPNFRGRRVVTFHNQRDYIFFRHHRYIFETKEKKVASKEKTSGSKSGSEKQQVICRLQECGPRFTLKLLTLQHGTFDTRSGEYEWVHKPDMDTSRRRFFL

SEQ ID NO: 9381 - protein, 337 aa, Cytophaga hutchinsonii
MKAIGFKRSLPITDTNSFILFETDKPVASGRNLLVKIQAISVNPVDFKVRQNSAKEAELETPKIIGWDAVGIVEEIGNEVSLFKKGDTVFYAGELTKPGTNAEYQLVDERIVGLAPESLSLAEAAALPLTALTAWEILFDRIRIQPDKDKGKSILIIGGAGGVGSIAIQLAKKVAGLTVIATASRPETKQWCKDLGADHVVNHADLLTEMQSIGFKQVDFILDFVDANAYWDVMAELIKPQGHIASITGSATPVALNKLKNKSVSFSWELMFTRAMFNTDDMIEQHEILTKVAALIDKKEIRTTLKQVLKGFTVENLKQAHVLLESGKTIGKVVIEF

SEQ ID NO: 9382 - protein, 402 aa, Zea mays
QQQQQVAFFILASSVVFLLLDREAGLQEEPAIRAGGGGGDEECSWSRGRWVYDNVSRPLYDGLKCAFIFPEVACDKYGRKDVMYQHWRWQPHGHGCDLPRFDAMKLLEELRNKRLVFVGDSVNRNQWVSLVCMVEASIPDDRLKMRIFNGSLISFKALEYNATIDFYWSPLLVESNSDNPIIHRVEYRIIRADRIEKHASVWRDADVIVFNSYLWWRKQKDDMRMKVMYGSFEDGDAKLDEMEMADGFEIAIKKLTEWLAKNIDKNKTRIFFAGSSPTHSWASNWGGQDKNKCLNETEPISYRPGGGYKAATTDYSLMAMARSYFRRTLEPRGIRVQILNITELSDYRKDGHPTVFRRQFVPLTKEQIADPASYADCTHWCLPGVPDVWNEFLYGYLTQQSK

SEQ ID NO: 9383 - protein, 492 aa, Oryza sativa (japonica cultivar-group)
MDPYKHRPSSSFNGPLWSTNSGAPVWNNNNSLTVGSRGPILLEDYHLVEKLANFDRERIPERVVHARGASAKGFFEVTHDITHLTCADFLRAPGVQTPVIVRFSTVIHERGSPETLRDPRVFAIKFYTREGNWDLVGNNFPVFFIRDGMKFPDMVHSLKPNPKSHVQENWRILDFFSHHPESLHMFTFLFDDIGIPADYRHMDGSGVNTYTLVNRAGKSHYVKFHWKPTCGVKSLLDDEAVTVGGTNHSHATQDLYDSIAAGNFPEWKLFIQTIDPDHEDRFDFDPLDVTKTWPEDIVPLQPVGRMVLNRNIDNFFSENEQLAFCPGIIVPGIYYSDDKLLQTRIFSYSDTQRHRLGPNYLLLPPNAPKCAHHNNHYDGFMNFMHRDEEVDYFPSRYDPAKHAPRYPIPSATLTGRREKVVIAKENNFKQPGERYRSWDPARQDRFIKRWIDALSDPRLTHEIRSIWLSYWSQADRSLGQKLASRLSAKPSM

SEQ ID NO: 9384 - protein, 60 aa, Triticum aestivum
  unsure (1)..(60): unsure at all Xaa locations
MFSGDWTPPCGSCCTKKYATLVQIPWRVFCKKGCNADGDTWEECIGXCTEICYKDPAVED

SEQ ID NO: 9385 - protein, 558 aa, Candidatus Blochmannia floridanus
MKNINPTKTKSWKSLKKHFLNINTTHILDLFKQNKYRFLSFSTIFNNEILLDYSKNLITEETINKLIDLAKECDLPGAIKSMFQGAKINRSENRAVLHTALRNRKNIPILVDGHDIMPNINTVLEKMKIFCQNIIQGYWKGYTNKNITDIVNIGIGGSNLGPHMVTEALTPYKNHLNIHFVSNIDGTHLFEVLKKINPETTLFLITSKTFTTQETMTNAFSARNWFVQKITKSSSFNHYEQHISKHFIALSANPVEVKKFGINPSTNMFEFWEWVGGRYSLWSSVGLSIMLSLGSNHFESLLDGAYAMDMHFKNTPLNKNIPVILALIGIWYNNFFLSETEAIFPYDQYMHRFAAYIQQSNMESNGKCVDRNGYPINYQTGPIVWGESGTNGQHSFFQLIHQGTKMIPCDFIAPVLSHHPIFDHHDKLIANFLAQTKALAFGKKLEEITQEYITKKQSYIYDLNILPFKVFKGNNPSNSILIKKITPYTLGALIALYEHKIFTQGVIFNIYTFDQWGVELGKQLADDIYSILKQTNINPQYDSSTNGLINYYKYWSQA

SEQ ID NO: 9386 - protein, 1478 aa, Saccharomyces cerevisiae
MPFLRKIAGTAHTHSRSDSNSSVKFGHQPTSSVASTKSSSKSPRATSRKSIYDDIRSQIPNLTPNSTSSQFYESTPVIEQSFNWTTDDHISAGTLENPTSFTNSSYKNDNGPSSLSDSRKSSGGNSVNSLSFDKLILSWDPTDPDEWTMHRVTSWFKFHDFPESWILFFKKHQLFGHRFIKLLAYDNFAVYEKYLPQTKTASYTRFQQLLKKTMTKNVTNSHIRQKSASKLKSSRSSSESIKSKLKNSKSQEDISNSRSTSESPLSPTKSGPSKTDEKIFLHSTSTHQKTKSASSLYRRSFISLRGSSSSNASSAKSPSNIKLSIPARPHSIIESNSTLTKSASPPASPSYPSIFRRHHKSSSSESSLLNSLFGSGIGEEAPTKPNPQGHSLSSENLAKGKSKHYETNVSSPLKQSSLPTSDDKGNLWNKFKRKSQIGVPSPNTVAYVTSQETPSLKSNSSTATLTVQTADVNIPSPSSSPPPIPKTANRSLEVISTEDTPKISSTTASFKETYPDCINPDKTVPVPVNNQKYSVKNFLLDQKFYPLKKTGLNDSENKYILVTKDNVSFVPLNLKSVAKLSSFKESALTKLGINHKNVTFHMTDFDCDIGAAIPDDTLEFLKKSLFLNTSGKIYIKDQMKLQQKPKPAPLTSENNVPLKSVKSKSSMRSGTSSLIASTDDVSIVTSSSDITSFDEHASGSGRSTPKPRVITMTEVSNTNPTEELNYWNIKEVLSHEENAPKMVFKTSPKLELNLPDKGSKLNIPTPITENESKSSFQVLRKDEGTEIDFNHRREAPYTKPEVAPKRESPKPPANTSPQRTLSTSKQNKPIRLVRASTKISRSKRSKPLPPQLLSSPIEASSSSPDSLTSSYTPASTHVLIPQPYKGANDVMRRLKTDQDSTSNSPSLKMKQKVNRSNSNVSTSNSIFYSPSPLLKRGNSKRVVSSTSAADIFEENDITFADAPPMFDSDDSDDDSSSSDDIIWSKKKTAPETNNENKKDEKSDNSSTHSDEIFYDSQTQDKMERKMTFRPSPEVVYQNLEKFFPRANLDKPITEGIASPTSPKSLDSLLSPKNVASSRTEPSTPSRPVPPDSSYEFIQDGLNGKNKPLNQAKTPKRTKTIRTIAHEASLARKNSVKLKRQNTKMWGTRMVEVTENHMVSINKAKNSKGEYKEFAWMKGEMIGKGSFGAVYLCLNVTTGEMMAVKQVEVPKYSSQNEAILSTVEALRSEVSTLKDLDHLNIVQYLGFENKNNIYSLFLEYVAGGSVGSLIRMYGRFDEPLIKHLTTQVLKGLAYLHSKGILHRDMKADNLLLDQDGICKISDFGISRKSKDIYSNSDMTMRGTVFWMAPEMVDTKQGYSAKVDIWSLGCIVLEMFAGKRPWSNLEVVAAMFKIGKSKSAPPIPEDTLPLISQIGRNFLDACFEINPEKRPTANELLSHPFSEVNETFNFKSTRLAKFIKSNDKLNSSKLRITSQENKTE

SEQ ID NO: 9387 - protein, 375 aa, Ustilago maydis 521
MSATPIGFFGLKLVPGKVHRMDVSRDFKITNVSYADQPKSNTKTLVKIHYTHVPGFEDDYDEEEQEKEPKSTDEEEEIEEKVYTLCSLNGANKDHAVVDLQFCQEELIGFSITGDAPVDLVGNYVAPPDFFDQDPSDSELYSDDEDDDEDMYGLDSDDFDDDDDDDMDEDPDRFEELVESSASKPKKAIEAAPLADSKKRAAEKPVKETAAKKLKADASAASAASTPTKAIETKGEKQTKGAKDTKPKSETVEKKTVDKSTSKMTTTKLPSGLVIEEKSAGSGPPCKAGQKVGMRYVGKLTNGKVFDQCTSGKPFYFKLGKGEVIKGWDEGVKGMRVGAERRLTCPPKLAYGNQKIPGIPANSTLVFDVKLVEIK

SEQ ID NO: 9388 - protein, 659 aa, Magnaporthe grisea 70-15
MSASRPIPGGSSKNPGSSSHDFPASFVASFRSSSPIAQEVIARDLAACSDDEDFDPEADGPGLGASDSVVDGDNPLMYRRPSGIAFGTARPVLAAQNVEDSILTREEWKQSLDAERSLLRDNHILPPKHAHPEQLGLLGRLRKRFFSTKVPRPSGSDEEAGPDLDGIPTEESPLLAGDGNDAPRRHSSSAAAAETGHLSETWEAAVAAGHIKTTWQREAKTLAVYSRSLVVTFLLQYSVNITSILAVGRIGKVELGAVSLATMSANILCYAPIQGLATSLDTLCAQAYGSGHKHLVGLQLQRMTAFLLLLLFPIGVLWLHAAELLVKFGIARPSAELAGLYLRICIFSMPAYAIFEASKRFVQAQGLFHATTYCLMISAPLNVLINWLLVWKLGWGFVGAPVSVVITQNLQPILLFLYVRFVDGYQCWGGFSKRAFSNWGPMIRLAIPGMIMVEAEWLAFEILTLTSGRFGTSQLAAQSVIVTLAATTYQIPFPLSVAVSTRVANLIGAKLADAAKTSAKVAIVAGIIIGLFNTTVLSVFRWKLPLLFTKDPEVIEIVARTMPILVVLQFFDAVCAISQGLLRGLGQQEFAGYSNIISYYAIALPISFATALGLGWELKGLWFGVTIGLAVVMVVEYSYLRWYDWNRAVRDAENRNASN

SEQ ID NO: 9389 - protein, 374 aa, Pristimera andina
ALSIAGAVQSQKLAVRAISRLQSLPGGDIKLLCDTAVESVRDLTGYDRVMVYKFHEDEHGEVVAGSKRPDLEPYIGLHYPATDIPQASRFLFKQNRVRIIVDCHASPVNVIQDDGLMQPLCLVGSTLRAPHGCHAQYMENMGSIASLAMAVVINGNDEDGIGGRNPTRLWGLVVCHHTSARCIPFPLRYACEFLMQAFGLQLNMELQLAAQLLEKHVLKTQTLLCDMLLRESPTGIVTQSPSIMDLVKCDGAALYYQANYYPLGVTPTEAQIKDIVEWLLVFHGDSTGLSTDSLADAGYPGATLLGDAVCGMAVAYITNRDFLFWFRSHTAKEIKWGGAKHHPEDKDDGLRMHPRSSFKAFLEVVKSRSLPWEN

SEQ ID NO: 9390 - protein, 374 aa, Psammomoya choretroides
ALSIAGAVQSQKLAVRAISQLQSLPGGDIKLLCDTVVESVADLTGYDRVMVYRFHEDEHGEVVAESKRPDLEPYIGLHYPATDIPQASRFLFKQNRVRMIVDCHASPVHVIQDDGLMQPLCLVGSTLRAPHGCHAQYMENMGSIASLAMAVIINGNDEEVIGGRNPTRLWGLVVCPHTSARCIPFPLRYACEFLMQAFGLQLNMELQLAAQLLEKHVLKTQTLLCDMLLRDSPTGIVTQSPSIMDLVKCDGAALYYRGNYYPLGVTPTEAQIKDIVEWLLAFHGDSTGLSTDSLADAGYPGAALLGDAVCGMAVAYITNRDFLFWFRSHTAKETKWGGAKHHPEDKDDGQRMHPRSSFKAFLEVVKSRSLPWEN

SEQ ID NO: 9391 - protein, 250 aa, Glycine max
MSRRYDSRTTIFSPEGRLYQVEYAMEAIGNAGTAIGILSKDGVVLVGEKKVTSKLLQTSTSTEKMYKIDDHVACAVAGIMSDANILINTARVQAQRYTYAYQEPMPVEQLVQSLCDTKQGYTQFGGLRPFGVSFLFAGWDKNFGFQLYMSDPSGNYGGWKAGAIGANNQAAQSILKQDYKDDITREEAVQLALKVLSKTMDSTSLTSEKLELAEVFLSPSGKVKYEVCSPEALTKMLVKSGVTQPATDTA

SEQ ID NO: 9392 - protein, 374 aa, Psammomoya choretroides
ALSIAGAVQSQKLAVRAISQLQSLPGGDIKLLCDTVVESVADLTGYDRVMVYRFHEDEHGEVVAESKRPDLEPYIGLHYPATDIPQASRFLFKQNRVRMIVDCHASPVHVIQDDGLMQPLCLVGSTLRAPHGCHAQYMENMGSIASLAMAVIINGNDEEVIGGRNPTRLWGLVVCHHTSARCVPFPLRYACEFLMQAFGLQLNMELQLAAQLLEKHVLKTQTLLCDMLLRDSPTGIVTQSPSIMDLVKCDGAALYYRGNYYPLGVTPTEAQIKDIVEWLLAFHGDSTGLSTDSLADAGYPGAALLGDAVCGMAVAYITNRDFLFWFRSHTAKETKWGGAKHHPEDKDDGQRMHPRSSFKAFLEVVKSRSLPWEN

SEQ ID NO: 9393 - protein, 271 aa, Cucumis sativus
MSIQLLPAIARRLEGKVAVITGGARGIGEQTAKLFFKHGAKVVIADIQDHLGQTLCKDLGQSSSVFVHCDVTKEKDVETAVDTAVSKYGKLDIMLNNAGVFEESPNFDFLKDDPLTFQRVVNVNLVGAFLGTKHAARVMKPAGRGSIVTTASICSVIGGIGTHAYTSSKHGVLGLMRNAAVDLGRYGIRVNCVSPNVVPTEMGRKLFKVKDGGEFPSFYWSLKNGDILREEDVGEAVVYLGSDESKCVSGLNLIVDGGFTVVNQALCSFRS

SEQ ID NO: 9394 - protein, 443 aa, Oryza sativa
MASVAVPEWLNKGDNAWQMLSATLVALQGFPGLALFYAGAVTRKCALTSAFMALYAMAATMPCWALWAHNMAFGHRLLPFVGRPAPALAQHYMLTQALLPFTAAVAPLYPSASMVFFQWASAGVTVGLVAGAVLGRMSVKAWMAFVPLWTTLSYTVGAYSIWGGGFLFHWGVMDYSGGYVVHLAAGVSGYTAAYWVGPRRKEEEEMTMAGGGNLVAMVAGAGILWMGWTGFNGGDPFSANTDSSVAVLNTHICTTTSILAWVCCDIAVRGRPSVVGAVQGMITGLVCITPAAGLVQGWAALLMGVASGTLPCYTMNAAMSFKVDDTLGILHTHAVSGVLGGVLTGVFAHPTLCDMFLPVTGSRGLVYGVRAGGVQVLKQVAAALFVAAWNVAATSIILVVVRAFVPLRMTEDELLAGDIAVHGEQAYYFSSEQELSDSPKHAL

SEQ ID NO: 9395 - protein, 429 aa, uncultured bacterium pCosHE2
MTTDDLAFDQRHIWHPYTSMTSPLPVYPVVSAEGCELILSDGRRLVDGMSSWWAAIHGYNHPQLNAAMKSQIDAMSHVMFGGITHAPAIELCRKLVAMTPQPLKCVFLADSGSVAVEVAMKMALQYWQAKGEARQRFLTFRNGYHGDTFGAMSVCDPDNSMHSLWKGYLPENLFAPAPQSRMDGEWDERDMVGFARLMAAHRHEIAAVIIEPIVQGAGGMRMYHPEWLKRIRKICDREGILLIADEIATGFGRTGKLFACEHAEIAPDILCLGKALTGGTMTLSATLTTREVAETISNGEAGCFMHGPTFMGNPLACAAANASLAILESGDWQQQVADIEVQLREQLAPARDAEMVADVRVLGAIGVVETTHPVNMAALQKFFVEQGVWIRPFGKLIYLMPPYIILPQQLQRLTAAVNRAVQDETFFCQ

SEQ ID NO: 9396 - protein, 374 aa, Pterocelastrus tricuspidatus
ALSIAGAVQSQKLAVRAISQLQSLPGGDIKLLCDTVVESVRDLTGYDRVMVYKFHEDEHGEVMAESRRPDLEPYIGLHYPASDIPQASRFLFKQNRVRMIVDCHASPVLVIQDDGLMQPLCLVGSTLRAPHGCHAQYMENMSSIASLAMAVIINGSDEEGVGGRNPTRLWGLVVCHHTSARCIPFPLRYACEFLMQAFGLQLNMELQLAAQLLEKHVLKTQTLLCDMLLRDSPTGIVTQSPSIMDLVKCDGAALYYQGNYYPLGVTPTEAQIKDIVEWLLAFHGDSTGLSTDSLADAGYPGAALLGDAVCGMSVAYITNRDFLFWFRSHTAKEIKWGGAKHHPEDKDDGQRMHPRSSFKAFLEVVKSRSLPWEN

SEQ ID NO: 9397 - protein, 1109 aa, Ipomoea nil
MKVAVNTFLLFLCSTSSIYAAFALNSDGAALLSLTRHWTSIPSDITQSWNASDSTPCSWLGVECDRRQFVDTLNLSSYGISGEFGPEISHLKHLKKVVLSGNGFFGSIPSQLGNCSLLEHIDLSSNSFTGNIPDTLGALQNLRNLSLFFNSLIGPFPESLLSIPHLETVYFTGNGLNGSIPSNIGNMSELTTLWLDDNQFSGPVPSSLGNITTLQELYLNDNNLVGTLPVTLNNLENLVYLDVRNNSLVGAIPLDFVSCKQIDTISLSNNQFTGGLPPGLGNCTSLREFGAFSCALSGPIPSCFGQLTKLDTLYLAGNHFSGRIPPELGKCKSMIDLQLQQNQLEGEIPGELGMLSQLQYLHLYTNNLSGEVPLSIWKIQSLQSLQLYQNNLSGELPVDMTELKQLVSLALYENHFTGVIPQDLGANSSLEVLDLTRNMFTGHIPPNLCSQKKLKRLLLGYNYLEGSVPSDLGGCSTLERLILEENNLRGGLPDFVEKQNLLFFDLSGNNFTGPIPPSLGNLKNVTAIYLSSNQLSGSIPPELGSLVKLEHLNLSHNILKGILPSELSNCHKLSELDASHNLLNGSIPSTLGSLTELTKLSLGENSFSGGIPTSLFQSNKLLNLQLGGNLLAGDIPPVGALQALRSLNLSSNKLNGQLPIDLGKLKMLEELDVSHNNLSGTLRVLSTIQSLTFINISHNLFSGPVPPSLTKFLNSSPTSFSGNSDLCINCPADGLACPESSILRPCNMQSNTGKGGLSTLGIAMIVLGALLFIICLFLFSAFLFLHCKKSVQEIAISAQEGDGSLLNKVLEATENLNDKYVIGKGAHGTIYKATLSPDKVYAVKKLVFTGIKNGSVSMVREIETIGKVRHRNLIKLEEFWLRKEYGLILYTYMENGSLHDILHETNPPKPLDWSTRHNIAVGTAHGLAYLHFDCDPAIVHRDIKPMNILLDSDLEPHISDFGIAKLLDQSATSIPSNTVQGTIGYMAPENAFTTVKSRESDVYSYGVVLLELITRKKALDPSFNGETDIVGWVRSVWTQTGEIQKIVDPSLLDELIDSSVMEQVTEALSLALRCAEKEVDKRPTMRDVVKQLTRWSIRSYSSSVRNKSK

SEQ ID NO: 9398 - protein, 457 aa, Thermus thermophilus HB27
MTYDLLIVGSGSAGVAAALEASALGAKAAVVEAGVLGGTCVNVGCVPSKYLLRAADAFHRARHPAFPGLRTEALGVDWKALLAGKEGLIAALRKEKYQEVLEAAGVPVLRGRARFLDGERMEVEGREVLAGRYLLATGARPFLPPIPGLRESAPWTYLEALSAPALPESLLVVGGGPIGLELAQAFARLGSRVTVLEALPEVLPQEDRELARLLRGYLEEEGLRVHTGVRVEAVAREGAFRVRTDRGVFEAERLLVATGRRPDLEGLGLERAGVERDERGFLRLDPSLRTTNPRVYAAGDAAGLPQFVYVAAQSGRVAARNALGVKAPLDLAALPRVTFTDPALAAVGLTEEEARRRYGAGVRAATLPLSQVPKALTVRDARGAFKIVVDEEGTVLGLHVLAHEAGDVIQEGILAVKYGLGYRDLIDTFHPYLTLAEGIRLVAQALDADPKKLSCCA

SEQ ID NO: 9399 - protein, 788 aa, Agrobacterium tumefaciens str. C58 (U. Washington)
MEYGPSPEANGDVKQWLDAHGRSFGHYINGRFVSPDGRKTIAVSNPANGDKLAEIVCGNEEDVDQAIKAARAAFGKWSKLSGHARARYLYAIARHIQKRERFLSVLETMDNGKPVRETRDIDIPLVARHFYHHAGWAEMVEDEFHGFSPVGVCGQVIPWNFPLLMLAWKIAPALAAGNTVVLKPADLTPLTAIAFAEICHEVGLPAGVVNIVQGDGSTGAAICGHDGVDKVAFTGSTKVGRVIREQIAGSGKKLSLELGGKSPFIVFEDADLDAAVEGVVDAIWFNQGEVCCAGSRLLVQEGIAEKFYARLKKRLETLRVGDPLDKSTDVGAIVSATQVKRITDLVRKGVEEGGELWQSSNPLPPTGNYVAPGFFTDVDQASTVCQVEIFGPIAAATTFRTPDEAVSLANNTRYGLAASIWSENINVALDLAARVKAGVVWINCTNMLDAGAGFGGYRESGFGREGAREGLYEYLAADWEKNLSVSKPAEAFAPSALPNADSKKAIDGLDRTMKNYIGGKQARPDGGYSYSVTGKGNAVIGMAGIGNRKDIRNAVEAASKAGSWSSATAHNRAQVLYYLAENLNARRDEFVARIIDSTGVSEKKARDEFDASLRRISYYAAQADKFDGAIHSTKSRHVTLAMNEPWGIVGIVCPDEAPLLSLVSLVLPAIAMGNRVVVIPSSRHPLIAGDFYQVLDTSDVPGGVINIVTGERDMLAKTLAEHDDVAAIWYFGSAVGSAMVERASAGNLKAAWVNNGRQPDWLDRTQWQGRDYLRRAIQVKNIWVPYGA

SEQ ID NO: 9400 - protein, 412 aa, Thermus thermophilus HB27
MEYTTLAVLAGLPEDPHGAVGLPIYAVAAYGFKTLEEGQERFATGEGYVYARQKDPTAKALEERLKALEGALEAVVLASGQAATFAALLALLRPGDEVVAAKGLFGQTIGLFGQVLSLMGVTVRYVDPEPEAVREALSAKTRAVFVETVANPALLVPDLEALATLAEEAGVALVVDNTFGAAGALCRPLAWGAHVVVESLTKWASGHGSVLGGAVLSRETELWRNYPQFLQPDLKGQIPWEALRARCFPERVRTLGLSLCGMALSPFNAYLLFQGLETVALRVARMSETARFLAERLQGHPKVKALRYPGLPEDPAHRNARKYLASGGPILTLDLGDLERASRFLEAIRLLKAANLGDARTLLVHPWTTTHSRLKEEARLQAGVTPGLVRVSVGLEDPLDLLALFEEALEAV

SEQ ID NO: 9401 - protein, 237 aa, Zea mays
  unsure (1)..(237): unsure at all Xaa locations
MATCATTLAPLLGPAANATEYLCNQFADTTSAVDSTYLLFSAYLVFAMQLGFAMLCAGSVRAKNTMNIMLTNVLDAAAGALFYYLFGFAFAYGTPSNGFIGKHFFGLKRLPQVGFDYDFFLFQWAFAIAAAGITSGSIAERTQFVAYLIYSAFLTGFVYPVVSHWVWSADGWASPTRTSGKLLFGSGIIDFAGSSVVHMVGXASPGLWGALIEGPRIGRFDTPGRSXALRGHSASLV

SEQ ID NO: 9402 - protein, 369 aa, Oryza sativa
QASSPPPPPSPPPRRRCLRRQRRRRRGKQNPPPVATARPFSRWNADGAAEFAASRALARARARPLSPRAPPRAAGAGKSRPPRPSPSSTVATAPAHPSGRPFEEYVKEWKAKKAALGVPAGRCELPFLTGTPKAVECRLCSKIIHPGEEIKCSVSRCGELFHLTCAAEDTTNFIAESFKCPQHEVFCRLPVPYVNEDFKIDSTIRDFTAAVCKPPHFTFIRRSILKGLYMSCSKNCHCSDMCTNKPFRKDKKIKAVKTKRCGWGAISLEPLEKGDFIIEYVGEVINDATCEQRLWDMKRRGDKNFYMCEISKDFTIDATFKGNTSRFLNHSCDPNCKLEKWQVDGETRVGVFASRSIQVGEHLTYDYRW

SEQ ID NO: 9403 - protein, 398 aa, Bradyrhizobium japonicum USDA 110
MANKFRTLDDVDVKGKRVLLRVDLNVPMENGRVTDATRLERVAPTITELADKGGKVILLAHFGRPKGRDAKESLKPVTEALSKVLNKPVAFADDCIGEPAATAVAALKDGDILCLENTRFHKEEEKNDPAFVAELAKLGDIWVNDAFSAAHRAHASTEGLGHKLPAYAGRTMQAELDALEKALGSPTKPVIAIIGGAKVSTKIDLLENLVSKVDALVIGGGMANTFLHAQGVGIGKSLAEKDLAPTALRIIEKAEAANCAIILPVDATVAYHFAANAPSHAYGLDAIPADGMILDVGPQSVARVHAAIDDAATLVWNGPLGAFEMQPFDRGTVAAAKHAAERTKAKKLISIAGGGDTVAALNQAHVAGDFTYVSTAGGAFLEWMEGKPLPGVEVLRIK

SEQ ID NO: 9404 - protein, 245 aa, Putterlickia verrucosa
ALSIAGAVQSQKLAVRAISQLQSLPGGDIELLCDTVVESVRDLTGYDRVMVYKFHEDEHGEVVAESKRSDLEPYIGLHYPASDIPQASRFLFKQNRVRMIVDCHASPVRVIQDDGLMQPLCLVGSTLRAPHGCHAQYMENMGSLASLAMAVIINGNEEEAIGGRSPTRLWGLVVCHHTSARCIPFPLRYACEFLMQAFGLQLNMELQLAAQLLEKHVLKTQTLLCDMLLRDSPTGIVTQSPSIMD

SEQ ID NO: 9405 - protein, 157 aa, Triticum aestivum
  unsure (1)..(157): unsure at all Xaa locations
MAPTVMASSATSVAPFQGLKSTAGLPVSRRSNGASLGSVSNGGRIRCMQVXWPIRGHQEFRDLSYLPPLNTXGLLKQVDYLXFRSKWVPCSXFNKVGFIFXEHNQSPGXYYDGRYWTIWXLLFPGAPTHTGXNEVEESKKDTCPYSSFRQIPCSVMP

SEQ ID NO: 9406 - protein, 280 aa, Zea mays
  unsure (1)..(280): unsure at all Xaa locations
MAMQATRRLASLSLQRRLLLPSQTEAPSIPTAAAAAFLHSHATSFGYKQIREEDKSKLVGNVFSSVASSYDLMNDLMSVGLHRLWKDRLISKLNPFPAMKHLDVAGGTXGDVAFRVLERIKSVSHRAMQGTLTETEEDTHIYVCDINPNMLNVGKKRAXERGYGEEHCLSWIQGDAEALSFEDGSMDGYTITFGIRNVTHIEKALSEAYSXDGSKARVEVPMLGVESCGYRRRXNMLTRHVNLEPWQEKFAQMIQEAGFQRVEYENLLSGVVVIHSGLKL

SEQ ID NO: 9407 - protein, 374 aa, Quetzalia occidentalis
ALSIAGAVQSQKLAVRAISQLQSLPGGDIKLLCDTVVESVRDPTGYDRVMVYKFHEDEHGEVVAESKRPDLEPYIGLHYPAADIPQASRFLFKQNRVRMIVDCHATPVSVIQDDGLMQPLCLVGSTLRAPHGCHAQYMANMGSMASLAMAVVINGNDEEGIGGRNTTRLWGLVVCHHPSARGIPFPLRYACEFLLQALGLQLNMELQLAAQLSEKHVLRTQTLLCDMLLRDSPTGIVTQNPSIMDLVKCDGAALYYQGKYYPLRVTPTEAQIKGIVEWMLAFHGDSTGLSTDSLADAGYPGAASLGDAVCGMAVAYITNRDFLFWFRSNTAKEIKWGGAKHHPKDKDDGQRMHPRSSFKAFLEVVKSRSLPWEN

SEQ ID NO: 9408 - protein, 374 aa, Quetzalia occidentalis
ALSIAGAVQSQKLAVCSISQLQSLPGGDIKLLCDTVVESVRDLTGYDRVMVYKFHEDEHGEVVAESKRPDLEPYIGLHYPATDIPQASRFLFKQNRVRMIVDCHATPVRVIQDDGLLQPLCLVGSTLRAPHGCHAHYMANMGSMASLAMAVIINVNDEEGIGGRNATRLWGLVVCHHTSTRCIPFPLRYACEFLMQAFGLQLNMELQLALQLSEKHVLRTQTLLCDMLLRDSPTGIVTQSPSTMDLVKCDGAALYHQGKYYPLGVTPTEAQIKDIVEWLLAFHGDSTGLSTDSLADAGYPGAVSLGDAVCGMAVAYITNRDFLFWFRSHTGKEMKWGGAKHHPEDKDDGQRMQPRSSFKAFLEVVKSRSLPWEN

SEQ ID NO: 9409 - protein, 374 aa, Reissantia sp. Chase 2095
ALSIAGAVQSQKLAVRAISQLQSLPGGDIKLLCDTAVESVRNLTGYDRVMVYKFHEDEHGEVVAESRRPDLEPYIGLHYPATDIPQASRFLFKQNRVRIIVDCHASPVSVIQDDGLMQPLCLVGSTLRAPHGCHAQYMENMGSIASLAMAVIINGNDEDGMGGRNPTRLWGLVVCHHTSARCIPFPLRYACEFLMQAFGLQLNMELQLAAQLLEKHVLKTQTLLCDMLLRESPTGIVTQSPSIMDLVKCDGAALYYQANYYPVGVTPTEAQIKDIVEWLLAFHGDSTGLSTDSLADAGYPGATSLGDAACGMAVAYITNRDFLFWFRSHTAKEIKWGGAKHHPEDKDDGQRMHPRSSFKAFLEVVKSRSLPWEN

SEQ ID NO: 9410 - protein, 146 aa, Triticum aestivum
  unsure (1)..(146): unsure at all Xaa locations
PRVRQLSFLLSFILSYPRPLSGMGNFASCTLARIPGAAKGARVVLPDGGLRLVRPPATAAELMLEAPGHFLADARALQAGRRIEALAADDDLQLRGXELGGVYAAFPMKRLGHGPAPADVARLXQASPRRPALAKVAAIVVAPPEV

SEQ ID NO: 9411 - protein, 374 aa, Reissantia indica
ALSIAGAVQSQKLAVRAISQLQSLPGGDIKLLCDTAVESVRNLTGYDRVMVYKFHEDEHGEVVAESRRPDLEPYIGLHYPATDIPQASRFLFKQNRVRIIVDCHASPVSVIQDDGLMQPLCLVGSTLRAPHGCHAQYMENMGSIASLAMAVIINGNDEDRMGGRNPTRLWGLAVCHHTSARCIPFPLRYACEFLMQAFGLQLNMELQLAAQLLEKHVLKTQTLLCDMLLRESPTGIVTQSPSIMDLVKCDGAALYYQANYYPLGVTPTEAQIKDIVEWLLAFHGDSTGLSTDSLADAGYPGATSLGDAVCAMAVAYITNRDFLFWFRSHTAKEIKWGGAKHHPEDKDDGQRMHPRSSFKAFLEVVKSRSLPWEN

SEQ ID NO: 9412 - protein, 493 aa, Triticum aestivum
  unsure (1)..(493): unsure at all Xaa locations
MDVPLASKTFPSPSPSXRQQCNVDGHKSSSKHADLNSHANDSVLGIILGGCAGTRXLYPLTKKRAKGAVPLGANIRLLDIPVXNCLNSNIXSIHVLTQFNSAFSFNHSSPSATLEGSNIGXGYKEMNGFGLKILVCTARAQMNPDWFXGTADAVXRQYLWLWEEHNVXEYLILAXGDHLYRMXYEKFIQAHXETDADIXVAALPMDEEXRATAFGLMKIDEEGXIIEFAEKPKGEQLKAMMVDTTILGLDDARAKEMPYIASMGIYVISKHVMLQLLREQFPGANDFGSEVIPGATSTGMRVQAYLYDGYWEDIGTIEAFYNANLGITKKPIPDFSFYDRSAPIYTQXPRHLPPSKVLDADVTDSVIXGEGCVIKNCKIHHSVVGLPDPAYLKGAIXIKDTLLMGADYXETEAXDKKLLAEKXGGIPIGIWKEXSHIKRAIIDKNARIGDNVIDNQWLTMVQESGQGRTDGYFIKSGIVTXIKDALLPSGTVI

SEQ ID NO: 9413 - protein, 626 aa, Mycobacterium bovis AF2122/97
MSFVVAVPEALAAAASDVANIGSALSAANAAAAAGTTGLLAAGADEVSAALASLFSGHAVSYQQVAAQATALHDQFVQALTGAGGSYALTEAANVQQNLLNAINAPTQALLGRPLIGDGAVGTASSPDGQDGGLLFGNGGAGYNSAATPGMAGGNGGNAGLIGNGGTGGSGGAGAAGGAGGSGGWLYGNGGNGGIGGNAIVAGGAGGNGGAGGAAGLWGSGGSGGQGGNGLTGNDGVNPAPVTNPALNGAAGDSNIEPQTSVLIGTQGGDGTPGGAGVNGGNGGAGGDANGNPANTSIANAGAGGNGAAGGDGGANGGAGGAGGQAASAGSSVGGDGGNGGAGGTGTNGHAGGAGGAGGQAASAGSSVGGDGGNGGAGGTGTNGHAGGAGGAGGAGGRGGWLVGSGGNGGNGGNGAAGGNGAIGGTGGAGGVPANQGGNSALGTQPVSGDGGDGGNGGTGGTGGRGGDGGSGGAGGASGWLMGNGGNGGNGGTGGSGGVGGNGGIGGDGAGGGNATSTSSIPFDAHGGNGGAGGDAGHGGTGGDGGDGGHAGTGGRGGLLAGQHANSGNGGGGGTGGAGGTHGTPGSGNAGGTGTGNADSTNGGPGSDGLGGDAFNGSRGTDGNPG

SEQ ID NO: 9414 - protein, 217 aa, Zea mays
MGGRVDHEYSYLFKMVLIGDSGVGKSNILSRFTRNHFSLDSKSTIGVEFATKSLQMDGKTIKAQIWDTAGQERYRAITSAYYRGAVGALLVYDITKRQSFDNVHRWLRELRDHADSSIVIMMVGNKSDLIHLRAISEDEGKALAEKEGLFFLETSAMEAINVEQAFQTIMTEVYGIVNRKALAAKEAAAATASLPSQGKIISIDSTAGNTKRACCST

SEQ ID NO: 9415 - protein, 516 aa, Microbulbifer degradans 2-40
MSEVKKPLALIILDGFGYSESDKYNAINAAKAPTWRKIWAENPKTTIATSGMAVGLPEGQMGNSEVGHMTLGAGRVVYQNFTRINKAIADGDFYTNPVYTKAVDDAQSQGKAVHVIGLLSDGGVHSHEDHMIAMMELAVKRGAEKVYMHAFLDGRDTPPRSAKAPLQKTEEKLKALGGGKIASIIGRFFALDRDNRWDRVQQAFDLMVDGKAAFTAQSATAGLEAAYERDENDEFVKATAIVDADGKPVTIEDGDAVIFMNFRPDRARQLTNAFVDKNFDGFARARVPALSDFVMTTEYSADIDTSCAYPPEDLVNSFGEVMAKNGKKQLRIAETEKYAHVTFFFSGGQESLYEGEDRILVPSPQVETYDEQPEMSAPEVTAKLVDAIENGGYDAIICNYANCDQVGHTGDFDASVKAVEAVDAALAEVFAALERVGGEALITADHGNVELMYDDEAQQLHTQHTTLPVPLVYVGKRDISLEQGGSLADIAPTMLALLDVPQPTEMNGRNLVKFSK

SEQ ID NO: 9416 - protein, 491 aa, Raphanus sativus
MDPYKYRPASSYNSPFFTNSGAPVWNNNSSMTVGPRGPILLEDYHLVEKLANFDRERIPERVVHARGASAKGFFEVTHDISNLTCADFLRAPGVQTPVIVRFSTVIHERGSPETLRDPRGFAVKFYTREGNFDLVGNNFPVFFIRDGMKFPDMVHALKPNPKSHIQENWRVLDFFSHHPESLNMFTFLFDDIGIPQDYRHMEGSGVNTYMLINKSGKAHYVKFHWKPTCGVKSLLEEDAIRVGGTNHSHATQDLYDSIAAGNYPEWKLFVQIIDPADEDKFDFDPLDVTKTWPEDLLPLQPVGRMVLNKNIDNFFAENEQLAFCPAIIVPGIHYSDDKLLQTRVFSYADTQRHRLGPNYLQLPVNAPKCAHHNNHHEGFMNFMHRDEEVNYFPSRYDPVRHAEKYPTPPAVCSGKRERCIIEKENNFKEPGERYRSFTPERQERFIGRWIDALSDPRITHEIRSIWISYWSQADKSLGQKLASRLNVRPSI

SEQ ID NO: 9417 - protein, 453 aa, Ustilago maydis 521
MTLELPTETTHLSDSLLAEFARHTTIDIDNNVASIAAQHNLAHRRLLELDETKHTNRAQIDQQVVNEFQSLFHDMTSNQIIVLSTYSELLTNDKNKAAKLVEMCVAAAKQIKGGMWNGKQLSSTVLERISVDGLTGAESDEEKHQQLASDILTVHFGLEMLPNLLASGNLHAQTATSQAYNASATVRHARRFVALYELISGDTVDSSRVCIKIPTTIAGLQAMRFLSSGGILDENNVGGPLLEGKIQVLATTVFAVEQGLAAAQAAGATYVAPYINALAAHFFDAENPSAEDKQKALDAGGRSISEIIYPLQRCLRRMRQQNNKIKTKVMAASFINAEEAIELCGLDHVTLGAGIVQALATTKLTDGIVETMHQASDKMRIAEEKELERYCATLAAIKDGEAQGCGGWLKQGHRSHARLEIVLTQDERCRYMLADALARFTSAEVKLRQLFVV

SEQ ID NO: 9418 - protein, 506 aa, Streptomyces coelicolor A3(2)
MTDTPPATTTDSGAPAESDEHSLTAGPAGPVLLQDAYLIEQMAQFNRERIPERQPHAKGSGAFGHFEVTHDVSAYTKAAVFQPGTRTDLVARFSTVAGERGSPDTWRDPRGFAVKFYTSQGNYDMVGNNTPVFFVKDPMKFQHFIRSQKRRADSNLRDHDMQWDFWTLSPESAHQVTWLMGDRGIPRTWRHMNGYTSHTYMWINASGERFWVKYHFKTDQGIEYFTQHEADQMAAADTDYHMRDLFEHIRDGDFPSWTLHVQVMPYEEAAGYRFNPFDLTKVWPHGDYPLIPVGRMTLERNPTDNHAEIEQAAFQPNNLVPGIGPSPDRMLLARLFSYADAHRYRIGANYQQLPVNAPVVDVRTYSKDGAMAYRKTTDPVYAPNSKGGPAADTEHFGTPPSWETDGSITRTAYVSHAEDDDWGQPGTLVREVMDDAARDRLVDNVVDHLLNEVTEPVLQRAFAYWSNIDRTIGDRIAKGVRAKAGEKDFKAAEQRNPARQAMQDKA

SEQ ID NO: 9419 - protein, 138 aa, Glycine max
  unsure (1)..(138): unsure at all Xaa locations
ALSMISSPADTTINRAGAGLDAPFTGLKYMAGFPTRKTNNDLTSIASNGGRVQCMHVWPPVGKKKYETLSYLPDLDDAHIGKRQSNTLLRNGWIPCLEYALDHGFMYREHNMSPGYYDGRYXTMRKLPMLDCTVASKE

SEQ ID NO: 9420 - protein, 276 aa, Zea mays
MAPRQAVLAVVVLAALLPFALSRGLRLGHHRAQPHPRPHGHAPLGGGAWSSAHATFYGGGDASGTMGGACGYGNLYSQGYGTNTAALSTALFNNGLSCGACFEVRCDAAGGGGRSCLPGSVVVTATNFCPPNNALPSDDGGWCNPPRAHFDMSQPVFQRIALYRAGIVPVSYRRVACNKKGGIRFTINGHSYFNLVLVTNVGGAGDVHAVAVKGDRSAGWQALSRNWGQNWQSNTLLDGQALSFRVTTSDGRSVVSSNAAPRGWGFGQTFSGAQFN

SEQ ID NO: 9421 - protein, 109 aa, Glycine max
  unsure (1)..(109): unsure at all Xaa locations
RAAFLKSKAIVEANIREKXFNELKEEMNHQILQAQDDIEDLNKQLKESKVERRHKEECEAIRKLIAMQPXRSETMKVILELENEISALDAENTAGSRLLELRKKQFALL

SEQ ID NO: 9422 - protein, 725 aa, Mesorhizobium sp. BNC1
MSNVEEFPVTARRLSEYEALVAAGSSALEAIPGAVYLCDHEGWLVRYNTEAAELWGQSPPENNVRFCGSHRLFLPDGTPLAHEDCPMATAVFTGEATRNAEVVIERPNGSRIIALVNIRALRDHSGKIQGAINCFQDISRHKAMEEEVRRKNDELEDFFENGAIGLHIVNGEGTIQRANKAELALLGYTAEEYVGRHIAEFHADAPVIGDILQKLSCGERLDRYPARLRAKDGTIKHVLITSNSRFQDGKFANTRCFTTDVTGLYEAELARRESEERLAATYEAATIGIAETDAEGRMLRVNDAACKMLGRTREELLEMTFFDYTHEEDREKDSALYVSQIRGERDNYTLRKRANRPDGTTVYLDVHSSSVRDGRGNFRYGVRVIQDVTEAKWMEDRLRESERHMRDLLEALPAAVYTTDAAGHITFYNKAAVEMAGRTPQAGDLWCVTWRLYNPDGTPLPHDDCPMAVALRENRPVRGVEAIAERPDGTRVPFIPYPTPLHDVDGKLVGAINMLVDISERKKAENRQKVLIDELNHRVKNTLATVQSLASQTARHCEDLGDFRGRFEERLLALAHAHDLLTKRHWENAPLESLAHEVLTPLAGEASDRILIEGPAVDVSPRAALSLTMALNELVTNAVKYGALSSDTGTLSVVWRLQRAAKQTMLALDWREQGGPPVIPPTKRGFGTRLMERCIERDLGGEFSLVFDPGGVSCSISIPIESIKA

SEQ ID NO: 9423 - protein, 245 aa, Rzedowskia tolantonguensis
ALSIAGAVQSQKLAIRAISQLQSLPGGDIKLLCDTVVESVRELTCYDRVMVYKFHEDEHGEVVAESKRPDLEPYIGLHYPATDIPQASRFLFKQNRVRMIVDCHASPVRVIQDDGLMQPLCLVGSTLRAPHGCHAQYMENMGSKASLAMAVIINGNDEEVIGGRNATRLWGLVVCHHTSARCIPFPLRYACEFLMQAFGLQLNMELQLAAQLSEKHVLKTQTLLCDMLLRDSPTGIVTQSPSIMD

SEQ ID NO: 9424 - protein, 318 aa, Schizosaccharomyces pombe
MSAILFPGQGVDWKTWMQPYLENNIVQNTLKEAENVTEIEIRKYIVEAEAKSNLRQPITTIAQPAILACSIALLRAFPPFTKKFRFYVGHSLGEYSAFVASQTLSFSSALKLVQARAKAMSYASALCQNPTSMLAITLTSRFPTDNFLNTVYSAVQKYRLIDIANVNSDRQIVLSGDKKELESITSTLSELVRSLGKLRSNWLDVSGAFHSRYMLPARDSLKNALGETEFNISPELCYTDSGKRFLPIISNVTAELYPADEEDIRRQLLLQCFRPVLFKNCLKTVKSKYGANLFYAYGPGTTMQSIAKQNGISTKSRP

SEQ ID NO: 9425 - protein, 245 aa, Salacia impressifolia
ALSIAGAVQSQKLAVRAISQIQSLPGGDIKLLCDTVVESVRDLTGYDRVMVYKFHEDEHGEVVAESKRPDLEPYIGLHYPATDIPQASRFLFKQNRVRMVVDCNASPVRVIQNDGLMQPLCLVGSTLRAPHGCHAQYMENMGSIASLAMAVIINGNDEEVIGGRNPTRLWGLVVCHHTSARCIPFPLRYACEFLMQAFGLQLKMELQLAAQLLEKHVLKTQTLLCDMLLRDSPTGIVTQSPSIMD

SEQ ID NO: 9426 - protein, 164 aa, Oryza sativa
TAMALVQHPVINSSCRDGKSFTYNSSINIGVAVAIDGGLITPVLPDADKLDIYSLSRKWKELVDKARARQQQPHANTSGTFTISNLGMFGVDRFDAILPPGTGAIMAVGSSQPTLVGTKGGSIGIKNQMQVNVTADHRVIYGADLAAFLQTLSKIIEDPKDLTF

SEQ ID NO: 9427 - protein, 245 aa, Salacia impressifolia
ALSIAGAVQSQKLAVRAISQIQSLPGGDIKLLCDTVVESVRDLTGYDRVMVYKFHEDEHGEVVAESKRPDLEPYIGLHYPATDIPQASRFLFKQNRVRMIVDCNASPVRVIQDDGLMQPLCLVGSTLRAPHGCHAQYMENMGSIASLAMAVIINGNDEEVIGGRNPTRLWGLVVCHHTSARCIPFPLRYACEFLMQAFGLQLKMELQLAAQLLEKHVLKTQTLLCDMLLRDSPTGIVTQSPSIMD

SEQ ID NO: 9428 - protein, 361 aa, Salacia nitida
QSQKLAVRAISQIQSLPGGDIKLLCDTVVESVRDLTGYDRVMVYKFHEDEHGEVVAECKRPDLEPYIGLHYPATDIPQASRFLFKQNRVRMIVDCHASPVRVIQDDGLMRPLRLVGSTLRAPHGCHAQYMENMGSIASLAMAVIINGNDEEVIGGRNPTRLWGLVVCHHTSARCIPFPLRYACEFLMQAFGLQLKMELQLAAQLLEKHVLKTQTLLCDMLLRDSPTGIVTQSPSIMDLVKCDGAALYFQGNYYPLGVTPTEAQIKDIVEWLLAFHGDSTGLSTDSSADAGYPGAALLGDAVCGMAVAYITNRDFLFWFRSHTAKEIKWGGAKHHPEDKDDGQRMHPRSSFKAFLEVVKRRS

SEQ ID NO: 9429 - protein, 410 aa, Ralstonia metallidurans CH34
MLGFNRPAAATVNPRLDLLQTYPFEKLRALVADVKPAAVPPISFGIGEPKHPTPAFIKEAMTASLGGLANYPSTAGSDALRACIAGWLERRYNLPKVDAATEVLPVTGSREALFAFAQTVIDSSKPNPLVLCPNPFYQIYEGAALLAGARPVFANSDPARNFAPAFDQIGADVWPHVQLLYVCSPGNPTGAVLSLEDWKQLFELSDRYGFVIASDECYSEIYFDEAKPPLGALEAAHKLGRGLERLVMFSSLSKRSNVPGLRSGFVAGDPEILKKFLLYRTYHGAAMNPAVQAASAAAWGDEAHVRENRAAYVRKFAEVTPMLAGVLDVALPDAAFYLWADVSRTGLSDTEFAVRLLAEQNLTVLPGSYLARDAHGVNPGANRVRMALVATPDECLEGARRIVEFCKSLG

SEQ ID NO: 9430 - protein, 171 aa, Zea mays
  unsure (1)..(171): unsure at all Xaa locations
DEATVDSGSKALQFLGLHDQDSTVPPVHTHQLDVAGNQDVAVNLIITDYCMPGMTGYDLLKKIKESSSLRDIPVVXIMSSENIPSRINRCLEEGADEFFLKPVRLSDMNKLKPHILKSRCNQEQHQQSDSHSGERRNPTIGSSSDSINNRKRKGAGTEEILPQLANRSRHS

SEQ ID NO: 9431 - protein, 236 aa, Oryza sativa (indica cultivar-group)
MAGADVDVGTELRLGLPGGGGGAAEAAAKAAKRGFEETIDLKLKLPTAGMEEAAAGKAEAPAAEKAKRPAEAAAADAEKPPAPKAQAVGWPPVRSFRRNIMTVQSVKSKKEEEADKQQQQPAANASGSNSSAFVKVSMDGAPYLRKVDLKMYNSYKDLSLALQKMFGTFTATGNNMNEVNGSDAGTTYEDKDGDWMLVGDVPWQMFVESCKRLRIMKGSEAIGLAPRAKDKYKNKS

SEQ ID NO: 9432 - protein, 124 aa, Triticum aestivum
RGASSATSVAPFQGLKSTAGLPVSRRSNGASLGSVSNGGRIRCMQVWPIEGIKKFETLSYLPPLSTEALLKQVDYLIRSKWVPCLEFSKVGFIFREHNASPGYYDGRYWTMWKLPMFGCTDATQ

SEQ ID NO: 9433 - protein, 385 aa, Triticum aestivum
IDPDCSWVEQWVHRAGPRKDIYYEPNEVKAAIVTCGGLCPGLNDVIRQVVFTLETYGVKNIVGIPFGFRGFFEKGLKEMPLSRNLVENINLAGGSFLGVSRGGAKTSEIVDSIQARRIDMLFVLGGNGTHAGANAIHDECRKRKLKVSVVAVPKTIDNDIPLMDKTFGFDTAVEEAQRAINSAYIEARSAYHGIGLVKLMGRSSGFIAMHASLSSGQVDVCLIPEVSFALDGEYGVLQHLEQLIKNKGFCVVCVAEAAGQELLQNSGATDASGNAILSDIGVHMQQKIKTHFKGIGVHADIKYIDPTYMVRACRANASDAILCTVLGQNAVHGAFAGFSGITSCICNTHYVYLPVTQVITAPKRVNNKGRMWHRCLTSTGQPDFR

SEQ ID NO: 9434 - protein, 215 aa, Bdellovibrio bacteriovorus HD100
MKFFIDTAEIEEIRQANLRGWVDGVTTNPSLIAKSGKDFHTVIKEICKEITGPVSAEVISLQHEEMVREGKELAKLASNVVVKIPMCEDGMIAVKKLKSEGIKTNVTLVFSPMQALLAAKAGATMVSPFVGRLDDIGVEGMQMVDQVIQMYRNYDFETEVLVASVRSPMHIQLAAEMGADIATIPFKVMQSMTHHPLTDKGIKMFMDDWNKAQKK

SEQ ID NO: 9435 - protein, 749 aa, Mycobacterium bovis AF2122/97
MSFVIANPEMLAAAATDLAGIRSAISAATAAAAAPTIQVAAAGADEVSLAISALFGQHAQAYQALSAQATIFHDQFVQALTSGGNLYAAAESHTVEQMVLNAINAPTQTLFGRPLIGDGANGTAENPDGQNGGLLFGNGGNGFTQTTAGVAGGNGGSAGLIGNGGAGGIGGAGTGTGGHGGAGGAGGRAWLWGTGGAGGAGAAAIGNAVTPGGAGGAGGAGGDGGWLFGDGGAGGTGGNGGSGFNSLTSSVGGAGGAGGHAGLFGAGGTGGTGGIGGQNTETGPAASNGGAGGAGGGGGYLVGDGGAGGTGGAGGKNSSGGATLTGGTGGTGGAGGAAGWLYGSGGAGGAGGLNNAGGATGGTGGTGGAGGSGAWLYGNGGAAGAGGNGGNNTSAGTGGVGASGGTGGNAGLIGAGGHGGAGGAGGNQTGGVGNGGAGGNGGAGGAGGQLYGNGGDGGNGGAGGANIAGGNGSDGGAAGHGGAGGSARLIGAGGHGGDGGAGGNTAGRRADAIAGTGGDGGNGGNGGLLSGNAGAGGHGGAGGSSTATTTTGTPPTGATGGNGGNGGAGGTAGFTGSGGIGGNGGAGGTGGNAGVALSVGSTGGLGGNGGSGGLGGGGGSLFGNGGAGGVGATGGNAGSGIGPASVGGNGGKGGVGAAGGLAGQIGNGGSGGSGGAGGNGGTGDTAGNGGNGGAGAVGGNAQLIGNGGNGGGGGNGGTGATPGTGGAGAAGGTGGTLFGAPGTTGADGT

SEQ ID NO: 9436 - protein, 1126 aa, Physcomitrella patens
MSTTKLAYSSGSSVKSKHSVRVAQTTADAKLQAVYEESGDSGDSFDYSKSVHASKSTGENVPALAVTAYLQRMQRGGLVQTFGCMLCVDESSFRVIAYSENAPEMLDLMPQAVPSVGQQEVLGIGTDARTLFTPSSAAALEKCAGAVDVTMLNPISVHCRSSGKPFYAILHRIDVGLVIDFEPVRPNDAVVSSAGALQSHKLAAKAISRLQALPGGDIGLLCDTVVEEVRQLSGYDRVMAYKFHEDEHGEVLAEIRRSDLEPYLGLHYPATDIPQASRFLFMKNRVRMIGDCYAPPVKVVQDKDLRQPISLAGSTLRAPHGCHAQYMGNMNSIASLVMAVIVNDPDEDPNSRGGQQRGRKLWGLVVCHHTSPRTVSFPLRSACEFLMLVFGLQLNMEVELAAQLREKHILRTQTLLCDMLLRDAPIGIVSQSPNIMDLVKCDGAALYYGKRFWLLGITPNEVQIKEIADWFLEHHQDSTGLSTDSLADAGYPGAAQLGDAVCGMAAAKITPRDFLFWFRSHTAKEIKWGGAKHDPDEKDDGRKMHPRSSFKAFLEVVKRRSLPWEDIEMDAIHSLQLISRGSFQDIDDSDTKTMIHARLNDLKLQGMDELSTVANEMVRLIETATAPILAVDSSGFINGWNAKVAELTGLPVGEAMGRSLVKDLILEESIDVVQRLLYLALQGEEEQNIEIQLKTFGPQKEKGAVILIVNACSSRDVQDNVVGVCFVGQDVTGQKQVLDKFTRIQGDYKAIVQNPNPLIPPIFGTDEYGYCSEWNPSMEKLTGWKREEVLGKLLVGEIFGMQLMCCRLKGQDAMTKFMIALNSAMDGQDTDRFPFSFFDRQGKYVDALLTVNKRTDAEGSITGVFCFLHTTSVELLQALTVQRATEKVAFAKLKELAYIRQEIKNPLYGIMFTRNLMEDTDLSEDQRQFVETSAVCERQLRKVLDDMDLESIEDGYLELDTNEFVMGTVMDAVVSQGMITSREKGLQLIRETPREIKNMCLFGDQVRLQQVLADFLLNAVKFTPSSGGWVGIKVVPTKKRLGGGIHVMHLEFRVTHSGMGLPEELVHEMFDRGRGMTQEGLGLSMCRKLVKLMNGNVQYIRETGKSYFLVEVELPLAQRDDAGSVR

SEQ ID NO: 9437 - protein, 1123 aa, Physcomitrella patens
MSTPKKTYSSTSSAKSKAHSVRVAQTTADAALQAVFEKSGDSGDSFDYSKSVSKSTAESLPSGAVTAYLQRMQRGGLTQSFGCMIAVEGTGFRVIAYSENAPEILDLVPQAVPSVGEMDTLRIGTDVRTLFTASSVASLEKAAEAQEMSLLNPITVNCRRSGKQLYAIAHRIDIGIVIDFEAVKTDDHLVSAAGALQSHKLAAKAITRLQALPGGNIGLLCDTVVEEVRELTGYDRVMAYRFHEDEHGEVVAEIRRADLEPYLGLHYPGTDIPQASRFLFMKNKVRIIADCSAPPVKVIQDPTLRQPVSLAGSTLRSPHGCHAQYMGNMGSIASLVMAVIINDNEEDSHGSVQRGRKLWGLVVCHHTSPRTVPFPLRSACGFLMQVFGLQLNMEVELAAQLREKHILRTQTLLCDMLLRDAPIGIVSQIPNIMDLVKCDGAALYYGKRFWLLGTTPTESQIKDIAEWLLEYHKDSTGLSTDSLADANYPAAHLLGDAVCGMAAAKITAKDFLFWFRSHTAKEIKWGGAKHDPGEKDDGRKMHPRSSFKAFLEVVKRRSLPWEDVEMDAIHSLQLILRGSFQDIDDSDTKTMIHARLNDLKLHDMDELSVVANEMVRLIETATAPILAVDSNGMINGWNAKIAQVTGLPVSEAHGRSLVKDLVTDESVAVVERLLYLALRGEEEQNVEIKLKTFGTQTEKGVVILIVDACSSIHVSENVVGVCFVGQDVTGQKMFMDKFTRIQGDYKTIVQNPHPLIPPIFGADEFGYCFEWNPAMEGLTGWKKDEVVGKLLVGEIFGMQMMCCRMKSQDAMTKFMIALNTAMDGQSTDKFTFSFFDREGKYVDVLLSTNKRTNADGVITGVFCFLQIASSELQQALKVQRATEKVAVAKLKELAYIRQEIKNPLCGITFTRQLLEDTDLSDDQQQFLDTSAVCEQQLQKVLNDMDLESIEDGYLELDTAEFEMGTVMNAVISQGMTTSREKGLQIFRETPREINTMRLLGDQIRLQQVLSDFLLNTVRFTPSPEGWVKIKVVPTRKRLGGSVHVVHLEFRVSHPGAGLPEELVLEMYDRGKGMTQEGLGLNMCRKLVRLMNGDVHYVREAMQCYFVVNVELPMAQRDDASSQM

SEQ ID NO: 9438 - protein, 826 aa, Alcaligenes faecalis
MSRPNDRITLPPANAQRTNMTCHFCIVGCGYHVYKWPELQEGGRAPEQNALGLDFRKQLPPLAVTLTPAMTNVVTEHNGRRYNIMVVPDKACVVNSGLSSTRGGKMASYMYTPTGDGKQRLKAPRLYAADQWVDTTWDHAMALYAGLIKKTLDKDGPQGVFFSCFDHGGAGGGFENTWGTGKLMFSAIQTPMVRIHNRPAYNSECHATREMGIGELNNAYEDAQLADVIWSIGNNPYESQTNYFLNHWLPNLQGATTSKKKERFPNENFPQARIIFVDPRETPSVAIARHVAGNDRVLHLAIEPGTDTALFNGLFTYVVEQGWIDKPFIEAHTKGFDDAVKTNRLSLDECSNITGVPVDMLKRAAEWSYKPKASGQAPRTMHAYEKGIIWGNDNYVIQSALLDLVIATHNVGRRGTGCVRMGGHQEGYTRPPYPGDKKIYIDQELIKGKGRIMTWWGCNNFQTSNNAQALREAILQRSAIVKQAMQKARGATTEEMVDVIYEATQNGGLFVTSINLYPTKLAEAAHLMLPAAHPGEMNLTSMNGERRIRLSEKFMDPPGTAMADCLIAARIANALRDMYQKDGKAEMAAQFEGFDWKTEEDAFNDGFRRAGQPGAPAIDSQGGSTGHLVTYDRLRKSGNNGVQLPVVSWDESKGLVGTEMLYTEGKFDTDDGKAHFKPAPWNGLPATVQQQKDKYRFWLNNGRNNEVWQTAYHDQYNSLMQERYPMAYIEMNPDDCKQLDVTGGDIVEVYNDFGSTFAMVYPVAEIKRGQTFMLFGYVNGIQGDVTTDWTDRNIIPYYKGTWGDIRKVGSMEEFKRTVSFKSRRFA

SEQ ID NO: 9439 - protein, 1130 aa, Physcomitrella patens
MSTPKLAYSSGSSVKSKHSVRVAQTTADAKLQAVYEESGDSGDSFDYSKSVHASKSTGENVSAQAVTAYLQRMQRGGLMQTFGCMLCVEESNFRVIAFSENAPEMLDLMPQAVPSVGQQEVLGIGTDARTLFTPSSAAALEKCAGTVDVTMLNPISVHCRSSGKPFYAILHRIDVGLVIDFEPVRSNDAIVSSAGVLQSHKLAAKAISRLQALPGGDIGLLCDIVVQEVRELSGYDRVMAYKFHEDEHGEVLAEIRRSDLEPYLGLHYPATDIPQASRFLFMKNKVRMIGDCFASPVKVIQDKDLRQPISLAGSTLRAPHGCHAQYMGNMNSIASLVMAVIVNDPDEDPNARGGQQRGRKLWGLVVCHHTSPRTVSFPLRSACEFLMQVFGLQLNMEVELAAQLREKHILRTQTLLCDMLLRDAPIGIVSQSPNIMDLVKCDGAALHYGKRFWLLGITPNDAQIKEIADWLLEHHQDSTGLSTDSLADAGYPGAAQLGDAVCGMAAAKITSKDFLFWFRSHTAKEIKWGGAKHDPDEKDDGRKMHPRSSFKAFLVVVKRRSLPWEDIEMDAIHSLQLILRGSFQDIDDSDTKTMIHARLNDLKLQDMDELSTVANEMVRLIETATAPILAVDSGGFINGWNAKVAELTGLPVEEAMGRSLVKDLILNESIDVVQRLLHLALQGDEEQNIEIQLKTFGPQKEKGAVILIVNACSSRDVQDNVVGVCFVGQDVTGQKQVLDKFTRIQGDYKAIVQNPNPLIPPIFGTDEYGYCSEWNPSMEKLTGWKREEVIGKLLVGEIFGIQLMCCRLKSQDAMTKFMIVLNGAMDGQDTDRFPFSFFDRQGKYVDPLLTVNKRTDAEGSITGVFCFLHTTSVELLQALTVQRSTEKVAFAKLKELAYIRQEIKNPLYGIVFTRNLMEDTDLSVDQRQLVETSAVCERQLRKILDDLDLESIEDGYLELDTTEFEMGTVMDAVVSQGMITSREKGLQLIRETPSEIKNMCLYGDQVRLQQVLADFLLNAVRFTPSSEGWVGIKVVPTKKRLGRGVHVMHVEFRVTHPGLGLPEELVHEMFGRGRGMTQEGLGLSMCRKLVKLMNGTVQYIRETGKSCFLVEVELPLAQRDDAGSVRSTVV

SEQ ID NO: 9440 - protein, 1122 aa, Physcomitrella patens
MSAPKKTYSSTSSAKSKAHSVRVAQTTADAALHAVFEKSGVSGDNFDYSKSVSKSTAGSLHTGAVTAYLQRMQRGGLTQSFGCMVAVEETGFRVIAYSENAPEFLDLMPQAVPNIGEINTLGIGTDVRTLFTPSSAASLEKAAETQEISLLNPITVYCRSKKPLYAIAHRIDIGIVIDFEAVNMNDVTISADGALQSHKLAAKAITRLQALPGGDIGLLCDTVVEEVRELTGYDRVMAYKFHEDEHGEVVAEIRRTDLEPYLGLHYPATDIPQASRFLFMKNRVRMIGDCSAPPEKIVQDPNLRQPVSLAGSTLRSPHGCHAQYMGNMGSISSIVMAVIINDNEDDSRGSVQRGRKQWGLVVCHHTSPRTVPFPLRSACEFLMQVFGLQLNMEVELAAQLREKHILRTQTLLCDMLLRDAPTGIVSQVPNIMDLVKCDGAALYYGKRFWLLGTTPTESQIKDIAEWLLEYHKDSTGLSTDSLADANYPAAHLLGDAVCGMAAAKITSKDFLFWFRSHTAKEIKWGGAKHDPGEKDDNRKMHPRSPFKAFLEVVKRRSLPWEDVEMDAIHSLQLILRGSFQDIDDSDTKTMIHARLNDLKLHDMDELSIVANEMVRLIETATAPILAVDSNGMINGWNAKIAQETGLPVAEAMGRSLVKDLVMDESLEVVERLLYLALRGEEEQGVEIKLKTFGAQTVKGAVTLIVNACASRDVSENVVGVCFVGQDVTGQKMFMDKFTRIQGDYKTIVQNPHPLIPPIFGADEFGYCFEWNPAMEGLTGWKRDEVIGKLLVGEIFGMQKMCCQMKSQDAMTKFMISLNSAMDGQNTDKFSLSFFDREGRYVDALLSTNKRTNADGAITGVICFLQIASSELQQALRVQQATEKVAIAKLKELAYIRQEIKNPLCGITFTRQLLEDTDLSNDQKQFLDTSAVCEQQLQKVLNDLDLESIEDGYLELDTAEFEMRTVMDAVISQGMTISREKGLQIIRETPREIITMRLFGDQVRLQQVLSDFLLNAVRFTPSSEGWVKIKVVPTRKRLGGNEHVMHLEFRVSHPGAGLPEELVLEMFDKGKGMTQEGLGLNICRKLVRLMNGDVQYVREAMQCYFVLYVELPLAQQDDAASQM

SEQ ID NO: 9441 - protein, 364 aa, Salacia nitida
VQSQKLAVRAISQIQSLPGGDIKLLCDTVVESVRDLTGYDRVMVYKFHEDEHGEVVAECKRPDLEPYIGLHYPATDIPQASRFLFKQNRVRMIVDCHASPVRVIQDDGLMRPLRLVGSTLRAPHGCHAQYMENMGSIASLAMAVIINGNDEEVIGGRNPTRLWGLVVCHHTSARCIPFPLRYACEFLMQAFGLQLKMELQLAAQLLEKHVLKTQTLLCDMLLRDSPTGIVTQSPSIMDLVKCDGAALYFQGNYYPLGVTPTEAQIKDIVEWLLAFHGDSTGLSTDSSADAGYPGAALLGDAVCGMAVAYITNRDFLFWFRSHTAKEIKWGGAKHHPEDKDDGQRMHPRSSFKAFLEVVKRRSLP

SEQ ID NO: 9442 - protein, 352 aa, Thermoanaerobacter brockii
MKGFAMLSIGKVGWIEKEKPAPGPFDAIVRPLAVAPCTSDIHTVFEGAIGERHNMILGHEAVGEVVEVGSEVKDFKPGDRVVVPAITPDWRTSEVQRGYHQHSGGMLAGWKFSNVKDGVFGEFFHVNDADMNLAHLPKEIPLEAAVMIPDMMTTGFHGAELADIELGATVAVLGIGPVGLMAVAGAKLRGAGRIIAVGSRPVCVDAAKYYGATDIVNYKDGPIESQIMNLTEGKGVDAAIIAGGNADIMATAVKIVKPGGTIANVNYFGEGEVLPVPRLEWGCGMAHKTIKGGLCPGGRLRMERLIDLVFYKRVDPSKLVTHVFRGFDNIEKAFMLMKDKPKDLIKPVVILA

SEQ ID NO: 9443 - protein, 374 aa, Salaciopsis glomerata
ALSIAGAVQSQKLAVRAISQLQSLPGGDIKLLCDAVVESVRDLTGYDRVMVYKFHEDEHGEVVAESKRSDLEPYIGLHYPATDIPQASRFLFKQNRVRMIADCHASPVRVIQDDGLMQPLCLVGSTLRAPHGCHAQYMENMGSVASLAMAVIVNGNDEEVIGGRNATRLWGLVVCHHASVRCIPFPLRYACEFLMQAFGLQLNMELQLAAQLSEKPVLKTQSLLCDMLLRDSPTGIVTQSPSIMDLVKCDGAALYYQGNYYPLGVTPAEPQIKDIVGWLLAFHGDSKGLSTDSLADAGYPGAALLGDAVCGMAVAYITNRDFLFWFRSHTAKEIKWGGAKHHPEEKDDGQRMHPRSSFKAFLEVVKSRSFPWEN

SEQ ID NO: 9444 - protein, 369 aa, Schaefferia frutescens
ALSIAGAVQSQKLAIRSISQLQSLPGGDIKLLCDTVVESVRELTGYDRVMVYKFHEDEHGEVVAESKRPDLEPYIGLHYPATDIPQASRFLFKQNRVRMIVDCHASPVLVIQDDGLMQPLCLVGSTLRAPHGCHAQYMENMGSKASLAMAVIINGNDEEVTGGRNATRLWGLVVCHHTSARCIPFPLRYACEFLMQAFGLQLNMELQLAAQLSEKHVLKTQTLLCDMLLRDSPTGIVTQSPSIMDLVKCDGAALYYQGKYYPIGVTPAEAQIKDIVEWLLAFHGDSTGLSTDSLADAGYPGATLLGDAVCGMAVAYITNRDFLFWFRSHTTKEIKWGGAKHHPEDKDDGPRMHPRSSFKAFLEVVKSRS

SEQ ID NO: 9445 - protein, 428 aa, Sulfolobus acidocaldarius
MEKIRWVIEESEKYLANTTRDPESQPLVIDRGEGVWVYDIEGNKYLDFTSGIGVNNLGWPSHPDVIKVAQIQMTRLAHAPANDFYNIPQMELAKRLVQLSPGNFSKKVFFSNSGTESVEASIKLVKGTGRKYLIAFLGSFHGRTLGSLALTASKPVQRYSAGPFSIGVFHVPYPNPFRNPWKINGYEKPDELINAVIEYIDFWLFQHVVDPEEVAGIIFEPIQGEGGYVVPPHNFFAELRKLAQKYNIPLIDDEVQMGLGRTGKMFAIEHFNIEPDIITLAKALGGGLVPVGATIFRSDLDFKKKGIHSNTFGGNALSMSIGLKVVELIKELMPHVNEIGKIFGEELCQMKVDDCRGLGLAWGIEFVKSDKTPDPKVRDRVVTEAFKEGLIVISAGKSSIRIIPPLVISEEAKIGLSKLKTAINRVRG

SEQ ID NO: 9446 - protein, 132 aa, Chloroflexus aurantiacus
MRQDIDYILIGEDQIKQRVAELAAEISADYRDLGDLLLVGVLKGCAMFMVDLARAIDLPLAIDFIAVASYGASTESSGVVRLIKDLDTDISQRHVLIVEDIIDSGLIPGVPAVAIAAAQSGQSAHLHVAQQT

SEQ ID NO: 9447 - protein, 309 aa, Schaefferia frutescens
ALSIAGAVQSQKLAIRSISQLQSLPGGDIKLLCDTVVESVRELTGYDRVMVYKFHEDEHGEVVAESKRPDLEPYIGLHYPATDIPQASRFLFKQNRVRMIVDCHASPVLVIQDDGLMQPLCLVGSTLRAPHGCHAQYMENMGSKASLAMAVIINGNDEEVTGGRNCTRLWGLVVCHHTFARCIPFPLRYAWEFLMQAFGLQLNMELQLAAQLSEKHVLKTQTLLCDMLLRDSPTGIVTQSPSIMDLVKCDGAALYYQGKYYPIGVTPAEAQIKDIVEWLLAFHGDSTGLSTDSLADAGYPGATLLGDAV

SEQ ID NO: 9448 - protein, 363 aa, Simicratea welwitschii
QSQKLAVRAISQLQSLPGGDIKLLCDTAVESVRDLTGYDRVMVYRFHEDEHGEVVAESKRPDLEPYIGLHYPATDIPQASRFLFKQNRVRIIVDCHASPVSVIQDDGLMQPLCLVGSTLRAPHGCHAQYMENMGSIASLAMAVIINGNDEEGMGGRNPTRLWGLVVCHHTSSRCIPFPLRYACEFLMQAFGLQLNMELQLAAQLLEKHVLKTQTLLCDMLLRESPTGIVTQSPSIMDLVKCDGAALYYQANYYPLGVTPTEAQIRDIVEWLLACHGDSTGLSTDSLADAGYPGATLLGDAVCGMAVAYITNRDFLFWFRSHTAKEIKWGGAKHHPEDKDDGQRMHPRSSFKAFLEVVKSRSLP

SEQ ID NO: 9449 - protein, 518 aa, Zea mays
  unsure (1)..(518): unsure at all Xaa locations
MEGGMSSLEAAMKASSSMASSMARNADPNQQTLRPNLVEQFYFPRPGQSLPGIPPFFGPPSSLYLPNDNEAKFGNNFESNPSQNTDWNPQAIVSNLTFLEQKIKQVKDIVQSMSNRENQVAGGSCEVAAKQQLITADLTSIIIQLISTAGSLLPSMKNPLLSSNPAVRQLGNTLGSPMGFGMNANQRPSVDSKTXFPDTGKTSDYEELMNSLNPTQAERDELIKCPNPCGGEGSEPTPMEDHDVKESDDGGEGENLPPGSYVVLQLEKEEILAPHTHFCLICGKGFKRDANLRMHMRGHGDEYKTPAALAKPTKDSGADHAPVTRYSCPFVGCKRNKEHKKFQPLKTILCVKNHYKRSHCDKSYTCSRCNTKKFSVIADLKTHEKHCGRDKWLCSCGTTFSRKDKLFGHVALFQGHTPALPMEDVKVSEASEQPQDSEPMNEMARSNVYSFPCSSSDGISNLDMKMADDVRGYFSPLNFDPCFGALDDFTRPGFDISENPFSFLPSGSCSYGQQNGDS

SEQ ID NO: 9450 - protein, 586 aa, Cytophaga hutchinsonii
MSEISTQLPKADVATKKKIQTWLSGSYDADTKKEIQSLVDAGKEDELIECFYKDLEFGTGGLRGLMGVGSNRMNKYTIGAATQGLCNYLKKNFPGQPLKAAIAHDSRNNSDFFARTTAEVFAANGIQVYFFKALRSTPELSFAIRHFGCQTGVVLTASHNPKEYNGYKAYWNDGAQVIAPHDKNIITEVQKISSIDDVNFNADQSLITEIGEEVDNAYLNEIVKLTVSPDAIKRQKDMKIVYTPIHGTGIVLVPEILKRFGFENVRVVQEQAVPDGNFPTVVYPNPEEKDALSLAVKQATEWNADLVMATDPDADRVGIAIKNDKNEFQLLNGNQTGSLLILYMLQAWKNANKITGKEFIVKTIVTTDLIEKIANKFGVKYYNTLTGFKYIAAKIKELEGKEQFIAGGEESYGYLIGDSVRDKDAIASCAFIAEMVAYAKDQGKSLYDMLLDMYVEYGFYKEHLISLTKKGKSGAEEIQTMMKELRATPPKTLSGSPVEWMFDYDSQLATNIINGTTKKIELPQENVLQFKTADGTLVSARPSGTEPKIKFYFSVNEPLASRAEFAAVDKKLDTKIQTLISDLKLA

SEQ ID NO: 9451 - protein, 350 aa, Bacillus cereus ATCC 10987
MKALLWHNQRDVRVEEVPEPTVKPGAVKIKVKWCGICGTDLHEYLAGPIFIPKEEHPLTHVKAPVILGHEFSGEVVEIGEGVTSHKVGDRVVVEPIYSCGKCEACKHGHYNVCEQLVFHGLGGEGGGFSEYTVVPEDMVHHIPDEMTYEQGALVEPAAVAVHAVRQSKLKEGEAVAVFGCGPIGLLVIQAAKAAGATPVIAVELSKERQELAKLAGADYVLNPATQDVLAEIRNLTNGLGVNVSFEVTGVEVVLRQAIESTSFEGQTVIVSVWEKDATITPNNLVLKEKEVVGILGYRHIFPAVIKLISSGQIQAEKLITKKITVDQVVEEGFEALVKDKTQVKILVSPK

SEQ ID NO: 9452 - protein, 535 aa, Halomonas maura
MKIRSQVGMVLNLDKCIGCHTCSVTCKNVWTSREGVEYAWFNNVETKPGIGYPKEWENQKKWNGGWLRRKDGRIEPRIGGKWRVLANIFANPDLPEIDDYYEPFTFDYQHLHTAKQGEHQPTARPRSLISGQRMNKVEWGPNWEEILGTEFAKRRKDANFEQVQADIYGQFENTFMMYLPRLCEHCLNPTCVASCPSGAIYKREEDGIVLIDQDKCRGWRMCISGCPYKKIYYNWKTGKSEKCIFCYPRIEAGQPTVCSETCVGRIRYLGVLLYDADRIEEVASSPDERDLYHRQCEIFLDPHDPEVIAQARKDGIPDNVIAAAQASPVYKMAIDWGLALPLHPEYRTLPMVWYVPPLSPIQSAAEAGDLERDESDGILPKIESLRIPVKYLANMLTAGEEAPVVLALKRLMAMRLYMRGKHVEGAADTAVLDEVELTAAQVEEMYRYLAIANYEDRFVIPTSHREMATEAFPERGGCGFSFGDGCHGDSGESLFGGRKMTTTLVKPVEVFDPGSRDKVRSEGRHDEKTEEARHG

SEQ ID NO: 9453 - protein, 258 aa, Catharanthus roseus
MEVMKHFVTVHGVGHGAWVYYKLKPRIEAAGHRCTAVNLAASGINEKKLEEVRSSIDYAAPLLEVLDSVPENEKVILVGHSGGGMTAAVGMEKFPNKISLAVFLNAIMPDTENRPSYVLEEYTAKTPPEAWKDCQFSAYGDPPITSLVCGPEFISSTLYHLSPIEDHALGKILVRPGSLFIEDLLKAEKFTEEGFGSVPRVYVIAAEDKTIPPEFQRWMIENNPVKEVKEIKGADHMPMFSKPDELSQCLLDIAKKHA

SEQ ID NO: 9454 - protein, 777 aa, Rhodobacter sphaeroides
EGLANGEVMSGCHWGVFKARVENGRAVAFEPWDKDPAPSHQLPGVLDSIYSPTRIKYPMVRREFLEKGVNADRSTRGNGDFVRVTWKEALDLVARELKRVQESYGPTGTFGGSYGWRSPGRLHNCQVLMRRALNLAGGFVNSVGDYSTAGAQIIMPYVMGTLEVYEQQTAWPVVVENTDLMVFWAADPMKTNEIGWVIPDHGAYAGMKALKEKGTRVICINPVRTETADYFGADVVSPRPQTDVALMLGMAHTLYSEDLHDKDFLENCTTGFDLFAAYLTGESDGTPKTAEWAAEICGLPAEQIRELARSFVAGRTMLAAGWSIQRMHMAQQAHWMLVTLASMIGQIGLPGGGFGLSYHYSNGGSPTSDGPALGGISDGAKARVEGAACLSESGATSIPCARVVDMLLNPGGEFQFNGATATYPDVKLAYWAGGNPFAHHQDRNRMLKAWEKLETFIVQDFQWTATARHADIVLPATTSYERNDIESVGDYSNRAILAMKKVVDPLYEARSDYDIFAALAERLGKGAEFTEGRDEMGWISSFYEAAVKQAEFKNVAMPSFEDFWSEGIVEFPITEGANFVRYADFREDPLFNPLGTPSGLIEIYSKNIEKMGYDDCPAHPTWMEPAERLGGAGAKYPLHVVASHPKSRLHSQLTGTSLRDLYAVAGHEPCLINPADAAARGIADGDVLRVFNDRGQILVGTKVSDAVIPGAIQIYEGGWYDPLDPSEEGTLDKYGDVNVLSLDVGTSKLAQDNCGQTILADVEKYAGAPVTVFVFPT

SEQ ID NO: 9455 - protein, 504 aa, Mycobacterium bovis AF2122/97
MACLEVSDVICDRGTGVLTAAAMDLASIGSTVSAASAAASAPTVAILAAGADEVSIAVAALFGMHGQAYQALSVQASAFHQQFVQALTAGAYSYASAEAAAVTPLQQLVDVINAPFRSALGRPLIGNGANGKPGTGQDGGAGGLLYGSGGNGGSGLAGSGQKGGNGGAAGLFGNGGAGGAGASNQAGNGGAGGNGGAGGLIWGTAGTGGNGGFTTFLDAAGGAGGAGGAGGLFGAGGAGGVGGAALGGGAQAAGGNGGAGGVGGLFGAGGAGGAGGFGDTGGTGGDGGSGGLFGVGGAGGHGGFGSAAGGDGGAGGAGGTVFGSGGAGGAGGVATVAGHGGHGGNAGLLYGTGGAGGAGGFGGFGGDGGDDGIGGLVGSGGAGGSGGTGTLSGGRGGAGGNAGTFYGSGGAGGAGGESDNGDGGNGGVGGKAGLVGEGGNGGDGGATIAGKGGSGGNGGNAWLTGQGGNGGNAAFGKAGTGSVGVGGAGGLLEGQNGENGLLPS

SEQ ID NO: 9456 - protein, 218 aa, Gossypium hirsutum
MAGYRAEDDYDYLFKVVLIGDSGVGKSNLLSRFTRNEFSLESKSTIGVEFATRSLNVDGKVIKAQIWDTAGQERYRAITSAYYRGAVGALLVYDVTRHSTFENVERWLRELRDHTDPNIVVMLVGNKSDLRHLVAVSTEDGKSFAEKESLYFMETSALEATNVEIAFAEVLTQIYNIVSKKAMETSDDGAASAVPSKGEKIDVGKDVSAMKKGGCCSS

SEQ ID NO: 9457 - protein, 289 aa, Mesembryanthemum crystallinum
MSNTCFTSSLHSPSILIPKSLFFSIPSKPTKIPLSLSLSSPQLSSFSLQKQTLSSTVVTYVAQTSEWDQEGTNAVLEEGSDQEPSWGNTEAQVSDFGSDEGEGFQEPPEDAKLFVGNLPFDVDSEKLAQIFEGAGVVEIAEVIYNRETDRSRGFGFVTMSTVEEAEKAVELYHKFEVNGRFLTVNKAAPRGSRPERAPREYEPSFRVYVGNLPWDVDDARLEQVFSEHGKVLSARVVSDRETGRSRGFAFVTMASESEMNEAIGALDGQTLEGRAIRVNVAEERPRRSF

SEQ ID NO: 9458 - protein, 347 aa, Oryza sativa
MYPLPAHCGYGDDFVPAMGQHVASEPGDVCHPDLDQSRGATRGEAKLLVVRIRENIATTTRGGGGERGGDVRYPGGRRRRRRRRRRRERGRLVPRLRHSRGPPGGRVRGLPVGRIPVLLQPEISLVRPANRVERVGRLDLCGIGLSEWSDWICVGLIRQLVRTVKKIMLRLTCVEVSSYVNTTSYVLKEPGSNKRFLELGTTLEPGKPVKSDKAAILSDATRMVIQLRAEAKQLKDTNESLEDKIKELKAEKDELRDEKQKLKVEKETLEQQVKILTATPAYMPHPTLMPAPYPQAPLAPFHHAQGQAAGQKLMMPFVGYPGYPMWQFMPPSEVDTSKDSEACPPVA

SEQ ID NO: 9459 - protein, 344 aa, Ustilago maydis 521
MFARQALRLAVPKAAAPRFFSSSTANNRAVAVLGASGGIGQPLSLLLKQNPLVSDLRLYDVRLAPGVAADISHVNTPSTTTGYQADQLGEALKDVEVIVIPAGVPRKPGMTRDDLFNTNASIVRDLAKKAAEVAPKAHLLIISNPVNSTVPIVAEVFKKAGVYDPKKLYGVTTLDVTRASTFLSGISGKKPSETIVPVVGGHSGVTIVPLLSQANGGDAVAKGEQYEKLVHRIQFGGDEVVKAKDGAGSATLSMAYAAAVFSDSLLKALNGEKGIKECAYVESPLYKDQGATFFASPVTLGKDGVEEIHSVGKVSAEEEKLLEAAIPELAKNIKKGVDWYAASP

SEQ ID NO: 9460 - protein, 400 aa, Mesorhizobium sp. BNC1
MAFLADALSRVKPSATIAVTQKARELKAQGRDVIGLGAGEPDFDTPDNIKQAAIEAIKRGETKYPPVSGIQPLREAIAAKFKRENNLDYDWKQTIVGTGGKQILFNAFMATLNPGDEVVIPTPYWVSYPEMVSICGGTSVFAETRLEDNFKLQPEVLERAITPRTKWLIMNSPSNPSGAAYTREELKAVADVLLKHPHVWVLTDDMYEHLTYGDFTYHTIAEVEPQLYGRTLTMNGVSKAYAMTGWRIGYAAGPIELIKAMDMIQGQQTSGAATVCQFAALEALTGPQDFIHQSKKVFQERRDLVVSMLNQAKGISCPVPEGAFYVYPSCAGTIGKKAPSGKLIESDTDFVSELLETEGVAVVQGSAFGLGPNFRISYATSDALLEEACSRIQRFTANLR

SEQ ID NO: 9461 - protein, 137 aa, Gossypium barbadense
MAEEHRCQAPQLCANNCGFFGSPTTQNLCSECYRGLQLKEQQSSSAKQAFNHTLVPSSSSLPSSSSARSSFSASLPAKEEPSAGTKETKVVEEEEVQVTPNRCLSCKKRVGLTGFKCRCGMVFCGIHRYPGTTCLCF

SEQ ID NO: 9462 - protein, 514 aa, Shewanella oneidensis MR-1
MTTTKRPIALLILDGWGYRENTHMNAVYHANTPVLDRLNAQYAHGLISGSGLDVGLPDGQMGNSEVGHINLGSGRIVYQELTRISKAIADHEFEQNPALCDAVDAAVKTGGAVHIMGLLSPGGVHSHEEHIEAMCRMAVARGATKVYLHAFLDGRDTPPRSAKSSLSHFDDLFTTLGHGRIASIIGRYFAMDRDNRWDRVSQAYDLITQGKSKFQYDNAVTALEAAYSRDENDEFVSSSAITDANGQVATLQDGDALIFMNFRADRARQITRSFINPEFDGFARAVTPKVNFVTLTEYAADIKAPIAYPSDNLVNTLGEVLQNRGRTQLRISETEKYAHVTFFFNGGKEEPFNGEDRILINSPKVATYDLQPEMSSTELTDKLVAAIESTKYDVIICNYPNGDMVGHTGNFDAAVKACEAVDACIGRVVEALAKVGGECIITADHGNAEQMTDETTGQAHTAHTSELVPFVFVGRDATIDKGGKLSDVAPTILHLMGESIPAEMTGKPLIHVKE

SEQ ID NO: 9463 - protein, 1126 aa, Ceratodon purpureus
  unsure (1)..(1126): unsure at all Xaa locations
MASAKMAYSSGSGIKSKHSVRVAQTTSDAKLQAVYEESNDSGDSFDYSKSVAQAAKSTGQQQVPAQAVTAYLQRMQRGGLTQTFGCMLAVEENTFRVIAYSENAPELLDVMPQAVPSLGQQDVLGIGTDARSLFTPSSATALERAAGAADLSLVNPISVHSRASGKPFYAIIHRIDVGIVMGFEPVRPNDVIVSTAGTLHSHKLAAKAIARLQALSGGDIGLLCDTVVEEVRELTGYDRVMAYKFHEDEHGEVLAEIRRSDLEPYLGLHYPSTDIPQASRFLFMKNRVRMIVDCWAPPVKVIQDKDLRQPISLAGSTLRAPHGCHAQYMGNMGSVASVTMAVIXNDQEDDFGGQQTRARRLWGLVVCHHTSARTISFPLRSACEFLMQVFGLQLNMEVELENQKREKHILRTQTMLCDMLLRDAPVGIVSQCPNIMDLVKCDGAALYYGKRFWLLGITPSEEQIEEIANWLLEHHQDSTGLSTDSLADAGYPGANLLGDAVCGMAAARITPTDFLFWFRSHTAKEIKRGGAKHEADDKDDGRKMTPRSSFNAFLEVMKRRSVPWEDIEMDAIHSLQLILRGSFQDIDDSDTKTMIHARLNDLKLQGMDELSTVANEMVRLIETATAPILAVDSNGFINGWNAKVAELTGLPVGDAMGRSLVQDLIVDESVEVVERLLYLALQGDEEQDVEIQLRTFGPQKGKGAVILIVNACSSRDVQDNVVGVCFVGQDVTSQKQVHDKFTRIHGDYKSIVQNPNPLIPPIFGSDELGYCTEWSPSMEKLTGWKRDEVLGKMLVGEVFGTQQICCRLKGQDSVTKFMIVLNNAMDGQDTDKYPFSFYDRQGKFVEALLTANKRTDADGYITGVFCFLHIASPELLQALTVQRATEKVAFAKLKELAYIRQEIKNPLYGIMFTRNLMEDTDLSDEQKQFMDTSAVCERQLRKILDDMDLESIEDGYLELETAESELGSMMDAVVSQGMITSREKGLQLIRETPREINDMSLFGDQVRLQHVLADFLLNAVRLTPSSEGWVGIKVVPTKKRLGGGFHVVHLEFRVAHPGSGLPEELVHEMFDRGRGMTQEGLGLSMCRKLVKLMNGEVKYIRDTGKSYFLVNLELPLTVRDESGMLR

SEQ ID NO: 9464 - protein, 349 aa, Triticum aestivum
  unsure (1)..(349): unsure at all Xaa locations
MCGILAVLGVGDVSLAKRSRIIELSRRLRHRGPDWSGIHSFEDCYLAHQRLAIVDPTSGDQPLYNEDKTVVVTVNGEIYKHEELKAKLKYRQSQTGSDCEVIAHLYEEYGEEFVDMLDGMFSFVPLDTRDKSFIAARDAIGICPLYMGWGLDGSVWFSSEMKALSDDCERFISFPPGHLSSSKTGGLRRWYNPPWFSESIPSAPYDPLLIRESFEKAVIWRLMTDXLMTDVPFGVLLSGGLDSSLVASVVSRYLAETKVARQWGNKLHTFCIGLKGXPDLKAAKEVADYLCTVHHEIHFTVQEGIDAXLEEVLYHIQTYDVTTIRASPPIVSNVSGKINSWGVKNGLFR

SEQ ID NO: 9465 - protein, 444 aa, Deinococcus radiodurans R1
MPNPNALPGAAHLSGAGAAQTGSPMKTRIAGKTILAIVLAGGRGSRLSPLTDERAKPAVPFLGTYRLIDFTLSNLVHSGINDVWVIEQYLPHGLNDHLSGGRPWDLDRTRGGLVVMPPFASAENEEGEFAQGNAHALAQHAHLIREFGADLVLVLSADHVYRLDYSDVIRQHVERGASVTMVTTELADEQQATRFGNVRAAKNGKVSEFAYKPDEPLGKTVTAEVFVYDAHIMLSTLEALSKEGELGDYGEELLPALVARGDAHAFPMHGYWMDVGTLDAYLQTHRDFLDGKGFALDDPQWPFITSSISRPPTRIEKTARLDEALVCGGAVIAGEVVRSLIAPNAVVEAGAVVRDSVVQPGAVIRAGAQVSRAVVDQDAEVGPGSRVGGQTGNSRPTVVGAHAHLGPGVQVGPGQVVAPRTRVKAGEEGQKVQELDADDKAGKK

SEQ ID NO: 9466 - protein, 182 aa, Mycoplasma gallisepticum R
MMSKLNYTIEKILITNEQINEAAIKAANWINQTYKDDEIILVGILKGCIPFIGKIIDKIECEMILDFMTLSSFKGETKSQGTPKIVMDLAYDVMDKNVLLVEDIIDSGNTIKIVLDLLKQRGAKSVRLLTFLDKPSGREVDVKADYVCFEVPHGFLVGFGLDYKDKLRNLPYVAHMVSNDKK

SEQ ID NO: 9467 - protein, 363 aa, Simicratea welwitschii
QSQKLAVRAISQLQSLPGGDIKLLCDTAVESVRDLTGYDRVMVYRFHEDEHGEVVAESKRPDLEPYIGLHYPATDIPQASRFLFKQNRVRIIVDCHASPVSVIQDDGLMQPLCLVGSTLRAPHGCHAQYMENMGSIASLAMAVIINGNDEEGMGGRNPTRLWGLVVCHHTSSRCIPFPLRYACEFLMQAFGLQLNMELQLAAQLLEKHVLKTQTLLCDMLLRESPTGIVTQRPSIMDLVKCDGAALYYQANYYPLGVTPTEAQIRDIVEWVLACHGDSTGLSTDSLADAGYPGATLLGDAVCGMAVAYITNRDFLFWFRSHTAKEIKWGGAKHHPEDKDDGQRMHPRSSFKAFLEVVKSRSLP

SEQ ID NO: 9468 - protein, 85 aa, Malus x domestica
NFDLVGNNFPVFFIRDGIKFPDMVHALKPNPKSHIQEFWRILDFFSHHPESLHMFTFLFDDIGVPQDYRHMDGSGVNTYTLIDKA

SEQ ID NO: 9469 - protein, 245 aa, Siphonodon australis
ALSIAGAVQSQKLAVRAISQLQSLAGGDIKLLCDTVVESVRDLIGYDRVMVYKFHEDEHGEVLAESKRPDLEPYIGLHYPATDIPQASRFLFKQNRVRMIVDCHASPVRVIQDDGLMQPLCLVGSTLRAPHGCHAQYMENMGSTASLVMAAMINGNDEKATGGRNTTKLWGLVVCHHTSARCIPFPLRYACEFLMQAFGLQLNMELQLAAQLSEKHVLKTQTLLCDMLLRDSPTGIVTQSPSIMD

SEQ ID NO: 9470 - protein, 374 aa, Siphonodon celastrineus
ALSIAGAVQSQKLAVRAISQLQSLAGGDIKLLCDTVVESVRDLTGHDRVMVYKFHEDEHGEVLAESKRPDMEPYIGLHYPATDIPQASRFLFKQNRVRMIVDCHASPVRVIQDDGLMRPLCLVGSTLRAPHGCHAQYMENMGSTTSLVMAAYINGNDEKATGGRNATKLWGLAVCHHTSARCIPFPLRYACEFLMQAFGLQLNMELQLAAQLSEKHVLKTQTLLCDMLLRDSPTGIVTQSPSIMDLVRCDGAALYYQGNYYPLGVTPTEAQIKDIVEWLLAVHGDSMGLSTDCLADAGYPGSALLGDAVCGMAVAHITNRDFLLWFRSHTAEEIKWGGAKHRPKDKDDGQRMHPRSSFKAFLEVVKSRSLPWEN

SEQ ID NO: 9471 - protein, 154 aa, Coursetia madrensis
RVMAYKFHEDDHGEVIAEITKPGLEPYLGLHYPATDIPQAARFLFLKNKVRMIVDCHAKHVKVLQDEKLPIDLSLCGSTLRAPHSCHLQYMANMDSIASLVMAVVVNDSDEDGDSSDAVQPQKRKRLWGLVVCHNTTPRFVPFPLRYACEFLAQ

SEQ ID NO: 9472 - protein, 284 aa, Schizosaccharomyces pombe
MLIAAMGPKIPVPAYGVGTALFKKEKGEINRTIVDSVKNALAAGFIHIDCAEVYGNEEEVGVALKEANVPRSKLFITSKVMHNVDNIPEALNESLRKLGTDYLDLYLLHSPIPFYEKKIPISEGWKAMETALGTGLVHSVGVSNFRIPDLEELLKTSTITPRVNQIEFHPQVYKAAKPLVEFCQSKGIIVEGYGPLSPLVRDAQGPVAEFTKSLESKYHVSDTQILLKWAYSKGVIPITTTSKIERMKECLNFDSFTLDKADIDELGTLGVQHHKRTFMKHMDE

SEQ ID NO: 9473 - protein, 246 aa, Methanothermobacter thermautotrophicus str. Delta H
MVSLTKRCIAEFIGTFFLVFFGAGAAAITLMIASGGTAPNPFNIGIGLLGGLGDWVAIGLAFGFAIAASIYALGNISGCHINPAVTIGLWSVKKFPGRDVVPYIIAQLLGAAFASFIFLQCAGITAATIGGLGATAPFPGIGYWQAMLAETVGTFLLMITIMGIAVDERAPKGFAGIIIGLTVAGIITTIGNITGSSLNPARTFGPYLNDMVFAGTNLWNYFPIYVIGPVVGAVLAALTYQYLTSE

SEQ ID NO: 9474 - protein, 374 aa, Siphonodon celastrineus
ALSIAGAVQSQKLAVRAISQLQSLAGGDIKLLCDTVVESVRDLTGHDRVMVYKFHEDEHGEVLAESKRPDMEPYIGLHYPATDIPQASRFLFKQNRVRMIVDCHASPVRVIQDDGLMRPLCLVGSTLRAPHGCHAQYMENMGSTASLVMAAYINGNDKKATGGRNATKLWGLAVCHHTSARCIPFPFRYACEFLMQAFGLQLNMELQLAAQLSEKHVLKTQTLLCDMLLRDSPTGIVTQSPSIMDLVRCDGAALYYQGNYYPLGVTPTEAQIKDIVEWLLAVHGDSMGLSTDCLADAGYPGSALLGDAVCGMAVAHITNRDFLLWFRSHTAEEIKWGGAKHRPKDKDDGQRMHPRSSFKAFLEVVKSRSLPWEN

SEQ ID NO: 9475 - protein, 232 aa, Brucella suis 1330
MSFDSIGTLCAGRMKGQAMRRIDTLSDIEAGLEALVLADRRLADIRNRSHAVPLRRSEPGFESLASIVVAQQVSTASAAAIWARLKQVINPLTPEAYIAGGEEAWRLAGLSRPKQRTLLALSEALAGGALDLHGLCDLPAGEAIATLTAIKGIGPWTAEVYLLFAAGHPDVFPAGDVALQTAVGHAFAHETRPDAAALRQLAENWAPWRGVAARLFWAYYAAIKGREAAPLL

SEQ ID NO: 9476 - protein, 402 aa, Glycine max
  unsure (1)..(402): unsure at all Xaa locations
MATKRSVGTLKEGDLKGKRVFVRVDXNVPLDDNLNITDDTRVRAAVPTIKYLTGYGAKVILSSHLGRPKGVTPKYSLKPLVPRLSQLLGIEVTMANDSIGEEVEKLVTQLPEGGVLLLENVRXFYKEEEKNDPEFAKKLASLADLYVNDAFGTAHRAHASTEGVAKYLKPSVAGFLMQKELDYLVGAVSNPKRPFAAIXGGSKVSSKIGVIESLLEKVNVLLLGGGMIFTFYKAQGYSVGSSLVEEDKLSLATTLLEKAKAKGVSLLLPTDVVIADKFAADANSKTVPASSIPDGWMGLDIGPDSIKTFGEALDTTQTIIWNGPMGVFEFDKFATGTEAIAKKLAELSGKGVTTIIGGGDSVAAVEKVGLADKMSHISTGGGASLELLEGKQLPGVLALDDA

SEQ ID NO: 9477 - protein, 318 aa, Glycine max
  unsure (1)..(318): unsure at all Xaa locations
MLNFTTFXQARILVESGFDAPQENPPPYEDDASNSESSLQHPEAISQLVNLNQTVYENPNQGTVSHEEYFRVLDEMKTKSYSYDTDKDTNIYDGNTSCLATCTTCGIDDDLCKGSFTYEAEELGGNELGCLTSCVGTRWFRAPELLYGSTDYGLEVDLWSLGCVFAELLTSKPLFPGTSDVDQLSRIVSVLGNINEETWPGCSKLPDYGSISLGNVENPSGLEACMPNCSPNEVSLVQRLVCYDPAKRTTAMELLQDKYFSEEPLPVPISELRVPLTRNGQDQDSPGGHNEMGSDSDLEELGTLEYTTTGFYLSIQIP

SEQ ID NO: 9478 - protein, 322 aa, Gossypium barbadense
MRAVQYSKYGGGVADLKHVEVPVPSPKKDEVLIKVETASINPIDWKLQDGVARPFLPRKFPHIPGTDVAGEVVQVGSEVQSFKVGENVVAVLGNGGALAEYAVANEGSTVSRPPEVSAREAAALPIAGLAAHQSLTQLAGIKLDGTGPEVNVLVTAASGGVGQYAVQLLKLANAHITATCGARNIDLIRSLGADEGLDYKTPDGVALKSPSGRTYDVIIHCAHKIPWSTFEANLTSKGKVVDPPPGFGTLMSVAFKKIPFAKRQLIPLFPSPKKETLEFLVKLVKEGKLNPVIDSVHPLSKAEEAWAKSIDGHATGKILVEP

SEQ ID NO: 9479 - protein, 167 aa, Triticum aestivum
CSHPADLPPSHLAPDPNPTTAPPTHTTRRPYLSRRSLAGWHLSRNKVLFFSGALFVSLAVGVHLSPYLPSLPHLLVSSFHPIRPAAPSSSSSASCISVLHRVSWADAEPHGGGRAWSWPPSLAATCGFARLTRDDASTLLNGSWVMVAGDSHARMLVLALLRLLLDP

SEQ ID NO: 9480 - protein, 214 aa, Paeonia sinjiangensis
IVESVGEGVTDVKPGDHVLPIFTGECKECRHCKSEESNMCDLLRINTDRGVMLNDGKSRFSINGQPIFHFVGTSTFSEYTVLHVGCLAKINPEAPLDKVCVLSCGISTGLGATLNVAKPKKGSTVAIFGLGAVGLAAAEGARMAGASRIIGVDLNPKRFDEARKFGVTEFVNPKDYNKPVQEVIAEMTGGGVDRSVECTGSIMAMMSAFECVHD

SEQ ID NO: 9481 - protein, 214 aa, Paeonia sinjiangensis
IVESVGEGVTDVKPGDHVLPIFTGECKECRHCKSEESNMCDLLRINTDRGVMLNDGKSRFSINGQPIFHFVGTSTFSEYTVLHVGCLAKINPEAPLDKVCVLSCGISTGLGATLNVAKPNKGSTVAIFGLGAVGLAAAEGARIAGASRIIGVDLNPKRFDEARKFGVTEFVNPKDYNKPVQEVIAEMTGGGVDRSVECTGSIMAMMSAFECVHD

SEQ ID NO: 9482 - protein, 218 aa, Gossypium hirsutum
MAGYRAEDDYDYLFKVVLIGDSGVGKSNLLSRFTRNEFSLESKSTIGVEFATRSLNVDGKVIKAQIWDTAGQERYRAITSAYYRGAVGALLVYDVTRHSTFENVERWLRELRDHTDPNIVVMLVGNKSDLRHLVAVSTEDGKSFAEKESLYFMETSALEATNVEISFAEVLTQIYNVISKKAMETSDDGAASAVPSKGEKIDVGKDVSAMKKGGCCSS

SEQ ID NO: 9483 - protein, 461 aa, Hordeum vulgare subsp. vulgare
MVHQSNGHGEAAAAAANGKSNGHAAAANGKSNGHAAAAAVEWNFARGKDGILATTGAKNSIRAIRYKISASVEESGPRPVLPLAHGDPSVFPAFRTAVEAEDAVAAALRTGQFNCYAAGVGLPAARSAVAEHLSQGVPYKLSADDVFLTAGGTQAIEVIIPVLAQTAGANILLPRPGYPNYEARAAFNKLEVRHFDLIPDKGWEIDIDSLESIADKNTTAMVIINPNNPCGSVYSYDHLAKVAEVARKLGILVIADEVYGKLVLGSAPFIPMGVFGHIAPVLSIGSLSKSWIVPGWRLGWVAVYDPTKILEKTKISTSITNYLNVSTDPATFVQEALPKILENTKADFFKRIIGLLKESSEICYREIKENKYITCPHKPEGSMFVMVKLNLHLLEEIHDDIDFCCKLAKEESVILCPGSVLGMENWVRITFACVPSSLQDGLERVKSFCQRNKKKNSINGC

SEQ ID NO: 9484 - protein, 214 aa, Paeonia sinjiangensis
IVEGVGEGVTDVKPGDHVLPIFTGECKECRHCKSEESNMCDLLRINTDRGVMLNDGKSRFSINGQPIFHFVGTSTFSEYTVLHVGCLAKINPEAPLDKVCVLSCGISTGLGATLNVAKPNKGSTVAIFGLGAVGLAAAEGARIAGASRIIGVDLNPERFDEARKFGVTEFVNPKDYNKPAQEVIAEMTGGGVDRSVECTGSIMAMMSAFECVHD

SEQ ID NO: 9485 - protein, 642 aa, Zea mays
FCFALQFRPSSSHDTTVTTTNAGAPVWNDNEALTVGPRGPILLEDYHLIEKVAHFARERIPERVVHARGASAKGFFECTHDVTSLTCADFLRAPGVRTPVIVRFSTVIHERGSPETIRDPRGFAVKFYTREGNWDLLGNNFPVFFIRDGIKFPDVIHAFKPNPRSHVQEYWRVFDFLSHLPESLHTFFFLFDDVGVPSDYRHMEGFGVNTYTFVSAAGKAQYVKFHWKPTCGVRCILTDEEAALVGGRNHSHATQDLYDSPETIRDPRGFAVKFYTREGNWDLLGNNFPVFFIRDGIKFPDVIHAFKPNPRSHVQEYWRVFDFLSHLPESLHTFFFLFDDVGVPSDYRHMEGFGVNTYTFVSAAGKAQYVKFHWKPTCGVRCILTDEEAALVGGRNHSHATQDLYDSIAAGSFPEWTLYVQVMEPDTEEQYDFDPLDDTKTWPEDLLPLRPVGRLVLDRNVDNFFNENEQLAFGPGLVVPGIYYSDDKMLQCRVFAYADTQRYRLGPNYLMLPVNAPRCAHHNNHYDGAMNFMHRDEEVDYYPSRHAPLRQAAPPTPLPPRPVAGRREKATIRKPNDFKQPGERYRSWDADRQDRFVRRFADSLGHPKVSQELRSIWIDLLAKCDASLGMKIATRLNMKANM

SEQ ID NO: 9486 - protein, 214 aa, Paeonia arietina
IVESVGEGVTDVKPGDHVLPIFTGECKECRHYKSEESNLCDLLRINTDRGVMLNDGKSRFSINGQPIFHFVGTSTFSEYTVLHVGCLAKINPEAPLDKVCVLSCGISTGLGATLNVAKPKKGSTVAIFGLGAVGLAAAEGARIAGASRIIGVDLNPKRFDEARKFGVTEFVNPKDYNKPVQEVIAEMTGGGVDRSVECTGSIMAMMSAFECVHD

SEQ ID NO: 9487 - protein, 423 aa, Saccharomyces cerevisiae
MSEATLSKQTIEWENKYSAHNYHPLPVVFHKAKGAHLWDPEGKLYLDFLSAYSAVNQGHCHPHIIKALTEQAQTLTLSSRAFHNDVYAQFAKFVTEFSGFETVLPMNTGAEAVETALKLARRWGYMKKNIPQDKAIILGAEGNFHGRTFGAISLSTDYEDSKLHFGPFVPNVASGHSVHKIRYGHAEDFVPILESPEGKNVAAIILEPIQREAGIVVPPADYFPKVSALCRKHNVLLIVDEIQTGIGRTGELLCYDHYKAEAKPDIVLLGKALSGGVLPVSCVLSSHDIMSCFTPGSHGSTFGGNPLASRVAIAALEVIRDEKLCQRAAQLGSSFIAQLKALQAKSNGIISEVRGMGLLTAIVIDPSKANGKTAWDLCLLMKDQGLLAKPTHDHIIRLAPPLVISEEDLQTGVETIAKCIDLL

SEQ ID NO: 9488 - protein, 253 aa, Petunia x hybrida
MDLLQDRESETESLPYPTQCKRYKRIINSRISDTHYNQFLSLERRRQQQQQQYGKITEFPFVESEPVSSISDTSPDEDVANCLMMLSRDKWMTQENEVIDNSASYDEDVKTEDSVVVKVTTTRRGRGKYICETCNKVFRSYQALGGHRASHKKIKVSINETKNNGNVESEVQKDKIHECPVCYRVFSSGQALGGHKRSHGIGVAATNVSLSTKIVSSRISGTMIDLNIPATLEDDEISQIEVSAVSDDEFVNP

SEQ ID NO: 9489 - protein, 214 aa, Paeonia humilis
IVESVGEGVTDVKPGDHVLPIFTGECKECRHYKSEESNLCDLLRINTDRGVMLNDGKSRFFINGQPIFHFVGTSTFSEYTVLHVGCLAKINPEAPLDKVCVLSCGISTGLGATLNVAKPKKGSTVAIFGLGAVGLAAAEGARIAGASRIIGVDLNPKRFDEARKFGVTEFVNPKDYNKPVQEVIAEMTGGGVDRSVECTGSIMAMMSAFECVHD

SEQ ID NO: 9490 - protein, 596 aa, Oryza sativa (japonica cultivar-group)
MASSASLQRFLPPYPHAAASRCRPPGVRARPVQSSTVSAPSSSTPAADEAVSAERLEPRVEQREGRYWVLKEKYRTGLNPQEKVKLGKEPMSLFMEGGIKELAKMPMEEIEADKLSKEDIDVRLKWLGLFHRRKHQYGRFMMRLKLPNGVTTSEQTRYLASVIEAYGKEGCADVTTRQNWQIRGVTLPDVPAILDGLNAVGLTSLQSGMDNVRNPVGNPLAGIDPDEIVDTRSYTNLLSSYITSNFQGNPTITNLPRKWNVCVIGSHDLYEHPHINDLAYMPAVKGGKFGFNLLVGGFISPKRWEEALPLDAWVPGDDIIPVCKAVLEAYRDLGTRGNRQKTRMMWLIDELGMEAFRSEVEKRMPNGVLERAAPEDLIDKKWQRRDYLGVHPQKQEGMSYVGLHVPVGRVQAADMFELARLADEYGSGELRLTVEQNIVIPNVKNEKVEALLSEPLLQKFSPQPSLLLKGLVACTGNQFCGQAIIETKQRALLVTSQVEKLVSVPRAVRMHWTGCPNSCGQVQVADIGFMGCLTKDSAGKIVEAADIFVGGRVGSDSHLAGAYKKSVPCDELAPIVADILVERFGAVRREREEDEE

SEQ ID NO: 9491 - protein, 93 aa, Malus x domestica
WTAEEDEKLMDYIQKHGYGNWRTLPKNAGLQRCGKSCRLRWTNYLRPDIKRGRFSFEEEETIIQLHSILGNKWSAIAARLPGRTDNEIKNHWK

SEQ ID NO: 9492 - protein, 405 aa, Arabidopsis thaliana
MDSVFSNVARAPEDPILGVTVAYNNDPSPVKINLGVGAYRTEEGKPLVLDVVRKAEQQLVNDPSRVKEYIPIVGISDFNKLSAKLILGADSPAITESRVTTVQCLSGTGSLRVGAEFLKTHYHQSVIYIPKPTWGNHPKVFNLAGLSVEYFRYYDPATRGLDFKGLLEDLGAAPSGAIVLLHACAHNPTGVDPTSEQWEQIRQLMRSKSLLPFFDSAYQGFASGSLDTDAQSVRTFVADGGECLIAQSYAKNMGLYGERVGALSIVCKSADVASKVESQVKLVVRPMYSSPPIHGASIVATILKSSDMYNNWTIELKEMADRIKSMRQQLFEAIQARGTPGDWSHIIKQIGMFTFTGLNKEQVEFMTKEFHIYMTSDGRISMAGLSSKTVPHLADAMHAAVTRLG

SEQ ID NO: 9493 - protein, 559 aa, Zea mays
MGSSGFSWTLPDHPKLPKGKPVAVVVLDGWGEANPDQYNCIHVAQTPVMDSLKNGAPEKWRLVKAHGTAVGLPSDDDMGNSEVGHNALGAGRIFAQGAKLVDQALASGKIYDGDGFNYIKESFESGTLHLIGLLSDGGVHSRLDQLQLLLKGVSERGAKKIRVHILTDGRDVLDGSSIGFVETLENDLLELRAKGVDAQIASGGGRMYVTMDRYENDWDVVKRGWDAQVLGEAPYKFKSALEAVKTLRAQPNANDQYLPPFVIVDDSGNAVGPVLDGDAVVTINFRADRMVMLAKALEYADFDNFDRVRVPKIRYAGMLQYDGELKLPSRYLVSPPEIDRTSGEYLVKNGIRTFACSETVKFGHVTFFWNGNRSGYFDETKEEYVEVPSDSGITFNVAPKMKALQIAEKARDALLSGKFDQVRVNLPNGDMVGHTGDIEATVVACKAADEAVKIILNAVEQVGGIYLVTADHGNAEDMVKRNKSGKPLLDKNGGIQILTSHTLQPVPVAIGGPGLHPGVKFRNDIQIPGLANVAATVMNLHGFEAPADYEQTLIEVADN

SEQ ID NO: 9494 - protein, 403 aa, Arabidopsis thaliana
MNSILSSVLPAPEDPVLSVIFACRDDPSPVKLNLSAGTYRTEEGKPLVLDVVRRAEQQLANDLDKEYLPLNGLPEFNKLSTKLILGDDSPALKENRVVTTQCLSGTGSLRVGAEFLATHNKESVIFVPNPTWGNHPRIFTLAGLSVQYFRYYDPKSRGLDFKGMLEDLGAAPPGAIVVLQACAHNPTGVDPTFEQWEKIRRLVRSKSLLPFFDSAYQGFASGSLDADAQAVRMFVADGGECLIAQSYAKNMGLYGERIGSLTIVCTSEDVAKKVENQVLLVVRPMYLTPPIHGASIVATILKNSDMYNDWTIELKGMADRIISMRQQLYAALEARGTPGDWSHIIKHIGMFTFTGLSEEQVRLMAKEYHIYMTYDGRISMASLSSKTVPQLADAIHAVVTRIA

SEQ ID NO: 9495 - protein, 374 aa, Kluyveromyces lactis
MLRLTSARSIVSPLRKGAFGSIRTLATSVPETQKGVIFYENGGKLEYKDIPVPKPKPNEILINVKYSGVCHTDLHAWKGDWPLPTKLPLVGGHEGAGVVVAMGENVKGWNIGDFAGIKWLNGSCMSCEYCELSNESNCPDADLSGYTHDGSFQQYRTADAVQAARIPKGTDLAEVAPTLCAGVTVYKALKSANLKAGDWVAISGAAGGLGSLAVQYAKAMGYRVVGIDGGEEKGKLVKQLGGEAFVDFTKTKDMVAEIQEITNGGPHGVINVSVSEAAMNASTQFVRPTGTVVLVGLPAGAVIKSEVFSHVVKSINIKGSYVGNRADTREAINFFANGHVHSPIKVVGLSELPKVYELMEQGKILGRYVVDTSN

SEQ ID NO: 9496 - protein, 463 aa, Chlamydomonas reinhardtii
MQMQLNAKTVQGAFKAQRPRSVRGNVAVRAVAAPPKLVTKRSEEIFKEAQELLPGGVNSPVRAFRSVGGGPIVFDRVKGAYCWDVDGNKYIDYVGSWGPAICGHGNDEVNNALKAQIDKGTSFGAPCELENVLAKMVIDRVPSVEMVRFVSSGTEACLSVLRLMRAYTGREKVLKFTGCYHGHADSFLVKAGSGVITLGLPDSPGVPKSTAAATLTATYNNLDSVRELFAANKGEIAGVILEPVVGNSGFIVPTKEFLQGLREICTAEGAVLCFDEVMTGFRIAKGCAQEHFGITPDLTTMGKVIGGGMPVGAYGGKKEIMKMVAPAGPMYQAGTLSGNPMAMTAGIKTLEILGRPGAYEHLEKVTKRLIDGIMAAAKEHSHEITGGNISGMFGFFFCKGPVTCFEDALAADTAKFARFHRGMLEEGVYLAPSQFEAGFTSLAHSEADVDATIAAARRVFARI

SEQ ID NO: 9497 - protein, 346 aa, Oryza sativa (japonica cultivar-group)
KDPIKLWERYVEWLYQHKELGLFVDVSRMGFTEEFLRRMEPRMQRAFAAMRELEKGAIANPDEGRMVGHYWLRDPGLAPNSFLRTKIETTLDRILAFSQDVVSGKIKPPSSPAGRFTQILSIGIGGSALGPQFVSEALAPDNPPLKIRFIDNTDPAGIDHQIAQLGPELASTLVIVISKSGGTPETRNGLLEVQKAFRDAGLDFSKQGVAVTQENSLLDNTARIEGWLARFPMFDWVGGRTSEMSAVGLLPAALQGIDIKEMLVGAALMDEETRNTVVKENPAALLALCWYWASEGIGNKDMVVLPYKDSLLLLSRYLQQLVMESLGKEFDLDGNRVHILPFYSHC

SEQ ID NO: 9498 - protein, 81 aa, Glycine max
SNSYTRAVHQLSHRARGTAWLHPYTGLKSMAGLPTRKTNTDITSIASNGGRVQCMQVRPPAGSMKFETLSYLPDLDDAQLA

SEQ ID NO: 9499 - protein, 339 aa, Enterococcus faecalis V583
MKAALIHKYGQKELAIEEVPLPTIHDNDVLVKIIAASINPIDLKTKDGKVKMLLDYQMPLILGSDFAGIVVSVGKNVQNFRLGDAVYGRVPKNRVGTFAEYIAVDQAAVAMKPKNLTFEEAAAIPLVGLTSYQALHDIMNVQPGQKVLIQAGSGGIGTIAIQLAKLAGAYVATTTSSKNKEWVQALGADEVIDYRTQNFEEVLSDYDYVFDTMGGTILEKAFSVVKPQGKVVTLSGIPNERFAKEYGLPLWKQWAFKIATRKIHRLEQATDVSYHFLFMRPDGEQLALLTEFIEQGKLQPIIDRVVPFSQIQEAVDYSLTGRAQGKIVVKIAELINMDG

SEQ ID NO: 9500 - protein, 254 aa, Streptomyces avermitilis MA-4680
MPVKAYDLTGRTAFVTGAASGIGRASAVLLAQAGATVHCADRDEQGLHETETLIKGGGGTARTHHLDVTDRARLHQAVAGCDRLDIMAAVAGIMHSSPVLETRDEDLDRVLNVNFKGVLYACQEAARRMIADGTRGSIVTMASGAVDTGGPGLLCYGAAKAAVVQLTKTLATEVGRHGIRVNAVAPGWVRTAMTDRHDGAAQAHTEAFMARLSPLGRVGEPDDIAHAVLHLASDASPFTTGQILRPNGGVAMPW

SEQ ID NO: 9501 - protein, 152 aa, Deinococcus radiodurans
MTAASYAGQLTFSTSHLSTCDPHDLHGCFTEFLASGRARYSRRMTQDLQVEKYQEGSGQPAEKGKMVSVHYTGTLENGQKFDSSRDRGQPIEFPLGVGYVIPGWDQGIAQMRVGDKARLTIPGHLAYGEAGVPGVIPPNATLIFDVELMDVR

SEQ ID NO: 9502 - protein, 473 aa, Glycine max
FGSSQNVPASAGGETRVEEKKPTREDVTDERKSESTSAIINASELPPHVLLEMPALSPTMNQGNIAKWRKQEGDKIEVGDILCEIETDKATLEFETLEEGYLAKILAPEGSKEVAVGHPIAITVEDASDIEAIMNSVSRSSTNQQKAPQRDTKSEAKAQKNNIIRISPAAKLLITEYGLDASTLNATGPYGTLLKGDVLSAIKSGKLSPKPASSKEKVSSFQSHQQVAASQESKSDLKLSDAYEDFPNSQIRKVIAKRLLDSKQNTPHLYLSSDVVLDPLLSLRKDLKEQYDVKVSVNDIIVKVVAAALRNVPEANAYWNVETGEVVLNDSIDICIAVATEKGLMTPIIKNADQKTISAISSEVKELAAKARAGKLKPHEFQGGTFSISNLGMFPVDKFCAIINPPQACILAVGRGNKVVEPVIGTDGIEKPSIATKLSLTLSADHRVFDGKVGGAFLSALQSNFSDIRRLLL

SEQ ID NO: 9503 - protein, 413 aa, Azotobacter vinelandii
MAELGKRRFARIDRLPPYVFNITAELKMAARRRGEDIIDFSMGNPDGAPPAHIVEKLVQVARREDTHGYSTSRGIPRLRRAISHWYRDRYAVEIDPDSEAIVTIGSKEGLAHLMLATLDHGDSVLVPNPSYPIHIYGAVIAGAQVRSVPLVPGMDFFAELERAIRETIPKPKMMILGFPSNPTAQCVELDFFERVVALARQYDILVVHDLAYADIVYDGWKAPSIMQVPGAKEVAVEFFTLSKSYNMAGWRIGFMVGNQELVGALARIKSYHDYGTFTPLQVAAIAALEGDQQCVRDIAEQYRERRNLLVKGLHEIGWMVEKPKASMYIWAKIPEPYAHLGSLEFAKKLLAEAKVCVSPGLGFGDYGDDHVRFALIENLDRTRQAIRGIKAMFRADGLLEVTSEKARKSDASH

SEQ ID NO: 9504 - protein, 311 aa, Brucella suis 1330
MRNSNVCVLYQNPDLRYAWAENLPLYWQEKWKAGGQDSDFIFSTALSRLDTAKQTTLESGIAQNVELLINDGSKTRWIEFHIDCDRDAQGNVIGLVTTAIEITELKRREQVLKTLLHEVSHRSKNLLAIVQSIATQTARFTDSIDDFLVKFRGRIQSLSYSQDLVTDSNWRGALFLDLVRSQVEKYIDIDDERLTIEGDNPYLFPGAALHIGLALHELVVNATSFGGLSIPYGRVVIRAHVLPGADGADKLMFCWDETNPAMPDVFEHDPRFGSAVLQRIVPAAVNGHAEYRIDGTGAIYSLTIPTEQFDS

SEQ ID NO: 9505 - protein, 187 aa, Triticum aestivum
  unsure (1)..(187): unsure at all Xaa locations
VTKVHARQIFDSRGNPTVEVEVTTAKGVFRAAVPSGAXTGIHEALELRDGDKSQYMGKGVTKAVNNVNSVIXPXLIESKIPVTEQKAIDDXLIXLDGTPNKGKLGANXILGVXFAVXKGXXGDKGXLFYVXFXDLVXXKKXXVFXVXVLNVMXGGFDXGXKFXMQEFMIXFSGAKRFKEVMKIGCEV

SEQ ID NO: 9506 - protein, 346 aa, Triticum aestivum
  unsure (1)..(346): unsure at all Xaa locations
HYAPSTLHSLCTPLPPHPHPHRRRRPPRTPPPRLPQAARAARRPGLPTEESSQSGDRLCSSPIRRKLXEDNNVPLXSSLKGTGPDGRILKADIEDYLSSAAKGSKKEAAAAPGLGYVDLPNTQIRKVTANRQLQSKQTIPHYYLTVDSRVDKLIKLRSELNPMQDASGGKKISINDLVIKAAALALRKVPACKGSWMNKFVRRYRTEKINVAEQTEHGLVDPVVIDADKKGLATIADEVKQLASRAKDNSLKPEDYEGGTFTVSNLGGPFGIKQFCAIVNPPQSAILAIGSAEKRVVPGAAEGQYEIGSFMSATLSCDHRVIDGAMGAEWLKAFKGYLEDPTTMLL

SEQ ID NO: 9507 - protein, 204 aa, Medicago sativa
MDSKKAILMLSLLAMALISSVMSARDLTETSTDAKKEVVEKTNEVNDAKYGGGYNHGGGYNGGGYNHGGGYNHGGGGYHNGGGGYNHGGGGYNGGGGHGGHGGGGYNGGGGHGGHGGGGYNGGGGHGGHGGAESVAVQTEEKTNEVNDAKYGGGSNYNDGRGGYNHGGGGYNHGGGGHGGHGGHGGHGGHGGHGAVQTEDNTQN

SEQ ID NO: 9508 - protein, 214 aa, Paeonia humilis
IVESVGEGVTDVKPGDHVLPIFTGECKECRHCKSEESNLCDLLRINTDRGVMLNDGKSRFSINGQPIFHFVGTSTFSEYTVLHVGCLAKINTEAPLDKVCVLSCGISTGLGATLNVAKPKKGSTVAIFGLGAVGLAAAEGARIAGASRIIGVDLNPKRFDEARKFGVTEFVNPKDYNKPVQEVIAEMTGGGVDRSVECTGSIMAMMSAFECVHD

SEQ ID NO: 9509 - protein, 214 aa, Ustilago maydis
MAPAAICRKLVIVGDGACGKTSLLCVFAIGEFPQEYEPTIFENYVAEIRLDGKPVQLALWDTAGQEEYERLRPLSYSQAHVILIAFAIDTPDSLENVQVKWMEEVRQICGPSVPVLLVGCKKDLRENAIAKGKPVQGHYVKRQQAKLVAAQIGARSYHECSSLNNQGVDAVFEAATRAAMLVRNSGASSGGAISQSKTKEALHNDAGSCKCIVL

SEQ ID NO: 9510 - protein, 214 aa, Paeonia humilis
IVESVGEGVTDVKPGDHVLPIFTGECKECRHYKSEESNLCDLLRINTDRGVMLNDGKSRFSINGQPIFHFVGTSTFSEYTVLHVGCLAKINTEAPLDKVCVLSCGISTGLGATLNVAKPKKGSTVAIFGLGAVGLAAAEGARIAGASRIIGVDLNPKRFDEARKFGVTEFVNPKDYNKPVQEVIAEMTGGGVDRSIECTGSIMAMMSAFECVHD

SEQ ID NO: 9511 - protein, 375 aa, Kluyveromyces lactis
MFRLARAQTALANKASVSRSFLRLNSSFAIPETQKGVIFYENGGKLEYKDLPVPKPKANEILINVKYSGVCHTDLHAWKGDWPLPVKLPLVGGHEGAGIVVAKGENVKNFEIGDYAGIKWLNGSCMSCELCEQGYESNCLQADLSGYTHDGSFQQYRTADAVQAAQIPKGTDLAEIAPILCAGVTVYKALKTADLKPGQWVAISGAAGGLGSLAVQYRKAMGLRVLGIDGGDGKEELFKQCGGEVFIDFRKSKDMVADIQEATNGGPHGVINVSVSEAAVSMSTEYLRPTGLVVLVGLPADAYVKSEVFSHVVKSISIKGSYVGNRADTREATDLFTRGLVKSPIKIIGLSELPEAYALMEQGKILGRFVVDTYK

SEQ ID NO: 9512 - protein, 329 aa, Oryza sativa (japonica cultivar-group)
MPNRATHWCYACRRPIRVSGQDITCPNCNDGFIQEISEIGGSLNTYGIFDPSFDERRDRSFGMVEAMSDLMRQRMAEMGRNRVLDFHGTRGASSHQGRQPTVRPMLIFGSNAPDRVSSSSEEADILLRQGRRIGADRPNFSRFLVGPSLEALFEQLLLHNNRQGPPPAPQSAIDSMPVVKINLRHLRDDPHCPVCTDKFEVGTEAREMPCKHLYHAECIIPWLVQHNSCPVCRHPLPSSSHRSGSTRSSSTHSNEAISHGVARSDADPVPVARSDDSRNHEMHGSFSFLWPFDSPTPDSSSYTHEGGVGEPTVHDDAGQMTYSEWHYDY

SEQ ID NO: 9513 - protein, 214 aa, Paeonia officinalis
IVESVGEGVTDVKPGDHVLPIFTGECKECRHCKSEESNLCDLLRINTDRGVMLNDGKSRFSINGQPIFHFVGTSTFSEYTVLHVGCLAKINPEAPLDKVCVLSCGISTGLGATLNVAKPKKGSTVAIFGLGAVGLAAAEGARIAGASRIIGVDLNPKRFDEARKFGVTEFVNPKDYNKPVQEVIAEMTGGGVDRSVECTGSIMAMMSAFECVHD

SEQ ID NO: 9514 - protein, 193 aa, Ustilago maydis
MQTIKCVVVGDGAVGKTCLLISYTTNAFPGEYIPTVFDNYSANVMVDGKPVSLGLWDTAGQEDYDRLRPLSYPQTDVFLVCFSLVSPPSFENVRTKWWPEVSHHAPNIPTILVGTKLDLREDPETIAKLRDRRMQPITYAQGNQMARDIHATKYLECSALTQKGLKGVFDEAIRSVLAPAPVQSKKKNNCLIL

SEQ ID NO: 9515 - protein, 435 aa, Schizosaccharomyces pombe
MTTIQKIYSRSIYDSRGNPTVEVELTTELGTFRSMVPSGASTGEWEAKELRDNDKNKWGGKGVTIAVHNVNNIIGPALVKSDIKITDQRGIDEFMIKLDGTNDKSKLGANSIVGVSMAVARAAAAFLKIPLYEYIGKLAGSKTTECIPVPSFNVLNGGRHAGGDLAFQEFMIMPIKAPTFSEGLRWGSEVYHTLKALAKKKYGASAGNVGDEGGIAPDLTTAEEALDLVNEAIKEAGYDGKVKIGFDVAASELYNGKLYDLDFKSEHPKPENKLDYKKLYEKYSALIEKYPIVFIEDPFSEEDWGAFSYMSSKTKVEVIADDLTVTNVKRLSKAIELKCANALLVKINQIGSLSETIDAANMAKKAGWGLMVSHRSGETDDSFIAHLAVGLEAGQMKSGAPCRSERLAKYNELLRIEDNLGDSAIYAGTRAADYI

SEQ ID NO: 9516 - protein, 214 aa, Paeonia parnassica
IVESVGEGVTDVKPGDHVLPIFTGECKECRHCKSEESNLCDLLRINTDRGVMLNDGKSRFSINGQPIFHFVGTSTFSEYTVLHVGCLAKINPEAPLDKVCVLSCGISTGLGATLNVAKPKKGSTVAIFGLGAVGLAAAEGARIAGASRIIGVDLNPKRFDEARKFGVTEFVNPKDYNKPVQEVIAEMTDGGVDRSVECTGSIMAMMSAFECVHD

SEQ ID NO: 9517 - protein, 434 aa, Streptomyces coelicolor A3(2) [sequence omitted]

SEQ ID NO: 9518 - protein, 394 aa, Oryza sativa
  unsure (1)..(394): unsure at all Xaa locations
MPVMAPTASLLLSPRPLPASRRVPSLPALSASGRLRLRRARADTRLRVAAPPSVPGEADQAPGETEPSTSSADEKFVWRDHWYPVSLVEDLDPSVPTPFQLLNRDLVIWKDPKSGEWVALDDRCPHRLAPLSEGRIDETGCLQCSYHGWSFDGSGACTRIPQAAPEGPEAQAVRSPKACAIKFPXLVSQGLLFVWPDENGWEKATATKPPMLPKEFEDPAFSTVTIQRDLYYGYDTLMENVSDPSHIEFAHHKVTGRRDRARPLPFKMESSGAWGYSGSNSGNPRISATFVAPCYALNKIEIDTKLPIFGDQKWVIWICSFNIPMAPGKTRSIVCSARNFFQFSMPGKAWWQVSAIFVALSIYLLFNLLVSALFRKTAVKIPALLKIRVNFMLS

SEQ ID NO: 9519 - protein, 226 aa, Oryza sativa
MARLRRGLEHLERRYAFYAAYHSNPANVLVHAVCVWPILLTAMLPLRYAPPLPLLRFYCPLCRQYLPVQLGFPVAVALGAYYALMDRRAGAAAAALCVAGWAAGTLLADAAGLWTFRDAWRPLLTAQAVLWSAQFFSHAFFEKRRPALVDGPVQAVVTAPLFVFIEVLHRLFGYEPTPGFYKRVQARVAAMHNGPPAPAPAPEKKEEEEKENVSKATQEESAEKDS

SEQ ID NO: 9520 - protein, 493 aa, Agrobacterium tumefaciens str. C58
MRSKVMRRFQCYIDGRFEDGEASFSSLDPATGQPWAEMPESREADIGRVVEAAHRALYEDTVWSKLTATQRGKLLYRLADLVAENAKTLAELETRDTGKIIRETSAQIAYVADYYRYYAGLADKIEGAYLPIDKPDMDVWLRREPVGVVAAIVPWNSQLFLAAVKIGPALAAGCTIVVKASEDGPAPLLEFARLVHEAGFPAGVVNVVTGFGASCGNALTTHPKVAHIAFTGGPETARHIVRNSAENLASTSLELGGKSPILVFADADLESAANAQVAGIFAATGQSCVAGSRLIIEKSVKDRFLQILAAKAEAIRIGSPLDMATEVGPLATERQRKHIVSLVSASVDAGAKVVTGGEPVEGEGYFYRPTILDCDGIRSPSLEKEFFGPVLSVVSFETEAEAISLANDTVYGLASGVFTQNLTRAHRLMKAIRAGIVWVNTYRAVSPIAPFGGFGLSGDGREGGLAAALDYTRTKTIWLRTSDDPIPDPFVMR

SEQ ID NO: 9521 - protein, 167 aa, Momordica charantia
MAEESPKSIYDFTVKDIRGNDVCLSQYSGKVLLIVNVASKCGFTDSNYKELNVLYDKYKSQGFEILAFPCNQFARQEPGTNEEIQETLCTRFKAEFPIFDKVEVNGKNAAPIYKFLKLKKGGIFGDGIKWNFTKFLVNREGKVVDRYAPTTPPLNIEKDIQNLLGSA

SEQ ID NO: 9522 - protein, 222 aa, Vibrio mimicus
AAGGIGQALALLLKNRLPAGSDLALYDIAPVTPGVAADLSHIPTPVTIKGYAGEDPTPALEGADVVLVSAGVARKPGMDRADLFNVNAGIVKALAETIAVVCPKACVGIITNPVNTTVPIAAEVLKKAGVYDKRKLFGVTTLDVIRSETFVAALKDKDPGQVRVPVIGGHSGVTILPLLSQVEGVTFTDEEVAALTKRIQNAGTEVVEAKAGGGSATFSMGQ

SEQ ID NO: 9523 - protein, 450 aa, Escherichia coli
MTKHYDYIAIGGGSGGIASINRAAMYGQKCALIEAKELGGTCVNVGCVPKKVMWHAAQIREAIHMYGPDYGFDTTINKFNWETLIASRTAYIDRIHTSYENVLGKNNVDVIKGFARFVDAKTLEVNGETITADHILIATGGRPSHPDIPGVEYGIDSDGFFALPALPERVAVVGAGYIGVELGGVINGLGAKTHLFEMFDAPLPSFDPMISETLVEVMNAEGPQLHTNAIPKAVVKNTDGSLTLELEDGRSETVDCLIWAIGREPANDNINLEAAGVKTNEKGYIVVDKYQNTNIEGIYAVGDNTGAVELTPVAVAAGRRLSERLFNNKPDEHLDYSNIPTVVFSHPPIGTVGLTEPQAREQYGDDQVKVYKSSFTAMYTAVTTHRQPCRMKLVCVGSEEKIVGIHGIGFGMDEMLQGFAVALKMGATKKDFDNTVAIHPTAAEEFVTMR

SEQ ID NO: 9524 - protein, 398 aa, Schizosaccharomyces pombe
MTHTPSFDLSDIKSTLSTNVLHADDAYALENDVAPPIHISTTYTYPGTPDTLQPFTKLAEEDFPYYARISGNNVDRAEASLSSVLGAPSVVYSSGLAAIYGLLSYLNPKHIAVHKPGFGGYSGTIQIIARINRLTGLETSFIDGKCDAIGEGDVIWLETPLNPLGIAFDIPFYKELAKKKGAILVVDSTFAPPPIQDALVLGADYVVHSATKYLAGHSDVLAGVTASKDRSKILDLKADRAYLGTILHPQQAFLLLRSLRTFPLRIAKHSENGFLVAQHLNKLATDEQFATSLGIDSSLILEVYHNSLQTKEFVAKNLTGGHASCFSVLLKSDTVAKHLCCELKYFHHATSLGSVESLIEWRRMTDSKIDPRLVRLSIGIEDAADLIADLNRVFASLS

SEQ ID NO: 9525 - protein, 407 aa, Haemophilus somnus 2336
MSNFDIITPDLPESVADATVVTWHKNVGDAVKCDEVLVEIETDKIVLEIPALSDGVLETILQPEGSTVVSKQLLGKVSASAGIGEVTKSTVQNVEKTPADRHSANLNTDASSDVLSPAVRRLLAEHELNADEIKGTGVGGRITREDIALVVKQKAQQTETAQASQSIVTGLKIDHRNEKRVPMTRLRKRIAERLLEAKNTTAMLTTFNEVDMQPIMNLRKRYAEKFEKQHGARLGFMSFYIKAVVEALKRYPEINASIDGDDIVYHNYFDISIAVSTPRGLVTPVVRNCDKLSMADIEKEIKLLAEKGRDGKLTVEDLTGGNFTITNGGVFGSLMSTPIINPPQSAILGMHAIKDRPVAVNGEVVIRPMMYLALSYDHRLIDGRESVGFLVTVKDLLEDPTRLLLEI

SEQ ID NO: 9526 - protein, 90 aa, Triticum aestivum
MATKRSVGTLGEADLKGKRAFVRADLNVPVDDAQKITDDTRIRAYIRTIKYLLEKGAKVILASHLGRPKGVTRKFSLKPLVPRLTELLGL

SEQ ID NO: 9527 - protein, 473 aa, Glycine max
  unsure (1)..(473): unsure at all Xaa locations
MAMVKRSIGVCKRLFGSSSCLSTSTATSDHDIARRLQLPPFDYKPRPYKGPLADEVFAKRKKFLGPSLFHFYQKLLNIVEGMMQHLFDENGRRYLDAFAGIVTISCGHCHPAVLNAIMEQSKLLQHTTTIYLHHAIADFAEALASKMPGNLKVVYFLNSGSEANDLAMLMARLYTGNMGMISLRNAYHGESSSTIGRTAMNTXKYPIPEGEVHHVMNPDPYRGVFGSDANRYARELQDHIDYGPSGRVAGFMAETIQGTGGAVELAPGYLKLAYDIIHKAGGVCIADEVQCGFARTGSHFWGFETQGVIPDIVTMAKGIGNGLPLAAVVTTPEIASVMAQKLQFNTFGENPVCFAGGLAVLRVLDKERRQCHCADVGSHSIQRLRSMMQVHDIIGDVRGRGLMVGIEFVTDRKXKPPAKAETTALHERFSELGILVGKGGLHGNVFRIKPPMCFTKDDAGFFVDALDCAISKL

SEQ ID NO: 9528 - protein, 495 aa, Glycine max
MAAMQRPLKRTIAIAKLRACFSSLRPAAAADIVASPPPQLPPFDHQPHPYNGPFADEVLAKRKTFLGPSVFHYYKKPCRCVSDQAKIYGFSKCSSVKLNIVEGKMQYLYDDSGRRYLDAFAGIVTVSCGHCHPEILNAITEQSKLLQHATTIYLHHTIGDFAESLAAKMPGNLKVVYFVNSGSEANELAMMMARLYTGSLGMISLRNAYHGGSSSTLGLTALNTWKYPIPEGHVHHVMNPDPYRGAFGADAASYANDVQDHIDYGTSGKVAGFIAETMQGVGGAVELAPGYLKLVYDIIHKAGGVCIADEVQTGFGRTGSHYWGFETQGVIPDIVTMAKGIGNGLPLGAVVTTPEIASVLAQKIQFNTFGGNPVCSAGGLAVLRVLDKEKRQAHCADVGSHLLERLRFLMERHDIIGNVRGRGLMVGIELVTDRDNKTPAKAETAVVFEKLRELGVLVGKGGLHGNVFRIKPPMCFSKDDADFLVDALDYSLSKL

SEQ ID NO: 9529 - protein, 146 aa, Butea monosperma
SRFLFKQNRVRMICDCHAKPVKVIQSEELRQSLCLVNSTLRLPHGCHTQYMANMGSIASLVMAIIVNGNDTTRLWGLLVCHHTSPRYVSFPVRYACEFLMQAFGLQLYMEIQLASQMEEKRILKTQTLLCDMLLRDAPFGIVTQSP

SEQ ID NO: 9530 - protein, 160 aa, Glycine max
  unsure (1)..(160): unsure at all Xaa locations
ASSMISSPAVTTVNRAGAGMVAPFSGLKSIAGFPTKKTNNDITSIATIRGKVQFLHVWPPLGKKKIDTLSYLPYLDDAQLPNELEYLLTNVWIPCLEFXMEHIFMYREHYTSPGYYNSRYCTMLKLPMVGCTDASRVIKELLQAKTAYPNGXFIRIIGFD

SEQ ID NO: 9531 - protein, 2082 aa, Streptomyces coelicolor A3(2)
MSGPAAAAPSAAARPRGETMSGSTPRQVPVAVVGVGALVPGATDAAGYWRVVTGGRDLITEVPASRWRVEDHYDPDPAAPDKTYARRGAFLPEVDFDPMAYGVPPANLPATDTSQLLALMVADQVLRDAGGTSGIDRDRTGVVLGAAALELLPHMYGRSQRPAWLAGLRESGLDEAKAQAVCDRIAARFEPWRESTFPGLLGNVVAGRIANRFDLHGVNHTTDAACASSLAALSTAVGELSLHRADLVISGGVDTGNDIGMFLCFSKTPALSPSGDCRPFAEAADGTMLGEAVVMYALKRLSDAERDGDRIHAVIRGIGTSSDGRSTAIYAPLPEGQERALRRAYEEAGYPPETVELVEAHGTGTKAGDTAELAALNAVFGASGRPDGQWCAIGSVKSQIGHTKCAAGAAGLLKAVMALHHKVLPPTVKVERPNPAAAAPHGPFYVNTQARPWVRPAGHPRRAAVSSFGFGGSNFHVTLEEYAPPTVPTPSSGTHAGTPARPAPKNTGRPALRHRTASSELVLFAAASPSALEERLPEDGRPLAALARESHAAFSPTARVRLAVVAADTDDLRGKYAQALAHIRRRPEASFSAPSGIRYAYGEPAPGRIGFLFPGQGSQYVGMGAELAMLAPTAQAVWDRLGSIRFDGRPLHRAVFPPPAFTEEERAARAALLNATEWAQPALAVHALALLAVVRELGLRPDCVAGHSFGELVALHCAGALDAESLVGLARRRGELMREAAATPGAMLAVAADRVRVAEVLAGGGFEDIWPANHNSPRQTVLSGSAAAVERARSAFSAAGIASRGLSASTAFHSPLVAPAVEPLAAHLRTVTFSEPRIEVYGNTDAAPYPSCPDAVRRRVAGHLASPVLFQDQIEAMYAAGVRTFVEVGAGATLTGLVGQILGGREHAAVPLDRPAGAGADTFHAALGELAVRGVPLDLNPLWTPYASPVTPAKEREPRMTVKISGANYGQLPPSGTPHVEPTPAPDHGPRPDAVPAVAAPVPAVALPSQAPGDVPLPPVYEPAAASSPQEFGPSHPAEAPADARPVIGDDRQLAVESIHRQTAETHLACQRLLTDSHMAFLRMTETTLAALLGAPVPGAVPGMTAPAALPLPRSVGPLDVPAAVAPPVAAPAPAAVVGAATPYPVPEASAPPASAAMRPSVSEPAPPAQAPARDASAPDRSAPEPTPSELSSSELEELLLSVVADLTGYPTAMLHVDMDLEADLGVDSIKRVEILSAVRRRVGDVAVGDAGRLGKLRTLREITAALASGARTAGPAPEPDVPVVPAPRADAFEPSPAKARAAAPFSTTVDVPAVRGDGSEPSADEAGVDGWTPLTRLVPRMVESPVCGLATAGLLDGPVVVSGEDVAGCPVVGLVARKLAERGVDATAVAEVPEGARGVVHLGGLSASGTPDEAREVHRSALRAARALAPRAAGGGGLFVTVQDTGGDFGLGGHAPGRAWLGGTAGLARTAAKEWPDVRVRVLDCERGGRDDEEVADAIVSELLEGGADTEVGLRADGTRALLRMVPGPLTPGGAPRIGENSVIVATGGARGVTAAALLDLARTHRPRIVLLGRTEAAAEPAGLASATDERALTRLLAQRAGDAEESSPARIAEEARRILAAREVRATLAGLEAAGSPARYVRVDVRDADALTAALREVRATWGPVTGIVHGAGVLADKRIADKTDEQAEPVMATKVDGLRALLSATADDPLDTILLFSSVAAVFGNAGQSDYAMANEVLQQVASAEQARRPDCLVRCVAWGPWQGGMVTPALAAHFGRAGVPLIPPAQGAAACTAELNGAAGQARVVLTAGDGPTAADERLRAQVLVSSDTLPQLADHAPAGVPVLPVALVLNWFAGAAAAWLPAEGQLVLRDLRVYRKYDLPELEGVGHRLTVLGNRGAPGSPAGVEAELRGEEGPAHFRAVVDTGDGAPDPSRWDTPADLKPLDVSAPYDGGVLFHGPRFHALREVRGVSEHGAEATVAGLRSLGWPGGRGPLDPAAVDGALQLALLWGEKVLGAATLPMAVAECRVYRRGPVDDAVRCVVRERKVHDTGARCDAALIGPGGSVLLELTGVELVSRPS

SEQ ID NO: 9532 - protein, 561 aa, Acinetobacter sp. ED45-25
MTTLKITGMTCDSCAAHVKEALEKVPGVQSALVSYPKGTAQLAIEAGTSSDALTTAVAGLGYEATLADAPPTDNRAGLLDKMRGWIGAADKPSGNERPLQVVVIGSGGAAMAAALKAVEQGAHVSLIERGTIGGTCVNVGCVPSKIMIRAAHIAHLRRESPFDGGIAATVPAIDRSKLLAQQQARVEELRHAKYEGILDGNPAITVVHGEARFKDEQSLVVRLNDGGERVVAFDRCLVATGASPAVPPIPGLKESPYWTSTEALVSDTLPERLAVIGSSVVALELAQAFARLGSQVTILARNTLFFRDDPAIGEAVTAAFRAEGIKVLEHTQASQVAHVDGEFVLTTGYGEIRADKLLVATGRTPNTRSLALDAAGVTVNAQGAIVIDQGMRTSNPNIYAAGDCTDQPQFVYVAAAAGTRAAINMTGGDAALDLTAMPAVVFTDPQVATVGYSEAEAHHDGIETDSRTLTLDNVPRALANFDTRGFIKLVIEEGSGRLIGVQAVAPEAGELIQTAVLAIRNRMTVQELADQLFPYLTMVEGLKLAAQTFSKDVKQLSCCAG

SEQ ID NO: 9533 - protein, 246 aa, Archaeoglobus fulgidus DSM 4304
MTMTLAKRFTAEVVGTFILVFFGPGAAVITLMIANGADKPNEFNIGIGALGGLGDWFAIGMAFALAIAAVIYSLGRISGAHINPAVTIALWSIGRFPGREVVPYIVAQFIGAALGSLLFLACVGPAAATVGGLGATAPFPGIGYGQAILTEAIGTFLLMLVIMGVAVDERAPPGFAGLVIGLTVGGIITTIGNITGSSLNPARTFGPYLGDSLMGINLWQYFPIYVIGPIVGAVAAAWLYNYLAKE

SEQ ID NO: 9534 - protein, 398 aa, Schizosaccharomyces pombe
MNLELLDPFSIPDYPEALTTTLKHGHATSIRFSTNGYHLASGLVNGSVVIWDLSTFSVSRVLTGHTRAIQSVCWSSCDRFLLTASRDWKCILWDLRDGSIVYQVVLSAPVWSASLHPHKINTFVASLLDESPQLIIVDDGIPKHKYLPTNPDIDENYSDRRNRSKHVTLVSFFHPSGEYILSGTSKGWFHVIDASTTKIRSSHRITSQSIKQIRLSFCKRFLIFNSTDRVIRTVSIQDLDNPEVEHKFQDVVNRLQWNSCGFSQTGEFVFATTYQMAHAIYVWERGMGSLVKILEGPKEELVDVDWHPVFPCVASVGLDSGSIYIWAVEQKESWSAFAPDFQELEENIEYEEPEDEFDIHDETGKSEEEEYFTSVVKILPHDSSAEQPFVMPPTLSSS

SEQ ID NO: 9535 - protein, 133 aa, Glycine max
  unsure (1)..(133): unsure at all Xaa locations
MKNGVMECSVCHSKLVSPSSKTISRAYDRHKSRISSKQRALNVFLVVGDCVLVGFQPILVYMSKVDGKFNFSPISVNFLTEITKVFFAIVMLLLQARHQKVGGEXPLLSISTFMQAARNNVLLAVPALLYAIN

SEQ ID NO: 9536 - protein, 170 aa, Craibia brevicaudata
PQATRFLFMKNKVRMIVDSRAKHVKVLQDQKIPFDLTLCGSTLRAPHSCHLQYMENMNSSASLVMAVVVNDNDEDGDSSDAVQPQKRKRLWGLVVCHHTTPRFVPFPLRYACEFLAQVFAIHVNKELELEYQIVEKNILRTQTLLCDMLMRDAPLGIVSQSPNIMDLVKC

SEQ ID NO: 9537 - protein, 186 aa, Hordeum vulgare
KYPYIAGMGIYVISKHVMLQLLREQFPGANDFGSEVIPGATSTGMRVQAYLYDGYWEDIGTIEAFYNANLGITKKPIPDFSFYDRSAPIYTQPRHLPPSKVLDADVTDSVIGEGCVIKNCKIHHSVVGLRSCISEGAIIEDALLMGADYYETEADKKLLAEKGGIPIGIGKNSHIKRAIIDKNARI

SEQ ID NO: 9538 - protein, 198 aa, Craibia brevicaudata
EDDHGEVIAEITKPGLEQYLGLHYPATDIPQAARFLFMNNKVRMIVDCHAKHVKVLQDEKLLFDLTLCGSTLRAPHSCHLQYMANMDSIASLVMAVVVNDNEEDGDSSDAVQPQKRKRLWGLVVCHNTTPRFVPFPLRYACEFLAQVFAIHVNKEIELEYQIIENNILRTQTLLCDMLMRDAPLGIVSQSPNIMDLVK

SEQ ID NO: 9539 - protein, 204 aa, Derris elliptica
YKFHEDDHGEVIAEITKPGLEPYLGLHYPATDIPQAARFLFMKNKVRMIVDCHAKHMKVLQDEKIPFDLTLCGSTLRAPHSCHLQYMANMDSIASLVMAVVVNDNEEDGDSSDAVQPQKRKRLWGLVVCHNTTPRFVPFPLRYACEFLAQVFAIHVNKEIELEYQIIEKNILRTQTLLCDMLMRDAPLGIVSQSPNIMDLVKCD

SEQ ID NO: 9540 - protein, 145 aa, Derris elliptica
EDDHGEVIAEVKRPGLEPYLGLHYPATDIPQATRFLFMKNKVRMIVDCRAKHVKVLQDKKVPFDLTLCGSTLRAPHSCHLQYMENMNCSASLVMAVVVNDNDEDGDSDAVQPQKRKRLWGLVVCHNTTPRFVPFPLRYACEFLAQ

SEQ ID NO: 9541 - protein, 137 aa, Phaseolus vulgaris
MAQKAQKNDTDFKVPEPITPCATATAAAATSISEPSRFFDAATPATSSRSPKRSLPLEDAANADRTVASEPKRAVNRCSGCRRRVGLTGFRCRCGDLFCAEHRYTDRHDCSYDYKTVGREAIARENPVVKAAKIVKV

SEQ ID NO: 9542 - protein, 357 aa, Triticum aestivum
  unsure (1)..(357): unsure at all Xaa locations
VPPRAPPRGPPTARPSAIPPPRRDQRFKMSNRATHWCYACRRPIRLRGQDIICPNCNDGFIQEISETXGALNNYGMFGPRFDDRLDGRFGMMDAMSALMRRRMAEMGSNPVFDPNAAWASTTQGRPSPIGPRLIFGSNMPAQGSDDSGVNVLVRGGRRIGADRPNFSGFLVGGPSLEALFEQLLLQTGNRQGPAPAPQSVIDSMPVVRITRRHLSDDPVCPVCTERFEIGSEAREMPCKHLYHASCIIPWXLVQHNSCPVCRHPLPPQRGIGQQCSPSTTFGPSRPVGVDGAGADPGPVMRNGAGEGGSPFSFLWPFGSARSGPCSYLYGGGGGEPAPAVYNDDPGQITYSEWHYDP

SEQ ID NO: 9543 - protein, 386 aa, Shigella flexneri 2a str. 2457T
MTNNPLIPQSKLPQLGTTIFTQMSALAQQHQAINLSQGFPDFDGPRYLQERLAYHVAQGANQYAPMTGVQALREAIAQKTERLYGYQPDADSDITVTAGATEALYAAITALVRNGDEVICFDPSYDSYAPAIALSGGIVKRMALQPPHFRVDWQEFAALLSERTRLVILNTPHNPSATVWQQADFAALWQAIAGHEIFVISDEVYEHINFSQQGHASVLAHPQLRERAVAVSSFGKTYHMTGWKVGYCVAPAPISAEIRKVHQYLTFSVNTPAQLALADMLRAEPEHYLALPDFYRQKRDILVNALNESRLEILPCEGTYFLLVDYSAVSTLDDVEFCQWLTQEHGVAAIPLSVFCADPFPHKLIRLCFAKKESTLLAAAERLRQL

SEQ ID NO: 9544 - protein, 61 aa, Gossypium barbadense
LGANAILAVSLAVCKAGAEVKKLPLYKHIANLAGNSKLVLPVPAFNVINGGSHAGNKLAMQ

SEQ ID NO: 9545 - protein, 348 aa, Kluyveromyces lactis
MSIPETQKGVIFYENGGELQYKDIPVPKPKANELLINVKYSGVCHTDLHAWKGDWPLPTKLPLVGGHEGAGVVVAMGENVKGWIIGDFAGIKWLNGSCMSCEYCELSNESNCPDADLSGYTHDGSFQQYATADAVQAARIPKGTDLAEVAPILCAGVTVYKALKSADLKAGDWVAISGACGGLGSLAIQYAKAMGYRVLGIDTGAEKAKLFKELGGEYFVDYAVSKDLIKEIVDATNGGAHGVINVSVSEFAIEQSTNYVRSNGTVVLVGLPRDAKCKSDVFTQVVKSVSIVGSYVGNRADTREALDFFARGLVHAPIKIVGLSELADVYDKMVKGEIVGRYVVDTSK

SEQ ID NO: 9546 - protein, 780 aa, Rhodobacter sphaeroides
  unsure (1)..(780): unsure at all Xaa locations
EGLANGEVMSGCHWGVFKARVENGRAVAFEPWDKDPAPSHQLPGVLDSIYSPTRIKYPMVRREFLEKGVNADRSTRGNGDFVRVTWDEALDLVARELKRVQESYGPTGTFGGSYGWKSPGRLHNCQVLMRRALNLAGGFVNSSGDYSTAAAQIIMPHVMGTLEVYEQQTAWPVVVENTDLMVFWAADPMKTNEIGWVIPDHGAYAGMKALKEKGTRVIXINPVRTETADYFGADVVSPRPQTDVALMLGMAHTLYSEDLHDKDFLENCTTGFDLFAAYLTGESDGTPKTAEWAAEICGLPAEQIRELARSFVAGRTMLAAGWSIQRMHHGEQAHWMLVTLASMIGQIGLPGGGFGLSYHYSNGGSPTSDGPALGGISDGGKAVEGAAWLSESGATSIPCARVVDMLLNPGGEFQFNGATATYPDVKLAYWAGGNPFAHHQDRNRMLKAWEKLETFIVQDFQWTATARHADIVLPATTSYERNDIESVGDYSNRAILAMKKVVDPLYEARSDYDIFAALAERLGKGAEFTEGRDEMGWISSFYEAAVKQAEFKNVAMPSFEDFWSEGIVEFPITEGANFVRYADFREDPLFNPLGTPSGLIEIYSKNIEKMGYDDCPAHPTWMEPAERLGGAGAKYPLHVVASHPKSRLHSQLNGTSLRDLYAVAGHEPCLINPADAAARGIADGDVLRVFNDRGQILVGAKVSDAVMPGAIQIYEGGWYDPLDPSEEGTLDKYGDVNVLSLDVGTSKLAQGNCGQTILADVEKYAGAPVTVTVFDTPKGA

SEQ ID NO: 9547 - protein, 61 aa, Gossypium barbadense
LGANAILAVSLAVCKAGAEVKKLPLYKHIANLAGNSKLVLPVPAFNVINGGSHAQKQIGYA

SEQ ID NO: 9548 - protein, 331 aa, Oryza sativa
MAQAPMSTGGGAMELGGGGHESVERRRRHQHHFVLVHGLCHGAWCWYKAAAALRRAGHRATALDMAASGAHPARVDEVRTFEDYSRPLLDALAALPPAGGDGDDEERVVLVGHSQGGFSVALAAERFPERVAAVVFLTAAMPPVGRPMSATTVEQGWADWRPMREEGRVTSGRMSSGVQHIFKNFIKTHVNYVGVEFFLDSMELEQQNADIPGNPVIFGPNFMAQILYHLSPQEDLTLGLSLIRPTNKFTGDALMRDPGLLTKERYGSTRRVFVVVEDDRGIPVEFQRRMIAENPGVEVVDFAGADHMAMISSPAKLAELLVRIADKAHEP

SEQ ID NO: 9549 - protein, 150 aa, Betula pendula
GVKCLLDDEAIRVGGANHGHATKDLYVSIGAGNYPEWKLYIQIIDPDHEDKFDFDPLDVTKIWPEDILPLQPVGRLVLNKNIDNFFAENEQLVFCPSIVVPGVYYSDDKLLQTRIFSYSDTQRHRLGPNYLQLPANAPKCAHHNNHHEGF

SEQ ID NO: 9550 - protein, 1091 aa, Oryza sativa
MSSSRPTQCSSSSSRTRQSSRARILAQTTLDAELNAEYEEYGDSFDYSKLVEAQRTTGPEQQARSEKVIAYLHHIQRAKLIQPFGCLLALDEKTFNVIALSENAPEMLTTVSHAVPSVDDPPKLRIGTNVWSLFTDPGATALQKALGFADVSLLNPILVQCKTSGKPFYAIVHRATGCLVVDFEPVKPTEFPATAAGALQSYKLAAKAISKIQSLPGGSMEVLCNTVVKELFDLTGYDRVMAYKFHEDDHGEVFAEITKPGLEPYLGLHYPATDIPQAARFLFMKNKVRMICDCRARSIKIIEDESLHLDISLCGSTLRAPHSCHLQYMENMNSIASLVMAVVVNENEDDDEVGADQPAQQQKRKKLWGLLVCHHESPRYVPFPLRYACEFLAQVFAVHVNKEFELERQVREKSILRMQTMLSDMLLRESSPLSIVSGTPNIMDLVKCDGAALLYGGKVWRLQNAPTESQIRDIAFWLSDVHRDSTGLSTDSLHDAGYPGAAALGDMICGMAVAKINSKDILFWFRSHTAAEIRWGGAKHDPSDKDDSRRMHPRLSFKAFLEVVKMKSLPWNDYEMDAIHSLQLILRGTLNDDIKPTRAASLDNQVGDLKLDGLAELQAVTSEMVRLMETATVPILAVDSNGLVNGWNQKVAELTGLRVDEAIGRHILTVVEESSVPVVQRMLYLALQGKEEKEVKFEVKTHGSKRDDGPVILVVNACASRDLHDHVVGVCFVAQDMTVHKLVMDKFTRVEGDYKAIIHNPSPLIPPIFGADEFGWCSEWNAAMTKLTGWHRDEVINKMLLGEVFDSTNASCLVKNKDAFVSLCILINSALAGDETEKAPFSFFDRNGKYIECLLSVNRKVNADGVITGVFCFIQVPSHELQHALHVQQASQQNALTKLKAYSYMRHAINNPLSGMLYSRKALKNTGLNEEQMKEVNVADSCHRQLNKILSDLDQDSVMNKSSCLDLEMVEFVLQDVFVAAILSDFLFVSVKFSPVGGSVEISCSLTKNSIGENLHLIDLELRIKHQGKGVPADLLSQMYEDDNKEQSDEGMSLAVSRNLLRLMNGDVRHMREAGMSTFILSVELASAPAK

SEQ ID NO: 9551 - protein, 792 aa, ASPERGILLUS NIDULANS FGSC A4
MSTDYEKRLSLDDMALKTGDHIETIGKAAAVDATVAANVDDIPISLYVWMVALSASIAGMLFGYDTGIISAVLVYIKDALGGRYLTSSEKELITSLCSGGAFFGSIFAGNTADRWGRKTALYLGCVLFVVGAVLQAAAYTIAQMAVGRVIVGFGVGSAAMIVPLYVAEIAPSKARGRLVGLNNVSITGGQVIAYAIGAAFASVPHGWRVMVGLGGLPPIVLACLLPFCPESPRHLVYNGRMEEARAVLRKLYRGATDVQIESVLASILAGCEEARAISGNEGGWAKIVRLHTVPSNFRALLCACGLMVLSQISGFNTLMYYSSTIFSLVGFTSPTAVGLVVAGTNLIMTFANMILVDRLGRRRLLLSTVWGMSAGLIAVSVAFSFIHVDVNATEVTPQSVTTPAIVVLIFIIWFVVFYGVSVGNTAWMSADFFPLEVRAMGTMWMTCSSWASNVIVSSTFLSMTNAMTMAGTFGFYAGICGVSYVLIYFFYPEVSGLILEEIKEVFEHGFGVSTYIPTPTMRSRLRVWLQIGRPISGLIDRGVAAFDGGYRKFQPESARCIRAKPSISSKCRPFEVFVYYGYSQLPSVHASQNPDIQNSDVRKIWERRIQLGLLGLQRVTTRIERKDKLMLARLQAVPRLFLEARSKAACPTLGTTSPLTSKAAHVPITRRDYKIILATRQSAEDNGDRHDEKMPWRCERRKRSRFRSVTTRDESNERQITVYFLDYLLYLTTLLQESCWKIVHPAYGLDLKHFDDEAADPRTERHAVFSTGLRVSDDYTTKKWNIGLGSLQ

SEQ ID NO: 9552 - protein, 241 aa, Xylella fastidiosa Ann-1
MPVDGQVVITSEQAIALTRVPEHLIVIGSGAVGLELASIWVRLGAQVSVIEAQPEILPGWDATVARTAKRSLRQQGITFLTDHRVETVVRSGSRAAVTCLNSKGETLMLDGDQVLVAVGRQAQLCVAGIQNLELQQDEQGRLWVDAHYATSLAGLYAVGDLIAGPQLAHRATAEGLRVADYLAGRPLSPMGPIPSVVYTDPELAMVGLTEQQAKVAGYAVKCGQFPFMASAAPVPKSRPKA

SEQ ID NO: 9553 - protein, 243 aa, Ralstonia eutropha JMP134
MSETHFGFEKVDETEKAGKVAGVFHSVASKYDVMNDLMSGGMHRLWKMFTIAQANVRPGHKVLDIAGGTGDLAKAFAKQAGPTGQVWLTDINESMLRVGRDRLLDKGVVTPVALCDAEHIPFPDNYFDLVTVAFGLRNMTHKDAALAEMRRVVKPGGKVMVLEFSKVWKPLEKAYDVYSFQVLPWLGQKVAGDAASYRYLAESIRMHPDQTSLVRLMEQVGLEKVEYFNLTAGVVALHVGRKY

SEQ ID NO: 9554 - protein, 191 aa, Saccharomyces cerevisiae
MQTLKCVVVGDGAVGKTCLLISYTTNQFPADYVPTVFDNYAVTVMIGDEPYTLGLFDTAGQEDYDRLRPLSYPSTDVFLVCFSVISPPSFENVKEKWFPEVHHHCPGVPCLVVGTQIDLRDDKVIIEKLQRQRLRPITSEQGSRLARELKAVKYVECSALTQRGLKNVFDEAIVAALEPPVIKKSKKCTIL

SEQ ID NO: 9555 - protein, 397 aa, Desulfovibrio vulgaris subsp. vulgaris (strain Hildenborough)
MSQSQFPRMHRLPPYVFAVVNELKMQLRRQGVDIVDLGMGNPDMPTPQHIVDKMVEASMKGNNHRYSVSRGIPNLRKAICDWYTRRFGVYLDPDTEAVVTMGAKEGLSHLSLAMLSPGDVVFAPDPTYPIHTYAPVIAGADVRRIPIGRGRDFFEDLLVATRQTWPQPKLLFLSYPHNPTTELATPEFFQKVVDFAKEHKIYVIHDFAYADLAFDGHMPPSFMQADGAKDVGVEFFSMSKSYSMAGWRVGFCVGNREMVNTLTRIKSYLDYGIFQPIQIAATVALNGPQECMTEIVDTYRKRRDVLIEGLNRSGWEVPAPKGTMFVWAQIPEPFRAMGSVEFSKLLLREAHVAVSPGLGFGAHGDDHVRFALIENEQRTKQALRGIRHLLSGKPCGE

SEQ ID NO: 9556 - protein, 588 aa, Glycine max
MSSSFSVRFLAPPSSCFPSSRPKTWLCAATTPTVAPATASSEVEASRLEPRVEERDGFWVLKEEYRGGISPQEKVKLEKDPMKLFMEGGIEDLAKMSLEEIESSKHTKDDIDVRLKWLGLFHRRKQHYGRFMMRLKLPNGVTTSAQTRYLASVIRKYGKDGCADVTTRQNWQIRGVVLPDVPEILKGLDEVGLTSLQSGMDNVRNPVGNPLAGIDPDEIVDTRPYNNLLSQFITANSRGNPAMSNLPRKWNVCVVGSHDLFEHPHINDLAYMPANKDGRFGFNLLVGGFFSAKRCAEAIPLDAWVSADDVIPLCKAVLEAYRDLGFRGNRQKTRMMWLIDELGIEVFRSEVEKRMPGKQLERASEEELVKKKWERRDYLGVHPQKQEGLSYVGIHIPVGRVQADDMDELARLADEYATGELRLTVEQNIIIPNVDNNKIDGLLNEPLLKGRFSPEPSLLMKTLVACTGNQFCGQAIIETKERALKVTEEVERQVAVTRPVRMHWTGCPNTCGQVQVADIGFMGCMARDENGKATEGVDIFLGGRIGSDSHLAEVYKKGVPCKNLVPIVVDILVKHFGAVQRNREEGED

SEQ ID NO: 9557 - protein, 371 aa, Archaeoglobus fulgidus DSM 4304
MAIYAFPEFDGESRRASRIYASARYPSRQEGNVFFDSEEVPNLKYADEMPLKIRNFYSVVAFRPSHIFLSRDVLGGRPLYYGSDMSISSFKSYIDGEVYEVMPGEVVKMDYTGEILERRKYAFEDVFRVGREDVNEMADRILNSLSSYKPRVGCIAFSGGVDSSLLAALYDAPLVSVTASDAEEEWLKTAARMLGKEIEILKVGESAIREVVDTVRKTIETGDFLQLSIAVPVYLTMQFAKSLGFTEIIFGQGADELFGGYKRYEGLSEHELEDALVKDLKSIGESNLVRDCKLAYKNEIKLVTPYLCWDVIDAALKIPPEYKVRREGGKVVRKYILRKIAEKFLPEEIAWRDKKAIQYSTGIAKILKKCL

SEQ ID NO: 9558 - protein, 550 aa, Haemophilus somnus 2336
MMQNINPTQTNAWKALEQHQKDLEQVTIQQLFEQEPTRFNDYSLKFAEQILVDYSKNNINQQTLSLLRQLAKECALNEATESMFNGEKINRTENRAVLHTALRNCANTPVYVDGKDVMPEVNAVLAKMKSFCQRVISGDWKGYTGKAITDVVNIGIGGSDLGPYMVTEALRPYKNHLTMHFVSNVDGTHIAETLKKVNPETTLFLVASKTFTTQETMTNAISARKWFLAAAQDESQIAKHFAALSTNVKEVEKFGIDTHNMFEFWDWVGGRYSLWSAIGLSIALSIGFDNFEQLLAGAHEMDKHFRTAPMEQNIPITLALIGIWNCNFLGAETEAMLPYDQYLHRFAAYFQQGNMESNGKYVDRSGQVINNYQTGPIIWGEPGTNGQHAFYQLIHQGTKIIPCDFIAPAQTHNVLSDHHNKLLSNFFAQTEALAFGKTQQEVEAEFIQAGKSLDEVKNIVPFKIFTGNKPTNSILVQKITPFTLGALIAMYEHKIFVQGVIFNIYSFDQWGVELGKQLANRILPELVGDEQINSHDSSTNGLINQFKSWR

SEQ ID NO: 9559 - protein, 164 aa, Derris elliptica
  unsure (1)..(164): unsure at all Xaa locations
AYKFHEDDHGEIVSEIRRSDLEPYLGLHYPATDIPQASRFLFKQNRVRMICDCHAKPVKVIQSEELRQPLCLVNSTLRSPHVCHTQYMANMGSIASLVMAIIVNGNDTTRLWGLLVCHHTSRXYVPFPVRYACEFLMQAFGVQLYMEIQMASQMAEKRMLKTQT

SEQ ID NO: 9560 - protein, 179 aa, Phaseolus vulgaris
GLHYPATDIPQASRFLFMKNKVRMIVDCYAKHVKVLQDEKLPFDLTLCGSTLRAPHSCHAQYMANMDSIASLVMAVVVNDNEEDGDTDAVQPQKRKRLWGLVVCHNTTPRFVPFPLRYACEFLAQVFAIHVNKEIELEYQIIEKNILRTQTLLCDMLMRDAPLGIVSQSPNIMDLVKCD

SEQ ID NO: 9561 - protein, 307 aa, Oryza sativa (japonica cultivar-group)
MGRPPCCEKEGVKKGPWTPEEDMVLASYVQEHGPGNWRAVPPRTGLLRCSKSCRLRWTNYLRPGIRRGGFSHHEERLILHLQALLGNRWAAIASYLPHRTDNDVKNFWNTHLKKKLALTSSSSSPPTPTTPLVARGQWERKLQTDIDLARRALRDALSVDDAASPAMISSGPPAPAAAAAYALSERNISVMLSGWAAPPPARKGLSACNPAAATTTPGGAAAESASTAGTSLELTADCCSGGGDSSASNCLPSSMLLACDDGDATATAAGVAPLSAIESWLLLDDSGEPQLALDEQLLDVALRNYAF

SEQ ID NO: 9562 - protein, 158 aa, Oryza sativa
  unsure (1)..(158): unsure at all Xaa locations
MDPYKHRPSSGSNSTFWTTNSGAPVWNNNSALTVGERGPILLEDYHLIEKLAQFDRERIPERVVHARGASAKGFFEVTHDISHXKCAGFFPWFLXVXTXSYLFXXFQKXXXLGWEAPXEXWGFXGVFXXXFXNGWGXFXXXWGKXXXFFFXXGGFKGG

SEQ ID NO: 9563 - protein, 828 aa, Actinobacillus actinomycetemcomitans
MNLSRRDFMKANAAMAAATAAGLSIPVKNVEAAESEIKWDKAVCRFCGTGCAVLVGTKDGRVVASQGDPDAEVNRGLNCIKGYFLPKIMYGKDRLTQPMLRMKDGKYDKNGDFTPVSWDVAFKTMAEKFKAAVKELGPNGVGMFSSGQTTIFEGYAKSKLWKAGFRSNNIDPNARHCMASAAVAFMRTFGMDEPMGCYNDIEQAEAFVLWGSNMAEMHPILWSRITDRRLSNQDVKVAVLSTFEHRSFELADYSLIFKPHTDLVILNYIINYLIQNDAINRDFVNKHTKFKRGETDIGYGLRPENPLEQKAKNVKTAGKMYDSNFDELKALVAEYTLDKAHEMSGVPKDVLENLAKLYADPKKKVVSYWTMGFNQHTRGVWANHLIYNIHLLTGKISIPGCGPFSLTGQPSACGTAREVGTFIHRLPADLVVTNPKHREKAEQIWKLPAGVITDVLGFHAVAQSRALKDGKMRVLWQMCTNNMQGGPNINRETFPGWRNPDNFIVVSDPYPTVSCLAADLMLPTAMWVEKEGAYGNAERRTQFWRQQVKAPGEAKSDVWQLVEFSKYFTTDEMWPAEILDKNPEYKGKTLYDVLYRNGQVDKFPLSELAEGQLNDESYHFGFYLQKGLFEEYASFGRGHGHDLASFDTYHKARGLRWPVVDGKETLWRYREGYDPYVKEGEGVAFYGYPDKKAIILAVPYEPPAESPDEEYDLWLCTGRVLEHWHTGTMTRRVPELHRSFPNNLVWMHPTDAQKRGLRHGDKVKVASRRGEIISFLDTRGRNKVPEGLIYTTFFDAGQLANKLTLDATDPISKETDFKKCAVKVEKAA

SEQ ID NO: 9564 - protein, 506 aa, Lotus japonicus
MAAAFTCSAADLHPLLGTGANATAAAEFICSRFGAISNKFTDTAYAVDNTYLLFSAYLVFAMQLGFAMLCAGSVRAKNTMNIMLTNVLDAATGGIFFYIFGFALAFGTPSNGFIGKHFFGLNEFPSPSFDYGFFLYQWAFAIAAAGITSGSIAERTQFVAYLIYSSFLTGLVYPIVAHWFWSSDGWGSPARTENLLFGSGVIDFAGSGVVHLVGAVAGFWGAFIEGPRMGRFDHAGKPVPLRGHSGTLVVLGTFLLWFGWYGFNPGSFITILKSYGESGSGNYYGQWSAIGRTAVTTTLAGCSAALTTLFGKRLQTGHWNVTDVCNGLLGGFAAITSGCSVVDPWAAIICGFVAAWVLIGCNVLAEKFHYDDPLEAAQLHGGCGTWGIIFTALFAKKQYVNEVYAGLPDRPYGLLMGGGWRLLAAHVVQILTIAGWVSVTMGAVFFVLHKLNLLRISPEEEMAGLDMTSHGGLAYEYHEDVGSVQKALKFVFDFYCKGNYYKTLLE

SEQ ID NO: 9565 - protein, 507 aa, Shigella flexneri 2a str. 301
MSQQFNPYLCCFRPDTCVNCSRIFSQCLTLCWQEKMVTINTESALTPRSLRDTRRMNMFVSVAAAVAGLLFGLDIGVIAGALPFITDHFVLTSRLQEWVVSSMMLGAAIGALFNGWLSFRLGRKYSLMAGAILFVLGSIGSAFATSVEMLIAARVVLGIAVGIASYTAPLYLSEMASENVRGKMISMYQLMVTLGIVLAFLSDTAFSYSGNWRAMLGVLALPAVLLIILVVFLPNSPRWLAEKGRHIEAEEVLRMLRDTSEKAREELNEIRESLKLKQGGWALFKINRNVRRAVFLGMLLQAMQQFTGMNIIMYYAPRIFKMAGFTTTEQQMIATLVVGLTFMFATFIAVFTVDKAGRKPALKIGFSVMALGTLVLGYCLMQFDNGTASSGLSWLSVGMTMMCIAGYAMSAAPVVWILCSEIQPLKCRDFGITCSTTTNWVSNMIIGAAFLTLLDSIGAAGTFWLYTALNIAFVGITFWLIPETKNVTLEHIERKLMAGEKLRNIGV

SEQ ID NO: 9566 - protein, 103 aa, Anabaena sp.
MSVYVGNLSYDVTEDSLNAVFAEYGSVKRVQLPTDRETGRMRGFGFVEMGSDAEETAAIEALDGAEWMGRDLKVNKAKPKEDRGSFGGGNRGGYGGGGGPNRY

SEQ ID NO: 9567 - protein, 492 aa, Oryza sativa
MDPYKGRPSSSFNGPLWSTNSGAPVWNNNNSLTVGSRGPILLEDYHLVEKLANFDRERIPERVVHARGASAKGFFEVTHDITHLTCADFLRAPGVQTPVIVRFSTVIHERGSPETLRDPRGFAIKFYTREGNWDLVGNNFPVFFIRDGMKFPDMVHSLKPNPKSHVQENWRILDFLSHHPESLHMFTFLFDDIGIPADYRHMDGSGVNTYTLVNRAGKSHYVKFHWKPTCGVKSLLDDEAVTVGGTNHSHATQDLYDSIAAGNFPEWKLFIQTIDPDHEDRFDFDPLDVTKTWPEDIVPLQPVGRMVLNRNIDNFFSENEQLAFCPGSSCRGSTTPTTSCCRRGSSPTPTRSATGWDQNYLVVPANAPKCAHHNNHYDGFMNFMHRDEEVDYFPSRYDPAKHAPRYPIPSATLTGRREKVVIAKENNFKQPGERYRSWDPARQDRFIKRWIDALSDPRLTHEIRSIWLSYWSQADRSLGQKLASRLSAKPSM

SEQ ID NO: 9568 - protein, 412 aa, Shigella flexneri 2a str. 2457T
MKALTYHGPHHVQVENVPDPGIEQADDIILRITVTAICGSDLHLYRGKIPQVKHGDIFGHEFMGEVVETGKDVKNLQKGDRVVIPFVIACGDCFFCRLQQYAACENTNAGKGAALNKKQIPAPAALFGYSHLYGGVPGGQAEYVRVPKGNVGPFKVPPLLSDDKALFLSDILPTAWQAAKNVQIQQGSSVAVYGAGPVGLLTIACARLLGAEQIFVVDHHPYRLRFAADRYGAIPINFDEDSDPAQSIIEQTAGHRGVDAVIDAVGFEAKGSTTETVLTNLKLEGSSGKALRQCIAAVRRGGIVSVPGVYAGFIHGFLFGDAFDKGLTFKMGQTHVHAWLGELLPLIEKGLLKPEEIVTHYMPFEEAARGYEIFEKREEECRKVILVPGAQSAEAAQKAVSGLVNAMPGGTI

SEQ ID NO: 9569 - protein, 122 aa, Triticum aestivum
  unsure (1)..(122): unsure at all Xaa locations
MAPTVMASSATSVAPFQGLKSTAGLPVSRRSNGASSAAXHNGGRIRCMQVWPIEGIKKFETLSYLPPLSTEALLKQVDYLIRSKWVPCLEFSKVGFIFREHNASPGYYDGRYWTMWXLPMFG

SEQ ID NO: 9570 - protein, 179 aa, Glycine max
  unsure (1)..(179): unsure at all Xaa locations
MASSMISSPAVTTVNRAGAGMVAPFTGLKSMAGFPTRKTNNDITSIASNGGRVLCMQVWPPIGKKKFETLSYLPDLDDAQLAKEVEYLLRKGWIPCLEFELEHGFVYREHYRSXLEYYDGRYWTMWKLPMFGCTDASQVLKELQEAKTAYPNGFIRIIGFDNVRQVQCISFIAYKPPGF

SEQ ID NO: 9571 - protein, 65 aa, Glycine max
MGIFGCSLFKHVEPITFCGKTPGKIVPPRGPSDFGWDPILDPEGYHQAFPQIPKEENTKFYHCSK

SEQ ID NO: 9572 - protein, 454 aa, Actinobacillus pleuropneumoniae serovar 1 str. 4074
MTIKTPVQAVLASNQYFLDRQDAMESNVRSYPRKLPFAYQKAQGVWVTDVEGNEYLDFLAGAGTLALGHNHPVLMQSIKDVLDSGLPLHTLDLTTPLKDAFTEELLSFFPKDQYILQFTGPSGADANEAAIKLAKTYTGRGNVIAFSGGFHGMTHGALSLTGNLSAKNAVQNLMAGVQFMPYPHEYRCPFGIGGEVGAKAVEHYFENFIEDVESGVVKPAAVILEAIQGEGGVVPAPISFLQKVREVTQKHGILMIVDEVQAGFCRSGKMFAFEHAGIEPDVVVMSKAVGGSLPLAVLAIRKEFDAWQPAGHTGTFRGNQLAMATGYASLKIMREENLAQNAQERGEYLTNALRELSKEFPCIGNVRGRGLMMGIDIVDERKPQDATGAYPQDGELAVAIQKACFNNKLLLERGGRGGNVVRVLCAVNINQAECEEFIKRFKQSVADALKAVRG

SEQ ID NO: 9573 - protein, 228 aa, Zea mays
  unsure (1)..(228): unsure at all Xaa locations
PAPDYPLWTAAVXSLSSGKAVHYLCDESAGWFPDLDDIRSKITPRTRGIVIINPNNPTGAVYSKELLLEIVEIARQHNLIIFADEIYDKILYDEAQHHSIAALAPDLLTVTFNGLSKTYRVAGFRQGWMVLNGPKKHAKGYIEGLEMLASMRLCANVPAQHAIQTALGGYQSISEFIAPGGRLFEQRQRAWELINDIPGVSCVKPQGALYMFPRIDAKKFNIMDDQKM

SEQ ID NO: 9574 - protein, 231 aa, Zea mays
MMNCDGGGDPVEDFLISGAVDDEDLAIFCDGGLGIEGVNGDACGFEQSNLGKRGRDEPCSSGLKSKACREKMRRDKLNDRFLELSAVMNPGKQAKLDKANILSDAARMVAQLRGEAEKLKESNEKLRENIKDLKEEKNELREEKVRLKVEKDRLEQQVKAMSVAPTGYVPHLPHPASYHPAAFAPFVPPQQAAGNKSAPIPAPFPGMAMWQWLPPTIVDTTQDPKLWPPNA

SEQ ID NO: 9575 - protein, 135 aa, Haemophilus influenzae
EDPTPALEGADVVLISAGVARKPGMDRSDLFNINAGIVRGLIEKVATTCPKACVGIITNPVNTTVAIAAEVLKKSGVYDKRKLFGVTTLDVLRSETFVAELKGLNVSRTSVPVIGGHSGVTILPLLSQVQYAEWN

SEQ ID NO: 9576 - protein, 349 aa, Actinobacillus pleuropneumoniae serovar 1 str. 4074
MMKMRAAVVAPQCDGTVEIVERDIPEIKNGEALVEVEYCGVCHTDLHVAAGDYGKKPGRILGHEGIGIVKSIAPDVTNLKVGDRVSIAWMFESCGSCEYCTTGRETLCRSVKNAGYTVDGGMATHCVVTADYAVKVPDGLDPAQASSITCAGVTTYKGIKVSGVRAGQWIAIYGAGGLGNLAVQYAKKVFGARVIAIDINDDKLAFAKEVGADLTINPLKEDSVQVIQEKVGGAHAAVVTAVSKVAFNAAVNCVRAGGRVVAIGLPPETMDLSIPRIVLDGIEIVGSLVGTRQDLAEAFQFGAEGLVVPLVQLRRLDEANDIFQEMRDGKIQGRMVIDMKKGCGCGCSH

SEQ ID NO: 9577 - protein, 84 aa, Hordeum vulgare subsp. vulgare
DDVGIPLNYRHMDGFGVNTYTLISRDGKAHLVKFHWKPTCGVKCLLDDEAVTVGGTCHTHATKDLTDSIAAGNYPEWKLFIQTI

SEQ ID NO: 9578 - protein, 189 aa, Triticum aestivum
LDRPLLPSPRAPPSPSSSSIPMQQRRGRPSGTDGSDFSYRMVVDSRYQRVADGRSRLARLMLVQTLHQVAGGALLLLSLSKGTEINKFAVLSLAAGLLAILLGEFGRRRTVAVFLRLYTSLSSIAIAFSVTCIIRSDLFVKITKQNTADITSYEMFDVVRVALGVLLQLVVIATTTRLLQNMSPPKRTS

SEQ ID NO: 9579 - protein, 403 aa, Zea mays
MATATSASLFSTVSSSYSKASSIPHSRLQSVKFNSVPSFTGLKSTSLISGSDSSSLTKTLRGSVTNAQTSDKKPYGFKINASYKVAVLGAAGGIGQPLSLLIKMSPLVSTLHLYDIANVKGVAADLSHCNTPSQVRDFTGPSELADCLKDVNVVVIPAGVPRKPGMTRDDLFNINANIVKTLVEAVAENCPNAFIHIISNPVNSTVPIAAEVLKKKGVYDPKKLFGVTTLDVVRANTFVSQKKNLKLIDVDVPVIGGHAGITILPLLSKTKPSVNFTDEEIQELTVRIQNAGTEVVDAKAGAGSATLSMAYAAARFVESSLRALDGDGDVYECSFVESTLTDLPFFASRVKIGKNGLEAVIESDLQGLTEYEQKALEALKVELKASIDKGVAFANKPAAAAAN

SEQ ID NO: 9580 - protein, 230 aa, Emericella nidulans
MSSGRVSEATNITQPPAYSKKFVVVGDGGCGKTCLLISYSQGYFPEKYVPTVFENYITQTLHRRSGKTVELALWDTAGQEEYDRLRPLSYPETDLLFVCFAIDCPASLENVMDKWYPEVLHFCPTTPIILVGLKSDLRNKRTCIELLKTQGLTPVTPEQGQAVAGRMNASYVECSSKEMRGVDSVFQLAVDTVVSLEEQNWDTRLPSSSGKPGGKPIGGKKIKKRSCKIL

SEQ ID NO: 9581 - protein, 572 aa, Oryza sativa
MARREAAAVAGEGEEESGGGERQGKRGGRWRRQAGRRRRRMGDEDSDKKKLEAKRKALASSISYSAGKSSIFLLCLFAGYLGIPGRKFHLLKTTSSLTRTIAQDPELFTAKIILPMGPPDVISENDEFDFSDVFGTTPVQTPTGISVAGPDSPAPLAESNEGVYNDPIVIIKRSHSLVGPTSLVSQSLRLSNLTLNKTEGSSEPAEEKERNLGQLSDEEFDNATTENEGIGLDDFEILKLVGQGAFGKVFQVRKKGTSEIYAMKVMRKDKILEKNHAEYMKAERDILTKVDHPFVVQLRYSFQTKYRLYLVLDFINGGHLFFQLYKQGLFREELARIYTAEIVSAVAHLHDNGIMHRDLKPENILLDADGHAMLTDFGLAKEFNENTRSNSMCGTVEYMAPEIILGRGHDKAADWWSVGILLFEMLTGKPPFVGNRDKVQQKIVKEKLKLPSFLSSEAHSLLKGLLHKEGGKRLGSGPGGSDEIKRHKWLKPINWRKLEARQIQPSFRPNVSGLTCIANFDECWTSMPVLDSPVATPVAGGAGHSSFAGFTYVRPAPFLQDVKPPSSSRLKD

SEQ ID NO: 9582 - protein, 243 aa, Sphingomonas paucimobilis
MASFLMIHGAWHGGWCFERLRRPLEARGHAMAAPDLPGMGGDARALAAATLDRWADFAIAQADTLPGPVILCGHSRGGLVVSRAAERAPEAFAALVYVAALLCEDGRSLYDMMGEPQHGGFSDGLSPVADGLGVALSAQAAIPLFYSHCEPQVQAVSAARLVAEPVRPLGTPVRVTPERFGRVPRHYVECIHDRVLPLATQRAMTAALPCASVTTLDSDHSPFLCVPDALAGALTTIAERTQA

SEQ ID NO: 9583 - protein, 467 aa, Chlorobium tepidum TLS
MSTKFDVIIIGGGPGGTPAAMQLASQGKTVLLVEESGKLGGACLFVGCIPSKIIRHWADEYAVKLKYSAQEALSPEDREAAWNEIMRKMQTILSQRSGAAMQMLKHLSNLRFVAGHAKFVSNNELVINEKDTGRKEKYTFNKAIIATGSHSFIPPFKGNGVQDVLTSEVLFSQDKLPESLLIIGGGPIGIELAQMLTKLGTKCTIIELLDSILYGVVETEFVSIISNQLSSLGVNIYTSSQVQEINKSDGHFDVTFTDANGSEHKENFEDVLVVTGKVPNIESLNLDSTDIKYDRKGIIVDEYLETSVKGIYATGDVTHGPKFAHTATYEAHIASANISAGNNQKVDFSKNTWVLFSEPEIVAAGFTEAQAVQEGYDIITGVYDYKIDAAAQVMNSPFGYLKYVVNKKNSEIIGVHICMNNASSLAGEASLIIANRLILKNVAETIHPHPTLTEAFGILAQKMLSKS

SEQ ID NO: 9584 - protein, 427 aa, Chlorobium tepidum TLS [sequence omitted]

SEQ ID NO: 9585 - protein, 569 aa, Zea mays
IPGRTGRARAAVSVPPPAGEQVPTERLEPRVEERAGGYWVLKEKYRAGLNPQEKVKLEKEPMALFMEGGIQDLARVPMEQIDAAKLTKDDVDVRLKWLGLFHRRKHQYGRFMMRLKLPNGVTTSEQTRYLASVIEAYGADGCADVTTRQNWQIRGVTLPDVPAILDGLRAVGLTSLQSGMDNVRNPVGNPLAGVDPHEIVDTRPYTNLLSSYVTNNSQGNPTITNLPRKWNVCVIGSHDLYEHPHINDLAYMPAVKDGEFGFNLLVGGFISPKRWAEALPLDAWVAGDDVVPVCKAILEAYRDLGSRGNRQKTRMMWLIDELGMEVFRSEVEKRMPNGVLERAAPEDLVDKRWERRDYLGVHPQKQEGLSYVGLHVPVGRLQAADMFELARLADEYGTGELRLTVEQNIVLPNVSNERLDALLAEPLLQEQRLSPRPSMLLRGLVACTGNQFCGQAIIETKARALQVAREVEKRVAVPRPVRMHWTGCPNSCGQVQVADIGFMGCLTKDSDGKIVEAADIFVGGRVGSDSHLADVYRKSVPCKDLVPIVADLLVERFGAVPREREEDEE

SEQ ID NO: 9586 - protein, 432 aa, Lactobacillus gasseri
MSVITDIHAREVLDSRGNPTVEAEVYTELGGFGRAIVPSGASTGEHEAVELRDGDKSRFGGQGVLTAVENVNGEIAKAVIGLDVTDQRLIDQTMIDLDGTPNKGRLGANAILSVSLASARAAADELGLPLYEYLGGPNAHVLPTPMMNVINGGKHADNNVDIQEFMIMPVGAKSLHEAVRMGAETFHTLKGLLQERGESTAVGDEGGFAPNLKNNEEPFEILVEAIQRAGYKPGQDIAIAFDCAASEFYNKDTKKYVTVADGREYTAEEWTSLIEDLVDKYPVISVEDPLDENDWEGWKTFTERLGDKVQIVGDDLFVTNTSYLEKGIKMGVANSILIKLNQIGTLTETFEAIEMAKEAGYTAVVSHRSGETEDTTIADLVVATNAGQIKTGSMSRTDRIAKYNQLMRIEEALGSTAQYKGIHSFYNLHKQF

SEQ ID NO: 9587 - protein, 522 aa, Oryza sativa
MDSGLGRSSETSLKALPSMASNATRNTDPDQQGVRFSSMDQPPCFARPGQSFPAFPPLFGVQSSSLYLPDDIEAKIGNQFESNPSPNNPTMDWDPQAMLSNLSFLEQKIKQVKDIVQSMSNRESQVAGGSSEAQAKQQLVTADLTCIIIQLISTAGSLLPSMKNPISSNPALRHLSNTLCAPMILGTNCNLRPSANDEATIPDISKTHDYEELMNSLNTTQAESDEMMNCQNPCGGEGSEPIPMEDHDVKESDDGGERENLPPGSYVVLQLEKEEILAPHTHFCLICGKGFKRDANLRMHMRGHGDEYKTAAALAKPSKDSSLESAPVTRYSCPYVGCKRNKEHKKFQPLKTILCVKNHYKRSHCDKSYTCSRCNTKKFSVIADLKTHEKHCGRDKWLCSCGTTFSRKDKLFGHVALFQGHTPALPMDDIKVTGASEQPQGSEAMNTMVGSAGYNFPGSSSDDIPNLDMKMADDPRYFSPLSFDPCFGGLDDFTRPGFDISENPFSFLPSGSCSFGQQNGDS

SEQ ID NO: 9588 - protein, 257 aa, Pirellula sp. 1
MTRKPLIGLNADFRAAARSTPAFAYIASGYYQAIINAGGIPVLVPPQADEESVSRVLDAVEGFLFIGGGDLDPRNDGFMLHPSVHPMDAARETSDRMLMAEIAERRMPVFGIGVGMQLINVQQGGNLFLHIKEDLPEAVPHFDAQDVNHRHTLNVESDSLIGRVYGDGEIRVTSRHHMAIDEVAPGFRVTARCPDGVIEAIESEMIDWFALGTQFHPESEAASALDIRIFEEFVDAVRDRNQDAPAKEGDEAYRLVA

SEQ ID NO: 9589 - protein, 196 aa, Fucus distichus
MQNIKCVVVGDGAVGKTCLLISYTTNAFPGEYIPTVFDNYSANVMVDGKPINLGLWDTAGQEDYDRLRPLSYPQTDVFLVCFSVVDPTSFHNVKLKWIPELQHHAPGIPFILVGTKLDLRDDQDAIKRLAERRQTPISFSEAQGLSSDLEAYRYLECSALTQHGLKQVFDGAIRCVLEQNQRKMKKKKGKKGCVIS

SEQ ID NO: 9590 - protein, 1049 aa, Oryza sativa
  unsure (1)..(1049): unsure at all Xaa locations
MSSSRSNNRATCSRSSSARSKHSARVVAXTPMDAQLHAEFEGNVSAYLQNMQRGRFVQPFGCLLAVHPETFALLAYSENAAEMLDLTPHAVPTIDQREALAVGTDVRTLFRSHSFVALQKAATFGDVNLLNPILVHARTSGKPFYAIMHRIDVGLVIDLEPVNPVDLPVTATGAIKSYKLAARAIARLQSLPSGNLSLLCDVLVREVSELTGYDRVMAYKFHEDEHGEVIAECKRSDLEPYLGLHYPATDIPQASRFLFMKNKVRMICDCSATPVKIIQDDSLTQPISICGSTLRAPHGCHAQYMASMGSVASLVMSVTINEDEDDDGDTGSDQQPKGRKLWGLMINKEVELAAQAKERHILRTQTLLCDMLLRDAPVGIFTQSPNEYHDGSTGLSTDSLVEAGYPGAAALGDVVCGMAAIKISSKDFIFWFRSHTAKEIKWGGAKHEPIDADDNGRKMHPRSSFKAFLEVVKWRSVPWEDVEMDAIHSLQLILRGSLQDEDANKNNNAKSIVTAPSDDMKKIQGLLELRTVTNEMVRLIETATAPILAVDITGSINGWNNKAAELTGLPVMEAIGKPLVDLVIDDSVEVVKQILNSALQGIEEQNLQIKLKTFNHQENNGPVILMVNACCSRDLSEKVVGVCFVAQDMTGQNIIMDKYTRIQGDYVAIVKNPSELIPPIFMINDLGSCLEWNEAMQKITGIKREDAVDKLLIGEVFTHHEYGCRVKDHGTLTKLSILMNTVISGQDPEKLLFGFFNTDGKYIESLMTATKRTDAEGKITGALCFLHVASPELQHALQVQKMSEQAAMNSFKELTYIRQELRNPLNGMQFTRNLLEPSDLTEEQRKLLASNVLCQEQLKKILHDTDLESIEQCYTEMSTVDFNLEEALNTVLMQAMPQSKEKQISIDRDWPAEVSCMHLCGDNLRLQQVLADFLACMLQFTQPAEGPIVLQVIPRMENIGSGMQIAHLEFRLVHPAPGVPEALIQEMFRHSPGASREGLGLYISQKLVKTMSGTVQYLRESESSSFIVLVEFPVAQLSTKRCKASTSKF

SEQ ID NO: 9591 - protein, 122 aa, Triticum aestivum
  unsure (1)..(122): unsure at all Xaa locations
LKSTAGLPVSRRSNGASLGSVSNGGRIRCMQVWPIEGIKKFETLSYLPPLSTEALLKQVDYLIRSKWVPCLRFSKLXHLXXEHNASPGYYDGRYWAMWNCLCSGCTDATQVINEGGGVKKDT

SEQ ID NO: 9592 - protein, 559 aa, Zea mays
MPTLYFFRLNKIKSPCSCVMAGHHHNNTHASRMDHVNRFQSEAQPFGPKLFMHSRTDAANGALPSGYVGAPIRPNGIPFSSHTGQSHIQHSDAPGTMLASYSGYPLAGSSSSTYAPHNTHHLPALSYPHRSDDNFILSSHMDDRRVALKRRNPIIYPVDGVNNGSCYAGSSSNPQFPCYMPPNPIPAPEPCPPRITSNMGSSYWTDQPFGSNGGSQRNVRGRHDHNPIHLGHNPGVACATSSTHGPPHHANVIGPQSTAVPQNRAYFSIPPRVTAPGSDGNCSMVFREGTYYSAPQRTNINAPPVLAPPGSSDSLHFVHGGYAPRAAPPNSISTYPAPAFATPNNSVTVTHEPDIPCYRPAVPGYPPATSAAAAAASVHAEGAAASSRHLGHVALGSSGSARSRRLRDSYHAFRPLVIEENNLRGPATERFMMLNQLFIHESREDSDPHWDMRLDIDDMSYEELLALGERIGNVNTGLADEKLSSCVTEIPCCSSARTHDDNESARCVICLEDYKFEDSVGKLKCNHKYHADCIKKWLQVKNACPVCKASAADDGGGTE

SEQ ID NO: 9593 - protein, 306 aa, Oryza sativa
MCGILAVLGVADVSLAKRSRIIELSRRLRHRGPDWSGIHCYQDCYLAHQRLAIVDPTSGDQPLYNEDKSVVVTVNGEIYNHEELKANLKSHKFQTASDCEVIAHLYEEYGEEFVDMLDGMFAFVLLDTRDKSFIAARDAIGICPLYMGWGLDGSVWFSSEMKALSDDCERFISFPPGHLYSSKTGGLRRWYNPPWFSESIPSTPYNPLLLRQSFEKAIIKRLMTDVPFGVLLSGGLDSSLVASVVSRHLAEAKVAAQWGNKLHTFCIGLKGSPDLRAAKEVADYLGTVHHELHFTVQEGIDALEEV

SEQ ID NO: 9594 - protein, 312 aa, Agrobacterium tumefaciens str. C58
MPMALGHEAAGVVEALGEGVRDLEPGDHVVMVFMPSCGHCLPCAEGRPALCEPGAAANAAGRLLGGATRLNYHGEVVHHHLGVSAFAEYAVVSRNSLVKIDRDLPFVEAALFGCAVLTGVGAVVNTARVRTGSTAVVIGLGGVGLAAVLGARAAGASKIVAVDLSQEKLALASELGATAIVNGRDEDAVEQVRELTSGGADYAFEMAGSIRALENAFRMTKRGGTTVTAGLPPPGAALPLNVVQLVGEERTLKGSYIGTCVPLRDIPRFIALYRDGRLPVNRLLSGRLKLEDINEGFDRLHDGSAVRQVIEF

SEQ ID NO: 9595 - protein, 561 aa, Thiocapsa roseopersicina
MSAPIHENERIKARSNCLRGTLRESLADTLTGAISPEDTQISKFHGFYQQDHRDRRQARPEQYLEPYFGFMLRAPLPGGVCTPAQWLAIDGMGRELGGGSLRLTTRQSFQYHGILKRDIASVIRGINAVMIDSIGGCGDVNRNVLCNPNPVESALHREVYDWAKRISEHLLPRTRAYHEIWLDGEQVGGGEDVEPIYGRTYLPRKFKTAVGVPPHNDVDVYANDLGFAAVADGSRLIGFNVSAGGTGRNTGIPATFPRLADVLGFVEPERTLAVAEAVVTTQRHFGDRLDRTQARLKYTIERMGLDAFRDEVERRAGIRFAPARPIGFTDQGDRTAWVRGQDGRWHLTLYIESGRLIDGPGQSSMQGLREIARIHQGDFRITPNQNLIVARVPEPGKSEIEALARKYGLLDKGIALRLNGMSCVALPTCPLAMAEAERYYPDFLAQVERLTRKHGLAEQEIVTRMTGCPNGCARPYLAELALVGKGPGRYNLMLGGNGRRYRLNRLYRENLDEAAIAILAEIDTLLGRYAACRQPGERFGDYLIRDGIVRPVVNPAEDFHE

SEQ ID NO: 9596 - protein, 403 aa, Lactobacillus gasseri
MAKLIVSDLDLKGKKVLVRVDFNVPIKNGVIGDDNRIVAALPTIKYIIEHGGKAILLSHLGRVKSDADKKELSLRPVAERLSELLKKPVTFVPENEGKEVEETIDKMKDGDVIVLENTRFQDIDNDFGKRESKNDPKLGEYWASLGDVFVNDAFGTAHRSHASNVGIATAMKKAGKPAAAGFLLEKEIKFLGDAVENPVHPFVTILGGAKVSDKIGVIENLIPKSDHILIGGGMAYTFLAAQGHKIGKSLFEADKVELAKELLAKAGDKIVLPVDNVAATEFSNDAPHEVVGDDIPDNEMGLDIGPKTVEKFRDILKDAKTVVWNGPMGAFEMPNYAEGTLEVGRALADLKDAVTIIGGGDSTAAAKQLGIAPKISHISTGGGASLNYLEGKELPGIACVSDK

SEQ ID NO: 9597 - protein, 253 aa, Arthrobacter ilicis
MASSVGNDFEGLAALVTGGASGIGAAIADRLAAGGAKVAVLDLAPETSPHFGVQCNVADDASVRTAVERVVQQFGRLDIVINNAGIGAQGDIAANDDDEWLRVLNVNVVGIARVSRAALPHLRESPAAAIVNTCSIAATAGLPQRALYSASKGAVLSLTLAMAADHVREGIRVNCVNPGTVDTPWVGRLLDSAADPAGERAALNARQPHGRMVVPAEVAGAVAYLASPLSGSTTGTSLAVDGGMQGLRLRPVQ

SEQ ID NO: 9598 - protein, 446 aa, Triticum aestivum
MAATIQSVKARQIFDSRGNPTVEVDVCCSDGTFARAAVPSGASTGVYEALELRDGGSDYLGKGVSKAVDNVNSIIAPALIGKDPTAQTELDNYMVQQLDGTKNEWGWCKQKLGANAILAVSLAVCKAGASVKKIPLYQHIANLAGNKQLVLPVPAFNVINGGSHAGNKLAMQEFMILPTGAASFKEAMKMGVEVYHNLKSVIKKKYGQDATNVGDEGGFAPNIQENKEGLELLKTAIEKAGYTGKVVIGMDVAASEFYNDKDKTYDLNFKEENNDGSQKISGDSLKNVYKSFVSEYPIVSIEDPFDQDDWVHYAKMTEECGVEVQIVGDDLLVTNPTRVAKAIKEKSCNALLLKVNQIGSVTESIEAVKMSKHAGWGVMTSHRSGETEDTFIADLAVGLSTGQIKTGAPCRSERLAKYNQLLRIEEELGAAAVYAGLKFRAPVEPY

SEQ ID NO: 9599 - protein, 231 aa, Hordeum vulgare subsp. vulgare
TVESVGEGVTDVAPGDHVLAVFTGECKECPHCKSAESNMCDLLRINTDRGVMNRDGKSRFFIGGKPIYHFVGTSTFSEYTVMHVGCVAKINPEAPLDKVCVLSCGISTGLGASINVAKPPKGSTVAIFGLGSVGLATAEGARIAGASRIIGIDLNAFRFEEARKFGCTEFVNPKAHTKPVQQVLADMTNGGVDRSVECTGNVNAMIQAFECVHDGWGVAVLVGVPHKDAEF

SEQ ID NO: 9600 - protein, 229 aa, Glycine max
  unsure (1)..(229): unsure at all Xaa locations
FGTRKLFVHTIYPEHEDKSDFDPLDVTKTWPEDMIPXQPDGRWVLNKNIDNFFAENEQLAFCPAIVVPGVYYSDDKMLQTRIFSYADSQRHRLGPNYLQLPANAPKCAHHNNHHEGFMNFIHRDEEVNYFPSRYDPVRHAERFPIPPAICSGRREKCGIEKENNFKQPGERYRFWAPDRQDRFARRWVDALSDPRVTHEIRSVWISYWSQADRSLGQKIASHLSTRPNI

SEQ ID NO: 9601 - protein, 416 aa, Kluyveromyces lactis
MSLSSKLTVKDLDVTGKRVFIRVDFNVPLDGKKITSNQRIVAALPTIQYVLEKKPKAIVLASHLGRPNGEVNDKYSLAPVADELSRLLQKPVTFLHDCVGEEVTNAVNNAKDGEVFLLENLRFHIEEEGSRKVDGNKVKADKAAVTKFREQLSSLADVYVNDAFGTAHRAHSSIVGFDLPNRAAGFLLSKELQYFAKALENPTRPFLAILGGAKVADKIQLIDNLLDKVDSLIIGGGMAFTFKKVLENTEIGDSIYDAAGAELVPKLVEKAKKNNVKIVLPTDFVIGDKFSADANTKVVTDKEGIPSGWQGLDNGPESRKAFAATVAEAKTIVWNGPPGVFEFAPFAKGTEALLDAVVASSQAGNNVIIGGGDTATVAKKYGVVDKISHVSTGGGASLELLEGKELPGVTFLSNKQ

SEQ ID NO: 9602 - protein, 135 aa, Triticum aestivum
  unsure (1)..(135): unsure at all Xaa locations
GGXGARVILPDGXVRRVSLXXTAAXLMXDAPGHFVAETRHARVGTRLEALHADEDLEMGVVXATFPMNRIGTKAGXADMARLAAAXXREARRSAKVSSVXVRAAAXKGAATKPGITGRGSGVKPVDKLLNRGPGI

SEQ ID NO: 9603 - protein, 106 aa, Zea mays
MEHGSLTDSTSSTFSIMDEDHTLANSARFVLNQDPRVAFCGYTIPHPSEKKVNIRLQTTGDAAKDVLKDALQNLMIMCQHVRGTMDTAVVNHRAKNAAEEMDVDQN

SEQ ID NO: 9604 - protein, 353 aa, ASPERGILLUS NIDULANS FGSC A4
MRAVRFHGRRDIRVDQIDEPSCAEGQVKIRPAFVGICGSDLHEYLSGPIAIPTTPHPLTGAQLPVTLGHEFSGTIEEVGQGVTGFKVGDRVAVRPNLSDGTCASCVYGRPNCCRSLGFIGFSSNSGGLSDYVTVPAKHAILLPESVPLDLGALVEPLTVAWHAVARSPHETARTALVVGGGPIGLAVVQVLKARGVQTVVVAEVSTQRREYALTLGATHVFNPLTDDVVARVRSLTDNAGADISFECSGVQAGFDTAMNGIRVRGTTTIVSLWEKKPMIDAFDVVSYEKHVIGAAICDDGDFEAVIGAIKDGKLNPRPMITSKIRMEDVEEKGFKALVDEKDKHVKILIDIAA

SEQ ID NO: 9605 - protein, 404 aa, Haemophilus somnus 2336
MRVFPKSDKLEHVCYDIRGPVHQEALRLEEEGKKILKLNIGNPAPFGFEAPDEILVDILRNLPAAQGYCDSKGLYSARKAIVQYYQSKNILSATVNDVYIGNGVSELITMSLQALLNDGDEVLIPMPDYPLWTAAATLAGGKAVHYLCDEQADWFPDVADIKSKVTSRTKAIVIINPNNPTGAVYSKELLLDIVEVARQNGLMIFADEIYDKILYDNAVHHHIAALAPDLLTVTFNGLSKSYRVAGFRQGWMILNGPKQQAKGYIEGLDMLASMRLCANHPMQHAIQTALGGYQSINEFILPGGRLLEQRNKAYELINQIPGLSCTKPMGALYMFPKIDTKKFNIYDDEKMVLDLLRQEKVLLVHGRGFNWQQPDHFRIVTLPYVNQIEDALGRLAKFLTHYRQ

SEQ ID NO: 9606 - protein, 383 aa, Daucus carota
VFLFSILVAHSHVSASSQTCDFPAIFNFGDANSDTGAFAAWFFGNPPFFGQSYFNGSAGRVSDGRLLIDFMATDLGLPFLHPYMDSLGANFSHGANFANILSTIALPTSNIIPGVRPPRGLNPVNLDIQVAQFAQFVNRSQTQGEAFDNFMPKQDYFSQALYTLDIGQIDITQEFLTNKTDDEIKAVVPGLISSLSSNIQILYSLGGRSFWIHNLGPNGCLPILWTLAPVPDDQIDSAGCAKRYNDLTQYFNSELKKGVDQLRTDLPLAAVTYVDVYTAKYSLYQEPAKYGFTHPLETCCGFGGRYNYGEFSLCGSTITVNGTQLAVGPCENPAEYINYEGQTYTQAADQITFNKISTGELSDPPNSLKTACPKLSLPRVSDI

SEQ ID NO: 9607 - protein, 217 aa, Chloroflexus aurantiacus
MQIYLDTANLAEIREAASWGILSGVTTNPTLIAREKGADFKAIITEIAELVDGPISAETISLDAEGMVREGLEYASWHPNVIIKVPSTTEGLRAVSQLAKHGIRCNVTLCFNSVQALLAARAGAFIISPFVGRVDDTGVDGMALIREIAGIYRQDREITTKILAASIRHPRHIVEAALAGADIATCPFKVLQQAMRHPLTDRGIEQFLADWKSRMSS

SEQ ID NO: 9608 - protein, 244 aa, Daucus carota
MGRFSVFSVFLVSILVAHCTSQVSAAAADTCKFPAIFNFGDANSDTGAFAAWFFGNPPFFGQSFFGGSAGRVSDGRLLIDFMATKLGLPFLHPYMDSLGADFAHGANFAEILSTIALPPANNIIPGVRPPRGLNPINLDIQVAQFAQFINRSQTIRQRGGVFKKFMPKAKYFSQALYTIDMGQIDITQLFLNNKTDEEIKAAVPALIASLSSNIKIIYSLGARSFWIHNLGPNGCLPILLTLAP

SEQ ID NO: 9609 - protein, 302 aa, Desulfovibrio vulgaris subsp. vulgaris str. Hildenborough
MKGIVLAGGSGTRLAPITRGVCKQLMPVYDKPMIYYPLSMLLLAGIRDICIITTPGDQPRFQELLGDGSQFGVCFTYVVQPSPDGLAQAFLLARDFLAGEPCCLILGDNLFYGDRLPSLLRRCANLTEGGTVFGYKVRDPERYGVVEFDADSRVLSIEEKPAKPKSRYAVTGLYFYDGAVADMAATLKPSARGELEITDLNNLYLREGRLKVEFLGRGIAWLDTGTFESLHQASSFVRAVQNRQGLKISCLEEIAYRMGYIDAAELERLAAPMLKNDYGQYLMDILHDRAVDCARVTCAADL

SEQ ID NO: 9610 - protein, 316 aa, Buchnera aphidicola str. APS (Acyrthosiphon pisum)
MNQLSALKQFSIIVADTSDIKSICKYQPEDATTNPSLILQAVSSNTNQNFVDQAVQYAKKKGGLYKDQIINASDKILVDLGIEILKKIPGYISSEVDARLSFSTEASILKAKKIIDLYEEQGISRNRVLIKLAATWECIKAAEELKKDSILCNLTLLFSFAQARACAESNVFLISPFVGRIYDWYISQNLLSKSFLGKDPGVISVCKIYEYYKKYGYKTIIMGASFRNIQQILYLSGCDRLTISPVLLKELESNTAKIDRNLAPPSFISVPPVALSEEEFRWEHNQDAMAVQKLSDGIRNFGKDQLRLEKIFSKKI

SEQ ID NO: 9611 - protein, 367 aa, Zea mays
MGSLASERKVVGWAARDATGHLSPYSYTLRNTGPEDVVVKVLYCGICHTDIHQAKNHLGASKYPMVPGHEVVGEVVEVGPEVAKYGVGDVVGVGVIVGCCRECSPCKANVEQYCNKKIWSYNDVYTDGRPTQGGFASTMVVDQKFVVKIPAGLAPEQAAPLLCAGVTVYSPLKHFGLTTPGLRGGILGLGGVGHMGVKVAKAMGHHVTVISSSSKKRAEAMDHLGADAYLVSSDAAAMGPAADSLDYIIDTVPVHHPLEPYLALLKLDGKLVLLGVIGEPLSFVSPMVMLGRKAITGSFIGSIDETAEVLQFCVDKGLTSQIEVVKMGYVNEALERLERNDVRYRFVVDVAGSNVEAEAAAADAASN

SEQ ID NO: 9612 - protein, 563 aa, Haemophilus influenzae Rd KW20
MRLKFQLFLMKGNTMKNINPTHTHAWKSLEAHKAELSNITIQDLFKQEKNRFDDYSLTFNNQILIDFSKNNINQTTLSHLRQLAQECALDSAKEAMFTGEKINRTENRAVLHTALRNRTNTPVLVDGKDVMPEVNAVLAKMKDFCQRIISGEWKGYTGKAITDVVNIGIGGSDLGPYMVTEALRPYKNHLNMHFVSNVDGTHIAETLKKVNPETTLFLVASKTFTTQETMTNAQSARDWLLKAAKDESAVAKHFAALSTNAKDVEKFGIDTNNMFEFWDWVGGRYSLWSAIGLSIALSIGFENFEALLNGAHEMDKHFLSTPIEQNIPTTLALVGLWNTNFLGAQTEAILPYDQYLHRFAAYFQQGNMESNGKYVDRDGNVIKNYQTGPIIWGEPGTNGQHAFYQLIHQGTTLIPCDFIAPAQRHNPLADHHNKLLSNFFAQTEALAFGKTKEEVEAEFVKAGKSLDDVKNIVPFKVFTGNKPTNSILVQKITPFTLGALIAMYEHKIFVQGVIFNIFSFDQWGVELGKQLANRILPELTDSEKVASHDSSTNGLINQFKAWR

SEQ ID NO: 9613 - protein, 277 aa, Agrobacterium tumefaciens str. C58
MHNVTANGATIPALGFGTFRIPGSDVLRIVPHALKVGFRHVDTAQIYGNEAEVGEAIANSGVARGDIFLTTKVWVENYGHDAFIKSVDESLKKLKTDYVDLLLLHWPNEAVSLAEQIGALNEVKEAGKVRHIGVSNFNTELMAESVKLSRAPIVTNQIEYHPYLSQDVVIAAARKAGMSVTGYFGMADGKVFNDPVLRDIGARHGKSVAQVVLRWLVQQEGVIALSKTVGEARVLENFAIFDFALSADEMAAIHALAVPGGRIVSPDGLAPVWDKAA

SEQ ID NO: 9614 - protein, 298 aa, Xanthomonas axonopodis pv. citri str. 306
MDSQTDEPLDEARADRIDWLRAVPFIALHLACLAVFWVGASWFAVGMAVALYALRMFALTGFYHRYFSHRAFKTSRVLQFVFAAIGATCVQRGPLWWAAHHRNHHRHTDTGRDPHSPAQHGFWWSHTGWFLTPRNFRTDWEVIPDLRRFAELRFLDRFDIVMPVLLALGLYLLGDWLAVAAPALKTSGAQLLVWGFVISTVALFHATFTINSLAHRFGSRRFDTRDDSRNNWLLALLTFGEGWHNNHHFFPGSARQGLRWWEYDMTWYGLTAMSWVGLVWDLKPMPKLLTQRAERVKR

SEQ ID NO: 9615 - protein, 494 aa, Paxillus involutus
  unsure (1)..(494): unsure at all Xaa locations
KLQQIYDAEHPRLILKELFSQDPHRFSKFSKEYVDPTDPNTTFLLDYSKNLVTQPILDTLLSLASEAQLETYRDKMFAGERINTSEDRAVLHVALRNFDDFKIQENGVEEVASVLAHMKEFSEAIRSGSWKGYTGKTINTXVNIGIGGSDLGPVMVTEALKPYAKRDLTALFVSNIDGTHLAETLRECDPERTLFIIASKTFTTQETITNAESARAWFLSFAKDKAHVAKHFVALSTNTKAVTAFGIDEANMFQFWDWVGGRYSLWSAIGLSIALYIGYDNFESLLKGAHGMDKHFKETPLESNLPVLLAVVGVWYNDFYGAQTHALLPYDQYLHKFADYFQQGDMESNGKFVTKSGERVDYQTGPIIWGAAGTNGQHSFYQLVHQGTKLIPADFLAPATSHNPIADSKHHRILLSNFFAQPEALAFGKTEEEVRKELGSGASEALVKSKVFEGNRPSNSIMFPLLTPRTLGALIALYEHKIFTQGVIWGINSF

SEQ ID NO: 9616 - protein, 494 aa, Paxillus involutus
KLQQIYDAEHPRLILKELFSQDPHRFSKFSKEYVDPTDPNTTFLLDYSKNLVTQPILDTLLSLASEAQLETYRDKMFAGERINTSEDRAVLHVALRNFDDFKIQENGVEEVASVLAHMKEFSEAIRSGSWKGYTGKTINTIVNIGIGGSDLGPVMVTEALKPYAKRDLTALFVSNIDGTHLAETLRECDPERTLFIIASKTFTTQETITNAESARAWFLSFAKDKAHVAKHFVALSTNTKAVTAFGIDEANMFQFWDWVGGRYSLWSAIGLSIALYIGYDNFESLLKGAHGMDKHFKETPLESNLPVLLAVVGVWYNDFYGAQTHALLPYDQYLHKFADYFQQGDMESNGKFVTKSGERVDYQTGPIIWGAAGTNGQHSFYQLVHQGTKLIPADFLAPATSHNPIADSKHHRILLSNFFAQPEALAFGKTEEEVRKELGSGASEALVKSKVFEGNRPSNSIMFPLLTPRTLGALIALYEHKIFTQGVIWGINSF

SEQ ID NO: 9617 - protein, 405 aa, Bacillus anthracis str. A2012
  unsure (1)..(405): unsure at all Xaa locations
MSDWFQLDKEYMMSTYCRTKIAIERGEGCKLYDVDGKEYLDLFSGVGVNVLGYNHPKIVQTTMDQVTKSLHLPFHFLNPVAIEYAKKLVDCSLKNGKVFFTNSGTEATETTLKLIDKYRAITNEEREGIVVLKNSFHGRTLGALHFTRQESVYQNFPTTSIPVYEVERENIEQLEETIINENPIAILLEPVLGSGGIYPLSREYLHGVQNLCDKYNVILIVDEVQSGMGRTGKLFAYQNFNITPHIIQIGKGAGGGIPLGGIIVGEKLCDVFAPGDHGTTFAHSSMGTALGLTVLNTLLDDGLMQEAYEMSLYLNDKLQEIQKENSYYIEEVRHAGMMFGISLNDTNENVKKLQVELMEKGILVDVXQGNIIRLLPPYIITKEEIDTFITQFIFCIDKVAAVVSA

SEQ ID NO: 9618 - protein, 278 aa, Rubrobacter xylanophilus DSM 9941
MFPGQGGKVEEPPEEMLPAIRRVVGERIPDQVKFFARAARDADESRRLEIRPDVVAGHSLGEYGAAYAAGCFDLETGIWLVANRDRFLSEVARKTPGGMVAVVKASPEEVERALEGTEGSVVANYNSPRQAVISGLRDALGEAVARVRGRKIPLNVPFAAHSPYVAAAGEKMRELLDSVEFRRPEVPLVSAVDGSVLESAEAVKEALKRQMEAPVRWVQVVETLARMRVVEWIELGGGNVLTRMLRDFELPSLRGMTFEDLRARIGRQAQNLFPKKEG

SEQ ID NO: 9619 - protein, 387 aa, Bacillus anthracis str. A2012
  unsure (1)..(387): unsure at all Xaa locations
MGENHDKQRQSLLGKDFNENGERNEQAILHSQTVGSRGPVLEQDSVLHEALQEFIHEKILERPVHVKGFGAFGYFQTIYPMSEHTKLSFLQHSNEKVPVMVRFSLAVSTKGTPDTARNVRGFSTKFYTKEGIFDLLCNHIPVFSVRDPMRFPETIQALSPSPKNNLLDPNRFWSFVARAPESIHFVVHLYSDNGTAKSFRRIPGHSVNTYVWRNAEGNRKYVKYHWYPFEGVQSITNEEANKLAAENPDYSGKDLYDAIANGKPVEYGLYVQLMDPKDEAHLSYDPLDDTKAWDEKAYPLIPVGKMVLNKNPENYMEQVEKVAFSPSNLLNGAELSDDKMLQXRANIYSDSQRRRIGPEFRKLAINQQQDWTPANQITSGDGRYVER

SEQ ID NO: 9620 - protein, 494 aa, Paxillus involutus
  unsure (1)..(494): unsure at all Xaa locations
KLQQIYDAEHPRLILKELFSQDPHRFAKFSKEYVDPTDPNTTFLLDYSKNLVTQPILDTLLSLASEAQLETYRDKMFAGERINTSEDRAVLHVALRNFDDFKIQENGVEEVASVLAHMKEFSEAIRSGSWKGYTGKTINTIVNIGIGGSDLGPVMVTEALKPYAKRDLTALFVSNIDGTHLAETLRECDPERTLFIIASKTFTTQETITNAESARAWFLSFAKDKAHVAKHFVALSTNTKAVTAFGIDEANMFQFWDWVGGRYSLWSAIGLSIALYIGYDNFESLLKGAHGMDKHFKETPLESNLPVLLAVVGXWYNDFYGAQTHALLPYDQYLHKFADYFQQGDMESNGKFVTKSGERVDYQTGPIIWGAAGTNGQHSFYQLVHQGTKLIPADFLAPATSHNPIADSKHHRILLSNFFAQPEALAFGKTEEEVRKELGSGASEALVKSKVFEGNRPSNSIMFPLLTPRTLGALIALYEHKIFTQGVIWGINSF

SEQ ID NO: 9621 - protein, 363 aa, Zea mays
  unsure (1)..(363): unsure at all Xaa locations
MVKENKRKQPPADAAPPPGDEGEGRSGRKGKKARKEKAEAILPSQIKNKDKRREVHAKLKREKKAQKRALARERGQAARRAEELGEQPPERQVPRTIENTREPDETVCRPDDQELFAGNDADEFSAVLKQHITPKILITTCRFNSGRGPAFIDELMRHXSLIPNSQYVKRGTYELKKIVEYANNRDFTSLVVVHTNRREPDALLIIGLPDGPTAHFKLSKLVLRKDIKNHGNPTSHKPELVLNNFTTRLGHRVGRMIQSLFPQDPNFRGRRVVTFHNQRDYIFFRHHRYIFETKEKKVASKEKTSGSKSGSEKQQVICRLQECGPRFTLKLLTLQHGTFDTRSGEYEWVHKPDMDTSRRRFFL

SEQ ID NO: 9622 - protein, 315 aa, Zea mays
MDPKFPPPPPLNKTEPTTATTTTTSTAQQQQQQLDPKDYQQQQQQPAQHLQIQIHQSQQDGGGGGKEQQQLQVVAQPGERRQQALAPKRSSNKDRHTKVDGRGRRIRMPALCAARIFQLTRELGHKSDGETVQWLLQQAEPAIVAATGTGTIPASALASVAPSLPSPTSGLARPHHHMWAPSAGFSSPSFLNSAAAGTGDAAGIMQRMGIPAGFELPGASAAGATLGAGGHIGFAPMFAGHAAAMPGLELGLSQDGHIGVLAAQSISQFYHQVGAAAGGGGQMHHAHGHHHHHHQQQEDGEDDREDGESDDESGQ

SEQ ID NO: 9623 - protein, 468 aa, Mesorhizobium loti MAFF303099
MAYDVVIIGSGPGGYVCAIKAAQLDLKVAVVEKNATFGGTCLNIGCIPSKALLHASEMFAEAGHSFDTLGVEIPAPKLNLTKMMAHKDATVASNVNGVAFLFKKNKIDSFRGTGKVVAAGKVSVTGEDGKVEEIETKNIVIATGSDVAGIPGVKVDFDEKIIVSSTGALSLDKVPGHLVVVGGGVIGLELGSVWARLGAKVTVVEFLDTILGGMDGEVSKQFQRMLSKQGFEFKLGAKVTGVAKAKKGATVTFEPVKGGAAETIAADVVLIATGRRAYADSLGLKEAGVEVDERGRVKTDGHLKTNVPGIYAIGDVIAGPMLAHKAEDEGVAVAETIAGQAGHVNYEVIPSVVYTSPEIASVGKTEEELKKAGIDYKVGKFPFSANGRARAMLHTDGFVKILADKASDRVLGVHIVGFGAGEMIHEAAVLMEFGGSSEDLARTCHAHPTMSEAVKEAALATFFKPIHI

SEQ ID NO: 9624 - protein, 424 aa, Mesorhizobium loti MAFF303099
MATEIRVPTLGESVTEATIGKWFKKVGDAIAVDEPLVELETDKVTVEVPAAAAGTLGEIVAKEGETVGVGALLGSISAGGSAPATKPQAVSQASSPDAASTSKQAAAETAKIAGDAGAVEPRSMPPAPAAAKLIAENNLSVDQLSGSGKRGQVLKGDVLDAIAKGAPSQPAETPRAAPAPIAVRAPSSGDDASREERVRMTKLRQTIARRLKEAQSTAAMLTTFNEVDMSAVMALRTKYKDVFEKKHGVKLGFMGFFTKAVTHALKEIPAVNAEIDGTDIIYKNFAHVGVAVGTEKGLVVPVVRDADQMSIAEIEKEIGRLGIAARDGKLSVADMQGGTFTISNGGVYGSLMSTPILNAPQSGILGMHKIQDRPVVVGGQIVIRPMMYLALSYDHRIVDGKEAVTFLVRVKESLEDPERLVLDL

SEQ ID NO: 9625 - protein, 453 aa, Eremothecium gossypii
MLAFTRIAPKVRTLASVARMQLRTYASYPPHTIIGMPALSPTMTQGNLAVWTKKEGDKLSPGEVLAEVETDKAQMDFEFQEEGFLAKILVPEGAKDVPVNKPIAVYVEEEGDVAAFKDFKVEESAAESKDAPAKEEAAPAKAAPAAAAPAKAAKKSTGSAASGGRIMASPLAKTIALEKGISLKEVTGTGPNGRITKEDVEKYLAKAPKKTESAAAPAAATYEDVPISNMRRVIGSRLLQSCQSIPSYPISSDISVAKLLKLRQSLNAAGKDQYKLSINDILIKAIAGAAKRVPEANAYWLEDQGVIRLFKNVDVSVAVATPTGLITPIVKNAESKGLRSISAEIKELGKRAKENKLAPHEFQGGTICISNLGMNNAVSSFGSIINPPQSTILSIGTLRRVPVEDAGAEYGFTFEDRMNITGVFDHRTIDGARAADFMRELKNIIENPLELML

SEQ ID NO: 9626 - protein, 385 aa, Oryza sativa
  unsure (1)..(385): unsure at all Xaa locations
MQYLFDEDGRRYLDAFGGIATVCCGHCHPDVVEAMVNQAKRIQHSTVLYLNHAIADFAEALAAKMPGDLKVVFFTNSGTEANELALMIARLYTGCHDIISLRNGYHGNAAGTMGATAQCNWKFNVVQASVVHHALNPDPYRGAFGSDGEKYARDVQEIIDFGTTGRVGGXVGGIVELAPGYLPAVYNMVRKAGGLCIADEVQAGVARTGSHFWGFESHGVIPDIVTMAKGIGNGIPIGAVVTTPEIAQVLTRRSYFNTFGGNPVSTAGGHAVLKVLEKEKLQENAFVVGSYLKERLNKLKEKHDIIGDVRGKGFLLGVELVTDRQKKTPAKVEIGHVMNHMKDMGVLVGKGGFYGNVFRVTPPLCFTKEDSDFFIEAMDISLSKL

SEQ ID NO: 9627 - protein, 197 aa, Oryza meridionalis
GQTPVFPRILGHEAGGIVESVGEGVTELAPGDHVLPVFTGECKECDHCKSEESNMCDLLRINVDRGVMIGDGKSRFTIKGKPIFHFVGTSTFSEYTVIHVGCLAKINPEAPLDKVCILSCGFSTGFGATVNVAKPKKGQTVAIFGLGAVGLAAMEGARLSGASRIIGVDLNPAKFEQAKKFGCTDFVNPKDHSKPVH

SEQ ID NO: 9628 - protein, 135 aa, Haemophilus influenzae
EDPTPALEGADVVLISAGVARKPGMDRSDLFNINAGIVRGLIEKVAVTCPKACVGIITNPVNTTVAIAAEVLKKAGVYDKRKLFGVTTLDVLRSETFVAELKDLNVSRTSVPVIGGHSGVTILPLLSQVQYAKWN

SEQ ID NO: 9629 - protein, 197 aa, Oryza eichingeri
GQTPVFPRILGHEAGGIVESVGEGVTELAPGDHVLPVFTGECKECAHCKSEESNMCDLLRINVDRGVMIGDGQSRFTINGKPIFHFVGTSTFSEYTVIHVGCLAKINPEAPLDKVCILSCGISTGLGATLNVAKPKKGQTVAIFGLGAVGLAAMEGARLSGASRIIGVDLNPAKFEQAKKFGCTDFVNPKDHSKPVH

SEQ ID NO: 9630 - protein, 425 aa, Ralstonia metallidurans CH34
MSKVAEIRGLEVLDSRGNPTVEVEVVLDDGAVGRAIVPSGASTGAREAVELRDADPRRYLGRGVLRAVQAVNTELCEALLGRDAGDQPEIDTIMIDLDGTPDKRRLGANALLGVSLAVAHAAAMSNGLPLFAYLGGERASLLPVPLINVINGGAHADNALDFQEFMIVPAGAPTFTEAVRASAEVFHTLRAMLKAAGYTTNVGDEGGFAPEFHAAEEALDILVAAIAKAGYRPGEDIALAIDPAASELYVNGSYVYQGEGVERSREEQVAYLVRLADRYPIVSIEDGMAEDDAMGWQLLTRQLGKRCQLVGDDVFCTHPTLLRQGVEQGMANAILVKANQIGTLSEMRETVRVAHGYAYSAVMSHRSGETEDVTIADLAVALRCGQIKTGSMSRADRTAKYNRLLRIERELGSRAEYAGALLRRR

SEQ ID NO: 9631 - protein, 487 aa, Oryza sativa (japonica cultivar-group)
MAASASASLRHHLLLRRRPRFPLGPSPTFRTSSLPRRHQRLFASAPSSSTVENGEPSSPVEPSDGASVVDVNPPRGTRDFPPEDMRLRTWLFDQFREVSRVMAFEEVDFPVLESEALFIRKAGEEITQQLYNFEDKGGRRVVLRPEITPSLARLVIKQGKSVSLPLKWFTIGQCWRYERMTRGRRREHYQWNMDIFGMPKVRAESELLQAIILLFERLGITSSDVGIRVSSRKVLQAVLNMYSIPEHLFTEVCVIVDKLGKLTREEIEKKLVTIGLSSEAVLGIIEVLSLKSLPKLEEVLGSDVEAVADLKKLFSFAEQYGYADWICFDASVVRGLAYYTGIVFEAFDRDGKLRAICGGGRYDRLLSTFGSEDIPACGFGFGDAVIVELLKEKGLLPDLSRQIDDIVFPLDEELEGPACSVASSLRRQGRSVDLVEDKRLKWVFKHAERINAGRLILVGKSEWERGMVRVKILSTREEFEVKAGELQ

SEQ ID NO: 9632 - protein, 133 aa, Triticum aestivum
  unsure (1)..(133): unsure at all Xaa locations
SQPFPHPHPHPLSPSPPASAAATPPATALAVSASASRPKKKPRSSGSNPAPKKPRLVPSVRGRPLSADGEVDAAIRHLRAADPALAPVIDAHDPPSFHCPHPPFXSLVRSVLYQQLAFKAAASVYSRFIALVG

SEQ ID NO: 9633 - protein, 197 aa, Oryza punctata
GQTPVFPRILGHEAGGIVESVGEGVTELAPGDHVLPVFTGECKECAHCKSEESNMCDLLRINVDRGVMIGDGQSRFTINGKPIFHFVGTSTFSEYTVIHVGCLAKINPEAPLDKVCILSCGISTGLGATLNVAKPKKGQTVAIFGLGAVGLAALEGARLSGASRIIGVDLNPAKFEQAKKFGCTDFVNPKDHSKPVH

SEQ ID NO: 9634 - protein, 135 aa, Haemophilus influenzae
EDPTPTLEGADVVLISAGVARKPGMDRSDLFNINAGIVRGLIEKVAITCPKACVGIITNPVNTTVAIAAEVLKKAGVYDKRKLFGVTTLDVLRSETFVAELKGLNVSRTSVPVIGGHSGVTILPLLSQVQYAKWN

SEQ ID NO: 9635 - protein, 312 aa, Pseudomonas aeruginosa PAO1
MSASLAFVFPGQGSQSLGMLAELGAQQALVRDTFAEASEALGYDLWALVQNGPEERLNQTDKTQPAILTVSIALWRLWLAEGGARPAFVAGHSLGEYSALVAAESLAFADAVKLVERRGQLMQQAVPAGQGGMAAILGLEDADVLAACAEAAQGEVVSAVNFNAPGQVVIAGAAAAVERAIEACKARGAKRAVALPVSVPSHCELMRPAAEQFAASVESLQWQAPKISLVQNVSAAVPADLDTLRRDLLAQLYSPVRWVESIQLLAEKGVTELVECGPGKVLAGLNRRCAKGINTHGLDGVEAFAATRAALA

SEQ ID NO: 9636 - protein, 226 aa, Triticum aestivum
  unsure (1)..(226): unsure at all Xaa locations
SGRGKALHQYDCLRANKATSAWGLEARVPFLDKDFINEAMSIDPEWKMVRPDLGRIEKWVLRKAFDDEEQPFLPKHILYRQKEQFSDGVGYSWIDGLQAHAASNVADKXCLSNAKFIFPHNTPTTKEAYYYRMIFERFFPTEXAILTVPGGPSVACSTAKAIEWDAQWSENLDPSGRAALGVHLAAYEHEQDPKHVPDTIAAGGSKKPRTIRVAAAPPPPGVAIEG

SEQ ID NO: 9637 - protein, 197 aa, Oryza minuta
GQTPVFPRILGHEAGGIVESVGEGVTELAPGDHVLPVLTGECKECAHCKSEESNMCDLLRINVDRGVMIGDGQSRFTINGKPIFHFVGTSTFSEYTVIHVGCLAKINPEAPLDKVCILSCGISTGLGATLNVAKPKKGQTVAIFGLGAVGLAAMEGARLSGASRIIGVDLNPAKFEQAKKFGCTDFVNPKDHSKPVH

SEQ ID NO: 9638 - protein, 494 aa, Paxillus involutus
KLQQIYDAEHPRLILKDLFSQDPHRFSKFSKEYVDPTDPNTTFLLDYSKNLVTQPILDTLLSLASEAELETYRDKMFAGEHINTSEDRAVLHVALRNFDDFKIQENGVEEVASVLAHMKEFSEAIRSGSWKGYTGKTINTIVNIGIGGSDLGPVMVTEALKPYAKRDLTALFVSNIDGTHIAETLRECDPERTLFIIASKTFTTQETITNAESARAWFLSFAKDKAHVAKHFVALSTNTKAVTAFGIDEANMFQFWDWVGGRYSLWSAIGLSIALYIGYDNFESLLKGAHGMDKHFKETPLESNLPVLLAVVGIWYNDFYGAQTHALLPYDQYLHKFAEYFQQGDMESNGKFVTKGGERVDYQTGPIIWGAAGTNGQHSFYQLVHQGTKLIPADFLAPATSHNPIADSKHHRILLSNFFAQPEALAFGKTEEEVRKELGSGASEALVKSKVFEGNRPSNSIMFPLLTPRTLGALIALYEHKIFTQGVIWGINSF

SEQ ID NO: 9639 - protein, 494 aa, Paxillus involutus
KLQQIYDAEHPRLILKDLFSQDPHRFSKFSKEYVDPTDPNTTFLLDYSKNLVTQPILDTLLSLASEAELETYRDKMFAGEHINTSEDRAVLHVALRNFDDFKIQENGVEEVASVLAHMKEFSEAIRSGSWKGYTGKTINTIVNIGIGGSDLGPVMVTEALKPYAKRDLTALFVSNIDGTHIAETLRECDPERTLFIIASKTFTTQETITNAESARAWFLSFAKDKAHVAKHFVALSTNTKAVTAFGIDEANMFQFWDWVGGRYSLWSAIGLSIALYIGYDNFESLLKGAHGMDKHFKETPLESNLPVLLAVVGIWYNDFYGAQTHALLPYDQYLHKFADYFQQGDMESNGKFVTKGGERVDYQTGPIIWGAAGTNGQHSLYQLVHQGTKLIPADFLAPATSHNPIADSKHHRILLSNFFAQPEALAFGKTEEEVRKELGSGASEALVKSKVFEGNRPSNSIMFPLLTPRTLGALIALYEHKIFTQGVIWGINSF

SEQ ID NO: 9640 - protein, 392 aa, Nostoc punctiforme
MKALCWHGANDVRVDTVPDPKIINPRDAIVKITSTAICGSDLHLYDGYIPTMEKGDILGHEFMGEVVELGSAVKNVKIGDRVVVPFTISCGSCFFCQKDLWSLCDNSNPNAWIAEKLMGHSPSGLFGYSHMMGGYAGGQAEYARVPFADVGLFKIPDGLTDEQVLFLTDIFPTGYMAAENCDIQPGDTVAIWGCGPVGQFAIRSAYMLGAERVIAIDRVPERLQMAKDGKAEVLNYEEVEVGEALKDMTGGRGPDACMDAVGMEAHGTGPDAFYDQVKQAVRMETDRPTALRQVIVACRKGGTVSIPGVYGGFVDKIPMGAAMNKALTFKMGQTHVHKYLRPLLDRVQNGDIDPSFVITHRLPLEQAPHGYEIFKHKKDNCIKIVLKPGQAA

SEQ ID NO: 9641 - protein, 395 aa, Brucella suis 1330
MFRTLDDANVQSKRVLVRIDLNVPMANGEVTDLTRIERIVPTIAELSRKGAKVILLAHFGRPKGVASDENSLKHVVKPLSKVLDHSVHFAEDCIGDKAKAAVDALKDGDVLLLENTRFHKGEEKNDPEFVQALAANGDLYVNDAFSAAHRAHASTEGLAHVLPAFAGRAMQAELEALEKGLGNPARPVVAIVGGAKVSTKLDLLSNLIEKVDALVIGGGMANTFLAAKGLDVGKSLCEHELASTAREIMAKAETTKCAIILPVDAVVGWHFAADTPHQTYGVDSVPGDAMILDAGELSTDLIASAIDDAATLVWNGPLGAFELRPFDTATVKVARHVAKRTKEGKLVSVGGGGDTVAALNHAGVVDDFTYISTAGGAFLEWMEGKPLPSVDVLKK

SEQ ID NO: 9642 - protein, 424 aa, Bacillus cereus ATCC 10987
MIEIKVPELAESITEGTISQWLINVGDKVEKGGSVVELETDKVNVEIIAEDSGIVSKLLGEPGDTVEVGATIAILDANGAPVAVSTPAPAAEQPKQETAEAPKAEAPKAAAPSAEQTATLQGLPNTNRPIASPAARKMARELGIDLNDVRSTDPLGRVRPHDVQAHAAAPKEAPAAPKSPAPAPVAKTEFEKPVERVKMSRRRQTIAKRLVEVQQTSAMLTTFNEVDMTAIMELRKERKDAFEKKHDVRLGFMSFFTKAVVAALKQFPLLNAEIQGDELIIKKFYDIGIAVAAPDGLVVPVVRDANQLNFAEIESEIRELGKKARDNKLSLKELQGGTFTITNGGVFGSLMSTPILNSPQVGILGMHKIQVRPVAIDAERMENRPMMYIALSYDHRIVDGKEAVSFLVAVKDMLEDPKSLLLEG

SEQ ID NO: 9643 - protein, 422 aa, Ustilago maydis 521
MGSISEQSSALAVWSAVPQAPEDAIFKLTSSYKSDTYDKKVNLGVGAYRDNNGKPYVLPSVKKAQADLIADESVDHEYLSITGLAEFTSAAAKLILGDDSPAIAEKRVASVQTISGTGANHLGAVFLQRFYQYQAYGVDRQIYISNPTWANHKAIFNTVGIKPIDYPYYDAKTIALDFDGFTNTLRQAKNQSVFLLHACAHNPTGVDPTQEQWKQIADIFVEKGHFAFFDCAYQGFASGDLDRDAWAVRHFVSRKSIPLLICQSFAKNAGLYGERVGALHVVSATPAQSAAVFSQLAAIQRSEISNPPAFGARVVKMILTDPALFQQWQADVKEMAGRIITMRQSLFDLLTKKFQTPGNWDHILKQIGMFTFLGLDTNQCNRLLEEGHIYLTANSRISMAGLTTNNVEYVASWIDKVVREKK

SEQ ID NO: 9644 - protein, 957 aa, Kluyveromyces lactis
MTQSLPLLNGTEAYKLVTTQGLYDKTVKFYEKYLQLVHDKRVGTLTNSLITLKLVVDNSFKPLDVVNDKDWRAIVSSALVFSCTNIQHFRDLAAGETIQAYPNETNPIEIYLKDPNGYIIGITETKNAISIKPTLPKQSVEASLISSRSSRIDIASSGVSTDSSYPAIPKTAKAQKSIAVMTSGGDAPGMNANVRAIVRTAIFKGCNAFVVMEGYEGLVKGGPNYIKQVYWETVRNWSCEGGTNIGTARCKEFREREGRLLGALHLIEAGVDALIVCGGDGSLTGADLFRSEWPSLIRELLDQGRINKVQFDRYQHLNICGTVGSIDNDMSTTDATIGAYSALDRICQAIDYIEATANSHSRAFVVEVMGRNCGWLALLAGISTSADYILIPEKPASSREWQDQMCDIISKHRSRGKRTTIVIVAEGAISADLTPISSKDVHKVLVDRLGLDCRITTLGHVQRGGTAVAYDRILATLQGVEAVNAVLESTPDTPSPLIAINENKITRKPLVESVQLTKSVAEIHSKDFKKAMQLRDSEFVEHLDNFMAINSAHHIEPKLPEHTHMKIAIVNVGAPAGGMNSAVYSMATYCMSQGHKPYAIYNGWTGLTRHESVRSLNWKDLLGWQSRGGSEIGTNRHTPEEADIGLIAYYFQKYGFDGIIIVGGFEAFVSLHQLERARENYTAFRIPMVLIPATLSNNVPGTEYSLGSDTALNSLMQYCDIIKQSAASTRGRVFVVDVQGGNSGYLATHAAVAVGAQVSYVPEEGISLEQLTQDIENLTESLREAEGRGKFGQLILKSTNASKVLTPEVLAEVITQEAEGHFDAKCAIPGHVQQGGLPSPIDRTRGTRFAIRAVGFIESQHKVLAAEANLDDDDFDFDTPKIIATASVLGVKGSDIVFSSIRQLYDFETELNKRTPKTIHWQSTRPLRTICRKEKTYEIKNVSASSKFPLKWMYIIM

SEQ ID NO: 9645 - protein, 932 aa, Vibrio parahaemolyticus RIMD 2210633
MRVRVLLFKNVLTALKALQPLQFGEAFFCSHGWVCKSCWSIAGGVMSQGCRKTTCPYCGVGCGVEVNSKGIVGDDNHPANAGALCVKGVALAESLNMPSRLLYPKLVTKERPQGKEIHWSQATNMIAEKIHQAKAEFGPDSVAMYVSGQLLTEDYYVANKLMKGYVGSANIDTNSRLCMSSAVAAHVRAFGEDVVPVNYDDIDNTELLIICGANTAWTHPVLFRRIQQARENNPNLKLVVIDPRETVTAQQADLHLPIKNDGDVSLFNGLLKFLIEKQGIDSQCINSYTSGFDALAKEITQQRYNVTNLATDVGVSQDKLTTFFQWFAHSPTAITLFCQGVNQAENGVDKGNAIINAHLATGKIGRVGCGPFSITGQPNAMGGREVGGLANQLAVHRGFDGESIQQVQAFWESPEIATKPGLKAVELFEAVERGEIKVLWIMATNPVVSLPDNQFVKRALERCPFVIVSDITAESDVARYADLLLPAAGWGEKQGMVTNSERRISRQRQFQNPPGEAKSDWWAVSQVGQALCTLEETKNGFDFDSEHEVFCEYAAMTGMNKKSPLKLDLSQYANLNEQEYEEWRPTQWGGERPFSDGVYSHPDGKARFVVTRESPQRLARTKGWWLNTGRQRDQWHTMTRTGHIAHLAASELEPTVYMNALSATQNRLKAGQLAKLFQPSSNTSIHAKIAIDDGLGFQELFMSMHWAGRYGGESSVNAIVNSAKDPISGQPAFKSSYVEVQDAAVKTYGMFIGTQFDSSKFLYSAFQAESNLGIWRFAHDKRPKKQSFCRTEKSRRIAIDIVQGWLAVDYDLVGDVRIIRSVLVVSSEPIQTDYTNFTGLTGKPMELSQLLTITQSQSSAKLVCSCFRVTDKQIHDAMEKQDCTSLTQLQNKLKCGTNCGSCISQIKQMVDSHQHQKGKQQASQQSLAIQIK

SEQ ID NO: 9646 - protein, 278 aa, Magnaporthe grisea 70-15
MDETTPQHHKGAMLGHADGQAGPHRQTLRHHLVAALGEFVGTFLFLFFGYASHSMIATAERPTPEGLRDGYSAQATVFIALAYAMAILVTVWAMYRISGGLFNPAITLGLGLAGQLPWIRIAVLFPTQLVASICAGAVIEAMLPGPISRVNTKLAPDVSVTQGVFLEMFFTAYLLFVVLMVAAEKSKDTYIAPVAIGLAAFVALIPGAYYTGASLNPARSFGCAVAGLQFPENHWIYWVGPFLGSALGAGFYRLLKFLNYEEANPGQDSDYPLYNQRV

SEQ ID NO: 9647 - protein, 197 aa, Oryza officinalis
GQTPVFPRILGHEAGGIVESVGEGVTELAPGDHVLPVFTGECKECAHCKSEESNMCDLLRINVDRGVMIGDGQSRFTIKGKPIFHFVGTSTFSEYTVIHVGCLAKINPEAPLDKVCILSCGISTGLGATVNVAKPKKGQTVAIFGLGAVGLAAMEGARLSGASRIIGVDLNPAKFEQAKKFGCTDFVNPKDHSKPVH

SEQ ID NO: 9648 - protein, 397 aa, Pirellula sp. 1
MHRFDSISVAPPDAILGLTEAFKADERETKMNLSVGVYQDASGTTPVLRCVKEAEKRLLDTESTKGYLSIDGLPDYREAARRLIFSDQIAAERVAAVQTPGGTGALRVAAEFLATQCGPLRIFLPTPTWANHNAIMAAAGLPVETYSYLASDKKTLDFDALIEDLKTKPKAGDAVLLHACCHNPTGVDPTPEQWEQIASVVSEKKLIPLLDFAYQGFGEGLDEDAIGVRTILRQMDEAIVCSSFSKNFGLYSERVGTACLVSGSAETTKAALSQLKRVVRANYSNPPRHGGAIVATVLADEGLTQMWHEELAEMRTRIASLRKQFVDGMAATGVDQDFSFLLDQKGMFSFSGLSPMQVDQLRSEHGVYLVGSGRINVAGMNESKMEWLCNAVAAVLR

SEQ ID NO: 9649 - protein, 197 aa, Oryza rhizomatis
GQTPVFPRILGHEAGGIVESVGEGVTELAPGDHVLPVFTGECKECAHCKSEESNMCDLLRINVDRGVMIGDGQSRFTIKGKPIFHFVGTSTFSEYTVIHVGCLAKINPEAPLDKVCILSCGIFTGLGATLNVAKPKKGQTVAIFGLGAVGLAAMEGARLSGASRIIGVDLNPAKFEQAKKFGCTDFVNPKDHSKPVH

SEQ ID NO: 9650 - protein, 423 aa, Actinobacillus pleuropneumoniae serovar 1 str. 4074
MAKNIQAIRGMNDCSPTESPLWQWIENKVRNVLAGYGYSEVRMPIVESTPLFARAIGEVTDVVSKEMYTFWDNDEQLTLRPEGTAGCVRAAIERGWIYNNEQRLWYMGPMFRHERPQKGRYRQFHQAGVEVFGIPNPEIDAELIILTARLWKELGIDQHVSLQLNSIGSLEARANYRSALVKFLENHTALMSDEEKERLVKNPLRILDTKNQALQEVLNDAPKLLDYLDDDSREHFAHLCHLLDAMGITYEVNPKLVRGLDYYNKTVFEWVTSALGSQGTVCGGGRYDGLVEQLGGHATQGVGFAMGLERLVLLVQEVNKEINLPKAVDVYVVYSGEGATLNAFQMAERIRSELPQLGVMTHCSGGNFKKQFKRADKVEAQIALVIGESEVEQQTVVLKDLQSGAEQVIIAQADLIAELTKRF

SEQ ID NO: 9651 - protein, 480 aa, Saccharomyces kluyveri
MEQVDLVQANILASGANKKTVRVVNGLGSLMGSKDMVDVDFDKDSNMDYLLRKDQEEKDVYKNKKHISEQPWTINNWHQHLNWLNMVLVVGIPLIGWYFALSGKVPLSKKVLIFSVAYYVLGGVSITAGYHRLWAHRAYSARWPLRMLFALFGAASVEGSVKWWGHSHRIHHRYTDTTRDPYDARRGLWFSHMGWMLLQPNPKYRARADIADLTDDWIVRFQHRHYIPIMALTAFILPALLCHYFFNDFWGGLVYAGIIRVFAIQQATFCINSLAHYLGDQPFDDRRTPRDNWITALVTFGEGYHNFHHEFPTDYRNAIKWYQYDPTKVFIYTSSLLGLAYNLKKFSQNAIQQGLVQQQQKKLDRSRSKLNWGTPLTQLPVWDKEEFMKSLKSNPGLVIVSGIVHDVSGYITEHPGGETLIQAAAGKDATKAFNGGVYLHSNAAHNVLATMRVAVIKDGVDAAAKFAARRGESFSSKKAI

SEQ ID NO: 9652 - protein, 135 aa, Haemophilus influenzae
EDPTPALEGADVVLISAGVARKPGMDRSDLFNINAGIVRGLIEKVAVTCPKACVGIITNPVNTTVAIVAEVLKKAGVYDKRKLFGVTTLDVLRSETFVAELKGLNVSRTSVPVIGGHSGVTILPLLSQVQYAKWN

SEQ ID NO: 9653 - protein, 327 aa, Brucella suis 1330
MKAMVLEKPGQPLVLVERPDPLPGPGQIRLKVEACAVCRTDLHVVDGELERPKLPLVPGHEIVGVIDAVGTGVDPSRTGRRVGVPWLGHTCGACDYCRSGAENLCDAPLFTGYTRDGGFATHVVADADFAFDLDEAADPVALAPLLCAGLIGWRSLKKAGEGKRIGLYGFGAAAHIIAQVCRWQDREVYAFTKPGDTEAKDFARSLGAVWAGDSDILPPSPLDAAIIFAPAGELVPAALRAVRKGGRVVCGGIHMSDIPSMPYSILWEERALVSVANLTRNDAEEFFPLARAAGVRTHTTIYPLESANEALADLRSGRLSGAAVLVP

SEQ ID NO: 9654 - protein, 559 aa, Zea mays
MGSSGFSWTLPDHPKLPKGKSVAVVVLDGWGEANPDQYNCIHVAQTPVMDSLKNGAPEKWRLVKAHGTAVGLPSDDDMGNSEVGHNALGAGRIFAQGAKLVDQALASGKIYDGDGFNYIKESFESGTLHLIGLLSDGGVHSRLDQLQLLLKGVSERGAKKIRVHILTDGRDVLDGSSIGFVETLENDLLELRAKGVDAQIASGGGRMYVTMDRYENDWDVVKRGWDAQVLGEAPYKFKSALEAVKTLRAQPKANDQYLPPFVIVDDSGNAVGPVLDGDAVVTINFRADRMVMLAKALEYADFDNFDRVRVPKIRYAGMLQYDGELKLPSRYLVSPPEIDRTSGEYLVKNGIRTFACSETVKFGHVTFFWNGNRSGYFDATKEEYVEVPSDSGITFNVAPNMKALEIAEKARDALLSGKFDQVRVNLPNGDMVGHTGDIEATVVACKAADEAVKIILDAVEQVGGIYLVTADHGNAEDMVKRNKSGKPLLDKNDRIQILTSHTLQPVPVAIGGPGLHPGVKFRNDIQTPGLANVAATVMNLHGFEAPADYEQTLIEVADN

SEQ ID NO: 9655 - protein, 405 aa, Bacillus cereus
MNIVFMFPGVGSHYSGMGKYLYENFPVAREIFEEASDTLKIDMASLCMEKIYKADLEKLQNSQTALVTTSMAAFRVFEQEIGNKPEAMIGYSLGEYTALCASGAIAFSDTLKLVQERSTILSSYALTIDGTMAWVNNLAPEIVEGICSELLTKGQEVYISAYDTPNKTSISGTNSAVQLACEMVVEHGGIAIPLKLSGPFHSPMMQPAAEKYKSVLENIDMKQPLVPVIANHDSSMYKGVENIRENLYLQLIKPVKWLDMIHYLMNQGSMKAIEMGPKEVLKYLLQAINPAISTCNYEREKDILNTKNSFTLQESDYEEVISGCLTVVVSTKNYNTDLSEYQKKVVRPFQKVQSQFEEKINSGYSVEKSDVEEAIQMMKTALTEKQIKEREQKRYLQRVLQCKSF

SEQ ID NO: 9656 - protein, 120 aa, Mesorhizobium sp. BNC1
MNELLGLKVLVVEDEGAVALLIEEMLEDLGCKIAASTACFAQACRIAATADIDLAVLDINLDGQPAFPIAEILRERQIPFLFSTGYGKSGLPHEFTGQPVIGKPFSMAELQKAIASILRR

SEQ ID NO: 9657 - protein, 571 aa, Streptococcus mutans UA159
MVYQENYQKWLAYAKLPDYLHQELLAMDEKTKEDAFYTNLEFGTAGMRGYIGAGTNRINIYVVRQATEGLAQLIETKGDDVKKRGVAIAYDSRHFSQEFAFESAQVLAKHGIKAYVFESLRPTPELSFTVRHLGTFAGIMVTASHNPAPFNGYKVYGEDGGQMPPFDADALTDFIRAINDPFSIELADLEESKASGLIEVIGEAVDTDYLKEVKDVNINQKLIDEYGKDMKIVYTPLHGTGEMLARRALAQAGFDSVQVVEAQAVPDPDFSTVKSPNPENQEAFRLAEELGRQVDADVLVATDPDADRLGVEIRQADGSYKNLSGNQIGAIIAKYILEAHKTAGSLPTNAALCKSIVSTELVSKIAESYGATMFNVLTGFKFIAEKIQEFEEKHNHTYMFGFEESFGYLIKPFVRDKDAIQAVLIVAEIAAYYRSRGLTLADGIDEIYKEYGYFAEKTISVTLSGVDGATEIKKIMDKFRGDAPKQFNATDVVKLEDFQAQTATTADGIEKLTTPPSNVLKYILSDASWIAVRPSGTEPKIKFYIATVGNNSEDAQVKIANIEKEINDFVG

SEQ ID NO: 9658 - protein, 357 aa, Microbulbifer degradans 2-40
MSKKIVLLPGDGIGPEIVAEAKKVLEAVDAKFKLGLKFEEDLIGGCAIDVHGVPLAQSTLDRCKAADAVLMGSVGGPKWDALDSNIRPEKGLLKIRYEMGLYANLRPAILYPQLADASSLKPEIVSGLDILIVRELTGGIYFGEPRGIRLLDNGERQGYNTYVYAEHEIERIGRTAFEMAMKRDKKVCSVDKANVLEATVLWREVIQSISKDYPEVELSHMYVDNAAMQLVRAPKQFDVVVTGNMFGDILSDTAAMLTGSIGMLPSASLNQDSKGLYEPVHGSAPDIAGQGVANPLATILSAAMMLRYSLNEAAAADAIEAAVGAVLDDGLRSADIFSEGMKKVSTQEMGDAVAAKI

SEQ ID NO: 9659 - protein, 408 aa, Shigella flexneri 2a str. 301
MLSGKTQAASAKLLESTRGFTMSVIKMTDLDLAGKRVFIRADLNVPVKDGKVTSDARIRASLPTIELALKQGAKVMVTSHLGRPTEGEYNEEFSLLPVVNYLKDKLSNPVRLVKDYLDGVDVAEGELVVLENVRFNKGEKKDDETLSKKYAALCDVFVMDAFGTAHRAQASTHGIGKFADVACAGPLLAAELDALGKALKEPARPMVAIVGGSKVSTKLTVLDSLSKIADQLIVGGGIANTFIAAQGHDVGKSLYEADLVDEAKRLLTTCNIPVPSDVRVATEFSETAPATLKSVNDVKADEQILDIGDASAQELAEILKNAKTILWNGPVGVFEFPNFRKGTEIVANAIADSEAFSIAGGGDTLAAIDLFGIADKISYISTGGGAFLEFVEGKVLPAVAMLEERAKK

SEQ ID NO: 9660 - protein, 557 aa, Kluyveromyces lactis
MASKNTYSDFKLATELPAWNQLQSLYEQKGKKLNVKDEFAKDNSRYEKFAKTFVNYDGSKILFDFSKNLVDDEILKSLIQLAKEAKVTSLRDAMFNGEPINFTEGRAVYHVALRNRSLKPMYVDGTNVTPEVDAVLQHMKEFTEEVRSGAWKGYTGKSITDVVNIGIGGSDLGPVMVTEALKHYATNLKVHFVSNIDGTHIAETLKDLDHETTLFLIASKTFTTAETITNATQLELKNWFLSKNGGDQSHISKHFAALSTNATEVEKFGIDTKNMFGFENWVGGRYSVWSAIGLSVALYIGFDNFEAFLKGAEAVDKHFVETPLEDNIPLLGGLLSVWYNNFFDAQTHLVAPFDQYLHRFPAYLQQLSMESNGKSVTRGNVFANYSTGSILFGEPATNAQHSFFQLIHQGTKLIPSDFILAAQSHNPIENNLHQKMLASNFFAQAEALMVGKDEEQVKSEGATGGLVPHKVFSGNRPTTSILAQKITPATLGALIAYYEHVTFTEGRIWNINSFDQWGVELGKVLAKVIGSELATDNKISSHDSSTNGLINQFKEWI

SEQ ID NO: 9661 - protein, 297 aa, ASPERGILLUS NIDULANS FGSC A4
MVADMSPRDLTAKPCGEAVSAMASELRSLVGDLTNAVNRKQFDTANTLLARAKRTLLLQNALIPASSTNPELLVLARETLELGALSAIRQTDAPAFTRYYQQLQPFYDLEREGSSTLDTRTSQRSKITGLYLLLLLSSGDGSSFHTVLEGLVEEASLKGGNVEDDPFIKYPVNLERNLMEGSYDKVWRETNSERVPSEDFALFSNVLVGTIRSEIADCSEKAYPSLPISNAKNLLFLESEGAVMEFAQQRGWTLRDGRIYFPVEPEAATRSEKDILVASSTIIENAIGYARELETIV

SEQ ID NO: 9662 - protein, 356 aa, Streptomyces avermitilis MA-4680
MKALVFHGSGESVWEDVADPGIQDAGDAIVRVDTVTICGTDLHILKGDLPEVRPGTVLGHEAVGEIVETGGDVRTVRPGDRVLVSCITACGRCRFCRESAYGQCRGGGGWILGHLINGTQAEYVRVPHADLSVHPLPGAMDSKDAVLLADILPTAYEVGVLNGRVRPGDTVVVVGAGPVGLAAVATSRLYTPEKIIAVDLAPARLDAAKRLGADAVAVAGEEAEPLVADLTLGLGADVVIEAVGVPETFEMCTRMVRPGGHVANVGVHGRPAVLHLEDLWIKNVTITTGLVDTRSTPTLLRMMAAGHLPASSMVTHTFPLDAMEEAYDVFSRAADTGALKVVLGEQQHDVLMVRAA

SEQ ID NO: 9663 - protein, 117 aa, Oryza sativa
  unsure (1)..(117): unsure at all Xaa locations
RSPSRPRVRGRVGALDIGPDSIKTSSDTVDTTKTVMWDGPMGVYVLEKFAAGTDAMAKKSCDITVKXVSTTSTGGGNSSSAVENAEEADKMSHISTGGVASLELVAGKTLPGVLALM

SEQ ID NO: 9664 - protein, 492 aa, Zea mays
MDPYKHRPSSGSNSSFWTTNSGAPVWNNNSALTVGQRGPILLEDYHLIEKLAQFDRERIPERVVHARGASAKGFFEVTHDVSHLTCADFLRAPGVQTPVIVRFSTVVHERGSPETLRDPRGFAVKFYTREGNFDLVGNNMPVFFIRDGMKFPDMVHVFKPNPKTNLQENWRIVDFFSHHPESLHMFTFLFDDVGIPLNYRHMEGFGVNTYTLINRDGKPHLVKFHWKPTCGVKCLLDNEAVTVGGTCHSHATKDLYDSIAAGNYPEWKLYIQTIDLDHEDKFDFDPLDVTKTWPEDIIPLQPVGRMVLNKNVDNFFAENEQIAFCPAIIVPGIHYSDDKLLQTRIFSYADTQRHRLGPNYLMLPVNAPKCAHHNNHHDGFMNFMHRDEEVNYFPSRFDPARHAEKVPIPPRVLTGCREKCIIQKENNFKQAGERYRSFDPARQDRFIQRWVDALTDPRVTHEHRTIWISYWSQCDAALGQKLASRLNLKPSM

SEQ ID NO: 9665 - protein, 372 aa, Streptomyces coelicolor A3(2)
MIGIELPTLNTNDSSYTLVEWLVPDGGSIEGEEPLAVVETSKASEEIESTGPGILHVLVGGGQECRPGQTIAYLFESAEERDSYRASAATPAAASESPGAGPSITNAARALADRHGVSEAELRGLGRTVVRTADVEALVRRAASAPASPGRQLSKRQRTVGAVVTESMRTVPAAAAYAKVDVGQAEELARQLSERTGSFVSLPVLLIKAVARRHAAHPLMFAALTDDGAVRESERAHVGVTMDAGRGLYTPVVHDAAELSGDRIADLLTGFRSKAFRGTFQAGELTGANIMVAPHTTEGMVLATPIVFPGQTCVVSVGAVDDQVLLDAQGAPRTHRFVHLGLVYDHRVVNGRDAMALLKDVKEELEAPAALG

SEQ ID NO: 9666 - protein, 286 aa, Schizosaccharomyces pombe
IYPTAHPYEIKTKLYLIQEGVRDPFSGSRWQKIVKTFKELYFNPSNFRALILACGLQAMQQLSGFNSLMYFSSTIFEVVGFNNPTATGLIIAATNFVFTIVAFGVIDFFGRRILLLLTVWGMIAALIVCAVAFHFLPKDENGNYTSGQSNAWAIVVLISMIVYVASYASGLGNLPWQQSELFPMSVRGLGTGMSTAVNWAGNLGIGASFLTLMSEITPTGTFALYGGLCFLGWLGALFCYPDLTDYTIEEIGELLKHGFGVRESMRHLKRVRQERAWSREDKEQNN

SEQ ID NO: 9667 - protein, 447 aa, Schizosaccharomyces pombe
MSFDRKDIGIKGLVLYTPNQYVEQAALEAHDGVSTGKYTIGLGLTKMAFVDDREDIYSFGLTALSQLIKRYQIDISKIGRLEVGTETIIDKSKSVKSVLMQLFGDNHNVEGIDCVNACYGGVNALFNTIDWIESSAWDGRDGIVVAGDIALYAKGNARPTGGAGCVALLVGPNAPIVFEPGLRGTYMQHAYDFYKPDLTSEYPYVDGHFSLECYVKALDGAYANYNVRDVAKNGKSQGLGLDRFDYCIFHAPTCKQVQKAYARLLYTDSAAEPSNPELEGVRELLSTLDAKKSLTDKALEKGLMAITKERFNKRVSPSVYAPTNCGNMYTASIFSCLTALLSRVPADELKGKRVGAYSYGSGLAASFFSFVVKGDVSEIAKKTNLVNDLDNRHCLTPTQYEEAIELRHQAHLKKNFTPKGSIERLRSGTYYLTGIDDMFRRSYSVKP

SEQ ID NO: 9668 - protein, 197 aa, Oryza grandiglumis
GQTPVFPRILGHEAGGIVESVGEGVTELAPGDHVLPVFTGECKECAHCKSEESNMCDLLRINVDRGVMIGDGQSRFTIKGKPIFHFVGTSTFSEYTVIHVGCLAKINPEAPLDKVCILSCGISTGLGATLNVAKPKKGQTVAIFGLGAVGLAAMEGARLSGASRIIGVDLNPAKFEQAKKFGCTDFVNPKDHSKPVH

SEQ ID NO: 9669 - protein, 126 aa, Glycine max
MPPAKRGKAKAESKVTTPSEKPNDFPSCIQSVPPSSVAITIHAKPGAKSASITDISDEAVGVQIDAPARDGEANAALLDYISSVLGVKRRQVSLGTGSKSRDKTVIVEDVTQQYVFDALDKVSKQH

SEQ ID NO: 9670 - protein, 387 aa, Bordetella parapertussis 12822
MKPDTRLVHLGRDPERFEGLVNIPPCRTSTFLHASVADYQAAASRKQDSLYYGRFGSQTSRALEAACTELDGGHGAMLFPCGLAAITRVLGSLLEPGQYLLMADTVYGPARAFCEQELARLGVETTWYAPDADLDALVRPATRVIYGEAPGSLTFEMQDLRALAEVARRHGLVSVVDNTWATSWFCQPLALGIDISIQSASKYIVGHSDAMLGVAVANEAQFPALRRAAAQYGNAVSPDDCYMALRGLRTLGVRLERHQASALRVAQWLRTRAEVEQVLHPALPDSPGHALWRRDFSGASGLFGVAFRAGDDAALARFVDDLRLFGIGVSWGGFESLALPSHPVRNTSAAALGGRPLVRLHIGLEDPDDLIADLARALDRHMAAARG

SEQ ID NO: 9671 - protein, 197 aa, Oryza latifolia
GQTPVFPRILGHEAGGIVESVGEGVTELAPGDHVLPVFTGECKECAHCKSEESNMCDLLRINVDRGVMIGDGQSRFTINGKPIFHFVGTSTFSEYTVIHVGRLAKINPEAPLDKVCILSCGISTGLGATLNVAKPKKGQTVAIFGLGAVGLAAMEGARLSGASRIIGVDLNPAKFEQAKKFGCTDFVNPKDHSKPVH

SEQ ID NO: 9672 - protein, 246 aa, Glycine max
  unsure (1)..(246): unsure at all Xaa locations
ELTNSKGRLNLMQAVSYDAYGGGPAGLKXLSSLCCVVEVGVPSPKANEVLLKLEPICINPIHWKIQKGLLRPLFLPXIPCTDVAGEIVEIGPQVKDFKVGDKVLAKLNHQYGGGLAEFVVASESLTAARPSEVSAAEAAALPIAGLTASDALTQIAGVKLDGTGQLKNILVTAASGGVGHYTVQLAKLGNTHVTATCGARNIDFVKGXDEVLDYRTPEGAALKSPSGRKYDAVINXTTGISWSTFD

SEQ ID NO: 9673 - protein, 197 aa, Oryza grandiglumis
GQTPVFPRILGHEAGGIVESVGEGVTELAPGDHVLPVFTGECKECAHCKSEESNMCDLLRINVDRGVMIGDGQSRFTINGKPIFHFVGTSTFGEYTVIHVGCLAKINPEAPLDKVCILSCGISTGLGATLNVAKPKKGQTVAIFGLGAVGLAAMEGARLSGASRIIGVDLNPAKFEQAKKFGCTDFVNPKDHSKPVH

SEQ ID NO: 9674 - protein, 563 aa, Mycobacterium tuberculosis H37Rv
MSAKENPQMTTARPAKARNEGQWALGHREPLNANEELKKAGNPLDVRERIENIYAKQGFDSIDKTDLRGRFRWWGLYTQREQGYDGTWTGDDNIDKLEAKYFMMRVRCDGGALSAAALRTLGQISTEFARDTADISDRQNVQYHWIEVENVPEIWRRLDDVGLQTTEACGDCPRVVLGSPLAGESLDEVLDPTWAIEEIVRRYIGKPDFADLPRKYKTAISGLQDVAHEINDVAFIGVNHPEHGPGLDLWVGGGLSTNPMLAQRVGAWVPLGEVPEVWAAVTSVFRDYGYRRLRAKARLKFLIKDWGIAKFREVLETEYLKRPLIDGPAPEPVKHPIDHVGVQRLKNGLNAVGVAPIAGRVSGTILTAVADLMARAGSDRIRFTPYQKLVILDIPDALLDDLIAGLDALGLQSRPSHWRRNLMACSGIEFCKLSFAETRVRAQHLVPELERRLEDINSQLDVPITVNINGCPNSCARIQIADIGFKGQMIDDGHGGSVEGFQVHLGGHLGLDAGFGRKLRQHKVTSDELGDYIDRVVRNFVKHRSEGERFAQWVIRAEEDDLR

SEQ ID NO: 9675 - protein, 356 aa, Neisseria meningitidis MC58
MTKHIAILRGDGIGPEIVAETVRVLDKLIAQGLDAGYEYAPLGGEAYDEYGHPYPEFTQNLCRKADAVLLGAVGSPQYDNLDRPLRPERGLLAIRKDLNLFANLRPAVLYPELANASTLKPEIVAGLDILIVRELTGDIYFGEPRGIRVLENGEREGYNTMKYSESEIRRIAHVAFQSAQKRSKKVCSVGKANVLETTELWREIFEEIGKEYPDVELSHMYVDNAAMQLVRAPKQFDVIATGNIFGDILSDEASMLTGSIGMLPSASLDENGKGLYEPSHGSAPDIAGQNKANPLATILSLAMLLRYSLNDEARAQQVENAVQKVLQQGLRTSDIYEEGTKLVSCSEMGDAVLAAL

SEQ ID NO: 9676 - protein, 369 aa, Xanthomonas axonopodis pv. citri str. 306
MKSRAAVAFGPGKPLEIVEIDVAPPKAGEVLVRITHTGVCHTDAFTLSGDDPEGIFPSVLGHEGGGIVEQVGEGVTSVKIGDHVIPLYTAECRKCKFCLSGKTNLCQAVRATQGKGLMPDGTTRFSYNGEPIYHYMGCSTFSEYTVVPEISLAVVNPEAPLEKVCLLGCGVTTGIGAVHNTAKVKPGESVAVFGLGGIGLAVIQGAVQAKAGRILAIDTNPGKFDLARSMGATDCINPKDYDKPIQEVIVELTDGGVDFSFECIGNVNVMRSALECCHKGWGESVIIGVAGAGQEISTRPFQLVTGRVWRGSAFGGVKGRTQLPGMVEQSMKGAIDLDPFITHTMPLEEINEAFHLMHEGKSIRTVIHF

SEQ ID NO: 9677 - protein, 464 aa, Pseudomonas aeruginosa PAO1
MAVYNYDVVILGTGPAGEGAAMNASKYGRKLAVVDSRRVVGGNCTHLGTIPSKALRHSVKQIIEFNTNPMFRQIGEPRWFSFPDVLKSADRVISKQVASRTGYYARNRIDMFTGTASFVDERTVEVVTPSGAVERLVADQFVIATGSRPYRPSDINFNHPRVYDSDTILSLSHTPRRLIIYGAGVIGCEYASIFSGLGVLVDLIDTRDQLLSFLDDEISDALSYHLRNNNVLIRHNEEYERVEGLDNGVILHLKSGKKIKADALLWCNGRTGNTDKLGLENVGIKVNSRGQIEVDENYRTSVSNIFAAGDVIGWPSLASAAYDQGRSAAGNIVESDSWRFVNDVPTGIYTIPEISSIGKNESELTAAKIPYEVGKAFFKGMARAQISNEPVGMLKILFHRETLEILGVHCFGDQASEIVHIGQAIMNQPGELNTLKYFVNTTFNYPTMAEAYRVAAFDGLNRLF

SEQ ID NO: 9678 - protein, 302 aa, Oryza sativa (japonica cultivar-group)
MASFRLMIAAVSLSLVQLSMGSRRLMELYIPPASDQLTYHHGSVLSGDIPVSILWYGKFTPTQMSIIADFVVSLTGAPNAATPSVGQWWGTIEQLYLSNAATNSQTSTRVLLDEQVSDEQCSLGKSLTLAQIDQLAARVGTKRGGVALVFTDEDVTVEGFCSSRCGKHGSDASAGTTHIWVGNSAKQCPGQCAWPFAQPVYGPQGTPLVAPNNDVGADGMVMILASMVAGTVTNPYGDGFYQGPQDAPLEACSACPGVYGSGAYPGNAGKLLVDATTGASYNANGANRRKYNPATSSCDTLV

SEQ ID NO: 9679 - protein, 474 aa, Zea mays
GRLLLLAGTNQEQQAPASGLTHPLGHCGDLNRNVLAPAAPFVKKDILFAQQTAENIAALLTPQSGAYYDLWVDGEKIMSAEEPPEVTKARNDNSHGTNFPDSPEPIYGTQYLPRKFKVAVTAAGDNSVDILTNDIGVVVVSDDAGEPIGFNIYVGGGMGRTHRVETTFPRLADPLGYVPKEDILYAIKAIVVTQRENGRRDDRKYSRMKYMIDRWGIDRFRAEVEKYYGKKFESFRPLPEWQFNSYLGWQEQGDGKLFYGVHVDNGRVGGQAKKTLREIIEKYNLDVSITPNQNLILCGIDQAWREPITTALAQAGLLEPKDVDPLNLTAMACPALPLCPLAQTEAERGILPILKRIRAVFNKVGIKDSESVVVRITGCPNGCARPYMAELGFVGDGPKSYQIWLGGTPNQSTLAESFMDKVKLDDIEKVLEPLFTYWNGTRQEGESFGSFTNRTGFDKLKEVVNKWAESPSAA

SEQ ID NO: 9680 - protein, 435 aa, Synechococcus elongatus PCC 7942
MASLQALRGTRDILPPETQVWQWIEQTAREILGRAAVQEVRTPIFEQTALFERGIGEATDVVGKEMYSFRDRGDRSLTLRPEGTAGTVRAYIEHGLASQGGVQRLWYTGPMFRYERPQAGRQRQFHQLGLELLGTADARADAEAIALATQILQALGLKNLRLDLNSVGDASDRAAYRQALVDYLTPYAADLDPDSRDRLERNPLRILDSKDERTQAIVAEAPSLHDYLSERSRQLFEQVQQLLTHLGIDYRLEPKLVRGLDYYTHTAFEIISSDLGAQATVCGGGRYDGLVSQLGGPETPAVGWAMGLERLVLLLQQGQAVPPATLDFYLVSRGAIAEGQALILAQKLRSAGFGVELDLSGSAFGKQFKRADRSGAIACLVLGDAEAEQGQVNLKWLQSGEQQTLDQSELLQDSDHWRSRLQAARTVSPVEVAPL

SEQ ID NO: 9681 - protein, 505 aa, Bifidobacterium longum DJO10A
MNSRGLKQVDLVHAAEHRGVKMGKSHISQYVAGKTMPREDVLEFLASELDVDTNWLRGEESTTQLNSDASNSVTDGEHAATPLAMGAAKPQTDSEIPVGRRRTFGKSHKLDNVLYDVRGPVADEAMRMEANGTHILKLNIGNPAPFGFRTPDEVVYDMAHQLTDTEGYSPSKGLFSARKAIMQYAQLKNIPNVTIDDIYTGNGVSELINLSMSALLDTGDEVLVPSPDYPLWTACVNLAGGTAVHYLCDEQSEWYPDIDDIRSKITSNTKAIVIINPNNPTGALYPKEVLQQIVDIAREHQLIIFSDEIYDRLVMDGLQHISIASMAPDLFCVTFSGLSKSHMIAGYRIGWMILSGNKRIAKDYIEGLNMLANMRMCSNVPAQSVVQTALGGHQSVNDYIVPGGRVHDQRDLVYDMLNQIPGITAVKPKAAFYIFPKIDVKRFNIHSDEQFALDLLHDKHILISHGGAFNWHRPDHFRVVYLPRMGMLRETMGEISDFFSYYWQS

SEQ ID NO: 9682 - protein, 437 aa, Emericella nidulans
MSDPSPKRFETLQLHAGQEPDPATNSRAVPIYATTSYTFNDSAHGARLFGLKEFGNIYSRIMNPTVDVFEKRIAALEGGVAAVAASSGQAAQFMAISALAHAGDNIVSTSNLYGGTYNQFKVLFPRLGITTKFVQGDKAEDIAAAIDDRTKAVYVETIGNPRYNVPDFEAIAKVAHEKGIPLVVDNTFGAGGYFVRPIEHGADIVVHSATKWIGGHGTTIGGVVVDSGKFEWGKNAARFPQFTQPSEGYHGLNFWETFGPIAFAIRVRVEILRDLGSALNPFAAQQLILGLETLSLRAERHASNALALANWLKKNDHVSWVSYVGLEEHPSHGVAKKYLKRGFGGVLSFGVKGEAAVGSQVVDNFKLISNLANVGDSKTLAIHPWSTTHEQLTDQERIDSGVTEDAIRISVGTEHIDDIIADFEQSFAATFKVVRGA

SEQ ID NO: 9683 - protein, 263 aa, Phleum pratense
MASSSSVLLVVALFAVFLGSAHGIPKVPPGPNITATYGDKWLDAKSTWYGKPTAAGPKDNGGACGYKDVDKPPFSGMTGCGNTPIFKSGRGCGSCFEIKCTKPEACSGEPVVVHITDDNEEPIAAYHFDLSGIAFGSMAKKGDEQKLRSAGEVEIQFRRVKCKYPEGTKVTFHVEKGSNPNYLALLVKFVAGDGDVVAVDIKEKGKDKWIALKESWGAIWRIDTPEVLKGPFTVRYTTEGGTKGEAKDVIPEGWKADTAYESK

SEQ ID NO: 9684 - protein, 438 aa, Methanococcus maripaludis S2
MNGELSFKYDNVMEENLGNLGISNGKLESFNNESSKIIEILKEKELNGEFGFLDVLNDNLDKYYELNEYSKNFENILIIGIGGSNLGLRAAETGILGSFTSRYEIPRIYYMDNSDPEKTHDILSNIDLEKTLVFVISKSGNTVETLANFFIVRNLMKKKNIDLEKHVVSITSGGELEKITKKENYIHFEVPENVGGRFSVLSSVGIAPLSCTSVDIKKLIDGAKSIEKSCKCEDIFKNPALMNAVIHKLMYNRGKTVSVMMPYIERLRSFGMWYGQLWAESLGKNGFGQTPVIAVGATSQHSQLQLYMDGPNDKIATFLKVNKYRNDLKIEYEYDHHLSGHNLSEVITSELVGTENSMKHNNIPNVKITLSKLNEITMGKLFLMYEMQTAISGELYGINAFDQPAVEYGKKIAHECLTGSKVDSENKYINGKYIITSK

SEQ ID NO: 9685 - protein, 195 aa, Glycine max
DIVMHSATKFIAGHSDIMAGVLAVKGEKLGKELYFLQNAEGSGLAPFDCWLCLRGIKTMALRIEKQQDNAQKIAEFLASHPRVKKVNYAGLPGHPGRDLHYSQAKGAGSVLSFLTGSLELSKHIVETTKYFSITVSFGSVKSLISMPCFMSHASIPAAVREARGLTEDLVRISVGIEDVNDLIADLDNALRTGPL

SEQ ID NO: 9686 - protein, 94 aa, Glycine max
LILTFFALLSLQNAALKPGGHQAFLNVEPRKTNEVNFWNKYFIAEFLHSTKKAVAATAEADKDDDLAVFLKDDEILKIEARKKGFVFFVFNSNC

SEQ ID NO: 9687 - protein, 234 aa, Deinococcus radiodurans
MEFFIDTAIVDEIREINAWGVLSGVTTNPSLIVASGRDFKEVIGEIAELVPGGAISAEVTALDAEGMIKEGKDVAAWHKQVVVKLPLTPAGLQACKALTSEGIKTNVTLCFSVPQALLAARAGATYVSPFVGRVDDTGWDGSELIRQIKEAFVLGDIQTKVLAASIRHPQHVVQAALAGADVATIPYKVFTQMVKHPLTQAGLDSFMADWAKRQGASPETPPSEAGTNPVKKEG

SEQ ID NO: 9688 - protein, 361 aa, ASPERGILLUS NIDULANS FGSC A4
MAQQDYKFEGWMGLDKNAADGNMVWQEFEPKEWEETDVDIKITHCGICGSDLHTLRSGWRPALYPCCVGHEIVGTAVRVGSKAVGGIKLGDRVGVGAQSDACVGRFGDCPECAMGWENYCSHKFVSTYNSVHFNGGKSYGGYALYNRCPSHFVVKIPDAVPSAEAAPMLCGGVTLYSPLKHNNCGPGKRVGIIGVGGLGHFGVLFAKALGADKVVAISRKNGKSEDALKMGADQYIATDDEPDWATKYARSLDLIVCTVSSTKMPLAEYVGLLATNGSFVQVGLPEDGVLNAPVANLRRRLKMESSLVGSPNEIREMFALVAEKGIKPWIETVPMKDANKAIVDMHEGKARYRYVLVNEEH

SEQ ID NO: 9689 - protein, 316 aa, Methylomonas aminofaciens
MANLFDQLKEFTTIVADTGDVEAIKSVKPYDATTNPSLLLKASTLPQYAPLIDEAIAYAKSQSGDKAQQIEDAADKLAVLIGQEILKHIPGKISTEVDARLSFDTDAMVQKGRKLIKLYADAGISKDRVLIKLASTWEGIKAGEILEKEGINCNLTLLFSFAQARACAEAGVFLISPFVGRILDWYKAKTGENYTSETDPGVLSVRKIYAYYKEHGYKTVVMGASFRNTGEITALAGCDRLTVSPNLLERAEGYRRYLPRVLVDNGATKQRPALLTEKEFRFDQNEDAMATEKLAEGIRGFVVDQNKLEKALAEKL

SEQ ID NO: 9690 - protein, 171 aa, Oryza sativa
RLYRQRSRGFAVKFYTEDGNWDLVGNNTPIFFVRDPILFPSFIHTQKRNPATHLKDPNMVWDFFTLRPESTHQAMFLFSDRGTPDGYRFMNGYGSHTFKLINAKGEAVYCKFHLKSGQGIKNLPVDKAAKISGDDPDYSIRDLYNAINNGDYPKWNFFIQVMTFEQAEKHR

SEQ ID NO: 9691 - protein, 369 aa, Photobacterium damselae subsp. piscicida
MKSRAAVAFGPGLPLEIVEIDVAPPKKGEVLVKISHTGVCHTDAYTLSGDDPEGLFPVVLGHEGAGVVVEVGEGVTSVKPGDHVIPLYTAECGECDFCTSGKTNLCVAVRETQGKGVMPDATSRFFVNGQPLYHYMGCSTFSEYTVVAEVSLAKINPQANAEQVCLLGCGVTTGIGAVHNTAKVQEGDSVAVFGLGGIGLAVVQGARQAKAGRIFAIDTNPSKFELAKQFGATDCINPNDYDKPVQQVLVEMTKWGVDHTFECIGNVNVMRSALESAHRGWGQSVIIGVAGAGKEISTRPFQLVTGRVWKGTAFGGVKGRTQLPGMVEDAMSGKIELAPFVTHTMELDKINEAFDLMHDGKSIRTVIHY

SEQ ID NO: 9692 - protein, 197 aa, Oryza australiensis
GQTPVFPRILGHEAGGIVESVGEGVTELTPGDHVLPVFTGECKECAHCKSEESNMCDLLRINVDRGVMIGDGQSRFTINGKPIFHFVGTSTFSEYTVIHVGCLAKINPEAPLDKVCILSCGISTGLGATLNVAKPKKGQTVAIFGLGAVGLAAMEGARLSGASRIIGVDLNPAKFEQAKKFGCTDFVNPKDHSKPVH

SEQ ID NO: 9693 - protein, 522 aa, Triticum aestivum
MSSMQFSSVLPLEGKACVSPVRREGSACERLKVGDSSSIRHDRASRRMCNGGRGPAATGAQCVLTSDASPADTLVLRTSFRRNYADPNEVAAVILGGGTGTQLFPLTSTRATPAVPIGGCYRLIDIPMSNCFNSGINKIFVMTQFNSASLNRHIHRTYLGGGINFTDGSVEVLAATQMPGEAAGWFRGTADAVRKFIWVLEDYYKNKSIEHILILSGDQLYRMDYMELVQKHVDDNADITLSCAPVGESRASEYGLVKFDSSGRVVQFSEKPKGDDLEAMKVDTSFLNFAIDDPAKYPYIASMGVYVFKRDVLLNLLKSRYAELHDFGSEILPRALHDHNVQAYVFTDYWEDIGQSDPSFDANMALCEQPPKFEFYDPKTPFFTSPRYLPPTKSDKCRIKEAIISHGCFLRECKIEHSIIGVRSRLNSGSELKNAMMMGADSYETEDEISRLMSEGKVPIGVGENTKISNCIIDMNARIGRDVVISNKEGVQEADRPEEGYYIRSGIVVIQKNATIKDGTVV

SEQ ID NO: 9694 - protein, 306 aa, Schizosaccharomyces pombe
MGKIKNKIVRQQQYMKALHQKNKDKLERRKERAKEEEKDPEKKRLRLSENIPATIESKRVYDETIIEDKPDEELQAELKDDEFSAYFSEERKVPKLLVTTSKRASRKCYDFASELLDCFPNAEFRKRTGDIEVHEIAEAAAKRGYTDLLVLNEDRKKTNALTLVHLPNGPSFYFTLSNLQTAKEISNHGRSTGHIPELIINNFSTRLGMTVARAFQSLFIQTPQIQGRQVVTIHCQRDFLFFRRHRYAFREKSNMPDGIGTGLQELGPRFTMRLRMVQKGVWDRKEGEVFFESNAGEESDRRKFWL

SEQ ID NO: 9695 - protein, 246 aa, Schizosaccharomyces pombe
MVISQPVGQIRLTNVSVVKYKKGGKRFEVACYKNKVTEWRNKIETDLDEVLQIHNVFNNVSKGHVASRQDLKKAFGTDDIDKIILEILQKGDFQVGEKERHHQMSSTYRDIVSHVTAMCMDPNSKRPYPASIIEKALSDCGFSVSTSKTAKSQALEAIKKLQEKNEIPIVRARMRIRIVVDVKQGKALRERLRSLADEIEEENIDDEYECIALVIPGNYKLIDELVRNETKNRGMVQVLDMSEART

SEQ ID NO: 9696 - protein, 411 aa, Bordetella parapertussis 12822
MNTISDSAAVAAGRRVAARMARVTTSKIYLAIAKVADMQAQGMQVASLTAGEPDFDTPAHVIEAAVQAMRGGDTHYTPVRGSLAMREAVRQKFQRENGLAFRDEEVMVGTGSKQVIANALAVTLETGDEVLLPVPYWAAYTGMVYAAGGVPTFVGTRAEDGYKLTPQALRAALGPRTRWVILNTPSNPSGLVYGSDELRALGEVLRERPDVLILTDEIYEHLNYTAEPPASLRKLCPDLAERIVVVNGVSKAYAMTGWRLGFAGGPADIIEAMANLQAQTTLAPCSISQAAAVAALNGPRESIDAMAAAYRRRRDLVMQIAGGQSGVRLQRPDGAFYAMLDLSEALAGGERFRGDPEPDQAFCEWLLETRHVAAVPGSVFGAPGSVRISFATDEQTIERGLTGLLDAAAHC

SEQ ID NO: 9697 - protein, 618 aa, Zea mays
MDSDYGVPRELSEVQKKRALYQPEVPPCLQGTTVRVEYGDAAIAADQAGAHVISHAFPHTYGQPLAHFLRKTAVVLDAKVISEHPVVRVGIVFCGRQSPGGHNVVWGLYEAIKAHNQNSKLIGFLGGSDGLLAQRTLEITNEVLASYKNQGGYDMLGRTKDQIRTTEQVNGAMASCQALKLDALVIIGGVTSNTDAAQLAETFAEAKCATKVVGVPVTLDGDLKNQFVETTVGFDTICKVNAQLISNVCTDALSAEKYYYFIRLMGRKASHVALECALQSHPNMVILGEEVAASKLTIFDITKQICDAVQARAEKDKNHGVILIPEGLVESIPELYALLQEIHGLHGKGVSVENISSQLSPWASALFEFLPPFIRKQLLLHPESDDSAQLSQIETEKLLAQLVETEMNRRLKEGTYKGKKFNAICHFFGYQARGALPSKFDCDYAYVLGHVCYHIIAAGLNGYMATVTNVKSPVNKWRCGAAPISSMMTVQRWSRGPSATQIGKPAVHMASVDLKGKAYDVLRQNSSSFLLEDVYRNPGPLQFEGPGADSKPISLCVEDQDYMGRIKKLQEYLEKVKRIVKPGCSQDVLKAALSAMSSVTETLNIMTSSSTGQTPLSH

SEQ ID NO: 9698 - protein, 361 aa, Mycobacterium tuberculosis H37Rv
MSFLIASPEALAATATYLTGIGSAISAANAVAAAPTTEILAAGTDEVSTAISALFGAHAQAYQALSAHVAAFHDQFVHTLTAGAGSYMAAEAAAASPLQALQLELLNAINAPTLALLGRPLIGDGTDAAPGSGGAGGAGGILIGNGGTGGASDLAGTGRGGVGGAGGAGGLFGIGGAGGGCGSAVAIGGDGGAGGAGGVFSGGGAGGAGDAIGGSGGAGGTGGLLGGGGGAGGAGGAGGNGGGASNSASIGGDGGSGGAGGMLYGAGGVGGNGGAAVAIGGDGGAGGRAGAIGNGGDGGNGGTSNTPGGSGGDGGNGGNAGLIGNGGNGGNAEIVISGGSVAGTGGNGGLLLGFNGTNGLP

SEQ ID NO: 9699 - protein, 197 aa, Oryza schlechteri
GQTPVFPRILGHEAGGIVESVGEGVTELVPGDHVLPVFTGECKDCAHCKSEESNMCDLLRINVDRGVMIGDGQSRFTIKGKPIFHFVGTSTFSEYTVIHVGCLAKINPEAPLDKVCILSCGISTGLGATLNVAKPKKGQTVAIFGLGAVGLAAMEGARLSGASRIIGVDLNPAKFEQAKKFGCTDFVNPKDHSKPVQ

SEQ ID NO: 9700 - protein, 448 aa, Corynebacterium glutamicum ATCC 13032
MPESILGRMDTKLGAELGTEFDLIVVGFGKAGKTIAMKRSAAGDKVALIEQSPQMYGGTCINVGCIPTKKLLFETATGKDFPDAVVARDQLIGKLNAKNLAMATDKGVTVIDGKATFTASHEITVTSGSDTLVLYAPTIVINTGSTPVIPNVPGTDNPHVFDSTGIQHISPLPKHLAIIGGGPIGLEFATLFSGQGSKVTIIDRGELPLKNFDREVAELAKTDLEARGITFLNNAELTGFSGDLTIALKDHELLADAALLAIGRRPATDGLGLEQAGIKTGTRGEVLVDAHLRTNIDGIFAVGDVNGGPQFTYVSYDDHRIVLDQLAGTGKKSTAHRLIPTTTFIEPPLSTIGDNTEGENVVVKKALIADMPIVPRPEIINQPHGMVKFFVDKQSDALLGATLYCADSQELINTVALAMRHGVTASELGDGIYTHPATSEIFNQLLGS

SEQ ID NO: 9701 - protein, 372 aa, Actinobacillus pleuropneumoniae serovar 1 str. 4074
MEFIKTRAAVAWAPNEPLKIEELDLMPPQKGEVLVRLVATGVCHTDAYTLSGQDSEGVFPCVLGHEGAGIVEAVGEGVTDFKVGDHVIPLYTAECRKCKFCLSGKTNLCSAVRETQGKGLMPDGTVRFFKDDQPIFHYMGTSTFSEYTVVSEYSLAKIQENAPLDEVCLLGCGVTTGIGAVTRTAKVKKGDTVAIFGLGGIGLAAIIGARMAGAGRIIAIDINPAKFEKAKELGATDCINPKDYEQPIQNVIIEMTDGGVDFSFECVGNVDLMRSALECCHKGWGESIIIGVAPAGAEIRTRPFQLVTGRVWRGSAFGGVKGRTELPGIIDQFMKGEFKLRDFITHTMPLEDINKAFDLMHEGKSIRTVIHF

SEQ ID NO: 9702 - protein, 197 aa, Porteresia coarctata
GQTPVFPRILGHEAGGIVESVGEGVKELVPGDHVLPVFTGECKDCAHCKSEESNMCDLLRINVDRGVMIGDGQSRFTIKGKPIFHFVGTSTFSEYTVIHVGCLAKINPEAPLDKVCILSCGISTGLGATLNVAKPKKGQTVAIFGLGAVGLAAMEGARLSGASRIIGVDLNPAKFEQAKKFGCTDFVNPKDHSKPVQ

SEQ ID NO: 9703 - protein, 323 aa, Triticum aestivum
  unsure (1)..(323): unsure at all Xaa locations
MGPKLVEVTQLFNRFKGAFKAQPNFDVCLEPSRSQHKVVLTKFPMPYNRMFQARRPKTLARMPYACDGQIYHXVVILTCENVMPQRCIWKASFCQLKPXYYSGTTCGSKFLHXGSEASPIIGGVILLXLLVQNRNFXEFHTELELLPAKALDNAYIKHGVELEQSFMEGXAYNRVLSARQTAPHETYIYFMDLLVKTVRDEIXLGASEKGYDYLSINDAKQMFKFSSEQGTAGQYIAEEHPEWDVKDGRVLFQKVKESQXPCKEIPAASNISQALFHARSRENRVMCLPRRRSSTRPLATRGNWRGLCDLFASFFFIFGLSFP

SEQ ID NO: 9704 - protein, 401 aa, Bifidobacterium longum DJO10A
MKTLKDLGDLKGKRVLVRADFNVPLDGTTITDDGRIKAALPTIKTLREEGAKVILMAHLGRPKGKVVPELSLAPVAARLGELLGANVPLAKDTYGEDAQAKVAAMNDGDVVLLENVRFNPEETSKDADERAAYAKKIAALGEAFVSDGFGVVHRAQGSNYDVAADLPAAAGLLVEKEVKALSKATENPERPFTVVLGGSKVSDKLGVIENLLDKANRLVIGGGMVFTFLKAKGYEVGTSLLEEDQLEKVKGYIETAEKNGVELVLPTDVVVNAGFPAGDTPVAPEVVAADAIPADKMGLDIGPESQKLFHDKIVDSKTVVWNGPMGVFEVPEFAAGTKAVAQGLVDATAAGAFTIVGGGDSASAVRNLGFPEDGFSHISTGGGASLEFLEGKELPGLKVLE

SEQ ID NO: 9705 - protein, 674 aa, Methanococcus maripaludis S2
  unsure (1)..(674): unsure at all Xaa locations
MELDFIHTICPYCGTGCGVDLVVKDGTLVGTNPFKRHPVNEGKTCIKGSYCHEFVHRDDRLKTPLIRKNGELVEASWDEALELISGKLQNYSPEEVGFFSSARCTNEDNYVFQKFARTVIKTNNVDHCARLXHSATVVGLGQAFGSGAMTNSISDIEDADCIFIIGSNTFEQHPLIARRVVRAKEKGTKIIVIDPRYTPTAKQADLYLQLLPGTNIAVLNAIMHVLVKENLVDEEFIKNRTKGYEELKTTLETYTPEYASKLSGVAPELIVEAAKMYGSANAASILYCMGITQFTTGVNNVKSCCNLAMITGNIGKPGTGVNPLRGQNNVQGACDMGALPNVFPGYQAVPANHEKYAEAWNTCVDPNVGLSIPDMLAKAGEQVKCIYVMGENPMVSDPDIHHVEHALKSLDLLIVQDIFLTETAQVADVVLPGASWAEKDGTFSNTERRIQKINKAVDSPGEAIADWKIVKMLAEKMGQGELFNFNTAEEVFQEIAKVTPQYAGVTYERLGVDGLHWPCKTCEDPGTPILHCEKCLTPDGLGNIFAIDYADPDEMADSEYPMTLTTGRIIFHYHTGTMTRRSKHMADEINEGFVEIHPEDAEKMGIKNKQKVKVSTRRGEVVVNAKITPNIKQGVVFMPFHFAETAANILTNPAQDPNCKIPEYKVCAAKVEKI

SEQ ID NO: 9706 - protein, 313 aa, Oryza sativa (japonica cultivar-group)
MAAKAVMLALLVLVSTAQVSMGARRRMELYKPDPADMLSYHSGAVLQGNIPVSIYWYGKFTPAQKSILFDFLLSLSVAPYAAAPSVAQWWSSIDELYLSKAVQTNSNGQSKKTQVLVASQVSDINCSMGKSLTLAQVAALAAQAKPKKGGIALVFTAQDVTVEGFGMSRCGLHGSDAKSGTAYIWVGNPATQCPGECAWPFHQPMYGPQGAPLVAPNGDIGADGMVMNLASMLAGTVTNPFGDGYYQGSRDAPLEAATACPGVFGSGAYPGFAGELKVDQATGASYNANGANGRKYLLPALYNPSTGTCNTLV

SEQ ID NO: 9707 - protein, 316 aa, Oryza sativa (japonica cultivar-group)
MSHAAIVLVSVLLLCSAHPSAGARRLMELYKPPPSEQLTYHNGTVLRGDIPVSVVWYGRFTPAQKAVVSDFLLLLTVASPAPTPSVSQWWNTINQLYLSKAAAQGKNGGGGGKITTQVRLAGQLTDDQCSLGKSLKLSQLPALAARAKPKKGGIALVLTAQDVSVEGFCMSRCGTHASNAKARTAYVWVGNSATQCPGQCAWPFHQPVYGPQTPALVPPSGDVGMDGMVMNIASMVAGVVTNPFGDGFYQGPKEAPLEAATACPGVYGSGAYPGYAGNLAVDPATGASYNANGAHGRKYLLPALFDPATSTCSTLV

SEQ ID NO: 9708 - protein, 470 aa, Synechococcus sp. PCC 7942
MFDKRWRTLGLTAALAGISAFLLAHPTLAATAPQLTLEQLNSNVTAAKTGTDTLLLLIGSALVLLMTPGLAFFYGGFGRAQNVLNIMMMSFLMMGLVGMTWVIYGYSLAFDTSLGSPFIGGFSNLFFNGVGGKFGIDPVWAGDELMISGMSASSFALFQGMFAIITPALISGALVERVNFKAWFWFGLLWSTLVYIPMAHMVWGSNGFIYGQIGALDFAGGTVVHIASGVGALVSVAMIGPRRVFPNRLSPPHNVPFILLGAGLLWFGWFGFNGASYFAAQGAGFAFLTTNTAAATAMLTWLLLEQIDLGKPTAVGAATGAVAGLVGITPSAGFIPVWAALPIGALTALVCFLFVAKVKSRIRLDDSLDAFGVHGVGGTVGAILTGIFAQKDFLVEKAFPTQFKVISQGPLAMTWAQIQAVLITYLFVGIATFVIWTILKSVMRVRATEEQELEGLDFALHGEDAYSKER

SEQ ID NO: 9709 - protein, 273 aa, Glycine max
NFPRQQGEKKNSDELAQKMAKLCDVYVNDAFGTAHRAEATTHGIAKFAPVACAGPLLAAELDALGKALGQPARPLAAIVAGSKVSTKLTILTSLAEKVDNLIVGGGIANTFMLASGLKIGKSLVEADLVGEAKAIIDMMAKRGASVPIPVDVVCAKEFSATAAATVKDVKDVTDDDMILDIGPKTASQLAEQIAKAGTVVWNGPVGVFEFDQFGEGTKTLAMAIANSKAFSIAGGGDTLAAIAKYNIADKVGYISTGRGAFPEFLERKTLPAV

SEQ ID NO: 9710 - protein, 220 aa, Pseudomonas fluorescens PfO-1
MGTFWLVLGGCGSAVIAASSPLGIGVLGVALAFGLTVLTMAFAIGHISGCHLNPAVSVGLVVGGRFPAKELPAYVIAQVLGGILAAALLYHIASGKEGFDIAAGLASNGYGEHSPGKYSMASGFVTELVMTAMFVVIILGATDKRAPAGLAPIAIGLALTLIHLISIPVTNTSVNPARSTGPALMVGGWAIAQLWMFWVAPLLGAVVGGVLYRWLGKEDS

SEQ ID NO: 9711 - protein, 489 aa, Photorhabdus luminescens subsp. laumondii TTO1
MRIQNKMLINGDWIDASDGQTIEVMNPHDGSLITRVAEAKEADVDCAVAAAKAAYPAWGRLQASERGALLLKLADKIEEHAAELAQLETMDTGHPIRDTLNIDVPRTAYCFRYFGGMADKLEGSVIPVEEGFLNYTTREPIGVVGQIVPWNFPLMFTSWKMAPALAAGNTIVIKPSEITPLSTLRIAELMMEVGFPPGVINVVVGYGNSAGARLSEHEDVGKIAFTGSTMTGQSIVAASAGNLKKVQLELGGKGANIIFEDADLTKAVGGSAWAIFHNQGQACIAGSRIILHESIADAFLEKFLTLAGSIRLGDPLLPETEMGPVTSLQHRERVLAYCDVARSQGCEILLGGKPPADPALANGCYIEPTVVRAKYSDRIAQEEVFGPFVTVITFKNDEEALAIANSTEYGLGSGLWTKDISRAHRFARDMHAGMVWINCYKRVNPASPFGGVGRSGYGREMGFEVMREYTQVKSVWVNVDAKIPPFYQR

SEQ ID NO: 9712 - protein, 385 aa, uncultured bacterium 578
MKDNKFNTKAIREGYQPTQEQEHSAAIFLTSSFRFDSAEQAAKRFDNKDQGNVYSRFTNPSVVAFEEKLAVLEGAEQCLATASGMSAIFATIMTLLKPGEHMVASRGMFGTTIVLLNTIIQKFNIEVTFVDLPDLNDWKNSVQTNTKLFMLETPSNPLGEVVDLRALSAISKKNNIILAIDNCIMTPALQKPLALGADLVIHSATKYIDGQGRCLAGAIAGNNKLIDEISSFARSTGPTLSAFNAWIIFKGLETLSLRMQAHCENAKKLAVWLNEQEFVKKVHYLGLDSHPHHSIAKEQQSDYGGIVSFEVIGGRKEAFRLINNTKMISITANLGDTKSTITHPATTTHVRLSDEEKQQSNISENLIRISVGLEDIEDIIADIKP

SEQ ID NO: 9713 - protein, 649 aa, Nostoc punctiforme
MCGITGFWDISKQFSGEHLDETIQKMSKTLLHRGPDDGGIWTDVEVGVALGHRRLSIVDLSPLGHQPMMSANGRYMVVFNGEIYNFLELRRELTQLGHNFRGHSDTEIMLAGFSEWGLDKAIRRFNGMFAFALWDRQKRILHLGRDRLGEKPLYYGWQGSTFLFTSELKALKAHPNFRAEINRDALTQFFRYSYLPAPYSIYQGIYKLPPGTLLSWNGIDAHPDPVTYWSAREVTELGIAEPFMGSESEAVIQLEALLREAVGLRMVADVPLGAFISGGIDSSTIVALMQAQSSQPVKTFTIGFNEEAYNEAKHAKAVAKHLGTDHTELYVNPKEALEVIPKLPFLYDEPFSDVSQIPTFLVSQLAKQQVTVSLSGDGGDELFAGYNRYLFGRKIWQAIGWIPTTVRKNSARALTSVSPQNWNRGFANVNALLPSRIKQPEFGNKLHTFSEIMALPNPTAIYTKLVSHWEDPKALVIDGLEPPTILSNSQNWPHLLDFTQCMMYFDTVTYLPDDILVKVDRASMGVSLEGRIPFLDHRLVEFAWRLPLSMKIRNGQGKWLLRQVLYKYVPPTLVERPKVGFGVPINSWLRGPLRDWAEELLNENRLKNEGFFNPKPIREKWEEHLSGAASWEYRLWDVLMFQAWLEANH

SEQ ID NO: 9714 - protein, 412 aa, Shigella flexneri 2a str. 301
MPQQNYLDELTPAFTPLLAIKEASRCLLCHDAPCSQACPAQTDPGKFIRSIYFRNFKGAAETIRENNALGAVCARVCPTEKLCQSGCTRAGVDAPIDIGRLQRFVTDFEQQTGMEIYQPGTKTLGKVAIIGAGPAGLQASVTLTNQGYDVTIYEKEAHPGGWLRNGIPQFRLPQSVLDAEIARIEKMGVTIKCNNEIGKTLTLEQLKAENRAVLVTVGLSSGSGLPLFEHSDVEIAVDFLQRVRQAQGDISIPQSALIIGGGDVAMDVASTLKVLGCQAVTCVAREELDEFPASEKEFASARELGVSIIDGFTPVAVEGNKVTFKHVRLSGELTMAADKIILAVGQHARLDAFAELEQQRNTIKTQNYQTRDPQVFAAGDIVEGDKTVVYAVKTGKEAAEAIHHYLEGACSC

SEQ ID NO: 9715 - protein, 248 aa, Zea mays
  unsure (1)..(248): unsure at all Xaa locations
MAATIQSVKARQIFDSRGNPTVEVDVCCSDGTFARAAVPSGASTGVYEALELRDGGSDYLGKGVSKAVNNVNSIIAPALVGKDPTAQTELDNFMVQQLDGTKNEWGWCKQKLGANAILAVSLAVCKAGASVKKIPLYQHIANLAGNKQLVLPVPAFNVINGGSHAGNKLAMQEFMILPTGAASFKEAMKMGXVEVYHNLKSVIKKKYGQDATNVGDEGGFAPNIQENKEGXELLKTAIEKRLDTPARL

SEQ ID NO: 9716 - protein, 231 aa, Fusobacterium nucleatum subsp. vincentii ATCC 49256
MNKEQKSKFVHEVFENIHTQYDKANNRISFGLQKNWKQELVDKIVEEIPKNADFLDVCCGTGDISIWLAEKRKDLNIVGVDFSSAMLNEAVKKSKDLDIVWKEADALCLPFKDCSFSAVAISFGLRNTVDYEKVLSEMIRVVKKDGFVYCLDSFVPDCLWIQPFYKIYFKYIMPLFGGGKKYYKEYVWLYESTQQFLKKKELILLYEKLGLKEIKHHSKMFGVCVMIQGKK

SEQ ID NO: 9717 - protein, 583 aa, Mesembryanthemum crystallinum
MATFKVSRVETKPYDGQKPGTSGLRKKVKVFAQPHYLENFVQSTFDALTADKIKGKTLVVSGDGRYYSEQAIQTIIKMSAANGVKSVWVGQDGLLSTPAVSAVIRERVGKDGSKASGAFILTASHNPGGPNEDFGIKYNMENGGPAQEGVTNKIYENTTTIKEYLIAKELPNVNISKTGVTSFSGPDGQFDVEVFDATETYVKLMKSIFDFQAIKKLLSIPSFTFCYDALHGVAGVYAKRIFVDELGANESSLLNCTPKEDFGGGHPDPNLTYAKELVERMGLGKSNTQGEPPEFGAAADGDADRNMILGKRFFVTPSDSVAIIAANAVEAIPYFSGGLKGVARSMPTSAALDVVAKHLNLKFFEVPTGWKFFGNLMDAGVCSICGEESFGTGSDHVREKDGIWAVLAWLSILAHKNKDNLNGEKLVTVEDIVCQHWATYGRHYYTRYDYENVDAGGAKELMAYLVNLQSDLSKVNNIVKGVHSGVANVIAADEFEYKDPVDGSVSKHQGIRYMFEDGSRLIFRLSGTGSEGATIRLYIEQYEKDSSKTGRDSQEALKPLVDVALKLSKMQEFSGRSEPTVIT

SEQ ID NO: 9718 - protein, 253 aa, Oryza sativa
  unsure (1)..(253): unsure at all Xaa locations
ATKLARLNFARARGDYVDTPIFFSWFQVLLPMFPRLXPSFEKTSNAVAELKTTRAIYEXSVILRINVXDQDAFERNFYQLKAFYMDTRGIIPPSPDEYPILGLNLLRLLAQNKIAEFHVELELLSLXLDYPCIKXALNLEFSFMEGAYSQLFNARQTVPHEAYDFFIDLLAETIRDEIADCSAQAYDYLSISYAKKMLLFSCDQQLLKFISEAKHEWDVQNCLVLFDMAKSKPPAIPSLQQNKRSISYVKELD

SEQ ID NO: 9719 - protein, 484 aa, Microbulbifer degradans 2-40
MSNKYDVIVIGSGPAGYVAAIRCAQLGLKTACIEKWKDKDGKGVNGGTCLNVGCIPSKALLDSSHRYEDAHKGFASHGIKAPNVEIDVPSMIARKDKIVKQMSGGITGLFQANKVTSLYGTGKLLAGRKVQYVALDGKEEVLEAENVILASGSIPVNIPVAPADGDVIVDSTGALEFQAVPERLGVIGAGVIGLELGSVWGRLGSKVVCLEAMDSFLAMMDQQIATEAKKILVKQGLDIRLSCRVTGTEVVEAKGKKEVIVTYTDKDGNEAKETFDKLIVCVGRRPFTDGLLSEDSGVKLDERGSIYVNDLCSTSAPGVWAVGDVVRGPMLAHKGSEEGVMVAERIAGQKTVMNYDIIPNVIYTHPEIASVGKTEEQLKADGEAYEVGTFPFLAIGRAVAADCAEGMVKMIAHADTDRVLGCHIVGPNAADLVQQVAIAMEFGATSEDIGMTVFGHPTFSEAVKEAALAVHGHAIHMPNRKKRK

SEQ ID NO: 9720 - protein, 583 aa, Zea mays
MGLFTVTKKATTPFDGQKPGTSGLRKKVTVFQQPHYLQNFVQSTFNALPVDQVRGATIVVSGDGRYFSKDAVQIITKMAAANGVRRVWVGQNSLMSTPAVSAVIRERVGADGSKATGAFILTASHNPGGPKEDFGIKYNMGNGGPAPESVTDKIFSNTTTISEYLISEDLPDVDISVVGVTSFSGPEGPFDVDVFDSSVDYIKLMKTIFDFEAIKKLLTSPKFTFCYDALHGVAGAYAKHIFVEELGADESSLLNCVPKEDFGGGHPDPNLTYAKELVERMGLGKSSSNVEPPEFGAAADGDADRNMILGKRFFVTPSDSVAIIAANAVQSIPYFASGLKGVARSMPTSAALDVVAKNLNLKFFEVPTGWKFFGNLMDAGMCSICGEESFGTGSDHIREKDGIWAVLAWLSIIAFKNKDNLGGDKLVTVEDIVRQHWATYGRHYYTRYDYENVDAGAAKELMANLVSMQSSLSDVNKLVKEIRSDVSEVVAADEFEYKDPVDGSVSKHQGIRYLFGDGSRLVFRLSGTGSVGATIRVYIEQYERDSSKTGRDSQDALAPLVDVALKLSKMQEYTGRSAPTVIT

SEQ ID NO: 9721 - protein, 388 aa, Bordetella pertussis Tohama I
MIRSKLPDVGTTIFTVMSRLAIEHKAINLGQGFPDFDPDPELCVLVGKAMAAGHNQYPYMPGVAPLREAIAAKVKTLYGHAYDPETEITVTSGATEALMATVLAAVGPGDEVVVIEPCYDSYLPAIRLAGGTAVPVPLRAPTRDDPYYRIDWQRVRDAIGARTRLLMLNFPHNPTGAVLDESDLDALESIVRETGVLLLSDEVYEHIVFDGKPHASLSRRPLLAEHAFVISSFGKTYHTTGWKVGYCCAPRQLSAELRKVHQFMVFTVSSPMQFALAEYMANPKPYLDLPAFYQAKRDRLAAGLANTRFRPLPSPGTFFMLADYSEITKHAEADFARHLTIDHGVTVIPVSAFYQNPAAPESNHHLVRFCFAKQDATLDAAIERLAHV

SEQ ID NO: 9722 - protein, 301 aa, Solanum tuberosum
MVSNYISATVSSILLFLLCSSSLFGASMAALVQEQPLVLKYHNGALLKGTVTVNLIWYGKFTPIQRSIIVDFLQSLNSPKAPNPSAASWWKTTEKYKTGASTVTLGKQILDENCSLGKSLKNSHIVYLASKGGYMGRSVNLVLTAKDVFVEGFCSRCGSHGSTRGKVRFTYAWVGNSETQCAGQCAWPFHQPIYGPQTPPLLAPNGDVGVDGMIINVATVLAGTVTNPFNNGYFQGPATAPLEAVSACTGMFGSGSYPGYPGQTLVDKSTGASYNAHGVNGRRFLLPAMWDPTKSACSALV

SEQ ID NO: 9723 - protein, 403 aa, Microbulbifer degradans 2-40
MTIEIKAPTFPESVQDGTVATWHKQPGEACSRDELIVDIETDKVVLEVVAPADGSIAEIIKGEGEIILSGEVIAKFVAGAAGSAPAPAAAEAAPAASEASEDVIAAPAARKLAAEKGIDLALVKGTGKDGRITKEDVAGYKPAAAAAPAPAAAPKAAAPASTGAVAPTGLREEKRVPMTRLRARIAERLLDANNNTAMLTTFNEVNMAPVMNLRKQYKDLFEKTHNGSRLGFMGFFVKAAVEALRRFPAVNASIDGNDMVYHGYQDVGCAVSTDKGLVVPVLRNAENLSIAEIENGIRDFGLRARDGKLGIEEMTGGTFTITNGGVFGSLLSTPILNPPQAAILGMHKIQERPMAVNGEVKVLPMMYLALSYDHRIIDGKEAVQFLVTIKDLLEDPARMLLEV

SEQ ID NO: 9724 - protein, 243 aa, Oryza sativa
MSCGGAGQSGWLLEYGLVEEEIQGSDFIYMVDDPAAVSSVLLGFDVPRKEDGSGGQDNSASKKRSRPESSAPPGTKACREKLRRDRLNERFNELSAILEPGKPPRADKVSILSDAARLLSQLRAEAQKLKSSNESLQDSIKSLKAEKSELRDEKTRLKAERERLEQMLKGVGAATPAAPAPFVPHHAAAVAAAPAYHPAAFAQAGGKYVPYATSYAPPAAFWQWIPPTSLDTSKDPVMWPPVA

SEQ ID NO: 9725 - protein, 468 aa, Shigella flexneri 2a str. 301
MEGIMPDAKKQGRSNKAMTFFVCFLAALAGLLFGLDIGVIAGALPFIADEFQITSHTQEWVVSSMMFGAAVGAVGIGWLSFKLGRKKSLMIGAILFVAGSLFSAAAPNVEVLILSRVLLGLAVGVASYTAPLYLSEIAPEKIRGSMISMYQLMITIGILGAYLSDTAFSYTGAWRWMLGVIIIPAILLLIGVFFLPDSPRWFAAKRRFVDAERVLLRLRDTSAEAKRELDEIRESLQVKQSGWALFKENSNFRRAVFLGVLLQVMQQFTGMNVIMYYAPKIFELAGYTNTTEQMWGTVIVGLTNVLATFIAIGLVDRWGRKPTLTLGFLVMAAGMGVLGTMMHIGIHSPSAQYFAIAMLLMFIVGFAMSAGPLIWVLCSEIQPLKGRDFGITCSTATNWIANMIVGATFLTMLNTLGNANTFWVYAALNVLFILLTLWLVPETKHVSLEHIERNLMKGRKLREIGAHD

SEQ ID NO: 9726 - protein, 94 aa, Zea mays
MDPKMTEVTQMFARFKAAYARNDLNTCVTLLSQLKVHLTQFPSLPPLFQQTPNIVEELKLVFFIPPPAVVLSVKLEDQDAFERNFCQLKPYYMD

SEQ ID NO: 9727 - protein, 461 aa, Streptomyces coelicolor A3(2)
MTVSPPSTASTASTGSTGSTGSTATTGPSAGLAAPPSEPSAPRAGTAAPTGRPDIVDLYLKHIGSGRAVMGRVMGGMAEVRSEGVWIHADDGRRFLDFGGYGVFIMGHRHPAVVEAVHRQIDTHPLASRVLLEPVAARAAQALAAHTPPGLDYVHFVNSGAEATEAALKLARAHGLTSVITTRSGFHGKTLGALSVTANTTYQTPFQPLLPDVTQVAYDDPADLEQALAAHRDRACVIVEPVQGEGGVRIPRPGYLGQVRALCRTYGALLVVDEIQTGMGRLGTWWGVDAEDVRPDVLLVGKGLSGGVVPVAAMVATAEAYAPFSRDPYLHTSTFGASPIACAAALATVRAMEEEDTVARAAALGPRILTAVRDVCAPYQGGLVREVRGRGLLIGIEFAEEQAVGELMLELISRGVLVNNSLNSTRVLRLTPPAVVEDSALDLFLTTLGAALRGTADRMTG

SEQ ID NO: 9728 - protein, 345 aa, Streptococcus pneumoniae R6
MAKKIVALVGDGIGPEIMEAGLEVLEALAEKTGFDYEIDRRPFGGADIDAAGPPLPDETLKASREADAILLVAIGSPQYDGVAVRPEQGLMALRKELNLYANIRPVKIFDSLKYLSPLKPERISGVDFVVVRELTGEIYFGDHILEERKARDINDYSYEEVERIIRKAFEIARNRRKIVTSIDKQNVLATSKLWRKVAEEVAQDFPDVTLEHQLVDSAAMLMITNPAKFDVIVTENLFGDILSDESSVLSGTLGVMPSASHSENGPSLYEPIHGSAPDIAGQGIANPISMILSVVMMLRDSFGRYEDTERIKRAVETSLAAGILTRDIGGQASTKEMMEAIIARL

SEQ ID NO: 9729 - protein, 131 aa, Oryza sativa
MAPTVMASSATSVAPFQGLKSTAGLPVSRRSTNSGFGNVSNGGRIKCMQVWPIEGIKKFETLSYLPPLTVEDLLKSRVYLLRPKWPPWLENHKGGPFYREIAHGSPYSTSASYCTRMTMLVLGHTELTLAV

SEQ ID NO: 9730 - protein, 197 aa, Porteresia coarctata
GQTPVFPRILGHEAGGIVESVGEGVTELAPGDHVLPVFTGECKECAHCKSEESNMCDLLRINVDRGVMIGDGQSRFTINGKPIFHFVGTSTFSEYTVIHVGCLAKINPEAPLDKVCILSCGISTGLGATLNVAKPKKGQTVAIFGLGAVGLAAMEGARLSGASRIIGVDLNPAKFEQAKKFGCTDFVNPKDHKKPVQ

SEQ ID NO: 9731 - protein, 256 aa, Pantoea oleae
  unsure (1)..(256): unsure at all Xaa locations
GAXGGIXZALALLLKTQLPAGSELSLYDIAPVTPGVAVDLSHIPTAVSIKGFSGEDATPALQGANVVLIXXGVARXPGMDRSDLFNVNAGIVRNLIQQVADTCPQALIGVITNPVNTTVAIAAEVLKKAGVYDKNKLFGVTTLDIIRANTFVAELKGKNPGELNVPVVGGHSGVTILPLLSQIQGVXFSEQEVSDLTKHIQNAGTEVVEAKAGGGXXTLSMGQAAARFGLSLVRALNGESNVVEXAYVEXDGQYAR

SEQ ID NO: 9732 - protein, 331 aa, Zea mays
MTTLDLMGGYGRVDEQVAIQEAATAGLRGMERLILQLSQAGTGERSLSPPAVQAQRQQQKQLEQIQQQVDCRELTDMTVSKFKKVISILNRTGHARFRRGPVAARSQSQSQGPASPEPAQSAPAPAARPLTLDFTKSVSGYSRDSGFSVSGASSSFLSSVTTGDGSVSNGRAGGSSFLMLPPAPGAASCAKPPPAGAAQKRKCHDHAHSENVAGGKYGANGGRCHCSKRRKHRVKRTIRVPAISPKVADIPADEYSWRKYGQKPIKGSPYPRGYYKCSTVRGCPARKHVERDPADPSMLIVTYEGEHRHSPASGQDPPPPSLAPLPELPSH

SEQ ID NO: 9733 - protein, 197 aa, Oryza schlechteri
GQTPVFPRILGHEAGGIVESVGEGVTELAPGDHVLPVFTGECKECAHCKSEESNMCDLLRINVDRGVMIGDGQSRFTINGKPIFHFVGTSTFSEYTVIHVGCLAKINPEAPLDKVCILSCGISTGLGATLNVAKPKKGQTVAIFGLGAVGLAAMEGARLSGASRIIGVDLNPAKFEQAKKFGCTDFVNPKDHKNPVQ

SEQ ID NO: 9734 - protein, 212 aa, Gossypium turneri
DVYYWECKGYTPLFPRILGHEASGIVESVGEGVNDLKPGDHVLPIFTGECKECRHCLSEESNNMCELLRINCDRGVMLADGKTRFSINGKPIYHFVGTSTFSQYTVVHVGQVAKISPTAPLDKVCPISCGICTGFGATVNVAKPKKGQTVAVFGLGAVGLAAAEGARVCGASRIIAVDVNPRRFEEAKRFGITEFVNPKDYDKPVQEVIVEM

SEQ ID NO: 9735 - protein, 197 aa, Oryza meyeriana
GQTPVFPRILGHEAGGIVESVGEGVTELVPGDHVLPVFTGECKECAHCKSEESNMCDLLRINVDRGVMIGDGQSRFTINGKPIFHFVGTSTFSEYTVIHVGCLAKINPEAPLDKVCILSCGISTGLGATLNVAKPKKGQTVAIFGLGAVGLAAMEGARLPGASRIIGVDLNPAKYEQAKKFGCTDFVNPKDHSKPVQ

SEQ ID NO: 9736 - protein, 434 aa, Streptococcus thermophilus
MSIITDVYAREVLDSRGNPTLEVEVYTESGAFGRGMVPSGASTGEHEAVELRDGDKARYGGLGTQKAVDNVNNVIAEHIIGFDVRDQQGIDRAMIALDGTPNKGKLGANAILGVSIAAARAAADYLEVPLYSYLGGFNTKVLPTPMMNIINGGSHSDAPIAFQEFMIVPAGAPTFKEALRWGAEIFHALKKILKERGLETAVGDEGGFAPRFDGTEDGVETIIKAIEAAGYVPGKDVFIGLDCASSEFYDAERKVYDYTKFEGEGAAVRTAAEQIDYLEELVNKYPIITIEDGMDENDWDGWKALTERLGDKVQLVGDDFFVTNTAYLEKGIAEHAANSILIKVNQIGTLTETFDAIEMAKEAGYTAVVSHRSGETEDSTIADIAVATNAGQIKTGSLSRTDRIAKYNQLLRIEDQLGEVAEYRGLKSFYNLKK

SEQ ID NO: 9737 - protein, 197 aa, Oryza granulata
GQTPVFPRILGHEAGGIVESVGEGVTELVPGDHVLPVFTGECKECAHCKSEESNMCDLLRINVDRGVMIGDGQSRFTINGKPIFHFVGTSTFSEYTVIHVGCLAKINPEAPLDKVCILSCGISTGLGATLNVAKPKKGQTVAIFGLGAVGLAAMEGARLFGASRIIGVDLNPAKYEQAKKFGCTDFVNPKDHSKPVQ

SEQ ID NO: 9738 - protein, 206 aa, Gossypium harknessii
DVYYWECKGYTPLFPRILGHEASGIVESVGEGVNDLKPGDHVLPIFTGECKECRHCLSEESNNMCELLRINCDRGVMLADGKTRFSINGKPIYHFVGTSTFSQYTVVHVGQVAKISPTAPLDKVCPISCGICTGFGATVNVAKPKKGQTVAVFGLGAVGLAAAEGARVCGASRIIAVDVNPRRFEEAKRFGITEFVNPKDYDKPVQ

SEQ ID NO: 9739 - protein, 311 aa, Oryza sativa (japonica cultivar-group)
MAASSAAFAACLLACALLFQMCVASRKLTALVQDQPITMTYHKGALLSGRIAVNLIWYGNFSAPQRAVITDFVSSLSTPPSPQPQPEPSVASWFKTAQKYYANSKARFPALSLGQHVLDQSYSLGKRLGEKDLVRLAARGSPSRAINVVLTADDVAVDGFCMSRCGTHGASPRSRAGRFAYVWVGNPATQCPGQCAWPYHQPVYGPQAAPLTPPNGDVGVDGMVISLASMIVGTVTNPFGNGFFQGDADAPLEAATACAGVYGKGAYPGYAGSLLVDPASGASYNANGAHGRKYLVPALVDPDTSACSTVG

SEQ ID NO: 9740 - protein, 211 aa, Gossypium thurberi
DVYYWECKGYTPLFPRILGHEASGIVESVGEGVNDLKPGDHVLPIFTGECKECRHCLSEETNNMCELLRINCDRGVMLADGKTRFSINGKPIYHFVGTSTFSQYTVVHVGQVAKISPTAPLDKVCPISCGICTGFGATVNVAKPKKGQTVAVFGLGAVGLAAAEGARVCGASRIIAVDVNPRRFEEAKRFGITEFVNPKDYDKPVQEVIVE

SEQ ID NO: 9741 - protein, 197 aa, Oryza brachyantha
GQTPVFPRILGHEAGGIVESVGEGVTELAPGDHVLPVFTGECKECAHCKSEESNMCDLLRINVDRGVMIGDGQSRFTIGGKPIFHFVGTSTFSEYTVIHVGCLAKINPEAPLDKVCILSCGISTGLGATVNVAKPKKGQTVAIFGLGAVGLAAMEGARLSGASRIIGVDLNPAKFEQAKKFGCTDFVNPRDHKKPVQ

SEQ ID NO: 9742 - protein, 508 aa, Haemophilus influenzae Rd
MSSQCPFSHLAATNLTMGNGAPVADNQNSLTAGPRGPLLAQDLWLNEKLADFVREVIPERRMHAKGSGAFGTFTVTHDITKYTRAKIFSEVGKKTEMFARFTTVAGERGAADAERDIRGFALKFYTEEGNWDLVGNNTPVFFLRDPRKFPDLNKAVKRDPRTNMRSATNNWDFWTLLPEALHQVTVVMSDRGIPASYRHMHGFGSHTYSFWNEAGERFWVKFHFRTQQGIKNLTDAEAAEIIANDRESHQRDLYEAIERGDFPKWTLFVQIMPEADAEKVPYHPFDLTKVWSKKDYPLIEVGEFELNRNPENFFADVEQSAFAPSNLVPGIGASPDRMLQARLFNYADAQRYRLGVNYRQIPVNRPRCPVHSNQRDGQGRVDGNYGSLPHYEPNSFSQWQQQPDFAEPPLRINGDAAHWDYRNDDNDYFSQPRALFNLMNAEQKQSLFNNTAAAMGDAPDFIKYRHIRNCHWCDAAYGEGVAKALGLTVEDALKARDTDPALGQGGLL

SEQ ID NO: 9743 - protein, 219 aa, Gossypium thurberi
DVYYWECKGYTPLFPRILGHEASGIVESVGEGVNDLKPGDHVLPIFTGECKECRHCLSEETNNMCELLRINCDRGVMLADGKTRFSINGKPIYHFVGTSTFSQYTVVHVGQVAKISPTAPLDKVCPISCGICTGFGATVNVAKPKKGQTVAVFGLGAVGLAAAEGARVCGASRIIAVDVNPRRFEEAKRFGITEFVNPKDYDKPVQEVIVEMTGGGVDR

SEQ ID NO: 9744 - protein, 210 aa, Gossypium trilobum
VYYWECKGYTPLFPRILGHEASGIVESVGEGVNDLKPGDHVLPIFTGECKECRHCLSEETNNMCELLRINCDRGVMLADGKTRFSINGKPIYHFVGTSTFSQYTVVHVGQVAKISPTAPLDKVCPISCGICTGFGATVNVAKPKKGQTVAVFGLGAVGLAAAEGARVCGASRIIAVDVNPRRFEEAKRFGITEFVNPKDYDKPVQEVIVE

SEQ ID NO: 9745 - protein, 215 aa, Gossypium trilobum
VYYWECKGYTPLFPRILGHEASGIVESVGEGVNDLKPGDHVLPIFTGECKECRHCLSEETNNMCELLRINCDRGVMLADGKTRFSINGKPIYHFVGTSTFSQYTVVHVGQVAKISPTAPLDKVCPISCGICTGFGATVNVAKPKKGQTVAVFGLGAVGLAAAEGARVCGASRIIAVDVNPRRFEEAKRFGITEFVNPKDYDKPVQEVIVEMTGGG

SEQ ID NO: 9746 - protein, 215 aa, Methanococcus maripaludis S2
MKFFLDTANVEKIKEFNALGLVDGVTTNPSLIKKEGRDFYEVIKEICSIVDGPVSAEVIALDSEGMVKEARELVKLAENVVVKIPMTKEGMKAVNILSKEGIKTNVTLIFSANQALLAAKAGASYVSPFVGRLDDVGQDGMFLISEVMQVFGAYGIETEVIVASVRHPIHVLESAKMGADIATIPFDVLDKLFNHPLTDNGIAKFLSDWEAHMNR

SEQ ID NO: 9747 - protein, 436 aa, Haemophilus influenzae Rd
  unsure (1)..(436): unsure at all Xaa locations
MAKIVKVIGREIIDSRGNPTVEAEVHLXGGFVGLAAAPSGASTGSREALELRDGDKSRFLGKGVLKAVAAVNNEIAQAIVGKDATNQAEIDQIMIDLDGTENKSNFGANAILAVSLANAKAAAASKGLPLYAYIAELNGTAGVYSMPLPMMNIINGGEHADNNVDIQEFMIQPVGAKTLREALRIGAEVFHNLAKVLKAKGMSTAVGDEGGFAPNLASNADALACIKEAVEKAGYVLGKDVTLAMDCASSEFYNKENGMYEMKGEGKSFTSQEFTHYLEELCKEYPIVSIEDGQDESDWEGFAYQTKVLGDRVQLVGDDLFVTNTKILKEGIEKGIANSILIKFNQIGSLTETLAAIKMAKDAGYTAVISHRSGETEDATIADLAVGTAAGQIKTGSMSRSDRIAKYNQLIRIEEALERAGTPAAFPGLKAVKGQA

SEQ ID NO: 9748 - protein, 541 aa, Glycine max
MRKSAADRFRHLFNRSLLLLRHRHHHNHHPFPYSSSVSSLSPFSRSRFLSSTPFSMASDSPFPVTAQNINPKVLKCEYAVRGEVVTLAQNLQKDLQANPGSHPFDEILYCNIGNPQSLGQQPITFFREVLALCDHPAILDKSETQGLFSTDAIQRAWQIVDQIPGRATGAYSHSQGVKGLRDTIAAGIEERDGFPANPDDIFMTDGASPAVHNMMQLLIRSENDGILCPIPQYPLYSASIALHGGCLVPYYLDEATGWGLEIPELKKQLEAAKSKGINVRALVVINPGHPTGQVLGEANQRDIVEFCKQEGLVLLADEVYQENVYVPEKKFHSFKKVSRSMGYGENDITLVSFQSVSKGYHGECGKRGGYMEVTGFSAEVREQIYKVASVNLCSNISGQILASLVMSPPKVGDESYDSFMAEKENILASLARRAKTLEDAFNKLEGVTCNKAEGAMYLFPQIRLSEKAIKAAEAANATPDNFYCKRLLNATGVVVVPGSGFGQVPGTWHFRCTILPPEEKIPAIVTRLTEFHEKFMDEFRD

SEQ ID NO: 9749 - protein, 253 aa, Triticum aestivum
  unsure (1)..(253): unsure at all Xaa locations
MAPTVMASSATSVAPFQGLKSTAGLPVSRRSNGASLGSVSNGGRIRCMQVWPIEGIKKFETLSYLPPLSTEALLKQVDYLIRSKWVPCLEFSKVGFIFREHNASPGYYDGRYWTMWKLPMFGCTDATQVINEVEEVKKEYPDAYVRIIGFDNMRQVQXVSFIAFKPPGCEEVRQGPKQAHSRTGHILKVPLQLSTLTIAFGVFLSPFIFLNLGLMGPLFHPNIGEASYFMLGGFVYSPDIIIQYTLGKKKKKN

SEQ ID NO: 9750 - protein, 564 aa, Xanthomonas axonopodis pv. citri str. 306
MCSIFGIFGLQPGDDLQALRRQALECSQRQRHRGPDWSGVYVDTGAILVHERLAIVDPAGGSQPLLSEDGQLALAVNGEIYNHRELKAELLQPYAFQTGSDCEVINALYREDTPASYLNRLNGIFAFALWDKTEGRVIIARDPIGVVPLYWGHDREGRLRVASELKSLVDDCADAAQFPPGHWYDSATGALNRYYERAWRQYGAVEGVQVQLQELREAFERAVHRQLMTDVPYGVLLSGGLDSSLVAAVAARYARHRIEENDITEAWWPRLHSFAIGLKGSPDLAAAEVAAAALGTVHHGFEYTFDEGLDALPDVIRHIETYDVTTIRASTPMFLLARRIKAMGVKMVLSGEGSDEIFGGYLYFHKAPNAREFHEELVRKLDALNNYDCLRANKSMMAWGVEPRVPFLDREFLDVAMRMDARFKMIDKTSSGATRMEKGVLREAFAGYLPESILWRQKEQFSDGVGYGWIDGLKAHAQSQVSDRELAAADRRYPVNPPQTKEAYFYRSLFEQFFPGQAAAETVPGGKSIACSSPTAIAWDASFAAMADPSGRAIAGVHAQALAS

SEQ ID NO: 9751 - protein, 178 aa, Glycine max
  unsure (1)..(178): unsure at all Xaa locations
MASSMISSPAVTTVNRAGAGMVAPFTGLKSMAGFPTRKTNNDITSIASNGGRVQCMQVWPPVGKKKFETLSYLPDLDDAQLAKEVEYLLRKGWIPCLEFELEHGFVYREHNRSPXYYDGRYWTMWKLPMCGYTDAAQILNKLQYANTTYPNSFIRIIIFHNIPQIQCISLITYKHPSF

SEQ ID NO: 9752 - protein, 236 aa, Triticum aestivum
  unsure (1)..(236): unsure at all Xaa locations
MDPDMGENFAYYWETQRYLESEELVDSIFVGATEDAISYYDSSSPDGSHSSSTPMGAAMPGAGMGMGGTGANKNILMERDRRRKLNEKLYTLRSVVPNITKMDKAXSIIKDAIEYIQQLQAEERQMEAEVSALESATGAEDDYDGGLSVDQVSSAQRKKVKRALSVSSMNDALLAAAAAVASPPVEVLELRVSEVSEKVLVVSVTCSRQRDALTKVCPALEELXRLRVITANITFV

SEQ ID NO: 9753 - protein, 515 aa, Glycine max
  unsure (1)..(515): unsure at all Xaa locations
MLSSRIWQRRALISARTLFSASASHSSSSSPAIPFRFSKANASSSSHLIFNFARVNIYWFSTQPALELPASKIVDVPLAQTGEGIAECELLKWYVQEGDYVEDFQPLCEVQSDKATIEITSRYKGKISSFLYVPGDIVKVGETLLKILVDESAFPSGTPCDSENAKSPDSDQTLVNESVLTTVVDDSDNAKLIDSDPGKGRQTGVLSTPAIRSLAKQHGIDITEVCGTGKDGRVLKEDVLNFAVKKGIIKNPSTVLHSDSGEQLQGAEGYNCNVATKFYRSSEDRTLPLRGFQRAMVKSMSLAAKVPHFHYVDEINCDALVELKTSFQKNNPYPDVKYTFLPILIKSLSMALSKYPFMNSCFKEDALEVVLKGSHNVGIAMATPHGLVVPNIKNVQSLSIMEITKDXARLXXLASDNKLTFEEIXXGTIPLSNXGAIGGKFGSPLINXPEXXIIAIGRIQIVXRFADNGNVYPASLMNVNIXADHRXLDGATVARFCNEWKQLIENPELLTXHLK

SEQ ID NO: 9754 - protein, 583 aa, Zea mays
MGLFTVTKKATTPFEGQKPGTSGLRKKVTVFQQPHYLQNFVQSTFNALPADQVKGATIVVSGDGRYFSKDAVQIITKMAAANGVRRVWVGQNSLMSTPAVSAVIRERIGADGSKATGAFILTASHNPGGPTEDFGIKYNMGNGGPAPESVTDKIFSNTTTISEYLISEDLPDVDISVVGVTSFSGPEGPFDVDVFDSSVNYIKLMKTIFDFEAIKKLLTSPKFTFCYDALHGVAGAYAKHIFVEELGADESSLLNCVPKEDFGGGHPDPNLTYAKELVERMGLGKSSSNVEPPEFGAAADGDADRNMILGKRFFVTPSDSVAIIAANAVQSIPYFASGLKGVARSMPTSAALDVVAKNLNLKFFEVPTGWKFFGNLMDAGMCSICGEESFGTGSDHIREKDGIWAVLAWLSIIAFKNKDNLGGDKLVTVEDIVRQHWATYGRHYYTRYDYENVDAGAAKELMANLVSMQSSLSDVNKLIKEIRSDVSEVVAADEFEYKDPVDGSVSKHQGIRYLFGDGSRLVFRLSGTGSVGATIRVYIEQYEKDSSKTGRDSQEALAPLVDVALKLSKMQEYTGRSAPTVIT

SEQ ID NO: 9755 - protein, 505 aa, Xanthobacter autotrophicus
MNKPEIAITKQSPFKARYGNFIGGKFVEPVGGRYFDNTSPVTGGKICEIARSDADDIEKALDAAHAAKDAWGKTSAAVRALILNRIADRMEENLDLLALAETWDNGKPIRETTAADMPLAIDHFRYFAGAVRAQEGGISEIDHDTVAYHFHEPLGVVGQIIPWNFPILMAVWKLAPALAAGNCVVLKPAEQTPASILVLAELIADLLPPGVLNIVNGFGLEAGKPLASSSRIAKIAFTGETTTGRLIMQYASQNLIPVTLELGGKSPNIFFADVVAEDDDFFDKAVEGFVMFALNQGEVCTCPSRALIQESIYDRFMEKALKRVAAIVQGSPLDPATMIGAQASSEQLEKILSYIDIGKQEGAEVLIGGERNTFGGDLAGGYYVKPTVFKGHNKMRIFQEEIFGPVVSVTTFTDDAEALHIANDTLYGLGAGVWTRDGNRAYRFGRAIQAGRVWTNCYHAYPAHAAFGGYKQSGIGRENHKMMLDHYQQTKNMLVSYSPKKLGFF

SEQ ID NO: 9756 - protein, 412 aa, Spiroplasma citri
MTNKKELKDVQVKGKKVLVRVDFNVPMKDGQVTDDNRIIAALPTIKYLIAQEAKVILFSHLGKVKTADDLEKRDMAPVAKVLEQKLGQPVKFINAFEGKQLEEAINEMHNKEVILFQNTRFADIINSNGQISVDSEGKAAAKRESKNDSALGKYWASLGDVFVNDAFGTAHRAHASNVGIAENITESCLGFLVEKEVKMLSQCVDNPVKPFVAIIGGAKVSDKIGVIEHLLTKADKILIGGGMAYTFFAAQGHKIGNSLLEVDKVEIAKTFLAKGQGKIILPIDALEAPEFADVPAKVTTGFDIDDGYMGLDIGPKTIELFKKELADAKTVTWNGPMGVFEFKNYSIGTKAVCEAIAELKGAFTLIGGGDSAAAAIQLGYKDKFTHISTGGGASLEYMEGKPLPGIEAVQSK

SEQ ID NO: 9757 - protein, 416 aa, Escherichia coli
MESKVVVPAQGKKITLQNGKLNVPENPIIPYIEGDGIGVDVTPAMLKVVDAAVEKAYKGERKISWMEIYTGEKSTQVYGQDVWLPAETLDLIREYRVAIKGPLTTPVGGGIRDLNVALRQELDLYICLRPVRYYQGTPSPVKHPELTDMVIFRENSEDIYAGIEWKADSADAEKVIKFLREEMGVKKIRFPEHCGIGIKPCSEEGTKRLVRAAIEYAIANDRDSVTLVHKGNIMKFTEGAFKDWGYQLAREEFGGELIDGGPWLKVKNPNTGKEIVIKDVIADAFLQQILLRPAEYDVIACMNLNGDYISDALAAQVGGIGIAPGANIGDECALFEATHGTAPKYAGQDKVNPGSIILSAEMMLRHMGWTEAADLIVKGMEGAINAKTVTYDFERLMDGAKLLKCSEFGDAIIENM

SEQ ID NO: 9758 - protein, 506 aa, Xanthobacter autotrophicus
MNSPAFLSSAHTSPFKPRYGNFIGGTFVEPVSGRYFENTSPITGKVICEVPRSDEHDIERALDAAHAAKKAWGRTSAADRALVLLKIADRLEANLELLAGAETWDNGKPIRETTLADIPLAIDHFRYFAACVRAQEGTLGEIDHDTIAYHYHVPLGVVGQIIPWNFPILMAAWKLAPALGAGNCVVLKPAEQTPASILVLAELIADLLPPGVLNIVNGFGLEAGKPLASSPRISKIAFTGETGTGRLIMGYAAQNLIPVTLELGGKSPNIFFADVAAEDDDFLDKAVEGFVMFALNQGEVCTCPSRALVQESIFDKFMEKALARVAAIKQGSPLDPSTMIGAQASSEQMHKILSYIDIGRAEGAQVLAGGERNVLTGELADGFYVKPTVFLGKNNMRIFQEEIFGPVVSVTTFKDEEEALHIANDTLFGLGAGLWTRDGSRAYRVGREIEAGRVWTNCYHAYPAHAAFGGYKQSGIGRETHKMMLDHYQQTKNLLVSYSPKKLGFF

SEQ ID NO: 9759 - protein, 419 aa, Pseudomonas fluorescens PfO-1
MNDILPEQTPVWRYFEGTVSRLLDNYGYKQIRMPIVEFTELFKRSIGEVTDIVEKEMYTFEDRNGDSLTLRPEGTAACVRAVLEHGITGGGQVQKLWYIGPMFRHERPQKGRYRQFHQIGLEVFNLDGPDIDAELIIMTWRLWGELGIRDAVKLELNSLGTSESRGRYREALVEYLSAHHDKLDEDSQRRLKTNPLRVLDTKNADTQAVLVDAPKMADYLDDESRAHFKGLKARLDAVGIPYVLNPKLVRGLDYYSKTVFEWVTDKLGAQGTVCAGGRYDGLVEQMGGKPTPGVGFAMGIERLVLLLETLEQIPEEISRQVDVYLCAFGEEAELAGLALAERVRDQLPNLRLQVNAGAGSFKSQFKKADKSGALYALILGDDEMAQQVVGFKPLRGQGEQQSIAWDALAAHLATCVVQG

SEQ ID NO: 9760 - protein, 232 aa, Brassica napus
MASSSYAPFSAVFSGFAATKPNPPPTCSAFLVPKRRSNSRNLKNGVSLKSWNKHGFQFTSRNLSVYARATEEKTVHDFTVKDISGKDVSLDKFKGKPLLIVNVASKCGLTSSNYTELSQLYDKYRNQGFEILAFPCNQFGGQEPESNPDIKRFVCTRFKAEFPIFDKVDVNGPSTAPIYQFLKSKSGGFLGDLIKWNFEKFLVDKKGNVVQRYPPTTSPLQIEKDIQKLLVA

SEQ ID NO: 9761 - protein, 425 aa, Arabidopsis thaliana
MGLGNKGNKFNFGDNDLADEASGADGDEGDGFGSVACSICLETVVKNGDRAWANLQCDHQFHLDCIGSAFNAKGVMQCPNCRKVEKGQWLYANGCRSYPEFNVEDWVHEEDIYDIGAYSEMSFGVHWCPFGSSARLPSFEDGEFSPSSYHDLLGQQGYYTEPAAPTAGHPCPYVTYFGPVHSPSSSSGGAAGVSDSSSFSSHWNTGSSVSGEVPTPYGFPVDPHYHGWDYHPPPPPPPQHFSASGAHVGSPTQPTPPPAAARTSRANGSDMIRPRPPHFTRPFHGHSSSGRAGSSVASVPRTPPFPGSNARTRDRMQALQAYYQQSSAQSHQPDSPIVSRGPVFPSGRRPARGIASGMGSTSSSSDQAGGSGFIRFNIWERDPYMQSQQAYSVNQMDREPNIWTSSFNEGSGSFHQRHGGGGGSS

SEQ ID NO: 9762 - protein, 327 aa, Fusobacterium nucleatum subsp. vincentii ATCC 49256
MEIEKMEKKLAILTSGGDAPGMNAAIRATAKIAESYGFEVYGIRRGYLGMLNDEIFPITGRFVSGIIDKGGTVLLTARCEEFKQARFREIAANNLKKKGIEYLVVIGGDGSYRGANLLYKEHGIKVVGIPGTIDNDICGTDFTLGFDTCLNTILDAMSKIRDTATSHERTILIQVMGRRAGDLALHACIAGGGDGIMIPEMDNPIEMLALQLKERRKNGKLHDIVLVAEGVGNVFEIEEKLRGHINSEIRSVVLGHIQRGGTPSGRDRVLASRMAAKAVEVLSKGEAGVMVGIEKNEMVTHTLEKACSVEKRKSIEKDYELALLLSK

SEQ ID NO: 9763 - protein, 382 aa, Pseudomonas fluorescens PfO-1
MITSKLPNVGITIFTQMSQLAAQTGAINLSQGFPDFDGPQALRDAVGRHIASGHNQYSPMTGLPALRQQIAAKIARSYGANVDADTEVTVTPGATQAIFCAIQAVIRTGDEVIVFDPAYDSYEPAVELAGGRCVHVQLGLKDFSIDFDRLSAALSPRTRMIILNTPHNPSGALISRAELDQLAALIRDRDIYVISDEVYEHLVFDGVPHVSVLAHEELYQRAFVVSSFGKTYHVTGWKTGYVVAPPALTAELRKVHQYVSFCGVTPLQYALADYMAEHPEHVEELPGFYQAKRDLFCDLLAPSRFSFTRVTGTYFQLVDYSQIRPDLNDVEMAMWMTREHGVASIPVSVFYQHPPEGQRLVRLCFAKREETLREAAAKLCVI

SEQ ID NO: 9764 - protein, 391 aa, Streptococcus pyogenes MGAS8232
MTIGIDKIGFATSQYVLKLEDLALARQVDPAKFSQGLLIESFSVAPITEDIITLAASAADQILTDEDRAKIDMVILATESSTDQSKASAIYVHHLVGIQPFARSFEVKQACYSATAALDYAKLHVASKPDSRVLVIASDIARYGVGSPGESTQGSGSIALLVTANPRILALNKDNVAQTRDIMDFWRPNYSFTPYVDGIYSTKQYLNCLETTWQAYQKRENLQLSDFAAVCFHIPFPKLALKGLNNIMDNTVPPEHREKLIEAFQASITYSKQIGNIYTGSLYLGLLSLLENSKVLQSGDKIGFFSYGSGAVSEFYSGQLVAGYDKMLMTNRQALLDQRTRLSVSKYEDLFYEQVQLDDNGNANFDIYLTGKFALTAIKEHQRIYRTNDKN

SEQ ID NO: 9765 - protein, 197 aa, Rhynchoryza subulata
GQTPVFPRILGHEAGGIVESVGEGVTELAPGDHVLPVFTGECKECAHCKSEESNMCDLLRINVDRGVMIGDGQSRFTINGKPIFHFVGTSTFSEYTVIHVGCLAKINPEAPLDKVCVLSCGISTGLGATLNVAKPTKGSTVAIFGLGAVGLSAMEGARLSGASRIIGVDLNPAKYEQAKKFGCTDFVNPKDYNKPVQ

SEQ ID NO: 9766 - protein, 295 aa, Methanothermobacter thermautotrophicus
GAHMKGIVLAGGSGTRLYPITRAVSKQLLPIYDKPMIYYPLSVLMLAGIRDILIISTPRDLPLYRDLLGDGSQFGVRFSYRVQEEPRGIADAFIVGKDFIGDSKVALVLGDNVFYGHRFSEILRRAASLEDGAVIFGYYVRDPRPFGVVEFDSEGRVISIEEKPSRPKSNYVVPGLYFYDNQVVEIARRIEPSDRGELEITSVNEEYLRMGKLRVELMGRGMAWLDTGTHDGLLEASSFIETIQKRQGFYIACLEEIAYNNGWITREDVLEMAEKLEKTDYGKYLRDLAEGNFHG

SEQ ID NO: 9767 - protein, 486 aa, Vibrio parahaemolyticus RIMD 2210633
MEMKTHYIDGAMYIGCSEEHFTTYNPANGEPLANIKQANQSDMEAAIESAKRGFEVWSAMTAIERSRILNKAVAILRERNDELAALEVADTGKPIQEAIAVDITTGADVIEYYAGLAPSLQGEQQPLNENQFFYTRREPLGICAGIGAWNYPIQIAMWKSAPALAAGNAMIFKPSEETPLTALKLAEIYSEAGLPDGVFNVVQGDYRVGQMLTAHPDIAKVSFTGESGTGKVVMGDSAKTLKQVTMELGGKSPLIVFDDAKLDDAVSAAMVANFYTQGEVCTNGTRVFVHESIYDDFVAQLKTRTEKLVVGDPLDENTQIGALISKEHESKVLSAIESAKASGATLLTGGYKVTDNGLQNGNFVAPTVFIDCDDSMSHVQQEIFGPVMSVLKFSEEAEVIERANDTDYGLAAGVFTQNLSRAHRVIHKIQAGICWVNAWGDSPAEMPVGGYKQSGIGRENGVETLKHYTQTKSVLVQLSDFESPYA

SEQ ID NO: 9768 - protein, 197 aa, Leersia perrieri
GQTPVFPRILGHEAGGIVESVGEGVTELAPGDHVLPVFTGECKECAHCKSEESNMCDLLRINVDRGVMIGDGKSRFTINGKPIFHFVGTSTFSEYTVIHVGCLAKINPEAPLDKVCILSCGISTGLGATLNVAKPKKGSTVAIFGLGAVGLAAMEGARLSGASRIIGVDLNPAKYEQAKKFGCTDFVNPKDHKKPVQ

SEQ ID NO: 9769 - protein, 437 aa, Desulfovibrio vulgaris subsp. vulgaris (strain Hildenborough)
MSTIVSVWAREILDSRGNPTIEVEVSLESGHSGRAAVPSGASTGTREALELRDGDKGRYKGKGVEKAVDNVMGEIAEAVIGLDALRQVQLDNTLLDLDGTDNKERLGANAMLGVSLATARAASSFLGLPLYQYLGGVNAKVLPVPLMNIINGGAHAPNNLDIQEFMIMPIGAATFRDALRMGAETFHTLKALLAADGHVTSVGDEGGFAPNLKSHDEAFKYITRAIEESGYIPGAEIALAIDAAASEFYRDGKYHLAGEGKTFSNSEMTEWLGEFTAKYPLISIEDGLAEGDWEGWGELTYKLGDTVQLVGDDIFVTNPDILAQGIDEGVANSILIKLNQIGTLTETLDTIEMAKQAAYTTVISHRSGETEDHFIADLAVGLNAGQIKTGSLCRSDRLAKYNQLLRIEEDLDDAGIYFGPMIASHFGYEGDEEFEDA

SEQ ID NO: 9770 - protein, 293 aa, Synechococcus elongatus PCC 7942
MAKTVWVFPGQGSQATGMGVDLQDWPEAQQRLAEAEALLGWSVLERCQADLETLSQTINTQPCLYVLEAILSDRLKQQGEQPDAVAGHSLGEYSALYTAGVFNFATGLQLVQKRAELMQAASGGKMAALIGFDAEALAAAIANTEGVVLANDNSAAQVVISGTPAAVDAILAAVKSKRAVPLTVSGAFHSPFMAEAATTFAATLAAVDFQDAQVPVLSNVSATPSTDAAVLKQNLLQQMTGSVRWRETCLAIEALGVEELVEVGPGKVLTGLMKRTCPAIGLRNVGTAADLTV

SEQ ID NO: 9771 - protein, 197 aa, Zizaniopsis villanensis
GQTPVFPRILGHEAGGIVESVGEGVTELAPGDHVLPVFTGECRECAHCKSEESNMCDLLRINVDRGVMIGDGKSRFTINGKPIFHFVGTSTFSEYTVIHVGCLAKINPEAPLDKVCILSCGISTGLGATLNVAKPKKGSTVAIFGLGAVGLAAMEGARLSGASRIIGVDLNPAKYGQAKKFGCTDFVNPKDHKKPVQ

SEQ ID NO: 9772 - protein, 397 aa, Synechococcus sp. PCC 7942
MAANLLEQLRGMTVVVADTGDIQSIATFTPRDATTNPSLITAAAQMPQYQSIIDDTLRQVRTELGAEAPVEAIVAEAIDELFVAFGLRILEIVPGRVSTEVDARLSYDTEATIAKARKLIGLYERAGIRRDRVLIKIASTWEGIRAAEVLEKEGIHCNLTLLFGFHQAVACAEAGVTLISPFVGRILDWYKKESGRDAFPGAEDPGVQSVTQIYNYYKKFGYATEVMGASFRNISEIIELAGCDLLTISPGLLEELRQTEALLERKLDPAIAESLELEQIHLDRDRFAELHQADRMANEKLDEGIRGFCKAIDTLEGLLKQRLAVLEGKAVFHHAAHEVFSVCDLDGDGFITREEWLGSDAVFDALDLNKDGKLNEEDLLAGLGATLQMAGRAVATV

SEQ ID NO: 9773 - protein, 7362 aa, Magnetococcus sp. MC-1
MAGLNFGSLDISGLFDGSTLVGWLTGLGFAHDDSATHNFGDLFKMGSFKGVDFSDFELPDLNFDFSGIDLSFGAFFSDNDNSNSATFTLDGANLRGLDLSGIGDVDVLSAASAFFDALTTFSVADSGSLTFTANMDEAVLEDVFANLGGPEFAFTPSFDTADSEVTLGFNIAINIDRSALFEFALDASELTGDAVADIGNFTASGSALGRFVFALDLDAGIAVTTRSTDSGFAGPLPVPSDAELYFRLNRFDTGAALDVMGLNVTASLLGDLATAEIAPGSSFKAKVAASIDMADPDNSDGKARITVADLSGVTIADYVTFTPAVAFEGALLFDASVAGFNVSDWGNPTLTIRSEIVAGNLVTSYFFDVNIDSATVQSNLESIFDTAADVGKSIDELGILNASLPFVDSTLGGLLASDDGRTLGDYFSFQYTKADGTESNVLMDYYASSGTHTYAGLIEWLRAYLGATGVYEDLTALFPDTYGSTTVGPFQVSGGLDLNNRELRLDLTMNLEQLFDLPLVMDSSLDALGLGFDASGNMQLSADLAMDLSFGMAFTDLADLSSVGDNVFVQINQMDANVSAAMNNFNAGVTVGVLEGKVDNGSIIFAADATLALNPDGDSNNNGQRVTLTDLGAASSISDLIDASATVYATADLPIKVNLFGADTAALTGGQPRITVDWGSAGAPISIENVATTSPVITKSNFTDLASFSSMTPAQIINMMKKVGDFLAQFRDSEVFDVGIPFTNTELGDVFDFTYGFVQALDENLSGILAMDITAGESISPVLTDDVAFDLVLRRAGDMQPEVFSIMVLASETSGFTSIDELAELINQKVAAVAYGALLVQTDLPAWVSQSDEVTASLDAQVGASATVEESTVGGQAYATQQVLNLGIASGTLSFKLAGKTDQSFVVSGSDSDADIKDKIKTALTGLIFDNLVQANDIETAKGNFEVAGNRDEGFRISYAGGLAGKDYSGVTIGFSASAPEGVISAVQDGAAGLGEEQILSIAGAKSGRFTLTYGKETTDPIRFLLNDISHSPSQIQQALEKLPSIGEGNVRVTFLNSYVDPVTGKTINTPGTAPKYKIEFIGDLAGKNVSQLKVNSGAIKWGTTVPSGRTSGFVVETVAGTGINDVAEKQSVKVYVEPGQSASFDLSVVFNGQTYTTASIAHDATATQVRQALESASNGSSSLGAVSVDGETANIKVTGTGNGFWTITFDGALAGVDIDLMSGNWTGMDSPDVSLNTSKVGGYTSETQQVVFSSGTGSFKVQLGSSGSISDTLAAASTPQALQAALEGMTEIGKGNVQVSGYEGNWTIDFIGDLAGQNMERLSFLPVQTIAFDSSTQESFKVKFAGSSSSFATLTAVDIAGKSAQEVRLLLQSAIEGLDDGLDWSNVKVLQGDAVAGEPQAWEIIFTGDLAGKTMEALSFEFSKGSTTTSVEAEAVVSSLIQVVATEKSTSGGITSGKLQIKPTNVDDFVGMAMTPGAGVALDVVSYGSPAGDTAVQRLFVVDAGSDAGKVSQYRLQFEDNSGTSYETAAIDWDATAGEVQTALNNALGAAGSVTVVDTNPEEVNLSPSTIAFDITFGGALANRSINTLTASFDTLRANPGVMADAYTLRQGAAATDLTDAVNEVQRVWFDDVVGGAFGISVYYDGTYYNPEQAWSWGTSVADMESELESSLAEAFGGLSADEVSQLLTFTEVPDGGGAIDIEFGGLLAGKDMATVLVTDTWLTAESRSASYADPSALGFAAGGQDAYAITGPKFNTMDKFAEVFAKAVNDLLPEGESFDLAARFDAVNMDFLFDIKFTPALPTIEEAIDLGFDSDIISLNADGTFVITPGITFETTIGIDFDRPDDFNLDSAGVARAVVNGASFNGAQPPIMLLEDPSSPFDGATGGSTNLTVDGHFTLVFNDQERYNVTIAAADQEDNTSYQDLLLDIQNALDGVAVKANGLLAAGGFSNLGEAVKINWDTSAQQQRFQFESRTSLTSMGVQVASGDPAVSQLKLVTQSANSVSERGIPSNGKVYNDFSDSSSGTAGIAFDLVVDGDSSNPFTIAVSAAEIANNSSVEDLLADLQDAIDAQTSHDWLTKKGLSSLGDVVQIVQENDYLSFAVSGGQISNLELRALDSDPIINQLGFLNGTLAKTSGLSLFLQDAFLGGNMVLGVQDFAATGSIGEMLQATMGQMEAVFDAGVSVQLKNGSDAEPGSRVYISDLLQGARDQSGQLGLLGDISIDSAGGSSVGHAAPLESLGVGVMARDLGLRLEITEAAPAAGAEAITHTVDVTLRAVDTLDNNSVAALASDLNSAIQSALSDAGLSQFSGHTFISTGNPYADDGTVNSSVTALKFTAPASHLLTLAGRSLISDFITPLTFTDSSYTEGTEPVARLLISDISVEAGGLNLFPAESAPSIAITVPVMELFRGEITLSDAIDVEILGLDALSGFKNLSWSSIIDGIKMVTQLLSQMESFEFLDQKLPVIDKSVVDMLDIASQFAHAIEEIENNPAAGIDSLQTALADGFGISDDEVQLNYDVLGHAISINLPYTFQLADQDFPISISFDDLRALVGPGTIDQLIGTVQSLVDVGAAAQVRLKSSAQINLSMGIDLDSGEMFLYDYNDGGTSDDYSDDTGLYTRLTAEIEGTALEFNANLGPVVLQVNDGTANIDAQAGLYLYDDPAGAPGAGDGRHYLSSAVSVRQVAEGESQGLVWGASDALVQSVSGNLYTLNYAADDAFRFLMEVEGKTYTTSLCNRYMTADEVAVALQDAFNFEGLSGSVVTGTDLALDGDGLPTGWSFTFGGQLAGQTVTITSEKVIDIAPTDEVQWVKVASGSGGTFTLSVDYDGTTYTTAAIGWNADSSAVASALNTVLAPIAGTVSVAAHDASNSSLGWDVTFGGALAGVALENMRGHGDNLSHQGAIAVQVDELGSTAGSVTTNTKQWLNVVAGTGGSFTLSYQEGSTTYSSAAIAYSEDSATLAANIQQALQNAYNAGMSNTVSVTANSSRGGFNIEFAGDLAGKAITQLVADTTNLSAGIFGSIFRDVDADFSGTASVVLPTTLGLEGEVFDEIIDLGLIPGLTNPMDMGNVEIRITDLKSMFQALVDPNLTVTSTVITQTGVYDDAYIVNYQLPNISDLLDAFKLMENPFLRLLRDPSIIVDGIDYVLKGMQTGLDVAASLPLPFIGDQLAQGAQFIGDFRGSVVQGIRDALDSALDEYRGMENALRFFLFDVFTDDTDGDGVIDPASMVEWAAGTTSKDNPFLNYLSDYDGDGIVSVDDIVVEFLAAAQGGYAAGTRVGYTEATRKSDGDDTPGDVIPTGGASDPFDVAKSLQIRMHLGQSILSKDVDIGFDIGFPGLSLDLDGGIQLDLGWDMYFGFGVNLDDGLYVVSDAINVAGLGLKASDVLVENPWAPDAAYTTEEIKLTFDAYLVNELPSAATVTAGTEGGSGSNESQTIAITAATQGSFTLKFNDGSRNFKTLDINYSDDGNTQASNIQKALNKAFSRDLNGSDISVTNNGDGTYGVTFAGGLANTNVSLMEIDIDNLKNLDPLNPAEMNAQLFFLRGIMKDDVTGSIVGKSGETLDLGGADGSRTRFTGTLGIDIDDPNDDGRLTFKEMTRNKFSSLFVTVVEAKAQANLQLELTIDAEFSFPSLLTEFHMAWSYAGPAAGASGYDAYFTSSPSIWITDLRLDMGSFFSDFLGPIVSQIQQVTGPMQPIIDTLKKDLGIGKIVGQNFSLLSLAEWTAKNFGGTAKLKFIITMVKLVDLINSIPTDADLIIPIGDVFSFAGDAKSSSSKKGASLEGDVGDVDSAIDNGSTSGGGDATASQAKSKSFLEKLNDPNSAFKIPLLSDFSNIINLLTGKTADLVTFTPPGLEIGTGFSKSFPIYSAPTVSMGFSASFKVKINLTLGFDTYGLNSYFSSGNFLDIFDGFYVSDNWTKDGRDLPEIELEATIGVRVSFSAVIVRAGVEGGIKFKGDLDLWEDPEEADGKLRVSEIIAALECNPLNIFSIHIRVSLYIKAYVDINSIIAGWKEVWSKTFVDITLYEKQWDPVPCVPILASVNDGVLDLHMGSDGTPVTVDGYTAGEKYAKDRRHIDTEDGNEYYTLVQTGADTIEITAVLPKGNTYKKSFRGVTSIRAYTGSGDDTIDASGVDNINMLVIAGEGNNTIIGGGGDDVLIGGTELTILEGGKGDDLLIARAGETTLRGDLGADTYRFLEDWDTAYIEDNDGSAVPESNTVDFSDIALDLVVDDANHQGFDANNNRVLWDDPSELGLFLGGSGNDFMDMSGDQERLTVNLTGLNQGSVLNGTSGATPEGDRYFEFVDFENLVGGLHSDAFVIDAGAAVSGKIYGAPTSSVGENKGTERAGSRNTLDFAQWSSGVTVNQEGTSSFGGESAMEIREFHNMIGGGGDDLLIGNYMQNIIIGNAGSDTLEGRDADDLIVAYNFSSDGSQDIKSWNTLPSREWTWYEHEVKNFSEASAGVQTLKGDEGNDILMGENGNDRFYTGNGNDTVIGDRAALDFDSRGRLLEIDNSTRSEGGSDTITALNGNHLIFGGAGGDNITSGSGNSTIVGDVGKLSFDASSRRPIEVDTGFDIGGADTINVTTGSNVIIGGVAGDQITATDDQASRNVVLGDTGTISYASPDVLSSLIAAPQTDTSGAADTISLGNGDSIVAGGLGQDVITISAGLSTASNYRYILGDHGAMTFDVAGELVQLETTDSDSANGDNDTVTIAGVADSHNIGLNMMATGMGDDSVTIAGTTTSVDFILADNGTIVRNDGSTAANYALRSVTSTQLDLGGNDTIRTANGDKVIVGGFGQDSITVQATSNSNRHIGGDNVAIAYDTMGGIIQMETTDTVATTGAEDSITIGLDGDSSDLGINVVIAGMADDTVNVLGSTTSRDILLGDSGLITWNSYDITQGQALRSVTSTLRDLGGNDTIRTANGDKVIVGGFGQDSITVQATSNSNRHIGGDNVAIAYDTMGGIIRMETTDTVATTGAEDSITIGLDGDSSDLGINVVIAGMADDTVNVLGITTSRDVLLGDSGLITWNSYDITQGQALRSVTSTLRDLGGNDTIRTANGDKVIVGGFGQDSITVQATSNSNRHIGGDNVAIAYDTMGGIIRMETTDTVATTGAEDSITIGLDGDSSDLGINVVIAGMADDTVNVLGSTTSRDVLLGDNGLITWNSYDITQGQALRSVDSTLYVELFGGNDTIRTANGDKVIVGGLGQDGITVETNSDSKRQISGDNVSLTYDTYGELYILQTLNQKDDHGDNDTITVGIEDDTSTLGENIITGGMFDDIIKIWSTTTSEDMIFGDNAYILRAQNEASSSDQNWMLQAKTLVNDKGGDDTIITGSGGKVLVGGFGADSISAINGDHLVIGDNGQLDYDKDSENGILRKMQSLDNVIGGEDTITLREGFKVVMGGYGDDEITVYTETVAAASGVKDLTGIVSVASVSELEAKGRTGRYITGDNMEVDFDLHGGLYKIQSNDAVAAMGGDDTISIGNRATTNDLGYQVLIGGMAADTITVEDTSTSQDVIFGDNVYYERSTSSYFHMDINSTLTNQGGGDTIVTGQGEKWIVGGMGADTAEVVSINLTDETLFAGDSVDITFSRAKTGNLTSITSTGLYFGGNDALVVGDGDVTFIGGKDNDSLIVDSTGATTAEVLAGTAGDPPNQRFAFGDNVYLEYSLDDAGKEALITINSEDTTASTGGDDSLLIGPTGSLAGVMGEVIAVGGMGADTINVSGLTADTVAAGDNINITRSTEGYLKTMRSLLPVEGGVDNISLSAGDHVVIGGMSGDTILTGSGNTIAMGDSGSLVFDSDTAPVYWGSVDSYDDPTLTEAQEQAVKRVNRWGILQTLSSLGTTNGGHDTMTLGQKGTSFDGNKVAVGGIGNDTITLYGTRSYVETDAAGNAVENVDGSNTIVVTERAVAGDNATMSFGADGLITDFATGDSNIATAGNDTIKVDVSNDPVIDPDYVDGDIGTLDMYLTTEFNVLAGGLGNDVLEVVGSTGMREVISGDNLLYQRGTASQNYNHLYAEVKSSSSGGTDTIKTGNGEKLIFGGVGNDTLTVLTTAVDHSIVFGDAGKVAYDTNATGAVSLIASIPETDDGNDTVTVKNGDLYLFGGGGTDALTVSANDTATRVVMGDSGQVNMTLYSYTDADGVTQTIGVPNFIQVNDASTTNESTRIDTFTLPSKGDNLIIGGLGTDLLSGAQLGVDSIIPGTGSIQVSLANSADPTGAWSKVVSVVVLGQYNEMGITDGTYVLSQDGVDTRPETTATGSGEVTEDGTQSVTGYLGLDALNGGKAIFTEATTTLLYGTLTVKSDGGWTYTLNNSSSAVQALMSGNDRPETFQVNTTDGQQTTVTIRVKGADDVSTLTGSSSASLNEDDTSAVSGTLTVVDADVIDATVTAATSVGTYGTFSVGSNGVWSYQLDNSKAVVQGLTQGQQVSESFTVHTSDGGSQSLTMNITGRQDSAVVGSGTGSVTEDSTLSSSGMLSVSDADSGEAAYVASTQTGSYGSFSLDSSGAWSYQLNNSASQVQALIMGQQVSESFTVATVDGTASSVVVTVVGAQDAAQLGGVQSGGVVEDGQLSTAGQLTISDADAGQSLYQVASTDGMYGHFAMDSSGAWSYVLNNELAAIQQMIAGQTVLESFTVSSSDGTQAQVSVTITGSQDNAVITGEAAGQVSETNDDSQSMATGKLNISDLDSQQAHFVGGPQAGQYGAFTLQGDGNWTYVLDNHGVAMAGLGTGDVVTETFTVRSLDNTAETTVTITINGLDEPPTAEEIEAARLAEEQRLQQELQASNDLLQGAIGAEGGNAGGTAPPPPNGNPADGAPGDLLGAGGAAAGGATGGTTGGGTTAGTGGGGLGGGGFGSGAPNTSAGGLTGGFGGTATGGTVTGGTGGTGGAATGGTATGGTATGGTGGTGGTTTGGTATGGTATGGTGGAAGGTGGAAAGGAATGEAGGTATGGTGGTGGAATGGTATGGTGGAAGGTGGAAAGGAATGEAGGTATGGTGGTATGGTATGGTGGAAGGTGGAAAGGAATGEAGGAATGGTGGTATGGTATGGTGGAAGGTGGAAAGGAATGEAGGAATGGTGGAAAGGTGGAATGEAGGAATGGTAGDAGDTGGAATGGDANGGAAGGPGVDGGAAGGPGADGGAAGGPGADGGAAGGPGANGGAAGGPGVDGGAAGGPGVDGGAAGGPGADGGAAGGPGAVPEGGDPAGANGQGGAAQDGQTNDDNTDDEAPADGEAPAEGQPPADGEAPAEGQVPADGEAPAEGQAPADGEAPAEGQTPADGEAPAEGQPQDGGGQANNASGTGEAIAGSAALAAAMGGGMGRIQWGQPAERGHDSRATAQAKVAKRGLFQRVTRGFKA

SEQ ID NO: 9774 - protein, 645 aa, Oryza sativa
  unsure (1)..(645): unsure at all Xaa locations
MAAPPPALRRLLLLLLFSLLLLASVAAAAAAPAAEEEEFTEELLLRPLPDRKALAHFHFRSSASPSAAAAGRHHHLFPKAIAQLVQQFHISELELSFTQGQWNYEQSXGYDPMSTNYAKPPGVELWAAFDLPLDEIDATWKNLTHTLSGLFCASINFLESSTAFSAPRWGFKLNEGNLRYGALPREAVCTENLTPWLKLLPCRDKAGIASLLYRPSIYKGYYHSQKLKLTSSQSFGIIIDQTLTVVLQPDTFWGQQLHSTDGQLQPSWSMKDLFNRKLSGKCRVSKSSRVFLEIENDIVDKSGTEASWTNELFVLSTAPDRVLKELNNMDAQSSSLYEYDVSNYNNDKPLDVGITWKLPLIWSCTPAPYHANRFLMGSGNERGSIALSFRSTNLHKQLFGSSNDCSIKAVVFQVVPWYVKVYYHSLQIFIDGNSKAISEVVEKIHVTPSEDKHLPGTLEMLLRLPCSMESATLSLDFDKGFLHIDEYPPDANQGFDIPSALVTFPEFNSSRSYLEGDTLFVSPLLQTFKEDGVVKSYTEVLLVPLTTPDFSMPYNVITFTCAVLALYFGSVLNALRRRIGAEERELKKAAAKRGLIPLLIAKLRGKKVDPPPQGSSPTCLLSTKLVLKVVFVAVVAVSLHYLSDS

SEQ ID NO: 9775 - protein, 189 aa, Pisum sativum
MEFKATELRLGLPGITEEEEKKIIHGSSVVKNNNKRQLPQTSEESVSISKVTNDEHIVESSSAAPPAKAKIVGWPPIRSYRKNSLHEADVGGIFVKVSMDGAPYLRKIDLRVYGGYSELLKALETMFKLTIGEYSEREGYKGSEYAPTYEDKDGDWMLVGDVPWDMFVTSCKRLRIMKGTEAKGLGCGV

SEQ ID NO: 9776 - protein, 614 aa, Oceanobacillus iheyensis HTE831
MCGITGFVNWGKTADEQRSVLGKMTDTLSLRGPDDTQLWTKGHTGFGHKRLSVVDLEGGKQPMSKTVNGITYTVCYNGELYNTEDLRKELLKRGYTFSTTSDTEVLLTSYIEWKEACVDHFNGIFAFGIWDEEKEQLFMSRDRLGVKPLFYAEKAKGFIFGSELKAILAHPDISTKVDRTGLSEIFGLGPSRTPGHGLFKDIDELRAAHSLTFSKHGLKVWRYWNMVSNHHTDSEEETAEKVRELFVDAVQRQLVADVPVSTLLSGGLDSSAITAIAANYYKEKGYGPLTTFSIDYQGNEQHFQKSKFQPSSDRAWIEKMVEGFSTDHHDEIIAGQELAILLKEAVEVRDQPGQADIDSSLLWFCREIKQHTTVALSGECADEIFGGYPWFHDPAAAGNNFPWIRSLDSRIDLLHGDWKKKLDLESYVQEQYQSTIAETPRLDGEDKIDAKRRELFYLNMQWFMSQLLDRKDRMSMGASLEVRVPFADHRLVEYVWNIPWDIKMVNGHEKGILRKAMEGILPNEVLYRKKSPYPRTFQPEYTEQVSQWMNRILVDPNARLFEFMKKEKVEAIVKSKGKEFKDPWYGQLMRGPQLIAHLCQIDHWLRQYDVEVVD

SEQ ID NO: 9777 - protein, 488 aa, Coptis japonica
MEVLSIAIVSFSFLLFLFFILRDSRPKNLPPGPRPSPIVGNLLQLGDKPHAEFAKLAQKYGELFSLKLGSQTVVVASSPAAAAEILKTHDKILSGRYVFQSFRVKEHVENSIVWSECNDNWKLLRKVCRTELFTPKMIESQSEIREAKAREMVKFLRGKEGEVVKIVEVVFGTLVNIFGNLIFSKDVFDLEDPTGGSVELKEHLWKLLDMGNSTNPADYFPIMGKLDLFGQRRAVAEVLQQIYDVWGVMLKERRGTKGSESKNDFVDVLLNAGLDDQKINALLMELFGAGTETSASTIEWAITELTKKPLVVSKIRLELVNVVGDNTVKESDLPHLPYLQAFVKETLRLHPPTPLLLPRRALETCTVMNYTIPKECQIMVNAWAIGRDPKTWDDPLNFKPERFLSSDVDYKGNDFELIPFGGGRRICPGLPLASQFSNLIVATLVQNFEWSLPQGMSTSELSMDEKFGLTLQKDPPLLIVLKARASNI

SEQ ID NO: 9778 - protein, 451 aa, Nostoc punctiforme PCC 73102
MVADVFELPAPSVNSIVGHLFELGQDPLGFLTRCRDYGDIVPLQLGLTPSCLIINPEYIEEVLKNRNDFIKSRGLRALKSLLGEGLLSAEGESWFWQRRLAQPVFHQKRINGYSQTMVEYTNRMVQTWHDGETHDIHEDMMRLTLQIVMKCIFSDDIDAGEAKVVADALDVAMQWFESKRRQNFLVWEWFPRPENIRYRDAIAQMDEAIYKLIQERRNGGEKTNDLLTMLMEAKDEQTLQQMDDKLLRDEVATLMLAGHETTANTLSWTWMLLAQNPGVREKLESELNQVLQGKLPTLEDLGQLVYTQQIIKESMRLYPPVPLMGREAAVDTQIGDYEIPQGMAIMISQWVMHRHPKYFENPEAFQPERWTQEFEKQLPKGVYIPFGDGPRICIGKGFAQMEAALLLATIAQRFQIDLVPGYPIVPQPSITLRPENGLKVQLKQIALDTSK

SEQ ID NO: 9779 - protein, 488 aa, Salmonella typhimurium LT2
MKKINHWINGKNVAGNDYFQTTNPATGDVLAEVASGGEAEVNQAVAAAKEAFPKWANLPMKERARLMRRLGDLIDQHVPEIAAMETADTGLPIHQTKNVLIPRASHNFEFFAEVCQQMNGKTYPVDDKMLNYTLVQPVGVCALVSPWNVPFMTATWKVAPCLALGNTAVLKMSELSPLTADRLGELALEAGIPAGVLNVVQGYGATAGDALVRHHDVRAVSFTGGTATGRNIMKNAGLKKYSMELGGKSPVLIFEDADIERALDAALFTIFSINGERCTAGSRIFIQQSIYPEFVKRFAERANRLRVGDPTDPNTQVGALISQQHWEKVSGYIRLGIEEGATLLAGGAEKPTDLPAHLKGGNFLRPTVLADVDNRMRVAQEEIFGPVACLLPFKDEAEGLRLANDVEYGLASYIWTQDVSKVLRLARGIEAGMVFVNTQNVRDLRQPFGGVKASGTGREGGEYSFEVFAEMKNVCISMGDHPIPKWGV

SEQ ID NO: 9780 - protein, 545 aa, Acidithiobacillus ferrooxidans
MTENAPTELAITGMTCDGCAAHVRKALEGVPGVREAQVSYPDATARVVLEGEVPMQRLIKAVVASGYGVHPRSDGASSTNDGQELHIAVIGTGGAAMACALKAVERGARVTLIERSTIGGTCVNIGCVPSKIMIRAAHIAHLRRESPFDGGIQAVAPTIQRTALLVQQQARVDELRHAKYEGILDGNPAITVLRGEARFKDSRSVVVHLNDGGERVVMFDRCLVATGASPAVPPIPGLKDTPYWTSTEGLVSESIPERLAVIGSSVVALELAQAFARLGSHVTILARGTLFLREDPAIGEAITAAFRAEGIEVLEHTQASQVAYADGEFVLATGHGELRADKLLVATGRAPNTRRLNLEAAGVAINAQGAIVIDQGMRTNSPNIYAAGDCTDQPQFVYVAAAAGTRAAINMMGGSAALDLTAMPAVVFTDPQVATVGYSAEAHRDGIETDSRMTLDNVPRALANFNTRGFIKLVAEVGSGSLIGVQVVAPEAGELIQTAALAIRNRMTVQELADQLFPYLTMVEGLKLAAQTFTRDVKQLSCCAG

SEQ ID NO: 9781 - protein, 224 aa, Zea mays
MASSMLSSAAVVTSPAQATMVAPFTGLKSSAAFPVTRKANNDITSIASNGGRVSCMKVWPPVGKKKFETLSYLPDLTEVELGKEVDYFLRNKWIPCVEFELYHGFGYREHGSTPEYYDGSYWTMWKSPPCWKDWTLLRGLKGSPKMGKTENPNRFSYGKNSGFEKTTPQGSGGSFFFPPKKTTPNFPRGGFIFFCKKPPSKKKTPRRVFFLLSTGAGGVFFSHR

SEQ ID NO: 9782 - protein, 520 aa, ASPERGILLUS NIDULANS FGSC A4
MAKVDQKVVLIVIDGWGVAGPNSPKEGDAIAAAETPFMSGFAEENSKTAQGYTELDASSLAVGLPEGLMGNSEVGHLNIGAGRVVWQDSVRIDQTLKKGELNKVENIAASFKRAKDGNGRLHLLGLVSDGGVHSNITHLIGLLKVAKEMEIPQVFIHFFGDGRDTDPKSAAKYMQQLLDATKEIGVGEIATVVGRYYAMDRDKRWDRVEIAIKGILSGEGEESSDPVKAIEKRYTEDETDEFLKPIIFGGKDRRVQDDDTLFFFNYRSDRVREITQLLGDYDRSPKPDLPYPKNIHITTMTQYKTDYTFPVAFPPQHMGNVLAEWLGKKDVQQCHVAETEKYAHVTFFFNGGIEKQFPGEVRDMIPSPKVATYDLEPEMSAEGVGKKVEERIAEGKFEFVMNNFAPPDMVGHTGVYEAAIKGVAATDKAIGIIYEACKKHGYTLFITADHGNAEEMLNEKGTPKTSHTTNRVPFIMANAPEGWSLRKQPGVLGDVAPTVLAAMGIEQPKEMSGESLLVKA

SEQ ID NO: 9783 - protein, 580 aa, Arabidopsis thaliana
MEGGIIHGGADESAFKECFSLTWKNPYVLRLAFSAGIGGLLFGYDTGVISGALLYIRDDFKSVDRNTWLQEMIVSMAVAGAIVGAAIGGWANDKLGRRSAILMADFLFLLGAIIMAAAPNPSLLVVGRVFVGLGVGMASMTAPLYISEASPAKIRGALVSTNGFLITGGQFLSYLINLAFTDVTGTWRWMLGIAGIPALLQFVLMFTLPESPRWLYRKGREEEAKAILRRIYSAEDVEQEIRALKDSVETEILEEGSSEKINMIKLCKAKTVRRGLIAGVGLQVFQQFVGINTVMYYSPTIVQLAGFASNRTALLLSLVTAGLNAFGSIISIYFIDRIGRKKLLIISLFGVIISLGILTGVFYEAATHAPAISSLETQRFNNISCPDYKSAMNTNAWDCMTCLKASSPSCGYCSSPIGKEHPGACWISDDSVKDLCHNENRLWYTRGCPSNFGWFALLGLGLYIIFFSPGMGTVPWIVNSEIYPLRFRGICGGIAATANWISNLIVAQSFLSLTEAIGTSWTFLIFGVISVIALLFVMVCVPETKGMPMEEIEKMLERRSMEFKFWKKKSKLVEKQNQSA

SEQ ID NO: 9784 - protein, 468 aa, Saccharomyces cerevisiae
MGQILSNPIIDKEHHSGTDCLTAFGLCAMQGWRMSMEDAHIVEPNLLAESDEEHLAFYGIFDGHGGSSVAEFCGSKMISILKKQESFKSGMLEQCLIDTFLATDVELLKDEKLKDDHSGCTATVILVSQLKKLLICANSGDSRTVLSTGGNSKAMSFDHKPTLLSEKSRIVAADGFVEMDRVNGNLALSRAIGDFEFKSNTKLGPHEQVVTCVPDIICHNLNYDEDEFVILACDGIWDCLTSQECVDLVHYGISQGNMTLSDISSRIVDVCCSPTTEGSGIGCDNMSISIVALLKENESESQWFERMRSKNYNIQTSFVQRRKSIFDFHDFSDDDNEVFAITTKKLQDRLNRSKDNDDMEIDDLDTELDSSATPSKLSGEDRTGPIDLFSLEALLEAGIQIRQRPSSDSDGNTSYFHGASLSDMLASLSNAAAGETEPNDADDNDDNDGEENGKNENAKKGSKIEEIE

SEQ ID NO: 9785 - protein, 604 aa, Cucumis sativus
MEIESLRVSVDEKVLKDEEKNEKEEMKMKMKMKRKLGGVKTMPFILGNEVCDRFASSGFHSNIITYLTQDLNMPLVPASNILTNFAATSSFTSLIGALIADSFAGRFWTITIASIIYELGMVTITISAILPSLHPPPCPTQINCTQASGTQLMILYLALLLTSLGAGGIRPCVVAFAADQFDMTKVGIAGRTWNFFNWYYFCMGMATLTALTVVVYIQDNVGWGWGFGLPTIAMALSVVAFVVGSPLYNKLKPSGSPLVRLAQVVVAAFKNRKAVLPDDSKLLYRNHELDAAIAIQGRLVHTDQFKWLDKAAVITSPDSTANPPNLWRLATVHRVEELKSIIRMLPIWAAGILLVTASSHQHSFTIQQARTMNRHLTPTFQIPPATLSIFGILSMLTGLVLYDRLLVPFAKKLTHNPSGITCLQRMGVGFAINILATLVSSIVEIKRKKVAANHGLLDNPTATIPFSVFWLVPQFWLHGIAEVFMSVGHLEFMYDQSPESLRSTATALYWLAISVGNYIGTLMVYLVHKYTGEEHNWLPDRNLNRGRLEYYYWLVSGIQVMNLVYYVICAWFYTYKPLEEEKINIENKDGDQEWERCEDTIKIA

SEQ ID NO: 9786 - protein, 567 aa, Ustilago maydis 521
MADRDPSLTPDEDKPHSLQSDDKFSPKASNDHAQLHQLHLATRSVVSTEGIIDAAELDQVLDEAAIEAAGQGESNSLYLWTLTFFATIGGLLFGYDTGAISSVLVQVGTDLDNKELTDGNKEFITSALTVGAIISALCAGVVADKFGRKWTLVICDIMFIVGAVIQAAAHKKWDVVGGRFVLGLGIGAAAQIVPVYIQELAPARARGRLTCLNSIAVTFGQVVATAIGAGFEHVSSGWRWIIALGAFPPIIQLIGIHFFMSESPRYLVKQRREDEAARALTRIYPLATPEQINAKLGVLKKHIQTEDAPLRYRIVKVWTDVPTRRAVFLTSMVLASQQLSGFNSLMYFSGTLFKSAGLKQPIATSLIVSGANFLCTFIPLKYIDRFGRRRFLLATMPCVIIFLVCTAGIFAKMLQPTNQRLVEGYPYPTSYTSAMLVFMVLYVCSYATGLGNVPWQQGEFFSTETRMIGTSISTAVNWAANLVISSTFLSLMNAITPSGAFGFYAGLTFVFLLIVYFLYPETSLLSLEEVRTTLNGGFNVKKSLKVRKEKIALWNTQKQAAKAETAA

SEQ ID NO: 9787 - protein, 146 aa, Zea mays
MKQNLFFLCVHNHGNPTSHKPELVLNNFTTRLGHRVGRMIQSLFPQDPNFRGRRVVTFHNQRDYIFFRHHRYIFETKEKKVASKEKTSGSKSGSEKQQVICRLQECGPRFTLKLLTLQHGTFDTRSGEYEWVHKPDMDTSRRRFFL

SEQ ID NO: 9788 - protein, 422 aa, Mesoplasma florum L1
MFKVKFADIGEGLTEGKVAEVLVKLGQEIKEGDALFFVETDKVNSEIPAPVGGKIANILISQGQEIKVGDVVIEIDDGSSAAEVTPVAEIKTKNEPIEENASVVGSTPVSNDVIASRATTNAAAEISNSGVKATPLARKIAADKKIDLSTIKGTGPHGRILVSDLDSAPVAVPNTNSATKTVVKSVDVDAPLSWDSIPMNGIRKATVKAMVKSQSENAAFTGMKNINITPTYDMRAMLKDGCESKGIKLTYLAFIVKAAAKVLEEMPNINVRIDAENNAILQVHNINIGIAVDTEKGLMVPVIKGANHLTIFEIANKIGELAKKARDGKLAMTEMKDATFTVSNFGSVGLDYATPIINSPESAILGVGTMTKTPIFVKDEIKAGWIMPFSMTCDHRIIDGGDAGRFLMKIENYLSNPALLLM

SEQ ID NO: 9789 - protein, 618 aa, Mycobacterium tuberculosis H37Rv
MSYLVVVPELVAAAATDLANIGSSISAANAAAAAPTTALVAAGGDEVSAAIAALFGAHARAYQALSAQAAMFHEQFVRALAAGGNSYAVAEAATAQSVQQDLLNLINAPTQALLGRPLIGNGANGLPGTGQNGGDGGILYGNGGNGGSGGVNQAGGNGGNAGLWGNGGSGGAGGNATTAGRNGFNGGAGGSGGLLWGNGGAGGAGGNGGPAPLVGGVGTTGGAGGNGGGAGLFYGFGGAGGNGGMGGVAPSTGPSMGILPAGGVGGPGGSGGASALAFGSGGVGGAGGLGGPTDGTVQGVGGFGGQGGNGGQSGLLFGNAGAGGAGAAGGAGTGDTESFGGHGGAGGDGGAVGLIGNGGAGGTGSPGAVVGGNGGVGGLGGAGSPGGLLYGTGGAGGNGGPGGDGGTGATVGFAGSGGFGGAGGIAQLFGTGGMGGSGGGIGAGTTTVVPPDVAPVGGTGGNGGRAGLLLGVGGMGGNGGATSVGGTLYAAGGNGGDGGLVWGNGGTGGSGGAGGAGSVGNGGAGGNAALLFGNGGAGGAGGAGGIGAGGAGGFGAVLFGNGGAGGSGAPGGIGAGGNGGNALLVGNGGNGGAGTGGAAGGAGGSGGLLFGQNGMPGP

SEQ ID NO: 9790 - protein, 422 aa, Vibrio parahaemolyticus RIMD 2210633
MKDETLSIHFGYETDPTTKSVATPIYQTVAYEFDNAQHGADLFNLEVPGNIYTRIMNPTNDVLEKRMAALEGGIAGLVVSAGSAAINYAILTLAQAGDNIVSTPQLYGGTYTLFAHMLPNQGIQVKFAKDDKPESLAELIDENTKAVYCESIGNPAGNIIDLERVAELAHAQGVPVIVDNTVATPVLCKPIEFGADIVVHSLTKYVGGHGTTLGGVIVDSGKFPWAQHKGRFPVFNQPEPSYHGVVYTEAFGEAAFIGRARTVPLRNTGSALSPMNAFMLMQGLETLPLRMERHTDNALKVAEFLEQHDKVSWVSYAGLPSSAHFNLAEKYMKGKPSAILSFGLQDGYEAGVRFYDALKIFKRLVNIGDAKSLACHPASTTHRQLSEAEQKQAGVSPEMIRLSVGIEHIDDILADLEQALNA

SEQ ID NO: 9791 - protein, 602 aa, Mesoplasma florum L1
MFKVKFADIGEGLTEGKVAEVLVKLGQEIKEGDALFFVETDKVNSEIPAPVGGKIAKVLISEGQEIKVGDVVIEIDDGSATVEAAPAAEEENASVVGSTPVSNDLIPSRGPAPTQNVAAQPTPAPVATKHTDIEESFDVIVVGAGIGGYVSAIKTAQLGLKTLIIEKQYYGGVCLNVGCIPTKSLLRTAKVFEDIVHKAANLGIDMKTKDEPSINWNKALERKDGVVNKLTGGVKVLLTKNGVKQIIGEASALDKNTISVNGKKYHCDNLIIASGSVPNELPLPGFAEGRESGFLIDSTKILSLPKIPKTLTVIGGGVIGIEFGCLFAALGTKVTVIEGAPKILPMLDQDVTALMTKTLKEKYKIEIFTNAKVKEVKGKSVVFEIDGKEQTVKSDYCLESIGRKTVTKGFDGIGLELSERKSIIANDYGETNLEGVYAIGDVTSKIMLAHVASHAGIVTANRIALKANKPDAHDIKMDYSKIPSCIYSHPEIAMIGKTEQQLKEEGVEYKTFKFPFAAIGKALADDDTTGFVKIICEPKYKTLLGAHIIGNRATDMISEFTTLIECEGTITELARAIHPHPTMSEAIGEAAEALESGKSLNL

SEQ ID NO: 9792 - protein, 443 aa, Vibrio parahaemolyticus RIMD 2210633
MSYVFHRHCHATLPIIDKGEGVYLFDKQGKQYLDACGGAAVSNLGHSHQAVKKAMLEQLERVPFAHTGFFTSDSSERLAELICQHMPEQFNHVYLVSGGSEAVESALKMARQYFVESGKPEKKQFIARQQSYHGNTLGALAVGGNEWRREPFKPILHPSHHIAPCYAYRYQQSHESELDYSLRAANELEAKILELGADNVMAFVAEPIVGATAGAVPATQGYFKRIREICDQYDVLLILDEVMCGVGRSGSFFAFEQEEAEPDLVCMAKGLGAGYQPIGAVVANDRVYQAIADGSGFFQHGHTFMAHPVACAAAVATIQTIFQDDLLTAVNRQSALLRNELASALAHLPYIGDIRGKGLFFGIELVADKESKSPLSKATLADKRIKQRAMENGLMCYPMGGTIDGVNGHHILLAPPFIIQSHHIDELVGKLSLTLKEVAEIWK

SEQ ID NO: 9793 - protein, 214 aa, Paeonia sinjiangensis
IVESVGEGVTDLKPGDHVLPVFTGECKECRHCKSEESNMCDLLRINTDRGVMLNDGKSRFSINGQPIFHFVGTSTFSEYTVVHVGCVAKINPEAPLDKVCVLSCGISTGLGATLNVAKPKKGSSIAIFGLGAVGLAAVEGARIAGASRIIGVDLNPKRFEEAKKFGVTEFVNPKDYNKHVQEVIAEMTDGGVDRSVECTGSIMAIISAFECVHD

SEQ ID NO: 9794 - protein, 244 aa, Cynodon dactylon
AMGDKPGPNITATYGDKWLDAKATFYGSDPRGAAPDDHGGACGYKDVDKAPFDGMTGCGNEPIFKDGLACGSCYEIKCKEPAECSGEPVLIKITDKNYEHIAAYHFDLSGKAFGAMAKKGEEDKLRKAGELMLQFRRVKCEYPSDTKIAFHVEKGSSPNYLALLVKYAAGDGNIVGVDIKPKGSDEFLPMKQSWGAIWRMDPPKPLKGPFTIRLTSESGGHVEQDDVIPEDWKPDTVYKSKIQF

SEQ ID NO: 9795 - protein, 214 aa, Paeonia sinjiangensis
IAESVGEGVTDLKPGDHVLPVFTGECKECRHCKSEESNMCDLLRINTDRGVMLNDGTSRFSINGQPIFHFVGTSTFSEYTVVHVGCVAKINPEAPLDKVCVLSCGISTGLGATLNVAKPKKGSSIAIFGLGAVGLAAAEGARIAGASRIIGVDLNPKRFEEAKKFGVTEFVNPKDYNKPVQEVIAEMTDGGVDRSVECTGSIMAMISAFECVHD

SEQ ID NO: 9796 - protein, 391 aa, Magnetococcus sp. MC-1
MSDKVSSIMSTYGRYPVAFERGEGVRLWDTNGRVYLDFLSGIGVNNLGHSHPTVVKAVQEQVAKLTHTCNLYRIPNQEALAARLVATCFADQVFFSNSGADANEAAIKLVRKYMKDRGQPGRYEIITATNSFHGRTMATLTATGQEKVQSGFEPLVPGFRYVPYNDMEAMEKAVGPYTAAIMVEPIQGESGVRVPDADYLNQLRALCDRKDILLVLDEVQSGMGRTGKMWAYQWSDIEPDIMTSAKALASGVPMGACLARRGVAAAFAPGSHGSTFGGNPLSAAAALATLDVMLAPDFLPTVQARGDYFMNALRQLAQGRRMVKQIRGRGLMVAMELNAPGEEVASIALSRGLLINCCMGTVLRFLPPLVVSEQEIDQGLAILGEVLSDLF

SEQ ID NO: 9797 - protein, 532 aa, Glycine max
  unsure (1)..(532): unsure at all Xaa locations
MNAIATASALSLPIFLRAGKLDTKRDLKGRFRVFAVFGEEEKKNAWGALFDVEDPRSKFPQNKGKXLDISQALEVARHTIQYLNWRARQDVLTIMHLHEKVVEVLNPLAREYKSIGTLKNEQAELQDELAQAHTQVHISEARVSTALDKLAYMEELVNDKLLQDRTTTEVSQTSSSPSTFFKPVDVEKRRPPRKSLDISGPVQSYHTHLKNFWYPVAFSTDLKDDTMIPIECFEEPWVIFRGNDGKPGCVQNTCAHRACPLHLGSVKEGRIQCPYHGWEYTTDGKCEKMPSTRQLNVKIKSVPCFEKEGMIWIWPGNDPPTATLPSLLPPSGFEIHAEIVMELPIEHGLLLDNLLDLAHAPFTHTSTFAKGWSVPSLVNFLTPASGLQGYWDPYPIDMEFRPPCMVLSTIGISKPGRLEGQSTRECSTHLHQLHVCLPSSKQKTRLLYRMSLDFAPLLKHIPLMKYLWRHFAEQVLNEDLRLVVGQQERMNNGANVWNFPVAYDKLGVRYRMWRDALERGAKQLPFSPQHID

SEQ ID NO: 9798 - protein, 454 aa, Haemophilus influenzae Rd
MTMITPVQAILASNQHFLDRQDVMESNVRSYPRKLPFAYAKAQGCWVTDVEGNEYLDFLAGAGTLALGHNHPILMQAIKDVLDSGLPLHTLDLTTPLKDAFSEELLSFFPKDKYILQFTGPSGADANEAAIKLAKTYTGRGNIIAFSGGFHGMTQGALALTGNLGAKNAVENLMPGVQFMPYPHEYRCPFGIGGEAGAKAVEQYFENFIEDVESGVVKPAAVILEAIQGEGGVVSAPISFLQKVREVTQKHGILMIVDEVQAGFCRSGRMFAFEHAGIEPDIIVMSKAVGGSLPLAVLAIRKEFDAWQPAGHTGTFRGNQLAMATGYASLKIMRDENLAQNAQERGEYLTNALRELSKEYPCIGNVRGRGLMMGIDIVDERQSKDATGAYPRDCELAAAIQKACFKNKLLLERGGRGGNVVRVLCAVNINQSECEEFIKRFKQSVVDALKVVRS

SEQ ID NO: 9799 - protein, 228 aa, Zea mays
  unsure (1)..(228): unsure at all Xaa locations
MATSPALLFPSPSSASSAPSSARVEAVVLFNVCDSYVRRPDQADRVIGTLLGSLLSDGTVHVRNSYXSPIHLTVDTGFTRGEASIKAYISSNLSSXDSQLAAQFQEIPLDLKMIEAEKAGFEILKSTMVEKLPNDLEGMESSMGKXYILIDEIYKYVDDVVEGRVAPDNRIGRFISDSFASVPKLSPAAFDKLFNGQDQDNLALVYLSSITXTQISIAEELNTAAQAL

SEQ ID NO: 9800 - protein, 715 aa, Escherichia coli; identical to SEQ ID NO: 3156
  unsure (1)..(715): unsure at all Xaa locations

SEQ ID NO: 9801 - protein, 715 aa, Salmonella enterica subsp. enterica serovar Typhi
  unsure (1)..(715): unsure at all Xaa locations
MKKVVTVCPYCASGCKINLVVDNGKIVRAEAAQGKTNQGTLCLKGYYGWDFINDTQILTPRLKTPMIRRQRGGKLESVSWDEALNYVAERLSAIKAKYGPDAIQTTGSSRGTGNETNYVMQKFARAVIGTNNVDCCARVXHGPSVAGLHQSVGNGAMSNAINEIDNTDLVFVFGYNPADSHPIVANHVINAKRNGAKIIVCDPRKIETARIADMHIALKNGSNIALLNAMGHVIIEENLYDKAFVASRTEGFEEYSKIVEGYTPESVEEITGVSAQEIRQAARMYASAKSAAILWGMGVTQFYQGVETVRSLTSLAMLTGNLGKPSAGVNPVRGQNNVQGACDMGALPDTYPGYQYVKFPENREKFAKAWGVESLPAHTGYRISELPHRAAHGEVRAAYIMGEDPLQTDAELSAVRKAFEDLELVIVQGIFMTKTASAADVILPSTSWGEHEGVFSAADRGFQRFFKAVEPKWDLKTDWQIISEIATRMGYPMHYNNTQEIWDELRHLCPDFYGATYEKMGELGYIQWPCRDTSDADQGTSYLFKEKFDTPNGLAQFFTCDWVAPIDKLTEEYPMVLSTVREVGHYSCRSMTGNCAALAALADEPGYAQINTADAARLGIEDEALVWVHSRKGKIITRAQVSDRPNKGAIYMTYQWWIGACNELVTENLSPITKTPEYKYCAVRVEPIADQRAAEQYVIDEYNKLKTRLRESAMG

SEQ ID NO: 9802 - protein, 1034 aa, Sinorhizobium meliloti; identical to SEQ ID NO: 868
  unsure (1)..(1034): unsure at all Xaa locations

SEQ ID NO: 9803 - protein, 1016 aa, Salmonella enterica subsp. enterica serovar Typhi
  unsure (1)..(1016): unsure at all Xaa locations
MQVSRRQFFKICAGGMAGTTAAALGFAPGVALAETRQYKLLRTRETRNTCTYCSVGCGLLMYSLGDGAKNAKASIFHIEGDPDHPVSRGALCPKGAGLVDFIHSESRLKFPQYRAPGSDKWQQISWEEAFDRIAKLMKEDRDANYQAQNAEGVTVNRWLTTGMLCASASSNETGYLTQKFSRALGMLAVDNQARVXHGPTVASLAPTFGRGAMTNHWVDIKNANLVVVMGGNAAEAHPVGFRWAMEAKIHNGAKLIVIDPRFTRTASVADFYAPIRSGTDIAFLSGVMLYLLTNEKYNREYTEAYTNASLIVREDFGFDDGLFTGYDADKRQYDKTSWHYELDENGFAKRDTTLQHPRCVWNLLKQHVSRYTPDVVENICGTPKADFLKVCEYIAETSAKDKTASFLYALGWTQHSIGAQNIRTMAMIQLLLGNMGMAGGGVNALRGHSNIQGLTDLGLLSQSLPGYLTLPSEKQTDLQTYLAANTPKPLLKDQVNYWGNYPKFFVSMMKAFFGDKATAENSWGFDWLPKWDKGYDVLQYFEMMKQGKVNGYICQGFNPVASFPNKNKVVASLSKLKYLVTIDPLNTETSTFWQNHGESNDVDPSKIQTEVFRLPSTCFAEENGSIVNSGRWLQWHWKGADAPGIAMTDGEILAGIFLRLRKMYSEQGGANPEQVLNMTWNYTKPYEPASEEVAMESNGKALADLIDPATGAVVVKKGQQLSSFAQLRDDGTTSSGCWIFAGSWTPEGNMMARRDNADPSGLGNTLGWAWAWPLNRRILYNRASADPQGNPWDPKRQLLKWEGGKWAGWDIPDYSAAAPGSDVGPFIMQPEGMGRLFAIDKMAEGPFPEHYEPFETPLGTNPLHPNVISNPAARIFKDDADALGKADKFPYVGTTYRLTEHFHYWTKHALLNAIAQPEQFVEIGEKLANKLGIAHGDTVKVSSNRGYIKAKAVVTKRIRTLKADGKDIDTIGIPIHWGYEGVAKKGFIANTLTPFVGDANTQTPEFKSFLVNVEKV

SEQ ID NO: 9804 - protein, 338 aa, Ustilago maydis 521
MSSLPKTYKAAVFEKTGQPLTFKDIELKHPEDGQILVKVEACGVCHSDAHVQAGAFGPLPRVPGHEIVGKVVEVGPHVTRWKSGDRVGGAWHGGHDGTCRQCNQGLFQMCDNGQINGVTRDGGYAEYCLLQAEAAVRLPSDGDAVQMAPLMCAGVTVHNGIRKMNITPGEVVAIQGLGGLGHLAVQYARKMGYRTVALSRGTDKKDFAMKLGATDYIDTSSQDAAEALQKMSGAALIVATAPNPEHISPLVGGCKPMGKLLILAPVGDVRVNSIAMITKGISVHGWPSGHALDSEDAVEFSQRFGVECMCETFPLAKANEAFEHMMANKARFRAVLTM

SEQ ID NO: 9805 - protein, 363 aa, Ustilago maydis 521
MSGESVPTKMRAATIKDFKKGYEIKDIDVPTDLGPNDILIKIAAAGYCHTDLQVMEGVYESQGAKPGLVGSHEPAGTVVKTGSDAGKSGIKVGDRVGSINTYGYCGKCDSCKQGKQLCDNMPGMLGLTLNGGFSQYMKADARVVSKIPDSIPFDQAAPLFCAGATVYGALLAVEPQKRQWLAMVGIGGLGHLGVQYAKAMGCNVIAIDNRKEGLELTNKAPDHLKPDKTFLIDSEEAQKKCIDELSSSFYETNPGVDRVVINCEDRGLIKFSQQFLRKGGQLVDVGLPADGPFELDSFAMNFKEQTIRGRLICTPEQCQDMINLHADNGCTTFIEKTYTIDQANDMAEHYNSKKLQGRLCIVF

SEQ ID NO: 9806 - protein, 231 aa, Triticum aestivum
  unsure (1)..(231): unsure at all Xaa locations
MCGILAVLGCGDESQGKRVHVLELSRRLKHRGPDWSGLHQVADNYLCHQXRLAIIDPASGDQPLYNEDKSIAVAVNGEVYNHEELRARLSGHRFRTGSDCEVIAHLYEEYGESFIDMLDGVFSFVLLDARDNSFIAARDAIGVTPLYIGWGIDGSVWISSEMKGLNDDCEHFEIFPPGNLYSSKEKSFKRWYNPPWFSEVIPSVPYDPLRLRSAFEKAVIKRLMTDVPFGV

SEQ ID NO: 9807 - protein, 830 aa, Chloroflexus aurantiacus
MKAVVMAGGEGTRLRPLTINRPKPMVSLVDRPVMQHIIELLKLHGITDIIITVQYLANVIQDYYGDGSAYGVNITYSLEEVPLGTAGSVKNAEHLLTEPFLVISGDALTDFNLSQIIEYHMASGATATVTLTRVSNPLDYGVIITDEQGRIRQLLEKPSWGEVFSDTVNTGIYVFNPDIFSYIERGKVTDWSKDVFPRMLHRGDRLQGYIANGYWTDVGTIEEYMRACGDYLSGKVNLPRVGHNIGGDIWVDRDAEIAPDAQLHGPIYLGHGAKIKGGVIIHGPSVIRDYTIVDSRANIDRSIIWRNSYIGERAELRGAIVLRQCNIRSRAMIFEGAVIGDGVQIGAGTVVQPNVKIWPSKEVDEGATVTSSIIWGSQGRRVLFGRYGITGLVNIEITPEMCARLGAAYGATLPRGATVTINRDAHFTPRMLKRAIIAGLPSAGVNVCDLRNVPIPIARYYTHASGAAGGVHVRISPFDNRVAEIKFFNHLGLDINSATERKIESTFFREDYRRAYLDEIGRIFYGEDVEETYRAAFMRALGQNAAFGKGFPIVIDYANTSTSTVMAEILRRMQADAVELNVYLDERMVFQTSADFEAAMNRLTKITPVVGAQFGVRLDPGGEKIFLIDDQGRRLHPLRALAAITALAMRANGGGVVAVPVTAPRAFEQIAARYGGSIIRTRANLGALMNLAAERADLLLLGDGTGNYIFPHFYPVADGMFAIARLMELLSLNQTTLSEVLADLPPYYLWQTRVPCRWESKGKVMRILNQQYHERHGEQIDGIKIELGEEWVLILPDPDGPFFHVIAEGVSEDHARILTDKYAGLVTSLQ

SEQ ID NO: 9808 - protein, 350 aa, Candida albicans
MSEQIPKTQKAVVFDTNGGQLVYKDYPVPTPKPNELLINVKYSGVCHTDLHAWKGDWPLATKLPLVGGHEGAGVVVGMGENVKGWKIGDFAGIKWLNGSCMSCEFCQQGAEPNCGEADLSGYTHDGSFEQYATADAVQAAKIPAGTDLANVAPILCAGVTVYKALKTADLAAGQWVAISGAGGGLGSLAVQYARAMGLRVVAIDGGDEKGELVKSLGAEAYVDFTKDKDIVEAVKKATDGGPHGAINVSVSEKAIDQSVEYVRPLGKVVLVGLPAHAKVTAPVFDAVVKSIEIKGSYVGNRKDTAEAIDFFSRGLIKCPIKIVGLSELPEVFKLMEEGKILGRYVLDTSK

SEQ ID NO: 9809 - protein, 266 aa, Mesoplasma florum L1
MKRVLFIGLGHMGSSLVKGVLKNSNNKIEVFGYDVIKEVQDKAIKNIQGLRPLKDISEIELKKIDYIVIGTRPIDVEPLCKNMDQLNIDGKTIICMANAVTIEDVQNNFVKNKKVSVIRMMPNMNASIQKSVTALATKNASNETMKFVSEMFELCGIVENIDEDKFGTLTAISGCSPSYIISFFKAMTDYAIDKGFEKEQAFRIIEEAIIGSVMNASKSEVELRTMVDQICVPNGSTIEGQKILDNKNFEKIIQEALTAATKKATK

SEQ ID NO: 9810 - protein, 486 aa, Cycloclasticus oligotrophus
MQHINHFINGEFVSAVDGKSFEKRSPVDRRLIAQVSEGGKVDVDRAVHAARAALNGEWGAFTMEQRVEILYGVADEITRRFDDFVEAEMADTGQPKSIMTHAFIPRGAANFKIFADVIKNVPNESFQTTTPDGLGALNYAIRVPKGVVGVVSPWNAPFLLMTWKVGPALACGNTVVVKPSEETPLTTTLLGEVMNKVGVPKGVFNVVHGFGPDSAGEYLTHHPKVDAITFTGETTTGAAIMKAASEGMRDVSFELGGKNAGIVFADSDFDKAVDGIYKSSFLNSGQVCLGTERVYVERPIFDKFVEALKKKVEKVRHGRPDDENCNFGPMISHEHQAKVLSYYAKAVEEGATVVTGGGVPSIPEELKEGAWVEPTIWTGLAEDATVMKEEIFGPCCHIAPFDDEQQVINWANDTEYGLSTTVWTRDLSRAHRVAAKINVGITWINSWFLRDLRTAFGGSKQSGIGREGGVHSLEFYTETRNVCVKL

SEQ ID NO: 9811 - protein, 345 aa, Methanocaldococcus jannaschii
MAGIVGYGAYIPKYRIKVEEIARVWNKDPESIKKGLLVYEKAVPSLDEDTATIAVEAARNALKRAEIDPKDIGAVYVGSESHPYAVKPTATIVAEAIDATPDLTAADLEFACKAGTAGIQMCMGLVESGLIKYGLAIGADTAQGAPGDALEYTAAAGGAAYIIGKSNVIAEFNGTYSYTTDTPDFWRREGKPYPRHGGRFTGEPAYFRHVINAAKGLMEKMGTKPEDYDYCVFHQPNGKFYIRVAKILGFKEEQYKIGLLTPYIGNTYSGAVPLGLSNVLDNCEGGERILAVSYGSGAGSDAFDITVTDRINKVKDKAPKTAYYLERKEYIDYAIYAKFRKKIKM

SEQ ID NO: 9812 - protein, 422 aa, Crocosphaera watsonii WH 8501
MTHTILPEKPTQSFDPQHFDTYVMHTYGRFPIAIERGEGCRLWDTNGKEYLDFVAGIATCTLGHGHPALVKSVSEQIRSLHHVSNLYYIPQQGELAQWMIENSCADKVFFCNSGAEANEAAIKLIRKYAHTVLDFLEQPVILTAKASFHGRTLATITATGQPKYQQDFEPLMPGFAYIPYNDIKAVEHAIADMDEGNRRVAAIMLEPLQGEGGVRPGEIDYFLRLRKICDENNILLVFDEVQVGVGRSGKLWGYENLGVEPDVLTSAKGLAGGVPIGAMMCKEFCNVLTPGTHASTFGGNPLASAAALTVLKTIEEDNILQNVQARGEQLRTRLRAIAQKDPTLFIDVRGWGLINGIEINEEMSITSIDIVKAAMDEGLLLAPAGPKVLRFVPPLIVTEEEINEAAEKLETAISEVCAAAVN

SEQ ID NO: 9813 - protein, 232 aa, Glycine max
MERVAESERTLYPYVTGSSVVAIKYKDGILMAADMGGSYGSTLRYKSVERIKPIGKHSLLGASGEISDFQEILRYLDELILYDNMWDDGNSLGPKEVHNYLTRVMYNRRNKFNPLWNALVLGGVKNGQKYLGMVNMIGINFEDNHVATGLGNHLARPILRDEWHENLTFEEGVKLLEKCMRVLLYRDRSAVNKIQISKITDEGATVFPPFSLKTYWEFSAFKNPTVGAEGSW

SEQ ID NO: 9814 - protein, 452 aa, Staphylococcus aureus subsp. aureus Mu50
MNYTQQLKQKDSEYVWHPFTQMGVYSKEEAIIIEKGKGSYLYDTNGNKYLDGYASLWVNVHGHNNKYLNKVIKKQLNKIAHSTLLGSSNIPSIELAEKLIEITPSNLRKVFYSDTGSASVEIAIKMAYQYWKNIDREKYAKKNKFITLNHGYHGDTIGAVSVGGIKTFHKIFKDLIFENIQVESPSFYRSNYDTENEIMTAILTNIEQILIERNDEIAGFILEPLIQGATGLFVHPKGFLKEVEKLCKKYDVLLICDEVAVGFGRTGKMFACNHEDVQPDIMCLGKAITGGYLPLAATLTSQKIYNTFLSDSHGVNTFFHGHTYTGNQIVCTVALENIRLYEKRKLLSHIETTSSTLEKQLHALKRHRNVGDVRGRGLMFGVELVTDKDSKTPLEIEKVERIVRKCKENGLMIRNLENVITFVPVLSMSNKEVKTMVRIFKKAVHNILDRKC

SEQ ID NO: 9815 - protein, 246 aa, Crocosphaera watsonii WH 8501
MTLYQPFLDYAISLMQDQLSLQPYPIPEGFERKEEMTGKGKRQQRVVTSSYAFKSPKLRQIRAAHVQGGSSLQVLNFVIFPQLTYDLPFFGADLVTLPGGHLIALDMQPLFHDKAYQQQYTEPILPLFKSHQQHLPWGGDFPEEAKPFFSPAFLWTRPQETEAVITRVFSAFKDYLQAYLNFVEQAKPITDSQRLEDILQAQRRYIAYRADKDPARGMFTRLYGQAWTEEYIHGFLFDLERQMVTV

SEQ ID NO: 9816 - protein, 593 aa, Zea mays
  unsure (1)..(593): unsure at all Xaa locations
MASISGAAAPPSSAVCRLRLRRHLLLRPSHLRLRAPHSIADLSRSSNSAPNPARPALGSGPENGSGGVRAVEKDPIKLWERYVEWLYQHKELGIFVDVSRMGFTEEFLRQMEPRMQQAFVDMRELEKGAIANPDEGRMVGHYWLRDPALAPNSFLRNKIETALDRILAFSQDVISGKILSPSGRFTSILSIGIGGSALGPQFVAEALAPDNPPLKIRFIDNTDPAGIDHQIAQLGPELATTLVIVISKSGGTPETRNGLLEVQKAFRDAGLQFSKQGVAITQENSLLDNTARIEGWLARFPMFDWVGGRTSEMSAVGLLPAALQGIDIKEMLVGAALMDEETRNTVVSHYXITRTTCSDGMIIYIVSCQTCLSFYXQVKANPAALLALCWYWASEGIGKKDMVVLPYKDSLLLLSRYLQQLVMESLGKEFDLDGNRVNQGLTVYGNKGSTDQHAYIQQLREGVHNFFVTFIEVLRDRPAGHDWELEPGVTCGDYLFGMLQGTRSALYANDRESISVTVQEVTPRAVGALIALYERAVGLYASLVNINAYHQPGVEAGKKAAGEVLALQKRVLTVLKEAMYGTSDLCSFCFSVK

SEQ ID NO: 9817 - protein, 395 aa, Campylobacter jejuni
MKMDYKEQSHIVPAYKRFDIVLEKGQGVYLFDDKAKKYLDFSSGIGVCALGYNHAKFNAKIKAQVDKLLHTSNLYYNENIAAAAKNLAKASALERVFFTNSGTESIEGAMKTARKYAFNKGIKGGQFIAFKHSFHGRTLGALSLTANEKYQKPFKPLISGVKFAKYNDISSVEKLVNEKTCAIILESVQGEGGINPANKDFYKALRKLCDEKDILLIADEIQCGMGRSGKFFAYEHAQILPDIMTSAKALGCGLSVGAFVINQKVASNSLEAGDHGSTYGGNPLVCAGVNAVFEIFKEEKILENVNKLTPYLEQSLDELINEFDFCKKRKGLGFMQGLSLDKNVKVAKVIQKCQENALLLISCGENDLRFLPPLILQKEHIDEMSEKLRKALKSF

SEQ ID NO: 9818 - protein, 214 aa, Paeonia parnassica
IVESVGEGVTDLKPGDHVLPVFTGECKECRHCKSEESNMCDLLRINTDRGVMLNDGKSRFSINGQPIFHFVGTSTFSEYTVVHVGCVAKINPEAPLDKVCVLSCGISTGLGATLNVAKPKKGSSVAIFGLGAVGLAAAEGARIAGASRIIGVDLNPKRFEEAKKFGVTEFVNPKDYNKPVQEVIAEMTDGGVDRSVECTGSIMAMISAFECVHD

SEQ ID NO: 9819 - protein, 515 aa, Pseudomonas aeruginosa UCBPP-PA14
MTATPKPLVLIILDGFGHSESPDYNAIYAAKKPVWDRLLATQPHGLISGSGMDVGLPDGQMGNSEVGHMNLGAGRVVYQDFTRVTKAIRDGEFFENPVIAAAVDKAVAADKAVHILGLLSPGGVHSHEDHLVAMAQMAARRGAGKIYLHAFLDGRDTPPKSAQPSLERLDATFAGLGKGRIASIIGRYFAMDRDNRWDRVQAAYELIVDGKAEFTADSSVAALEAAYARGESDEFVKATAVVPAGAEAVRVEDGDAVIFMNFRADRARELSRAFVEPAFKEFPREQAPQLAGFVMLTQYAASIPAPCAFPPEPLTNVLGEYLAKHGKTQLRIAETEKYAHVTFFFSGGREEPYEGEERILIPSPKVATYDLQPEMSAPEVTDRIVEAIEQQRYDVIVVNYANGDMVGHTGVFEAAVKAVECLDTCMGRIVEALDKVGGEALITADHGNVEQMEDESTGQAHTAHTCEPVPFVYVGKRKLSIREGGVLADVAPTMLTLMGLEQPAEMTGRSIVTLG

SEQ ID NO: 9820 - protein, 411 aa, uncultured bacterium 314
MNKIIKEQINQLKPSATLAINEESNKLKKSGKKVYKFGFGQSPFPVPESIVSALKNNANKNTYLPMQGLEELRSAIANQLNQSNNNDFVAEDIIVGPGTKELMLLTQIAFAGEILLPAPSWVSYQPQAVIAKNKVHWIQTSSNSNWFPTAEQLENKIKSIKNQNLILFMNSPNNPSGIVCKNLQEITEVAKKHKLIILSDEIYSRLTFDNQYKSISNFYPEGTIVSTGLSKWCGAGGWRLGFFAIPKQLEELKNSLKILCSESFTSVSAPIQYAAVEAYKGDHSAYLNAVRKILSFTGNYVYENLKSNVINVTKPEGGFYLFPEFTNAKFSSSSEMCKDILNKTGVALLPGSDFGVDSKKMLTRLSYTDFDGSNFLANTIGGKKLDHATIKKYAPNIVEGVAKLKDWSKSL

SEQ ID NO: 9821 - protein, 158 aa, Oryza sativa
IDSLLGRIGLPGPPSRPHGPGDCRQSPSDMAPGKQRGKAKGAPPPPAAPNAAAAGGFPACLRLMPPSTVAISIQAKPGSKLATITEIGDEAVGVQIDAPARDGEANAALVDFISSVLGVKKREVSIGSGSKSREKVVLVQDATLQGVFDALKKACASA

SEQ ID NO: 9822 - protein, 214 aa, Paeonia arietina
IVESVGEGVTDLKPGDHVLPVFAGECKVCRHCKSEESNMCDLLRINTDRGVMLNDGKSRFSINGQPIFHFVGTSTFSEYTVVHVGCVAKINPEAPLDKVCVLSCGISTGLGATLNVAKPKKGSSIAIFGLGAVGLAAAEGARIAGASRIIGVDLNPKRFEEAKKFGVTEFVNPKDYNKPVQEVIAEMTDGGVDRSVECTGSIMAMISAFECVHD

SEQ ID NO: 9823 - protein, 604 aa, Arabidopsis thaliana
MGAEEFPSVPFNSNAMDNAEYTDTDLVFAVRKALASVQNGDTDDYSQLKTVMCLTEDADFDAVAQLETVLKSLSVSVAWIDLVHHKDLLEAMSLWYHSHRPSVMDALVDLIISLAATSGKYLDPCLNMLVRNFSQPTFKHKVSQTQLVKKMQEVHPRVHAALHKISYLIPLAPWNLVSILAQNMRKIDKKDPSIVTYVDNLLRLENSSIGEVVGSVILMMVMERMLDLDLVSGCDDSNGGMFDMELEDAVESTMNEGDEFPVGALKQNTSGGNVVSELLDKLMVLFFHHLESCQNSDRLDEVFEILFKSFENYILNTYKTKFSQFLMFYACSLDPENCGVRFASKLLDIYLSSNTCRLTRMSAVAYLASYLSRGKFLPASFVASMLKRLVDECAEYCGTCNDDVKPEAHQVFYSGCQAILYVLCFRMRSIVEIPRFQSQFRSLESILSHKLNPLLVCLPSVVSEFLKQAKAGGLFIVSESFIFDDLHESELSRAFGGFERLDTFFPFDPCLLKMSSSYISPNFNFWSMVKTTYGEDGDEELCDEVIVNGDADSAEEPDDDVELDSEMNTMSTTPKHSFMRETERLLKMPSRIRPSTSPPESFLI

SEQ ID NO: 9824 - protein, 1016 aa, Escherichia coli
  unsure (1)..(1016): unsure at all Xaa locations
MQVSRRQFFKICAGGMAGTTAAALGFAPSVALAETRQYKLLRTRETRNTCTYCSVGCGLLMYSLGDGAKNAKASIFHIEGDPDHPVNRGALCPKGAGLVDFIHSESRLKFPEYRAPGSDKWQQISWEEAFDRIAKLMKEDRDANYIAQNAEGVTVNRWLSTGMLCASASSNETGYLTQKFSRALGMLAVDNQARVXHGPTVASLAPTFGRGAMTNHWVDIKNANLVVVMGGNAAEAHPVGFRWAMEAKIHNGAKLIVIDPRFTRTAAVADYYAPIRSGTDIAFLSGVLLYLLNNEKFNREYTEAYTNASLIVREDYGFEDGLFTGYDAEKRKYDKSSWTYELDENGFAKRDTTLQHPRCVWNLLKQHVSRYTPDVVENICGTPKDAFLKVCEYIAETSAHDKTASFLYALGWTQHSVGAQNIRTMAMIQLLLGNMGMAGGGVNALRGHSNIQGLTDLGLLSQSLPGYMTLPSEKQTDLQTYLTANTPKPLLEGQENYWGNYPKFFVSMMKAFFGDKATAENSWGFDWLPKWDKGYDVLQYFEMMKEGKVNGYICQGFNPVASFPNKNKVISCLSKLKFLVTIDPLNTETSNFWQNHGELNEVDSSKIQTEVFRLPSTCFAEENGSIVNSGRWLQWHWKGADAPGIALTDGEILSGIFLRLRKMYAEQGGANPDQVLNMTWNYAIPHEPKSEEVAMESNGKALADITDPATGAVIVKKGQQLSSFAQLRDDGTTSCGCWIFAGSWTPEGNQMARRDNADPSGLGNTLGWAWAWPLNRRILYNRASADPQGNPWDPKRQLLKWDGTKWTGWDIPDYSAAPPGSGVGPFIMQQEGMGRLFALDKMAEGPFPEHYEPFETPLGTNPLHPNVISNPAARIFKDDAEALGKADKFPYVGTTYRLTEHFHYWTKHALLNAILQPEQFVEIGESLANKLGIAQGDTVKVSSNRGYIKAKAVVTKRIRTLKANGKDIDTIGIPIHWGYEGVAKKGFIANTLTPFVGDANTQTPEFKSFLVNVEKV

SEQ ID NO: 9825 - protein, 265 aa, Burkholderia fungorum LB400
MLPIVDKPLIQYAVEEAMAAGITEMIFVTGRSKRAIEDHFDKSYEIEAELEARGKDKLLELVRSIKPSHVDCFYVRQSEALGLGHAVLCAEKLVGDNPFAVILADDLLHGTPPVMRQMIEAFDHYHSSMIGVEEIPSQDTGSYGVIDGSEWGDSIIRMAGIVEKPEPNVAPSNLGVVGRYVLKPRIFKHLRAIKAGAGGELQLTDAIQSLLADEQVLAYKYHGTRFDCGSKLGYLKATVEFALRHPEVRSEFRAYLEKHLSLLQM

SEQ ID NO: 9826 - protein, 206 aa, Schizophyllum commune
MALCGSSKGRGRGRPIQRKVVVCGDGACGKTSLLNVFTRGFFTQVYEPTVFENYVHDLYIDDQLVELSLWDTAGQEEFDRLRSLSYAETHVIMICFSVDNPTSLENVESKWLDEILEYCPGVKLVLVDSKCDLRDDPAVLDRLQRYGTHTDQYEEGLGVARRIRASRYLECSSKHNRGVNEVFLRGRARVTVHSIRQGSAGSCCVM

SEQ ID NO: 9827 - protein, 1015 aa, Escherichia coli
  unsure (1)..(1015): unsure at all Xaa locations
MDVSRRQFFKICAGGMAGTTVAALGFAPKQALAQARNYKLLRAKEIRNTCTYCSVGCGLLMYSLGDGAKNAREAIYHIEGDPDHPVSRGALCPKGAGLLDYVNSENRLRYPEYRAPGSDKWQRISWEEAFSRIAKLMKADRDANFIEKNEQGVTVNRWLSTGMLCASGASNETGMLTQKFARSLGMLAVDNQARVXHGPTVASLAPTFGRGAMTNHWVDIKNANVVMVMGGNAAEAHPVGFRWAMEAKNNNDATLIVVDPRFTRTASVADIYAPIRSGTDITFLSGVLRYLIENNKINAEYVKHYTNASLLVRDDFAFEDGLFSGYDAEKRQYDKSSWNYQFDENGYAKRDETLTHPRCVWNLLKEHVSRYTPDVVENICGTPKADFLKVCEVLASTSAPDRTTTFLYALGWTQHTVGAQNIRTMAMIQLLLGNMGMAGGGVNALRGHSNIQGLTDLGLLSTSLPGYLTLPSEKQVDLQSYLEANTPKATLAGQVNYWSNYPKFFVSLMKSFYGDAAQKENNWGYDWLPKWDQTYDVIKYFNMMDEGKVTGYFCQGFNPVASFPDKNKVVSCLSKLKYMVVIDPLVTETSTFWQNHGESNDVDPASIQTEVFRLPSTCFAEEDGSIANSGRWLQWHWKGQDAPGEARNDGEILAGIYHHLRELYQAEGGKGVEPLMKMSWNYKQPHEPQSDEVAKENNGYALEDLYDANGVLIAKKGQLLSSFAHLRDDGTTASSCWIYTGSWTEQGNQMANRDNSDPSGLGNTLGWAWAWPLNRRVLYNRASADINGKPWDPKRMLIQWNGSKWTGNDIPDFGNAAPGTPTGPFIMQPEGMGRLFAINKMAEGPFPEHYEPIETPLGTNPLHPNVVSNPVVRLYEQDALRMGKKEQFPYVGTTYRLTEHFHTWTKHALLNAIAQPEQFVEISETLAAAKGINNGDRVTVSSKRGFIRAVAVVTRRLKPLNVNGQQVETVGIPIHWGFEGVARKGYIANTLTPNVGDANSQTPEYKAFLVNIEKA

SEQ ID NO: 9828 - protein, 258 aa, Oceanobacillus iheyensis HTE831
MVKDRVVYITGAASGIGYQMGVEFLKQGAKVVFTDINEQKLNEITKDLSDLGYECTGLKVDVTNEEELKQSIQQTVRIYGSLDVLINNAGLQHVSPIEDFPTEKYEFMIKIMLTAPFVAIKHVLPIMKEQGHGRILNMASINGLVGFAGKAAYNSAKHGLIGLTKVAALEVADTGITVNAICPGYVDTPLVRGQFEDLAKTRNVPVERVKEEVLFPLVPQKRLLDVKEIADYALYLASDKAKGITGQALALDGGYTVQ

SEQ ID NO: 9829 - protein, 874 aa, Sulfurospirillum barnesii
  unsure (1)..(874): unsure at all Xaa locations
WKWDKAVCRFCGTGCGIMVATKEGKIVAVKGDPAAPVNRGLNCIKGYFNAKIMYGADRLKQPLLRMNDKGEFDKKGQFKPVSWKRAFDEMEKHIKAALKVGGPEAIGVFGSGQYTIQEGYAAAKMMKAGFRANGIDPNARHCMASAVAGFMQTFGIDEPAGCYDDIEITDTIITWGANMAEMHPILWSRVSDRKLTSPDRVKIVNLSTYTHRCSDLADLEIIFSPSTDLAIWNYIAREIVYNHPEAIDWDFVKKNTIFTTGFANIGYGMRTEAEAKKLGYSAKELEVIKKEDAKVISEKEAPGLAHLGVKAGDVMKMDKADAAGAHWEISFEDFKKALEPYTLEYVAKISKGNPDEKLEDFKVKLQELANLYIEKNRKVVSFWTMGFNQHQRGTWVNEQSYMVHFLLGKQAKPGDGAFSLTGQPSACGTAREVGTFTHRLPXDMDVSIPKHREVSEKIWKLPAGTLNPMGYQHIMNXHRQIESGKIKFAWVNVCNPYQDTANANHWIKAARELDNFIVCSDAYPGISAKVSDLILPSAMIYEKWGSYGNAERRTQHWRQQVLPVGDAMSDTWQWVELSKRFTIKDVWGEQPIKGGKLPNVIEAAKAMGYKETDTMYDVLFATPFAKQFKADDAIGKGFDNSEVFGDARKVMGSDGKEWTGYGFFIQKSIWEEYRQFGLGHGHDLADFDTYHKVRGLKWPVVDGKETQWRFNAKYDPYAAKAGNGDFAFYGDFAKALKKGNLVKPTTEETYSLKNKAKIFFRPYMDPCEMPDREYDTWLCTGRVLEHWHSGTMTMRVPELYRAVPEALCYMHPEDAKAKGFKQGDMIWLESRRGSCKARVETRGRNRTPRGLVFVPWFDEKVMINKVCLDATCRF

SEQ ID NO: 9830 - protein, 497 aa, Pseudomonas syringae pv. tomato str. DC3000
MTTLTRADWEQRAQNLKIEGRAFIQGEYTAAASGETFDCISPVDGRLLAKVASCDAADAQRAVESARSAFDSGAWSRLAPAKRKATMIRFAGLLEQNAEELALLETLDMGKPISDSLGVDIPGGARALSWSGEAIDKLYDEVAATPHDQLGLVTREPVGVVAAIVPWNFPLMMACWKLGPALSTGNSVVLKPSEKSPLTAIRIAQLAIEAGIPAGVLNVLPGYGHTVGKALALHMDVDTVVFTGSTKIAKQLMIYAGESNMKRVWLEAGGKSPNIVFADAPDLQAAADSAASAIAFNQGEVCTAGSRLLVERSIKDRFLPMVIEALGTWKPGNPLDPATNVGALVDTQQMNTVLSYIAAGHTDGARLVAGGKQILQETGGTYVEPTIFDGVNNAMRIAQEEIFGPVLSVLTFDTAEEAIQIANDTPYGLAAAVWTANLSKAHLTARALRAGSVWVNQYDGGDMTAPFGGFKQSGNGRDKSLHAFDKYTELKSTWIKL

SEQ ID NO: 9831 - protein, 242 aa, Zinnia elegans
MAHFAIFFLALLSPLHVIAGGGGWSNAHATFYGGGDASGTMGGACGYGNLYSQGYGTNTAALSTALFNKGLSCGSCYEIRCVNDRQWCLPATIVVTATNFCPPNSNGGWCDPPRQHFDLSQPIFQHIAQYKAGVVPVAYRRVPCRRRGGIRFQINGHSYFNLVLITNVGGAGDVHAVAIKGSRTGWQQMSRNWGQNWQSNSYLNGQSLSFKVTTSDGRTVVSYNVAPSRWSFGQTFAGAQFY

SEQ ID NO: 9832 - protein, 416 aa, Oryza sativa
MVAEAEVMHQPVPVLEVPYHRCVAKGVEEVAAAAAVAPPPVVEVEVAVQVPHMVYYGVYCLSVYYTRLFSVRGCKRLTQFGLESAAGAPSISVDALQFVPSIRSGSFADIGPRRYMEDEHIRIDDLSAHLGSLLVCTLPSAFYGVFDGHGGLDAAAYMKRHAMRFLFEDSEFPQASQVDETYVQSVENSVRRAFLQADLALADDLDISRSSGTTALTALVFGRQLLVANAGDCRAVLCRRGVAMEMSRDHRANYAEECERVAASGGYIEDGYLNGVLSVTRALGDWDMKMPDGSISPLIAEPEFRQTMLTEDDEFLIMGCDGIWDVMTSQHAVSIVRRGLRQHDDPERCARELVMEAKRLETADNLTVIVVCFVSELGSPRQEQVGGQAGVARPRSCKSLSAEALCNLRSWLETDR

SEQ ID NO: 9833 - protein, 258 aa, Sinorhizobium meliloti
MADERVSARGGMETSFGFREVGTGEKQPLVNDVFHKVAKRYDIMNDVMSAGLHRVWKDAMIAALNPPGREDYRVLDVAGGTGDIAFRIVERSGRKAHATVLDINGSMLSVGAERARKKGIEANLDFVEANAEDLPFAANSFDAYTIAFGIRNVPRIEVALKEAYRVLKRGGRLLVLEFSEVEMPLLDRFYDAWSFNAIPKFGKLITGDDAPYQYLVESIRKFPNQRDFAAMIRDAGFARVSFTNYTGGIAALHSGWKI

SEQ ID NO: 9834 - protein, 444 aa, Lycopersicon esculentum
MATIKSIKARQIFDSRGNPTVEVDVHISNGVFARAAVPSGASTGIYEALELRDGGSDYLGKGVSKAVNNVNSIIGPALVGKDPTDQTGLDNFMVHQLDGTQNEWGWCKEKLGANAILAVSLAVCKAGAAVRNVPLYKHIADLAGNKKLVLPVPAFNVINGGSHAGNKLAMQEFMILPVGAANFKEAMKMGCEVYHHLKAVIKKKYGQDATNVGDEGGFAPNIQENKEGLELLKTAIEKAGYTGKVVIGMDVAASEFYGKDKSYDLNFKEESNDGSQKISGDQLKDLYKSFVSEYPIVSIEDPFDQDDWETYAKLTAEIGEQVQIVGDDLLVTNPKRVAKAIAEKTCNALLLKVNQIGSVTESIEAVKMSKKAGWGVMTSHRSGETEDTFIADLAVGLSTGQIKTGAPCRSERLAKYNQLLRIEEELGSEAVYAGASFRKPVEPY

SEQ ID NO: 9835 - protein, 294 aa, Chloroflexus aurantiacus
MARTVPATEPKLEKSPLEKFVVLLIVVLPFLGTIYAMVMLWQQYVDWLDVTLMLVLYVISGLGITIGFHRMLTHKSFETSRPLKALFLIMGCMALEGDPTSWASTHIQHHAHSDDEDDPHSPLEGLWHSHVGWLFTHKNNIEMYGKWLTKDPTVVWVTKTWYVWAALGIIIPTLIAGWSGLIWGGLVRIFLTHHITWSVNSICHTFGRRDYNTRDASRNNFIVGLLAFGEGWHNNHHAFPRSAFHGLQWWQVDISAYIIRALEKVGLVWNVHRVKPEDLRKRQRTPALHEVMGD

SEQ ID NO: 9836 - protein, 306 aa, Streptococcus mutans UA159
MTKTAFLFAGQGAQKLGMASDLYEIYPVVKETFKTAHSILGYDVRALIDNDEEKLNQTRYAQPAILTTSVAIYRLLKEKGYQPDIVAGLSLGEYSALVAAGAISFEDALALVAKRGEFMETAAPAGVGKMVAVMNTDPRLIEEICQKASSKGIVSPANYNTPTQIVIGGEVAAVDYAVELLKGAGSKRLISLKVSGPFHTALLKSASQKLAQALENIKFSDFMLPLVGNTKAEIMKEQEIKPLLARQVKEPVRFYESIAVMQKFGVNNYVEIGPGKVLSGFVKKIDKSAKISAVEDLASLQAFLDN

SEQ ID NO: 9837 - protein, 339 aa, Streptococcus thermophilus
MKRIAVLTSGGDAPGMNAAVRAVVLKAISEGIEVFGINRGYAGMVEGDIFKLDAKRVENILSRGGTFLQSARYPEFAQLEGQLKGIEQLKKYGIEGVVVIGGDGSYHGAMRLTEHGFPAVGLPGTIDNDIVGTDYTIGFDTAVATATEALDKIQDTAFSHGRTFVVEVMGRNAGDIALWAGIASGADQIIVPEEEYDINEVVRKVKEGYESGEKSHHIIVLAEGVMGAEEFAAKMKEAGDTSDLRATNLGHVIRGGSPTARDRVLASWMGAHAVDLLKEGIGGVAVGIHNEQLVESPILGTAEEGALFSLTEDGKIIVNNPHKARLDFAELNRSLANLK

SEQ ID NO: 9838 - protein, 294 aa, Nostoc punctiforme PCC 73102
MTKTAWVFPGQGSQTLGMGIDLLDIPFAKDKFAQAEEILGWSVTKICQNEEAKLSQTLYTQPSLYVIESILADLLQERGQQPDLVAGHSLGEYSALYVAGVFEWSAGLYLVKRRAELMDNAVGGMMAALMNFDREQLEKVIAHTPDVVLANDNSSAQVVISGTTEAVQAVMTQVKAKRAIPLKVSGAFHSHLIAPAAAEFQNILESVEFQPATVPVLSNVEPIPSIDAEILKQRLNKQMTGSVRWREISLQLPANGIQRVVEVGPGKVLTGLIKRSSPDLILENIQSGADLALG

SEQ ID NO: 9839 - protein, 450 aa, Desulfovibrio desulfuricans G20
MTATRFESGSIVLDTTIPNLGPAKIPSPLSYCRFANEEQGLSLFLDHDQVEELGDEVVPLTFEPAGPRRHVYFDTSKTKCAIVTCGGLCPGINDVIRAIVMEAYHNYRVPAVLGIKYGLEGFIPRYGHDVVELTPALVGDIHQFGGTILGSSRGPQSPEEIVDALERMNVNILFMIGGDGTMKAVRSITGEINQRRLKISVIGIPKTIDNDINFISQSFGFETAVDKATEAIQCAHTEAVGAMNGIGLVKLMGRESGFIAAQATLSLKEVNFVLVPETPFTLHGEDGLLNALAQRLRERSHAVIVVAEGAGQHLLSGSHDTDASGNPILGDIATLLRTEIKSHFDKLGIPHTLKYIDPSYIIRSVPANANDRVYCGFLGQNAVHAGMAGKTGMVVAKLMDRYIHLPLDLVTSKRRKLNIISDFWRAVLESTGQSHLAGMVPPEARSCPRA

SEQ ID NO: 9840 - protein, 509 aa, Xanthomonas axonopodis pv. citri str. 306
MNALASAKSLNNDPHSIFKPRYDNFIGGQWVAPHSGQYFDNTTPINGKVFTSIARSTAPDIEAALDAAHAAKDAWGKTSTTERSNVLLKIADRIEQNLELLAYAETWDNGKPVRETLNADVPLCVDHFRYFAGAIRAQEGGISEIDSDTIAYHFHEPLGVVGQIIPWNFPLLMACWKLAPALAAGNCVVMKPAEQTPASILVLMELIGDLLPPGVLNVVNGFGLEAGKPLASNPRIAKIAFTGETTTGRLIMQYASQNLIPVTLELGGKSPNIFFADVMAEDDDFLDKAVEGFVLFAFNQGEVCTCPSRALIQESIYDAFMEKALSRVAAIKQGNPLDPNTMVGAQASSEQLEKILSYIDIGKQEGAEVLIGGERNTLDGDLAEGFYVKPTVFKGHNKMRVFQEEIFGPVVSVTTFKDEADALAIANDTLYGLGAGVWSRDASRLYRMGRAIQAGRVWTNCYHAYPAHAAFGGYKQSGIGRENHKMMLDHYQQTKNLLVSYSPKALGFF

SEQ ID NO: 9841 - protein, 214 aa, Paeonia humilis
IVESVGEGVTDLKPGDHVLPVFTGECKVCRHCKSEESNMCDLLRINTDRGVMLNDGKSRFSINGQPIFHFVGTSTFSEYTVVHVGCVAKINPEAPLDKVCVLSCGISTGLGATLNVAKPKKGSSIAIFGLGAVGLAAAEGARIAGASRIIGVDLNPKRFEEAKKFGVTEFVNPKDYNKPVQEVIAEMTDGGVDRSVECTGSIMAMISAFECVHD

SEQ ID NO: 9842 - protein, 153 aa, Medicago sativa
TTRKITLKSSDGETFEVDEAVALESQTIKHMIEDDCADSGIPLPNVTSKILAKVIEYCKKHVDAAAAEDKPNEDELKSWDSEFVKVDQATLFDLILAANYLNIKSLLDLTCQTVADMIKGKTPEEIRKTFNIKNDFSPEEEEEVRRENQWAFE

SEQ ID NO: 9843 - protein, 214 aa, Paeonia officinalis
IVESVGEGVTDLKPGDHVLPVFTGECKVCRHCKSEESNMCDLLRINTDRGVMLNDGRSRFSINGQPIFHFVGTSTFSEYTVVHVGCVAKINPEAPLDKVCVLSCGISTGLGATLNVAKPKKGSSIAIFGLGAVGLAAAEGARIAGASRIIGVDLNPKRFEEAKKFGVTEFVNPKDYNKPVQEVIAEMTDGGVDRSVECTGSIMAMISAFECVHD

SEQ ID NO: 9844 - protein, 430 aa, Oryza sativa (japonica cultivar-group)
MHAHQHQHALLAALLACALAASSSTAGAQPAGQQGYAYGDVSGQQVHVSTTMIVLLAAVVGVFLFIAISTIYLRHCTGYDPATEGGGVGGSRSMILPANSFVSRRQRRPRGLDSSVVRMFPTMKYAEAKALRVGKVAGAALECAVCLSEFEDDEMLRFLPKCSHAFHPDCIGQWLASHVTCPVCRRNLDPNKDTTEEVIIPAAAAADPNSTSSEIVVIRQEDGAHPAAVVIDVVTEEDDEERRKEELELQAIGTQLRAMRSRSGLRPKTSAAKLPRSHSTGHSLAVRLDGDLERYTLRLPEHVHREMVAAGEQSVRRGRRLGEGVGMGARCSPRFSRSGRWSSFLSNSLSGKLSFLSPSSRRTPDSTQVEVSSSSSSSVTKVKGKRVAAVDVADDGSAHGTAQYPGCTVASSAAAAAVDVEKAATRQVRT

SEQ ID NO: 9845 - protein, 98 aa, Glycine max
  unsure (1)..(98): unsure at all Xaa locations
MATIDSMRARQMFHRRGNPTGEADSTRSDGTLARAACPSGAPTGRAEARESRDGRPDHQGKGASKAVDNVNTXLAPALNATDPTEQTAPDNGTDQQQD

SEQ ID NO: 9846 - protein, 577 aa, Ceratodon purpureus
MSAPKKTYSSTTSAKSKHSVRVAQTTADAALEAVYEMSGDSGDSFDYSKSVGQSAESVPAGAVTAYLQRMQRGGLIQTFGCMVAVEEPNFCVIAYSENASEFLDLMPQAVPSMGEMDVLGIGTDIRTLFTPSSGAALEKAAATQDISLLNPITVHCRRSGKPLYAIAHRIDIGIVIDFEAVKMNDVSVSAAGALQSHKLAAKAITRLQALPGGDIGLLCDTVVEEVRELTGYDRVMAYKFHEDEHGEVVAEIRRMDLEPYLGLHYPATDIPQASRFLFMKNRVRVIADCCASPVKLIQDPDIKQPVSLAGSTLRAPHGCHAQYMGNMGSIASLVMAVIINDNEEDSRGAIQRGRKLWGLVVCHHTSPRTVPFPLRSACEFLMQVFGMQLNMEVELAAQLREKHILRTQTLLCDMLLRDAPIGIVSQTPNIMDLVKCDGAALYYGKRFWLLGTTPTENQIKDIAEWLLEYHKDSTGLSTDSLADANYPGAHLLGDAVCGMAAAKITAKDFLFWFRSHTAKEVKWGGAKHDPAEKDDGRKMHPRSSFKAFLEVVKRRSLPWEDVEMDAIHSLQLILRGS

SEQ ID NO: 9847 - protein, 570 aa, Glycine max
  unsure (1)..(570): unsure at all Xaa locations
MCGILAVLGCVDNSQTKRARIIELSRRLRHRGPDWSGIHCYEDCYLAHQRLAIVDPTSGDQPLYNEDKTVIVTVNGEIYNHKQLRQKLSSHQFRTGSDCEVIAHLYEEHGEEFVNMLDGMFAFILLDTRDKSFIAARDAIGITPLYLGWGHDGSTWFASEMKALSDDCERFISFPPGHIYSSKQGGLRRWYNPPWFSEDIPSTPYDPTLLRETFERAVVKRLMTDVXPFGVLLSGGLDSSLVAAVVNRYLAESESARQWGSQLHTFCIGLKGSPDLKAAKEVADYLGTRHHELYFTVQEGIDALEEVIYHIETYDVTTIRASTAMFLMSRKIKALGVKMVLSGEGSDEIFGGYLYFHKAPNKKEFHEETCRKIKALHLYDCLRANKSTAAWGVEARVPFLDKEFINVAMSIDPEWKMIRPDLGRIEKWVLRNAFDDDKNPYLPKHILYRQKEQFSDGVGYSWIDGLKDHANKQVTDATMMAANFIYPENTPTTKEGYLYRTIFEKFFPKNAAKATVPGGPSVACSTAKAVEWDAAWSKNLDPSGRAALGIHDAAYDAVDTKIDEPKNGTL

SEQ ID NO: 9848 - protein, 31 aa, Triticum aestivum
VFKGAMKGKLIVFCPLPPERIPRFQLLFKDV

SEQ ID NO: 9849 - protein, 520 aa, Neurospora crassa
MNGIKDLGLGFSKASTRLHFFSLLLALGSFVWGYNVGVLASVLAHPGFRETIPGYGPYKRGLITSINYLGTWLSYIFFSRPATDLLGRRYAAMVGMSVLCVGQALQAAASGSVALSMVIFGRVVSGLGTGIVSTSVPLYQSEIAPAKQRGRLVVLNHVGFVAGLASGFWVGYAITFWNSSHGYLSGWRLSVSLSFIPALIFFVGLPFLHESPRWLVEHGRPDEALKALQFYREGSFTPSQIQSELTDIKRNVCAYQATSLKKWTSLFTNPSLFTRLWRAALLHFMAQMCGATAMKYYLPDLFRVLGLSPRVSLLAGGIESTLKIGCTVLEMFVIDKVGRRMTLAVGAGIMAFALLINGALPLAYPNNTNRASDYTCVVFIFIYSLGYSMGFGPAAWVYGSEMFPTAARARGLSFAASGGAVGSIIVSQLWPIGIAELGSKIYFFFMAVNLACVPIIFLLYPETKGRPLEDMEVLFGGYEGGTPSTTSLLLADEREDGNEEDEENETLGRPLLGDGRGMAR

SEQ ID NO: 9850 - protein, 974 aa, Vibrio vulnificus YJ016
MRRGRESFFYFKGKCMSTAFEVDTNTIATIFSSQVPVVEGIYDLTPDQVLLDQAEHESEVRSYPRRLPIAIKQAYGCLVEDTRGQIFLDCLAGAGTLALGYNHPEINQALKEQLDSGLPYQTLDIATTAKTNFIKSVKAFLPEELGNNCVIQFCGPSGADAVEAAIKLAKQTTGRNTMFAFRGAYHGMTNGTMGMMGNLNTKARRTGLMSDVHFMPFPYSLRCPFGLGGDEGAKASIRYIERLLNDDEAGIMKPAAIIVEPVQGEGGVIPAPAFWLRELRRICDEHGMLLIFDEIQCGVGKSGYNFAFEEAGIVPDVLCLSKAIGGGLPMSLLVINKKHDTWRPGEHTGTFRGNQLAMVSGAKALEIITRDNLVEHANVAGQYLRHGLEKIQQRVDCIAEVRGKGLMLGVEIRKPGSELNKFGEPVSDGQLTLAIQRAALERGLMVEKGGRDGSVIRFLPPLIISFEQIDFALRILEEAILAAGGNLKAVEENAEWKKHFIHTGVNGSKEFASVMNHTTAALKNAFEEVDAPYSGMDPKALESAIYAVDLDNKNAPLKEIIDETTELVVKNSIFTQHPDCIAHLHTPPLMPAVAAEAMIAALNQSMDSWDQSSSATYVEQKVINWLCDKYELGAKADGIFTSGGTQSNQMGLMLARDWIADKLSGHSIQKLGLPDYADKLRIICSKKSHFTVQKSASWMGLGEKAVLTIDAHANGTMDVTKLEASVEQAKAEGLIPFAVVGTAGTTDHGAIDDLNTIADVAEKHDLWMHVDGAYGGALILSSQKARLKGVERAQSVSVDFHKLFYQTISCGAVLVNDKQNFKFLLHHADYLNREHDELPNLVDKSIATTKRFDALKVFMTMQNVGPKALGAMYDHILGQTLEVADLVRNTEGFELLAEPSLSTVLFRSTLGSDLDELNKTLRLEALTRGVAVLGETIVDGKTALKFTILNPCLKMSDFESLLSKINTLAAELAQ

SEQ ID NO: 9851 - protein, 453 aa, ASPERGILLUS NIDULANS FGSC A4
MASRLSLRQFSAQRLRTFTTSKGSENARSASGLIQGLQKGPALRNGFSRVNVIPISNYQVRTYADTVVKVPQMAESITEGTLKQFSKQVGDYVERDEEIATIETDKIDVSVNAPESGVIKELLVNEEDTVTVGQDLVKLEAGGTPEKKSEEATEKPKEPASTGSEAEKPKEPESAPSSSAPEKSTSSTKAPQAETSKPTQEVASKSRPTEEAKPALGNREERRVKMNRMRLRIAERLKQSQNTAASLTTFNEVDMSSLMEFRKLYKDEILKKTGVKLGFMSAFSRACVLAMKDVPAVNASIEGPNGGDTIVYRDYVDISVAVATEKGLVTPVVRNAETMDLVGIEKSIADLGKKARDNKLTIEDMAGGTFTISNGGVFGSLMGTPIINLPQTAVLGLHAIKDKPVAIGGKVEIRPMMYLALTYDHRLLDGREAVTFLVKVKEYIEDPRRMLLG

SEQ ID NO: 9852 - protein, 436 aa, Saccharomyces cerevisiae [sequence omitted]

SEQ ID NO: 9853 - protein, 299 aa, Streptococcus pneumoniae TIGR4
MTSKVRKAVIPAAGLGTRFLPATKALAKEMLPIVDKPTIQFIVEEALKSGIEDILVVTGKSKRSIEDHFDSNFELEYNLKEKGKTDLLKLVDKTTDMRLHFIRQTHPRGLGDAVLQAKAFVGNEPFVVMLGDDLMDITDEKAVPLTKQLMDDYERTHASTIAVMPVPHDEVSAYGVIAPQGEGKDGLYSVETFVEKPAPEDAPSDLAIIGRYLLTPEIFEILEKQAPGAGNEIQLTDAIDTLNKTQRVFAREFKGARYDVGDKFGFMKTSIDYALKHPQVKDDLKNYLIQLGKELTEKE

SEQ ID NO: 9854 - protein, 616 aa, Oryza sativa
  unsure (1)..(616): unsure at all Xaa locations
MGSMTIGAKYKTTLKDPGTTGVLRMNEDKFTFTPHDPRSAMKLNVDFRSIKGHKFNKVDGSKPAPPLLNLSKDSDKGGGYMFEFDNVTNRDLSRDFVAKVLGKQQGTIPPKPNVPPENSVTSTGEEQLSAAEMQRRMKLLQEDSELQKLHMKFVLGNILQESEFWATRKNLLEDEANKGSKQRPGFKSAMLADVRPSADGRXTNKVTFSLTTEIIHQIFAEKPAVHRAFLDFVPKKMSEKDFWTKYFRAEYLLRIKNTVAATAEAAEDEELAIFLKNDDILAKEARLKIKRVDPTLDMEADAGDDYIHLPDHGIIRDGSKETIDNDGELARRTLSQDLNRHAAVVLEGRSSDVELTDTKTVAEAFARSKIEXLSSSISDDTNHERLVKVARMTEIEDLQAPRSLPYAPLCIKDPREYFDSQQANALRSLGGNNDGRHARNCRLSTDDAFDHLLGQISSIKVNGLNYPVIQSDVALKENLTTCMVWAXVLNELNEGISRSRRLNLKNPQDSLLGQIPRRTRDELMDHWAAIQELLQHFWSSYPITTSVLYNKVQRIKDAMTQIYQKLQDIKESAQPDVRHEISQLVKPMTQALDAAFNHDLEQQQKSSKSGNKPNGF

SEQ ID NO: 9855 - protein, 405 aa, Vibrio vulnificus CMCP6
MAGVLGMILAGGEGSRLRPLTESRSKPAVPFGGSYRLIDFALNNFVNADLMRIYVLTQFKSQSLFHHMKKGWNINGITDRFIDPIPAQMRTGKRWYEGTADAIYQNLRFMELSEPEQVCIFGSDHIYKMDIKQMLSFHKEKLAALTVSALRMPLAEASQFGVIEVDAEGRMVGFEEKPSAPKSIPGDPDFALVSMGNYIFEADVLFAELIEDADNENSSHDFGKDIIPKMFPRGDVFVYDFSQNRISGEKAEVYWRDVGTIDAYWQAHMDLLKTDAPFSLYNRKWPLHTYQPPLPPATFTDSDNGRVQIIDSLVCNGSYVRGSRIEKSVLGFRSNIASACDISESILLGDVKVGEGCVLRRVIVDKDVDIAPGTQIGVNLQEDKKIFHVSDDGIVVIPKGARVGY

SEQ ID NO: 9856 - protein, 294 aa, Pinus contorta
MEQYEKVEKIGEGTYGVVYKARDRLTNETIALKKIRLEQEDEGVPSTAIREISLLKEMQHGNIVRLQDVVHSEKRLYLVFEYLDLDLKKHMDSCPELAKDPRLIKTFLYQILRGIAYCHSHRVLHRDLKPQNLLIDRKTNALKLADFGLARAFGIPVRTFTHEVVTLWYRAPEILLGSRHYSTPVDVWSVGCIFAEMVNQRPLFPGDSEIDELFKIFRVLGTPNEETWPGVTSLPDFKSAFPKWPAKDLATVVSGLEPAGIDILSKMLCLEPSRRITARSALEHEYFKDLGFVP

SEQ ID NO: 9857 - protein, 1080 aa, Nicotiana tabacum
MLPVKRTVEVGGENDTVSVDPLTKKHKATAAAAGDSSTVTMGGAGSAITGDVNANGNATNGKSPIDARNSPDIDEDLHSRQLAVYGRETMRRLFASNVLASGLQGLGAEIAKNLILAGVKSVTLHDEGNVELWDLSSNFIFTEEDVGKNRALASIQKLQELNNAVIISTLTDALTKEQLSNFQAVVFTDISLEKAVKFDDYCHQHQPPIAFIKAEVRGLFGSVFCDFGPEFTIADVDGEDPHTGIIASISNDNPALVGCIDDERLEFQDGDLVIFSEVRGMTELNDGKPRKIKNARPYSFTIEEDTSNYAAYERGGIVTQVKEPKVLKFKPLREAIKDPGDFLLSDFSKFDRPPILHLAFQALDRFVSESGRFPLAGSEEDAQRLISFVTDLNNSLSDGKLEEIDQKLLRNFAFGARAVLNPMAAMFGGIVGQEVVKACSGKFHPLYQFFYFDSVESLPTAPLDPNDLKPLNSRYDAQISVFGNKLQKKLEEAKAFVVGSGALGCEFLKNLALMGVCCGDKGKLTITDDDVIEKSNLSRQFLFRDWNIGQAKSTVAAAAASLINPRIHIEALQNRASPETESVFDDTFWENLSVVINALDNVNARLYIDQRCLYFQKPLLESGTLGAKCNTQMVIPHLTENYGASRDPPEKQAPMCTVHSFPHNIDHCLTWARSEFEGLLEKTPTEVNAYLINPSDYISAMQKAGDAQARDTLDRVLECLDKERCDTFQDCITWARLRFEDYFADRVKQLTFTFPEEATTSSGAPFWSAPKRFPRPLQFSVDDASHLQFLLAASILRAETFGILIPDWVKSPQNLAEAVDKVIVPDFQPKKDVKIVTDEKATSMAASSIDDAAVINELVMKLETCRQKLPSGYKMNPIQFEKDDDTNYHMDLIAGLANMRARNYSIPEVDKLKAKFIAGRIIPAIATSTAMATGLVCLELYKVLDGGHKVEDYRNTFANLALPLFSMAEPVPPKVVKHQDMNWTVWDRWILKDNPTLRELLQWLQNKGLNAYSISYGSCLLYNSMFPKHKERMDRKLVDLAREVAKADLPPYRKHFDVVVACEDEEDNDVDIPQMSIYFR

SEQ ID NO: 9858 - protein, 481 aa, Streptococcus mutans
MPITNKTMLITYADSLGKNLKELNENIENYFGDAVGGVHLLPFFPSTGDRGFAPIDYHEVDSAFGDWDDVKRLGEKYYLMFDFMINHISRQSKYYKDYQEKHEASAYKDLFLNWDKFWPKNRPTQEDVDLIYKRKDRAPKQEIQFADGSVEHLWNTFGEEQIDLDVTKEVTMDFIRSTIENLAANGCDLIRLDAFAYAVKKLDTNDFFVEPEIWTLLDKVRNIAAVSGAEILPEIHEHYTIQFKIADHDYYVYDFALPMVTLYSLYSGKVDRLAKWLKMSPMKQFTTLDTHDGIGVVDVKDILTDEEITYTSNELYKVGANVNRKYSTAEYNNLDIYQINSTYYSALGDDDQKYFLARLIQAFAPGIPQVYYVGFLAGKNDLELLESTKEGRNINRHYYSSEEIAKEVKRPVVKALLNLFTYRNQSAAFDLDGRIEVETPNEATIVIERQNKDGSHIATAEINLQDMTYRVTENDQTISFE

SEQ ID NO: 9859 - protein, 179 aa, Haemophilus somnus 2336
MKKHHVDVLITEEDVRSRIQELGREITQFYQHKHVNKLVVVGLLRGSFMFMADLVREIKLPIEIEFMTTSSYGNEMTTNHDVRIAKDLDGDIKNEDVLIVEDIIDTGYTLEKVREILLLRSPNSLAICTLLDKPSRREVDVPVEWVGFTIPDEFVVGYGIDYAQCYRNLGYIGKVTLEE

SEQ ID NO: 9860 - protein, 571 aa, Eremothecium gossypii
MCGIFACYRKDDIESFKPTALRLSKRVRHRGPDWSGNVIKNDTILVHERLAIVGLDSGAQPINSPDGNYVLCVNGEIYNHIHLREECSDYEFTSLSDCEPIIPLYLKYDVETPQHLDGMFAWCLYDVQRDRIVAARDPIGVTTLYMGKSSSSPRTRYFASELKCLVDECDEITAFPPGHVYDSDTDKLTRYFKPDWIDETRIPSQPVDYKAVRTTLEKAVRKRLMAEVPYGVLLSGGLDSSLIASIAARETERANREAGDVYADGKHLAGMDDRGLLHTGGWSRLHSFAIGLPNAPDLQAARKVAKFIGSIHHEHTFTLQEGLDALDDVIHHLETYDVTTIRASTPMFLLSRKIKAQGVKMVLSGEGSDEIFGGYLYFAQAPSPAEFHTETVKRVNNLHLADCLRANKSTMAWGLEARVPFLDREFLQLCMNIDPAEKMIAPQKGRIEKYILRKAFDTSDEPGVDPYLPEEILWRQKEQFSDGVGYSWIDGLKDAAERAISDEQFANPNPAWGDDIPTTKEAFWYRLKFDALFPQPTAAATVMRWVPKADWGCAEDPSGRYAKIHDQHISS

SEQ ID NO: 9861 - protein, 519 aa, Ipomoea quamoclit
MATLTLILCTLLFAIFLYFLILRVKQRYPLPLPPGPKPWPVLGNLPHLGEKPHQSIAAMAQKYGPLMHLRLGFVDVVVAASAAVAAQFLKVHDANFSSRPPNSGAEHIAYNYQDLVFAPYGPRWRMLRKITSVHLFSAKALDDFSHVRQEEVATLTRSLASAGKTPVKLGQLLNVCTTNALARVMLGRKVFNDGSSKSDPKAEEFKSMVEEMMVLAGSFNLGDFIPVLGWFDLQGIVGKMKKLHARFDAFLNAILEEHKFVNNQHTTSSKDVDFLSTLLRLRDSGADMDGEEGKLTDTEIKALLLNLFTAGTDTSSSTVEWAFAELLRNPKILSQAQQELDLVVGTNRLVTESDLTQLPFLQAIVKETFRLHPSTPLSLPRIGAESCEINGYFIPKGATLLVNVWAIARDPNAWTNPLQFNPNRFLPGGEKTNVDIKGNDFEVIPFGAGRRICSGMSLGIRMVHLLIATLVHAFDWDLVNGQSVETLNMEESYGLTLQRAVPLMLHPKPRLQPHLYTLN

SEQ ID NO: 9862 - protein, 193 aa, Triticum aestivum
LIACASNIYYINDRLDKRTWTYIFGACCATTVFIPSFHNYRIWSFLGLGMTTYTAWYLAIAALINGQVEGVTHTGPNKLVLYFTGATNILYTFGGHAVTVEIMHAMWKPAKFKYIYLLATLYVFTLTLPSASAMYWAYGDELLAHANAFSLLPKTAWRDAAVILMLIHQFITFRFACTPLYFVWEKVIGMHDT

SEQ ID NO: 9863 - protein, 742 aa, Magnaporthe grisea 70-15
MSRTRNDSLNPENEQDDRRTSILSMFSFRERHGSILSGITDIIPENLPLPSSFVPTAPIVQEILSRDIAECSDEDHDNEDGDDNHVHEHRSGSISHSQTPPLDIGAGPSHHHHTQTTSQDAKLAFHPNGVAYGLSGFSAVSIQGVDRPVPNPQELQQSLAAEVDLLRDNDLIPSHSSEQRRRSSATFSGRVYRRFLSTRVRDHDRPVDIFSSDVFRSSSQSVLPDERAPLLPGRRRPSTDTEETLGESDGDSEAVSDSEDESVPTPPADEVHQKWDSAVAAQVLRTTWQREAKTLVQYSAPLIVTFLLHYSVTVASVLTVGRLGMVELAAVNLATMTASITCYVPVQGLATCLDTLCAQAYGSGHKHLVGLQAQRMTWFLWILMVPIAVLWWFSGPIIEKLVPGEETAGLSSLYLRVLILGMPGVAALESGKRFVQAQGLFHATTYVLLITAPLSFFLNWLFVFRFGWGFAGSASAMAIVQNLIPILLVLYVVFFEGRECWSGFSWKAFRNWGPMIKLALPGMIMIEAQFSVLEILTIAAGQLGTAHLAAQSVLVTVTSTSFNIPFPLAIATSTRVANLIGANLGDAARTTTKVAIFAALAVGVFNMIMLISLRRVLPAVFTDDERVIDIASKTMIVCGIMQIFDALAAVSHGILRGVGRQAVGGYANLFSYYFVALPVSLSTAFALGWKLSGLWAGLVSGLAVVSALELLYLYNSDWESAIAQAAARMRSEEVEIVEPKAS

SEQ ID NO: 9864 - protein, 1022 aa, Neurospora crassa
MSQPIERVFPIRLSILESSAFLRNVSDADDLLSVVPVTQQLSNQHLSPPSSDGSRCEPLPSATDRQANPQDSSSAASSYNYTYPSSFNKGNGGDDSLLSETFEYALLADGSHGVIQKARRAFTTCDEEPIHIPGAIQSYGMLVALKLVDERVAGPSRYLPRICSENSAFVCHYQPSELLSLDSFYQVMPNFQRHLFDVQLRHIRQGYDSTKKEQEPVVFAFSFSDPDGRLIPCWCAAHYLGGDTDLFICEFELQDYSMHPLATPAMSDPGNPIDTLGSDHLDFATACSIQSKVQPAFPNPELISKGFDPSTSSVEVIGMATKIQTQFSEAATVPDLLETIVSIVKEVTRFHRVMVYQFDRDYNGTVVAELMDPKASNDVYRGLHFPASDIPPQARKLYMINKVRVLFDRSQRTSRLIGRDVSDMDVPLDLTHAYLRAMSPVHLKYLSNMGVRSSMSMSLESDGKLWGLIVCHSYGPAATRVPFSIRELSFFVGLAASTCLQKLLNSERLQAHRIIETLRGRGRPDESPQMTVWYFTARTRSEKYIGQGGLRWRVWREKETAINDTRLKRLLLHDASHQALEKHLDDGTKQVLTTSYTASKSLIYVIDDLLSLTGSITGSVPLLDEPFHLPNCLEEVLCPLRRLGQEKGIQLIMIPSTGPTQYVRGDPTSLQRSLSILVANAIQHTTSGQVVVKWYETAMNPENTVIHISITDTGPGFSERELDDMFQEFEQVPDEDFDEATSKPHAVRDNVLRVGVGLAFVARFVKQRNGQLKVKSTKGRGSTFTLEIPFAVSSHCSSIASRRRDASPLPVLTMPGPLTFGAGSSVPSDRSTFGTSRDSKPSPPIIRPGSSTADTSPRDFQTPSPHHYTVIVADDNMINVQILERRLTKLGHRVLVSRDGQECFNLFASNRSTVDFVLMDLNMPVVDGFASIRMIRDQEYSHPTPSRVVQCCGRTPIFAVSGMLRRGQEQQCKEAGFDGWMPKPVDMKRLVRCLAGGLDPNARRMCVYDEKRFELGGWFDAE

SEQ ID NO: 9865 - protein, 814 aa, Escherichia coli
MKTKIPDAVLAAEVSRRGLVKTTAIGGLAMASSALTLPFSRIAHAVDSAIPTKSDEKVIWSACTVNCGSRCPLRMHVVDGEIKYVETDNTGDDNYDGLHQVRACLRGRSMRRRVYNPDRLKYPMKRVGARGEGKFERISWEEAYDIIATNMQRLIKEYGNESIYLNYGTGTLGGTMTRSWPPGNTLVARLMNCCGGYLNHYGDYSSAQIAEGLNYTYGGWADGNSPSDIENSKLVVLFGNNPGETRMSGGGVTYYLEQARQKSNARMIIIDPRYTDTGAGREDEWIPIRPGTDAALVNGLAYVMITENLVDQAFLDKYCVGYDEKTLPASAPKNGHYKAYILGEGPDGVAKTPEWASQITGVPADKIIKLAREIGSTKPAFISQGWGPQRHANGEIATRAISMLAILTGNVGINGGNSGAREGSYSLPFVRMPTLENPIQTSISMFMWTDAIERGPEMTALRDGVRGKDKLDVPIKMIWNYAGNCLINQHSEINRTHEILQDDKKCELIVVIDCHMTSSAKYADILLPDCTASEQMDFALDASCGNMSYVIFNDQVIKPRFECKTIYEMTSELAKRLGVEQQFTEGRTQEEWMRHLYAQSREAIPELPTFEEFRKQGIFKKRDPQGHHVAYKAFREDPQANPLTTPSGKIEIYSQALADIAATWELPEGDVIDPLPIYTPGFESYQDPLNKQYPLQLTGFHYKSRVHSTYGNVDVLKAACRQEMWINPLDAQKRGIHNGDKVRIFNDRGEVHIEAKVTPRMMPGVVALGEGAWYDPDAKRVDKGGCINVLTTQRPSPLAKGNPSHTNLVQVEKV

SEQ ID NO: 9866 - protein, 1080 aa, Nicotiana tabacum
  unsure (1)..(1080): unsure at all Xaa locations
MLPVKRTVEVGGENDDVSVDPLTKKHKATAAASGDSSTVTMGGTGSATTGDVNTNGNATNGKSPIDARNSPDIDEDLHSRQLAVYGRETMRRLFASNVLVSGLQGLGAEIAKNLILAGVKSVTLHDEGNVELWDLSSNFIFTEEDVGKNRALASIQKLQELNNAVIISTLTDALTKEQLSNFQAVVFTDISLEKAVEFDDYCHKHQPPIAFIKAEVRGLFGSVFCDFGPEFTVADVDGEDPHTGIIASISNDNPALVGCIDDERLEFEDGDLVIFSEVRGMTELNDGKPRKIKNARPYSFTIEEDTSNYAAYERGGIVTQVKEPKVLKFKPLREAIKDPGDFLLSDFSKFDRPPILHLAFQALDRFVSESGRFPLAGSEEDAQRLISFVTDLNNSLSDGKLEEIDQKLLRNFAFGARAVLNPMAAMFGGIVGQEVVKACSGKFHPLYQFFYFDSVESLPTAPLDXNDLKPLNSRYDAQISVFGNKLQKKLEEAKVFVVGSGALGCEFLKNLALMGVCCGDKGKLTITDDDVIEKSNLSRQFLFRDWNIGQAKSTVAAAAASLINPRIHIEALQNRASPETESVFDDTFWENLSVVINALDNVNARLYIDQRCLYFQKPLLESGTLGAKCNTQMVIPHLTENYGASRDPPEKQAPMCTVHSFPHNIDHCLTWARSEFEGLLEKTPTEVNAYLINPSDYISAMQKAGDAQARDTLDRVLECLDKERCDTFQDCITWARLRFEDYFADRVKQLTFTFPEEATTSSGAPFWSAPKRFPRPLQFSVDDASHLQFLLAASILRAETFGILIPDWVKSPQKLAEAVDKVIVPDFQPKKDVKIVTDEKATSMAASSIDDAAVINELVVKLETCRQELPSGYKMNPIQFEKDDDTNYHMDLIAGLANMRARNYSIPEVDKLKAKFIAGRIIPAIATSTAMATGLVCLELYKVLDGGHKVEDYRNTFANLALPLFSMAEPVPPKVVKHQDMNWTVWDRWILKDNPTLRELLQWLQNKGLNAYSISYGSCLLYNSMFPKHKERMDRKLVDLAREVAKADLPPYRKHFDVVVACEDEEDNDVDIPQMSIYFR

SEQ ID NO: 9867 - protein, 834 aa, Agrobacterium tumefaciens str. C58
MSSELTRRNLLKAHAAGIAAATAGIALPAAAQPVPGGVSALQIKWSKAPCRFCGTGCGVMVGVKEGKVVATHGDMQAEVNRGLNCIKGYFLSKIMYGKDRLETPLLRKKNGVYAKDGEFEPVSWDEAFDVMAQQCKRVLKEKGPTAVGMFGSGQWTIFEGYAATKLMRAGFRSNNLDPNARHCMASAAYAFMRTFGMDEPMGCYDDFEHADAFVLWGSNMAEMHPILWTRIADRRLGFDHVRVAVLSTFTHRSMDLADIPMVFKPGTDLVILNYIANHIIKTGRVNEDFVRNHTKFVRGVTDIGYGLRPDDPVEVNAANSADPTKTEAIDFETFKEFVSEYTLEKTAAMTGVEAGFLEELAELYADPKRKVMSLWTMGFNQHVRGVWANQMVYNIHLLTGKISEPGNSPFSLTGQPSACGTAREVGTFAHRLPADMTVTNPEHRKHAEEIWRIPHGIIPEKPGYHAVQQDRMLHDGKLNFYWVQVNNNVQAGPNTKNETYLGYRNPENFIVVSDAYPTITAMSADLILPAAMWVEKEGAYGNAERRTHVWHQLVEASGEARSDLWQLVEFSKRFTTDEVWPAEILDANPAYRGKTLYEVLYKDSDVGKFPLSEINADYKNQESSDFGFYLQKGLFEEYAAFGRGHGHDLAPYDAYHEVRGMRWPVVDGKETLWRYREGYDPYVKPGEGVKFYGNKDGRAVIIAVPYEPPAESPDQEFDTWLVTGRVLEHWHSGSMTMRVPELYKAFPGARCFMNADDARKRGLNQGAEIRIVSRRGEIRSRVETRGRNRMPPGVIFVPWFDASQLINKVTLDATDPISKQTDFKKCAVKIEPVA

SEQ ID NO: 9868 - protein, 460 aa, Pseudomonas syringae pv. tomato str. DC3000
MQPPAFKELWIILRLAGPLIASQMAHMLMVFTDTVMMGKIGPEALAGGGLGAATYSFISFFCVGVMAAVGTLVSIRHGAGDSEGVTRLTQAGLWLAWGMALIAALLLWNLEPILLQLGQAEANVHMAAQFLITLPFALPGLLSFMALRGFTSALGRAGPVMTISVAGAVANFVLNYAMINQWLGLPNLGLMGIGLVTAMVTNCMALALAWHIKRHPAYAAYPISKGLSKLSRSHLKELWRLGLPIGGTYAVEVGLFTFAAFCMGAMGSTQMAAHQIALQTVSMAFMIPVGISYAVTMRIGQHYGAGNILMARTAGRLGIGFGGSVMLLFGIFFWLAPHWVIGLFLDLDDPAFAEIVVLAAKLLAIAAWFEFFDGTQTIAMGAIRGLKDARTTFLIGLGCYWLIAAPAAWLLGFYADGGASGVWWGLALGLFCSAVALTYAFEWKTARLLRKEAVGAAVPG

SEQ ID NO: 9869 - protein, 399 aa, Candida albicans SC5314
MTIESSTNYSFGTKAIHAGAPLDPSTGAVIEPISLSTTFAQSEPSKPLGIYEYSRSSNPNRDNFEIAVAALESAKYAIALSSGSATTALVIQSLPINSHIVSSGDVYGGTHRYFTKVANTHGVEAQFVGNLVEDLQGALRENTRLVWLETPSNPTLQVTDIAKVKSILVDHEAKTGNKVLLAVDNTFLSPYLSNPLTHGADVVVHSVTKYINGHSDVVMGVLATNDSQLHERFRFLQNAIGSIPSPFDSWLAHRGLKTLHLRVRQASNSAQRIAEYLSQHSAVLKVNYPGLKSHRNHDVVLRQQRDGLGGGMISFRIAGGAKGAAVFTSSTKLFTLAESLGGIESLIEVPAIMTHGGIPKEEREANGVYDDLVRVSVGIEDTEDLLKDIEQALQKAASV

SEQ ID NO: 9870 - protein, 732 aa, Candida albicans SC5314
MSETFPETNTPVQTPSTESFVNKMNAGDKTIGNNIFSQDSDSNQQSSHQEPLSPPNPSPTPEKRQLDDEVDNSIEPESKKQKVEEETEASQTGVIQTEVSETVPEIESSVNKDSEPVNGVSEESENTNNEQEKPQEEAPEENPQEEVPEAKPQEEASGENPQEIPNDKPQDDEPDIQEVDPPKPVVPVFTEPAPKPPQEPDMNNLPENPIPQHQAKFVLNTIKAVKRNREAVPFLHPVDTVKLNVPFYYNYIPRPMDLSTIERKINLKAYEDVSQVVDDFNLMVKNCKKFNGEAAGISKMATNIQAQFEKLMVKVPPKELPAGTNVAEATSVATSPTTNKRKSVAESSSSHQHRDSVAAARPKRTIHPPKSKELPYETKPKNKKVAAELRFCNQTIKELMSKKHYNYNFPFLAPVDTVALNIPNYNEIVKQPMDLGTIQSKLANNEYENADDFEKDVRLVFKNCYLFNPEGTDVNMMGHRLEAVFDKKWANKPVPEPTPQNSDVSDREYSSEEEDNVEISEAMLSEIPAIQVMENQIIRMRKELDELKKEHLKKLREQQAARKKKKQQKGKRRAPKAKHTKDTQHQVQAPPEPPKLTPPQPVVTYEMKKQVSEMVPNLSDKKLNALIKIIQDDVQISNDDEVELDMDQLEDRTVLKLYDFLFGDKALKNSAGKKKKPVANNNLDELAHLRSQLALFDEGVNGQQGSDNGFMKVVNQEESSEDEASSESSEEE

SEQ ID NO: 9871 - protein, 436 aa, Neocallimastix frontalis [sequence omitted]

SEQ ID NO: 9872 - protein, 502 aa, Triticum aestivum
MVATAKIPQRQLFIDGDWRAPALGRRLPVINPTTEASIGEIPAGTSEDVDAAVAAARAALKRNRGRDWSRAPGAVRAKYLRAIAAKMIERKSDLARLEALDCGKPLDEAAWDMDDVAGCFEFFAGHAEALDKRQNAAVALPENFKCHLKKEPIGVVALITPWNYPLLMAVWKVAPALAAGCTAVLKPSELASLTCLELGDVCKEIGLPSGVLNIVTGLGHEAGAPLSSHPDVDKVAFTGSYATGQKIMVAAAPTVKPVTLELGGKSPIVVFDDVDIDKAVEWTLFGCFWTNGQICSATSRLLIHKNIAKEFVDRMVAWSKNIKVSDPLEEGCRLGPVVSEGQYEKIKKFVANAKSEGATILTGGVRPKHLEKGFFIEPTIITDINTSMEIWREEVFGPVLCVKEFSTEEEAIELANDTHYGLAGAVISGDRERCQRLAEEIDAGCIWVNCSQPCFCQAPWGGNKRSGFGRELGEGGIDNYLSIKQVTEYTSDAPWGWYKAPA

SEQ ID NO: 9873 - protein, 639 aa, Mycobacterium tuberculosis H37Rv
MWTSQMIVAPAFVDAAAKDLATIGSAISRANAEALVPITALLPAGADDVSAAIAALFATHGQAYQELSAHAVAFHEQFVQLMSAGAAQYASAEAANSSPLQIVGQTALDAINSPVQTLTGRPLIGNGANGVAGTGQNGGDGGWLYGNGGNGGSGGTGQNGGNGGSAGLWGSGGNGGQGGAGANGAAGQPGKAGGSGGNGGAGGWIYGHGGHGGAGGNGGNATAPGGASAGFDGGAGGNGGSGGRGGLLFGNGGNGSVGGMGGQGTNDTAGDSAGSGGLGGNGGNGAQGGWLIGNGGQGGDSGAGGGTDSTQTGVMNGASGGSAGIAGNGGDAGLVGNGGAGGNGGNGAAGSALGTTIFGGSGGVGGSGGDGGNGGWLFGSGASGGNGGQGGDAGTNGFAGFGGSAGGGGWVGAVNFGPISVQGFGLFGHGGDGGNGGDVGAGSLSIQFGASGGDGGQGGVLYGNGGNGGNAGSGGGTGFEGSAGQGGAAILIGNGGAGGNGATGGTGVGNIIQEAGGDGSDGGAGGSGGLLFGSGGAGGIGGAGGVGGSGNDGGNGGDGGQGGASGLGIGNGGPGGSGGTGGAGGTGGSAGTGGAGGDGGNAALLIGTGGDGGDGVPPAPGGQGGKGGLIGLPGQNGQP

SEQ ID NO: 9874 - protein, 1137 aa, Lycopersicon esculentum
MESQSSENRRGGGGRTSLNQNKQNNNKDSGLNTSSAASNMKNNASKAALAQYNADAKLMAEFEQSSVSGKSFDYSKSVLFPPHEANEEEITSYLSRIQRGGLVQPFGCMVAIEEPTFKIIGYSENCYDMLGFKPTKMKLGLIGVDARNLFTPSSGDSLAKVMASREISLLNPIWVHSRTTHKPFYAILHRIDVGIVIDLEPANSSDPALLLAGAVQSQKLAVRSISRLQSLPGGDIGVLCDTAVEDVQKLTGYDRVMVYKFHDDNHGEIVSEIRRSDLEPYLGLHYPATDIPQAARFLFKQNRVRMICDCNAQPVKVVQSEELKQPICLVNSTLRSPHECHSKYMANMGSISSLVMAILINSGDSMKLWGLIVCHHTSPRYVPFPLRYACEFFTQAFGLQLNMELQLASQLAEKKTLQMQTLLCDMLLRDVPFGVVTQSPSIMDLVKCDGAALYCGGKCWLLGVTPTEAQVKDIAQWLLVAHKDSTGLSTDCLADAGYPGAALLGDAVCGMATARITSKDFLFWFRSHTAKEVKWGGAKHHPDDKDDGGKMHPRSSFNAFLEVVKSRSLPWEIPEINAIHSLQIIMRESIQENENSSLKTLTTSQQNDADGPSMDELSSVAMEMVRLIETATAPIFGVDPSGLINGWNEKIADLTGLHASEAVGMSLINDITHEDSRGTVEKVLHRALLGEEEKNVEIKLRRFGKDPPGSVIYLVINACTSRDHKNGVVGVSFVAQDVTPEKFIMDKFIQLRGDYEAIVQSLSPLIPPIFASDENACCSEWNAAMERLTGWTKYEVMGRTLPGEVFGGLCRLTGQDALTKFMILFYQAISGHDTKKLPFGFFNRRGEFLEVFLTANKRTDEHGNVCGCFCFLQPMTIDPEASDERQDSKDSLWKYKEYVYVLQQMKNPLNGIQFTHKLLEATGVSDNQKQLLETSEACEKQILSVIDNMDFGGIEDGKVQLNMEEFVLGNVVDAIVSQVMIFLKEKNLQLLHDIPDQIKTLPLYGDQIKLQRVLSDFLLSVVHHAPSPDGWVEIKVLPGLKLIQDGNELIHLQLRMTHPGQGLPAALIDDMSGERNRWTTQEGIALNVAQKLLNVMNGHVRYVRGEDKCYFLIDVELQTLKPTQHGPKLEVTQEIEI

SEQ ID NO: 9875 - protein, 231 aa, Glycine max
  unsure (1)..(231): unsure at all Xaa locations
MEIFPIPAESYTLXFIGAGKMXESIARGAVRSGPLPASRIRTAVHFNLARRGAFEFFFPPPPGGGGGXXSQKTTPSPPSEKTPLTGRGRGSQIXTPVLSKXKHPLAPGTGARAPDGTPPSGAPVLCAPGNLLAGPSRSRVSAAAGPCFCFAPAPSCGAPRXLCVSLEAPSVVLGAASMVSQTGKHPGQLKDDVTSPGGTTITGIHELENGGFRGTLMNAVVAAAKRSRELS

SEQ ID NO: 9876 - protein, 445 aa, Chloroflexus aurantiacus
MKQIVVIGGGAAGVEAAVAAAQGNTKVTLVSEGPIGGRTGWDSLLPSKVWLHAAEVAGIATAAAGEGVAVNGVQVDPTAVLQRIKHVATRWSDHEQQRLQAAGVTVMQGVAAFSSPHELTIQTQAGQQTITADVIIIATGSVPRFPPTMKPDGQRIIAPRFASHLHTLPDDIIVIGGGPTGSEFASLFSRLGVKVTWLVGSPGVLPMFATNARSTLAAAMQAHGVEIHQVDVERAERTEEGVSVLAADGTTYTAAMAFLAIGRTPDLSRLNLSAAGLTVEANGQLTVDNYGRTPVNHIFAVGDAAGGPMLANRALAQAWIAGRTAADLPAPGYCPHTIVHAVYTVPEVAQVGLVMDTELSRIRAEYGSSLKSYLGAETSGWIELTFDPITRQVRGGVAVGDHAADLLAPVALAIQTGATLADLAAVFAAYPTLSETVFAAARAAG

SEQ ID NO: 9877 - protein, 340 aa, Streptomyces avermitilis MA-4680
MSTYRAAQVAAASGPFEIVQREVPRPGPGHVRIAVDACGICHSDSVFVDALLPGVRFPLVPGHEIAGHIDELGEGTDISWQVGDRVAVGWFGGSCGHCPPCRQGDFVVCQNLKVPGWAYDGGYAEAVIAPADALARIPDALAATDAAPLGCAGVTTYNGLRRSSARPGDLVAVLGIGGLGHLGVKYAAAMGFETVAIARGSDKADFAKQLGAHHYIDSTADTTVADALQSLGGAKAVLATAANSDAITATVDGLAPRGELVAIGVDAEPLGISPNQLLMGGKIIRGHPSGTAQDVQDTMAFSALHGIRPMTETVPLDQADEAYRKMMSGAARFRMVLTTG

SEQ ID NO: 9878 - protein, 531 aa, Aspergillus parasiticus
MAVLHSGVVCLDGWFYLRLLHRYVNFPVGYLPCFVLTFTSGQIAGFTTMNDFKMRFAEQHADGTYAFSNVRNGLIVGLLSIGTMIGALVAAPIADRIGRKYSISFWSVIHMVGIIIQIATDDNWVQVAMGRWVAGLVVGALSSIVPMYQSESAPRQVRGAMVSAFQLFVASVFSSLISSTSVPNPSTVPLPGVSLWDMCAWPLILGVGTLFLPESPRYAYRNGRVEEAREVMCKLYGVGPNHRCIAQEMKDMKDKLDEEKAAGQAWHFEVFTGPRMFYRVAGIALQSLQQLTGANFLFYYGNTIFTSTGLNNSYVTQIILGAVNFGMTLPGLYVVEHFGRRNSLMVGASWMFICFMIWASIGHFALDLENPPNTPQAGTAMIVFTCFFIGGFATTWGPIVWAICGEMYPARYRAVCIGLATAANWSLNFLISFFNPIHLQRYRLCYGYVFAGCCFAAVLVVFFFVNETQGRTLEEVDTMYVLHVKPWKSASWTPRRVSSVISTDPPLPPSRRVGLSTASPPPRSASKWYHV

SEQ ID NO: 9879 - protein, 251 aa, Eremothecium gossypii
MGSRRYDSRTTIFSPEGRLYQVEYALESISHAGTAIGIMAKDGIVLAAERKVTSKLLEQDTSSEKLYRLNDNITVAVAGLTADAEILVNTARLHAQNYLKMYNEEIPVEVLVRRLSDIKQGYTQHGGLRPFGVSFIYAGYDARYGYQLYTSNPSGNYSGWKAISVGANTQAVQTLLQMDYKDDLTFDDAIKLALKTLSKTTDSSSLSHERLEFATIQRNADGKVVQKIYKLGEIKDLLEKTGINKQEEKED

SEQ ID NO: 9880 - protein, 510 aa, Vibrio cholerae O1 biovar eltor str. N16961
MSAKKPMALVILDGWGYREDNANNAINNARTPVMDSLMANNPHTLISASGMDVGLPDGQMGNSEVGHTNIGAGRIVYQDLTRITKAIMDGEFQHNKVLVAAIDKAVAAGKAVHLMGLMSPGGVHSHEDHIYAAVEMAAARGAEKIYLHCFLDGRDTPPRSAEASLKRFQDLFAKLGKGRIASIVGRYYAMDRDNNWDRVEKAYDLLTLAQGEFTYDSAVEALQAAYAREENDEFVKATEIRAAGQESAAMQDGDALLFMNYRADRARQITRTFVPDFAGFSRKAFPALDFVMLTQYAADIPLQCAFGPASLENTYGEWLSKAGKTQLRISETEKYAHVTFFFNGGVENEFPGEERQLVASPKVATYDLQPEMSSKELTDKLVAAIKSGKYDAIICNYPNGDMVGHTGVYEAAVKACEAVDECIGRVVEAIKEVDGQLLITADHGNAEMMIDPETGGVHTAHTSLPVPLIYVGNKAISLKEGGKLSDLAPTMLALSDLDIPADMSGQVLYS

SEQ ID NO: 9881 - protein, 823 aa, Oryza sativa
  unsure (1)..(823): unsure at all Xaa locations
MPAQKRPAPEAASAPAGGDGHVEGGGAGGGGGADEDAHRGGERSPKVMNGGGPEKEKERRDADSDAEEEEEEAGGGGGGGGADEDRDSPSSESDGDMDEFILVKLMDIRKEVQCPICLGIIRKTRTVMECLHRFCRDCIDKSMRLGNNECPACRTHCASRRSLRDDPNYDALILALYPDIDKYEEEIQASIAETFRRQSEALVKKRSVAKATGSTITRRTRGNMRAKRRGRTSSPDIVATDNEDEDRDENGNEGSKESSSVDDRSPDVRQKRVRRWPVPRSSPAKSIGGIDSSFEDIDDLGSGRDIMSTSPLRGEMLAWGKNGTRSQTRHGNSGGSSGRMARGGRVTKLVEYLRNTDEFDNKFNLYLVLLPLNGQSMPKLEKPYLSCQPTFSVRHLCQFVALQLSRHAKEVEIFIRKNXTNGCFASIDTSADEIKLNHDALERLEEEKSLSELYPSLASGHGDLAPWTRYGALNNEQMVGCRKNREVIKLLLTGAGLTVCHAMLPLKLADWPSTLTQSRCQSNWPMSLEVLSESLLCFGATSVTVDDIAAAGNLDEITITSIFAHGEDVGSCVSSAASSAGLEYNPVYESSVGKQCDWVTVVQETYESTKVIDGLWVIPKWRTPPDPQAINIIINPGLAFGTGEHPTTKLCLLLLRETVKGGERFLDYGTGTGVLGIAALKMGAALSNGIDIDPQAVTSACENMMLNGIDSNKMLVYLVPTNAQSACFPSNIDKSEENRPTGNLELKSSKGSYDIVAANILLNPLLELVEDIVGYAKSGGIVAVSGILSEQVPKVEEAYSRYLENISVSEIDGWACLRGNRRA

SEQ ID NO: 9882 - protein, 481 aa, Azospirillum brasilense
MANQRMLGFVHTAQRMPDKRPAAERRQDFAEIYARFSDERANEQANRCSQCGVPFCQVHCPVSNNIPDWLKLTSEGRLEEAYEVSQATNNFPEICGRICPQDRLCEGNCVIEQSTHGAVTIGSVEKYINDTAWDQGWVKPRTPSRELGLSVGVIGAGPAGLAAAEELRAKGYEVHVYDRYDRMGGLLVYGIPGFKLEKSVVERRVKLLADAGVIYHPNFEVGRDASLPELRRKHVAVLVATGVYKARDIKAPGSGLGNIVAALDYLTTSNKVSLGDTVEAYENGSLNAAGKHVVVLGGGDTAMDCVRTAIRQGATSVKCLYRRDRKNMPGSQREVAHAEEEGVEFIWQAAPEGFTGDTVVTGVRAVRIHLGVADATGRQTPQVIEGSEFTVQADLVIKALGFEPEDLPNAFDEPELKVTRWGTLLVDHRTKMTNMDGVFAAGDIVRGASLVVWAIRDGRDAGRGHPRLRQGEGRGTGCRGG

SEQ ID NO: 9883 - protein, 408 aa, Sulfolobus solfataricus
MGDLTIPTMDDIDIQSKKVLLRIDINSPVDENGKIIDDSRIKAHIGTIKELINKGNSVVLISHQGRPGDKDFTSLEEHAKLISKYLDREVIFVDDVIGPYAREMIKKLENNGILLLDNIRLISEELIEAPPQQHVKSFLVKKLAPLFDIYINDAFATAHRSQPSIVGFPLALPSAAGRVMEREVSALAKIFNAEDTPKIFTLGGGKVHDTIRIIENLVRKRIADRILTGGLVAELFSVAKGMNLNPKNMEILEKLGILSLIPRARKLLLSGAPIEIPVDYKVEINGNVIEEPASKVTGIIKDIGSTTAEIYSSFIKDAKVVVLRGPMGVIEDERFKSGSKSVLKASLEGQGYVIIGGGHMISALDEDMKIDSSKVHISTGGGALLLFLSGERLPALEALSMSVVNSGD

SEQ ID NO: 9884 - protein, 504 aa, Zea mays
  unsure (1)..(504): unsure at all Xaa locations
MQFSSVLPLEGKACMSPVRRGSGGYGSERMRINCCSIRRNKALRRMCFSARGAVSSTQCVLTSDAGPDTLVVRTSFRRNYADPNEVAAVILGGGTGTQLFPLTSTRATPAVPIGGCYRLIDIPMSNCFNSGINKIFVMTQFNSASLNRHIHRTYLGGGINFTDGSVEVLAATQMPGEAAGWFQGTADAVRKFIWVLXGDQLYRMDYMELVQKHVDDNADITLSCAPVGESRASDYGLVKFDSSGRVIQFSEKPKGAALEEMKVDTSFLNFAIDSPAEYPYIASMGVYVFKRDVLLDLLKSRYAELHDFGSEILPKALHEHNVQAYVFTDYWEDIGTIRSFFDANMALCEQPPKFEFYDPKAPFFTSPRYLPPTKSDKCRIKDAIISHGCFLRECAIEHSIVGVRSRLNSGCELKNTMMMGADLYETEDEISRLLAEGKVPIGVGENTKISNCIIDMXCQGWKERLHNKQRGRPRSRPAGRRILXIRSGIVVVLKNATIKDGTVI

SEQ ID NO: 9885 - protein, 293 aa, Pseudomonas aeruginosa UCBPP-PA14
MKRKGIILAGGSGTRLHPATLAISKQLLPVYDKPMIYYPLSTLMLAGIREILIISTPQDTPRFQQLLGDGSNWGLDLQYAVQPSPDGLAQAFLIGESFIGNDLSALVLGDNLYYGHDFHELLGSASQRQTGASVFAYHVLDPERYGVVEFDQGGKAISLEEKPLKPKSNYAVTGLYFYDQQVVDIARDLKPSPRGELEITDVNRAYLERGQLSVEIMGRGYAWLDTGTHDSLLEAGQFIATLENRQGLKVACPEEIAYRQKWIDAAQLEKLAAPLAKNGYGQYLKRLLTETVY

SEQ ID NO: 9886 - protein, 145 aa, Vibrio vulnificus YJ016
MLRILNRTLLSTWLVLFVAFVSFSSQAQNENTSSNHVDLFQFHNVELQERAIRLSKELRCPQCQNQNLLESNAQVARDLRFIVYSQINDGKSDQEVVDFMTSRYGNMVLYNPPINSSTLLLWIFPVVILIIFFVISIRNIHTKRM

SEQ ID NO: 9887 - protein, 410 aa, Cytophaga hutchinsonii
MNTTVSLSQQAIELEDKYGAHNYHPLPVVLAKGEGVHVWDVEGKHYYDFLSAYSAVNQGHCHPRIINALIEQAQTLTLTSRAFYNDKLGEAEKFICDLFGYDKALLMNSGAEANESAIKLARKWGYQVKGIPTDQAVIVAVERNFHGRTTGIISASTDPDSRNNFGPFMPGYQIIPYNDVIALEEALKNPNVCGFWVEPIQGEAGVFVPGDGYLKKAQELCTKYNVILMMDEIQTGCGRTGKLIASNHEGVHPDMLILGKALSGGTYPVSCVLTSDEIMLTIKPGEHGSTFGGNPLACAVLVESLAVLMDEGLIDNAASMGELFRDRMNALKDKCEHVTLVRGKGLLNAIIIKPTADGRTAWDVCMKLMENGLLAKPTHGDIIRFAPPLIITEEQINACCDIIEKTLLEF

SEQ ID NO: 9888 - protein, 75 aa, Glycine max
SGPICYQRNRAGAGMVAPFTVLKSMAGFPTRNTNNDITSIASIVGRVQCMHVCPPIVKKKFETLSYLSDLDYAQL

SEQ ID NO: 9889 - protein, 404 aa, Haemophilus somnus 129PT
MRVFPKSDKLEHVCYDIRGPVHQEALRLEEEGKKILKLNIGNPAPFGFEAPDEILVDILRNLPAAQGYCDSKGLYSARKAIVQYYQSKNILSATVNDVYIGNGVSELITMSLQALLNDGDEVLIPMPDYPLWTAAATLAGGKAVHYLCDEQADWFPDVADIKSKVTSRTKAIVIINPNNPTGAVYSKELLLDIVEVARQNGLMIFADEIYDKILYDNAVHHHIAALAPDLLTVTFNGLSKSYRVAGFRQGWMILNGPKHQAKGYIEGLDMLASMRLCANHPMQHAIQTALGGYQSINEFILPGGRLLEQRNKAYELINQIPGLSCTKPMGALYMFPKIDTKKFNIYDDEKMVLDLLRQEKVLLVHGRGFNWQQPDHFRIVTLPYVNQIEDALGRLARFLEYYRQ

SEQ ID NO: 9890 - protein, 401 aa, Apodachlya brachynema
  unsure (1)..(401): unsure at all Xaa locations
SGNPSVEVDLVTEDGLFRAAVPSGASTGEFEALELRDGGKDYMGKGVKTAVHNVNDIIAPALIGKDQNKQTELDTFMVETLDGTKNEWGWCKKKLGANSILAVSLALCKAGAAAEKVPLWQHIANLAGNPTPCLPVPSFNIINGGSHAGNKLAMQEFMILPVGATSFTESMQIGCEVYHXLKKVINKRYGLDATAVGDEGGFAPNIQVNGEALDLIQEAIALAGYTDKVKIGMDVAASEFYTGKEDARYNLDFKNENAQDSDKISADELIDVYQSFITKCKDKSPIVSIEDPFDQDDWESWMKLTAAVGEDIQIVGDDLTVTNPTRVQKAIDQKACNALLLKVNQIGSVTESIQAVTMSKRAGWAIMASHRSGETEDSFIADLAVGLSAGQIKTGAPCRER

SEQ ID NO: 9891 - protein, 388 aa, Apodachlya brachynema
  unsure (1)..(388): unsure at all Xaa locations
SGNPTVEVDLITQDGLFRASVPSGASTGIHEAVELRDGGSRFLGKGVLKAVNNVNDIIGPKLEGMDPRKQKDIDHLMIQLDGTDNKGRLGANAILGVSLAVAKAGAKSKGVPLFQHFADMIKNDKLILPVPAFNVINGGSHAGNKLAFQEFMIMPVGASSXSEAMVMGCEVYHHLKGVIKKKYGQDATNVGDEGGFAPNIQSNREGVELLMSAIEKAGYNGQVKIAMDVASSEFYTDAGHYDLNFKNKGSNEKPLTGEELGALYQQLSNEFPIISIEDPFDQDDWSHYKSFTNAIGEKVQVVGDDLLCTNPKRIATAVDTFACNALLLKVNQIGSVTESVQAVADAKKAGWGVMTSHRSGETEDSYIADLAVGLSTGQIKTGAPCRER

SEQ ID NO: 9892 - protein, 389 aa, Heterosigma akashiwo
SGNPTVEVDIFTDNGMFRASVPSGASTGIYEACELRDGGDRYMGKGVLQAVNNVDTLIKDALIGKDPTQQREIDQIMLDLDGTKNKTKLGANAILGVSLAVSKAGAAAKGVPLYQHYADLAGNTQLVLPVPSFNVINGGSHAGNKLAFQEFMVLPTGAATFSEAMQIGCEMYHTLKKVIKERYGQDATNVGDEGGFAPNIQSNREGVELLMEARSRCGHGDKIVFGMDVAASEFWTEDKEYDLDFKTKDNDGSQKITGAELAQMYKDLAAEFPIVSIEDPFDQDDWEAYTAMTADMGTDCQVVGDDLLVTNPERIQMASEKSACNAPLLKVNQIGSVTEAIDAVKMAKQNGWGVMTSHRSGETEDCYIADLAVGLCTGQIKTGAPCRER

SEQ ID NO: 9893 - protein, 374 aa, Isochrysis galbana
STGIYEALELRDGDKDKYMGKGVQKAVDNVNNIISPALEGMSPIDQKAIDDKMVRELDGSKNEWGWSKAKLGANAILAVSMAVCKAGAGAKGIPLYKHIANLSGNPVDKMYMPVPAFNIINGGSHAGNKLAMQEFMILPVGATSFKEAMQMGSEVYHNLKKVIAAKYGQDACNVGDEGGFAPNILDNKEGLDLVVTAIEKAGYTGKVKIGMDVAASEFWKGEEKVYDLDFKTENNDGSQKLSGEKLAELYESFVNDYPMISIEDPFDQDDFASYTATTAKLGEKCQIVGDDLLVTNPTRVLKAIDEKACNALLLKVNQIGSITEAIDAVTMAQKAGWGVMTSHRSGETEDSFIADLAVGLKTGQIKTGAPCRER

SEQ ID NO: 9894 - protein, 124 aa, Pavlova lutheri
ASTGIYEALEMRDGDKSMYMGKGVSKAVHNVNTIIGPALVGMDPVQQKEIDDKMVKTLDGSKNDWGWSKSKLGANAILGVSMAVCKAGAASKGIPLYKHIAELAGNPTDKMYMPVPSFNVINGG

SEQ ID NO: 9895 - protein, 392 aa, Caulobacter crescentus CB15
MSALMNTYARANIDIVRGEGCWLYDQDGRDYLDLAAGVAVNTLGHGDPRLVQALKTQADILWHASNLYRLPAQEALATKLTDATFADRVFFANSGAEAVEAAIKTARRWQGAKGRPERYRVLTFGNAFHGRTLATISATDQMKVREGFTPLYDAFDTTPFNDIEGAARAITPQTAAILVEPIQGEGGLTPATPGFLAGLRALCDQHDLLLILDEVQTGIGRTGHLFAHELYGVRPDIIAVAKGLGGGFPIGACLATEDAASGMTPGSHGSTYGGNPLACAVASAVLDAVLAPGFLETVRERAALVDALLERLLRRHSDLFVRAQGHGLMRGLQVRASARDVVAHLRDFGVMTVAAGADVVRLLPPLTISELEIAEAEARLLRAAEAWLPIAA

SEQ ID NO: 9896 - protein, 498 aa, Mycobacterium tuberculosis H37Rv
MSFVVTIPEALAAVATDLAGIGSTIGTANAAAAVPTTTVLAAAADEVSAAMAALFSGHAQAYQALSAQAALFHEQFVRALTAGAGSYAAAEAASAAPLEGVLDVINAPALALLGRPLIGNGANGAPGTGANGGDGGILIGNGGAGGSGAAGMPGGNGGAAGLFGNGGAGGAGGNVASGTAGFGGAGGAGGLLYGAGGAGGAGGRAGGGVGGIGGAGGAGGNGGLLFGAGGAGGVGGLAADAGDGGAGGDGGLFFGVGGAGGAGGTGTNVTGGAGGAGGNGGLLFGAGGVGGVGGDGVAFLGTAPGGPGGAGGAGGLFGVGGAGGAGGIGLVGNGGAGGSGGSALLWGDGGAGGAGGVGSTTGGAGGAGGNAGLLVGAGGAGGAGALGGGATGVGGAGGNGGTAGLLFGAGGAGGFGFGGAGGAGGLGGKAGLIGDGGDGGAGGNGTGAKGGDGGAGGGAILVGNGGNGGNAGSGTPNGSAGTGGAGGLLGKNGMNGLP

SEQ ID NO: 9897 - protein, 296 aa, Eremothecium gossypii
MFVFSGSPCIFESFTPICNEMQNCSYPSSRRLYKRPMGRLNYSVEEQDDKFIISLRKDVPEELLYRAVEERVNAYKERAPRYSLVTDFFGNQYCVQNHVDQQQLLCEAMRNIDMNELGSHLAQMTFHDYQVTLSADGHTLVVESADDNVHKEFELQTEFEDVAIENFEMARENTAIVKIALKKPLPRPQKRVCTSIPVMWHNTKSRKNSQKLESGDALDGTTSDVPREAIGENQHELRVNGNGLNAKSQSVNRKFTGKATTEMHVTIEDLEDEEFLRWERSLGQAPKGHAIIEDAA

SEQ ID NO: 9898 - protein, 298 aa, Bifidobacterium longum DJO10A
MKGIILAGGSGTRLYPLTTVTSKQLLPVYDKPMIYYPLSVLMMAGIRDILIISTPKDLPNFERLLGDGSQYGVSFSYKVQPSPDGLAQAFILGEEFIDGEPCALVLGDNIFYGNGLGRTLRKAATVEHGATVFGYYVDDPERYGVVEFDENKKAISIVEKPEHPASNYAVTGLYFYDERVTEFAKQVKPSPRGELEITDLNKMYLEDGTLNVQTLGRGYAWLDTGTMDSLYEAGEFVRTVQRAQGLPIAVAEEIAFENGWITRDELMEAAVKYGKSPYGKHLKDVAENKIIVKPRDVR

SEQ ID NO: 9899 - protein, 78 aa, Glycine max
  unsure (1)..(78): unsure at all Xaa locations
MGGGMEAXKNKFIEDWSTARENLEXNWRWTQRYLALVGMFGIAIPFLVYKGISREFVCRHVSITKLGLYLLNESLYGL

SEQ ID NO: 9900 - protein, 884 aa, Saccharomyces cerevisiae
MDPNSNSSSETLRQEKQGFLDKALQRVKGIALRRNNSNKDHTTDDTTGSIRTPTSLQRQNSDRQSNMTSVFTDDISTIDDNSILFSEPPQKQSMMMSICVGVFVAVGGFLFGYDTGLINSITSMNYVKSHVAPNHDSFTAQQMSILVSFLSLGTFFGALTAPFISDSYGRKPTIIFSTIFIFSIGNSLQVGAGGITLLIVGRVISGIGIGAISAVVPLYQAEATHKSLRGAIISTYQWAITWGLLVSSAVSQGTHARNDASSYRIPIGLQYVWSSFLAIGMFFLPESPRYYVLKDKLDEAAKSLSFLRGVPVHDSGLLEELVEIKATYDYEASFGSSNFIDCFISSKSRPKQTLRMFTGIALQAFQQFSGINFIFYYGVNFFNKTGVSNSYLVSFITYAVNVVFNVPGLFFVEFFGRRKVLVVGGVIMTIANFIVAIVGCSLKTVAAAKVMIAFICLFIAAFSATWGGVVWVISAELYPLGVRSKCTAICAAANWLVNFICALITPYIVDTGSHTSSLGAKIFFIWGSLNAMGVIVVYLTVYETKGLTLEEIDELYIKSSTGVVSPKFNKDIRERALKFQYDPLQRLEDGKNTFVAKRNNFDDETPRNDFRNTISGEIDHSPNQKEVHSIPERVDIPTSTEILESPNKSSGMTVPVSPSLQDVPIPQTTEPAEIRTKYVDLGNGLGLNTYNRGPPSLSSDSSEDYTEDEIGGPSSQGDQSNRSTMNDINDYMARLIHSTSTASNTTDKFSGNQSTLRYHTASSHSDTTEEDSNLMDLGNGLALNAYNRGPPSILMNSSDEEANGGETSDNLNTAQDLAGMKERMAQFAQSYIDKRGGLEPETQSNILSTSLSVMADTNEHNNEILHSSEENATNQPVNENNDLK

SEQ ID NO: 9901 - protein, 320 aa, Sinorhizobium meliloti
MDRVRTVRKAVIPVAGNGTRFLPATKAVPKEMLTIVDRPVVQYAVDEARQAGIEHIVFVTSRNKQVIEDHFDDAPELISSLSRSGKSAQISELEAMLPAAGSVSFTRQQAPLGLGHAVWCARDLIGDEPFALLLPDMVSFGARGCVAGLMDLYHEVGGNVVGVEQCAPEEASKYGIVGKGETVRHGFSVTEMVEKPAAGKAPSNYYLNGRYILQPEIFSILAHQTRGAGNEIQLTDGMLTLSQSQSFHAHPYEGRTFDCGSKQGFIEANVAFALLVRTSAISFSNPSATWFCLTKAASGRHKRRLPAVLRDCRNKDRRRR

SEQ ID NO: 9902 - protein, 532 aa, Synechocystis sp. PCC 6803
MAEAPIAPVVLVILDGWGYRPDTRANAIAQANTPIMDSLIAAYPNTLVNTSGKDVGLPKGQMGNSEVGHLNLGAGRVVPQELVRISDAIEDGTFFDNQALIEVCQRVRDRRGKLHLIGLCSDGGVHSHIDHLLGLIDLAKLQGISQLCIHAITDGRDTPTNEGAHFVQQIQAHLEKIGLGRIVSVSGRYYALDRDRRWDRVEKAYRVMTEDGVGDGRSAAQVIKDYYASDITDEFIPPTRIGAGAIASGDGVIFYNFRPDRARQLCYALVNPSFDGFPRERIQPLDFVTFTQYDPALPVVVAFEPQNLNNILGEIISRQGMKQFRTAETEKYPHVTYFFNGGLEQPFAGEDRELIQSPMVSTYDKAPQMSAKAVTDAVCRAMEKGIYSLVVVNYANPDMVGHTGKLKEAIQAIETVDLNLGRLLASAAKVGGTVLITADHGNAEYMSDESGNPWTAHTTNPVPFILVEGEGRKIPGHGGEVKLREGGKLADIAPTILDILQLPVPAEMTGKTLIDQPLVEIKANRTPVNLSR

SEQ ID NO: 9903 - protein, 363 aa, Oryza sativa (japonica cultivar-group)
MGSLAAEKTVTGWAARDASGHLTPYNYTLRKTGPEDVVVKVLYCGICHTDIHQAKNHLGASKYPMVPGHEVVGEVVEVGPEVTKYSAGDVVGVGVIVGCCRECHPCKANVEQYCNKRIWSYNDVYTDGRPTQGGFASAMVVDQKFVVKIPAGLAPEQAAPLLCAGLTVYSPLKHFGLMSPGLRGGVLGLGGVGHMGVKVAKSMGHHVTVISSSARKRGEAMDDLGADAYLVSSDAAAMAAAGDSLDYIIDTVPVHHPLEPYLALLKLDGKLILMGVINQPLSFISPMVMLGRKAITGSFIGSMAETEEVLNFCVDKGLTSQIEVVKMDYVNQALERLERNDVRYRFVVDVAGSNIDDADAPPA

SEQ ID NO: 9904 - protein, 433 aa, Synechocystis sp. PCC 6803
MIYDIFMPALSSTMTEGKIVSWTKSPGDKVEKGETVLVVESDKADMDVESFNEGYLAAILVPAGEEAPVGATLGLVVETEAEIAEAQAKAGSGGGSSAAPTATPAPQQPEPVAIASATAIETTPAPSSNGNGKGSGRIIASPRAKKLAKELKVDLATIAGTGPHGRIVAADIESAAGKPVTASIAAPSAPAPKTSPAPTPRVTSTPSVPVGQTVPLTTFQKALVQNMVAAMAAPTFRVGYTITTDGLDQLYKQIKGKGVTMTALLAKAVALALKKHPIVNASYTDQGIIYHKDVNIALAVAMPDGGLITPVLQNADQVDIYSLSRRWKELVERARAKQLQPEEYSTGTFTISNLGMFGVDRFDAILPPGQGGILAVGASRPQVVANEEGLIGTKRQMAVNVTCDHRVIYGAHAAAFLKDLAVIIEENAQSLTM

SEQ ID NO: 9905 - protein, 173 aa, Glycine max
  unsure (1)..(173): unsure at all Xaa locations
MCGILAVLGCSDSSQAKRVRVLELSRRLKHRGPDWSGLHQYGDNYLAHQRLAIVDPASGDQPLFNEDKTVVVTVNGEIYNHEELRKQLPNHTFRTGSDCDVIAHLYEEHGENFMDMLDGIFSFVLLDTRDNSFIVARDAIGVTSLYXGXWGLECSVVNSSEXKRFDDDCDTLE

SEQ ID NO: 9906 - protein, 409 aa, Corynebacterium glutamicum ATCC 13032
MVKGVKGRPNVLAIVLAGGEGKRLFPLTEDRAKPAVPFGGTYRLIDFVLSNLVNSGFLKIAVLTQYKSHSLDRHISLSWNVSGPTGQYIASVPAQQRLGKRWFTGSADAILQSLNLISDEKPDYVIVFGADHVYRMDPSQMLDEHIASGRAVSVAGIRVPREEATAFGCIQSDVDGNITEFLEKPADPPGTPDDPDMTYASMGNYIFTTEALIQALKDDENNENSDHDMGGDIIPYFVSRNDAHVYDFSGNIVPGATERDKGYWRDVGTIDAFYECHMDLISVHPIFNLYNSEWPIHTTSEGNLPPAKFVRGGIAQSSMVSSGSIISAGTVRNSVLSNNVVVEEGATVEGAVLMPGVRIGKGAVVRHAILDKNVVVRDGELIGVDQVRDAQRFKVSAGGVVVVGKNQVV

SEQ ID NO: 9907 - protein, 429 aa, Streptococcus pneumoniae TIGR4
MKLQKPKGTQDILPAESAKWQYVEGFAREIFKRYNYAEVRTPIFEHYEVISRSVGDTTDIVTKEMYDFYDKGDRHITLRPEGTAPVVRSYVENKLFAPEVQKPSKFYYMGPMFRYERPQAGRLRQFHQIGVECFGSSNPATDVETIAMAAHFLKEIGIQGVKLHLNTLGNPESRAAYRQALIDYLTPLKETLSKDSQRRLEENPLRVLDSKEKEDKVAVENAPSILDFLDEESQAHFDAVRQMLENLGVDYIIDTNMVRGLDYYNHTIFEFITEIEGNDLTVCAGGRYDGLVAYFGGPETAGFGFGLGVERLLLILEKQGVTLPIENALDVYIAVLGEGANIKALELVQALRQQGFKAERDYLNRKLKAQFKSADVFAAKTLITLGESEVESGQVTVKNNQTREEVQVSLETISQNFSEIFEKLGFYTQ

SEQ ID NO: 9908 - protein, 376 aa, Bacillus cereus ATCC 14579
MAQKQKCVAMLLAGGKGSRLSALTKNLAKPAVPFGGKYRIIDFTLSNCANSGIETVGILTQYQPLELHNYIGIGNAWDLDRVSGGVTVLPPYAESSGVKWYTGTASAIYQNLNYLSQYEPEYVLILSGDHIYKMDYSKMLDYHIEKESDVSISVIEVPWDEASRFGIMNTNEEMEIVEFEEKPQFPRSNLASMGIYIFNWSILKEYLEMDARNPESSNDFGKDVLPLLLDEGKKLMAYPFEGYWKDVGTVKSLWEANMDLLRDETSLNLNDRNWRIYSVNPNEPPQYIAEKAKVEESLINEGCVIEGDVKHSVLFQGVTVEEGSMVIDSVVMPGAKIGKNVVIERAIVGSEMVIEDGTIIRPEKNVDDVVLIAEGK

SEQ ID NO: 9909 - protein, 387 aa, Phaeodactylum tricornutum
SGNPTVEVEVTTADGVFRASVPSGASTGAYEAVELRDGGDRYMGKGVLQAVQNVNDILGPAVMGMDPVGQGSVDDVMLELDGTPNKANLGANAILGVSLAVAKAGAAAKKVPLYRHFADLAGNNLDTYTMPVPCFNVINGGSHAGNKLAFQEYFVIPTGAKSFAEAMQIGCEVYHTLGKIIKAKFGGDATLIGDEGGFAPPCDNREGCELIMEAISKAGYDGKCKIGLDVAASEFKVKGEDEYDLDFKYDGDIVSGEELGNLYQSLAADFPIVTIEDPFDEDDWENWSKFTTKNGATFQVVGDDLTVTNIEKIERAIDEKACTCLLLKVNQIGSISESIAAVTKAKKAGWGVMTSHRSGETEDTYIADLAVGLCTGQIKTGAPCRER

SEQ ID NO: 9910 - protein, 513 aa, Photobacterium profundum
MSAKKPLALVILDGWGYREDNSDNAIANANTPVMDSLIANEANTLISASGFDVGLPDGQMGNSEVGHTNIGAGRVVYQDLTRITKSIADGDFFENEALTTAMDKAINAGKAVHIMGLMSPGGVHSHEDHIAAAIEMAAKRGAEKIYLHCFLDGRDTPPRSAQNSLERFDALFAELGKGRTASLVGRYYAMDRDNNWDRVEVAYNLLSAAKADFTVDSAVAGLTDAYSRDENDEFVKATEIRAEGQESAAMVDGDTVIFMNYRADRAREITRAFEADFTSFVRTQTPALAEFVMLTRYAANIKLPAAFPPATLKNTLGEWLSKKGKKQLRISETEKYAHVTFFFNGGVEDEFDGETRSLVASPKVATYDLQPEMSAPELTEKLVAAIKGGEFDTIICNYPNGDMVGHTGVYDAAVKACEALDGCIGQVVEAIKSVGGQLLITADHGNAEMMINPETGGVHTAHTNLPVPLIYVGDKSLTLKDGGKLSDLAPTMLSLSDIEIPAEMTGQVLFDLK

SEQ ID NO: 9911 - protein, 401 aa, Phytophthora palmivora
SGNPTVEVDLVTELGEYRAAVPSGASTGEFEALEMRDGGKAYMGKGVLNAVKNVNEIIAPALVGKDVTQQAELDRFMVETLDGTQNEWGWCKKKLGANAILGVSLALCRGGAAAKKQPLWQYIADLAGNPTPCLPVPSFNIINGGSHAGNKLAMQEFMILPVGATSFTEAMQIGSEVYHNLKKVIKGRYGLDATAVGDEGGFAPNIQSNGEAIDLIEEAIKAAGYTNQVRLGMDVAASEFYTGAADARYNLDFKNENAPDSEKIPADKLQEVYEGFIAKCAGSSKIVSIEDPFDQDDWESWIKFTGKVGKDVQIVGDDLTVTNPTRVKKAIEQKACNALLLKVNQIGSITESIEAVTMAKKAGWAIMASHRSGETEDTFIADLAVGLSAGQIKTGAPCRER

SEQ ID NO: 9912 - protein, 307 aa, Vibrio vulnificus YJ016
MSKFAIVFPGQGSQAVGMLADLGEQYEIVKQTFAQASEALGYDLWALVQNGPAEDLNQTFRTQPALLASSVAIWRVWQELGLAQPENLAGHSLGEYSALVCAGVIDFQEAIKLVELRGQLMQEAVPAGTGAMYAIIGLDDEAIAKACEEAAQGEVVSPVNFNSPGQVVIAGSKDAVERAGALCKEAGAKRALPLPVSVPSHCALMKPAAEKLAVALESIEFKAPQLPVINNVDVVAETDPARIKDALVRQLYSPVRWTESVELMSSQGVEKLLEMGPGKVLTGLTKRIVKSLEAAVVNDVASLDAVK

SEQ ID NO: 9913 - protein, 437 aa, Prymnesium parvum
SGNPTVEVDLITAKGQTYRAAVPSGASTGIYEALEMRDGDKSMYMGKGVSKAVHNVNTIIGPALVGMDPVQQKEIDDKMVKTLDGSKNDWGWSKSKLGANAILGVSMAVCKAGAASKGIPLYKHIAELAGNPTDKMYMPVPSFNVINGGSHAGNKLAMQEFMILPVGATDFTEAMRMGSEVYHNLKSVIKAKYGQDACNVGDEGGFAPNILENKEGLDLLVTSIEKAGYTGKVKIGMDVAASEFWLADKKMYDLDFKTENNDGSQCKSGDDLMKIYEEFVKDYPMVSIEDPFDQDDFASYKAMTELLGERCQIVGDDLLVTNPTRVQKAIDEKVRPNNACCPDAVLSMCTSVQRNFCAGCPLVHDAVALQACNALLLKVNQIGSVSESIEAVNMAKAAGWGVMTSHRSGETEDSFIADLAVGLKTGQIKTGAPCRER

SEQ ID NO: 9914 - protein, 191 aa, Yarrowia lipolytica
MQTIKCVVVGDGAVGKTCLLISYTTNKFPSEYVPTVFDNYAVTVMIGDEPYTLGLFDTAGQEDYDRLRPLCYPQTDVFLVCFSVTSPASFENVKEKWFPEVHHHCPGVPCLIVGTQVDPRSDRMILDKLSRHKLRPMTTEQGYQLARELGAVKYVECSALTQKGLKDVFDEAIVAALEPPVVKKNKKCIVL

SEQ ID NO: 9915 - protein, 388 aa, Thraustotheca clavata
SGNPTVEVDLTTEHGLFRASVPSGASTGIHEACELRDGGKRYLGKGVTQAVNNVKNIIGPKIEGMDPTQQKDIDFLMRELDGTENKGNLGANAILGVSLAVAKAGARSKGVPLFQHFADLIKNDKLVLPVPAFNVINGGSHAGNALAFQEFMILPTGAGSFSEAMAMGCEVYHHLKGVIKKKYGQDATNVGDEGGFAPNIQSNREGVELLMLAIEKAGYSGKIEIGMDVASSEFYTDDGRYDLNFKNKSSTDAPLTGAQLGQLYKDLAKEFPIVSIEDPFDQDDWENYQAFTAAVGKDVQVVGDDLLCTNPKRIAKAVELSACNALLLKVNQIGTLTESVQAVSDAKKAGWGVMTSHRSGETEDSYIADLAVGLSTGQIKTGAPCRER

SEQ ID NO: 9916 - protein, 1169 aa, Streptomyces sp. GERI155
MGRQVCAVGSLRREEGGLRRFLTSAAEAFVQGVDVTWPALFDDTGARAIDLPTYPFQHQNYWYIDPARRKGDVSSFGMAEAGHPLLDAGTELPEGGEHLYTARLTADSHPWLLEHTLLGTPLLPGAAFVDLVLWAGGELGCELVEELTLTSPLLLSDSAAVQLRLVVGATDAEGRRTITIHSRPDAHPGTTRTPAAPPEAGSEAEVRRDAADWTKHAQATVAPAPAAPASVVGADGNPGLPAAEWSSAATESDTFRAEDFYASFAARGYGYGPLFQGVRSGRQDGSDVYAEVALDQGALPPGERFGLHPALLDAAFQTMRLGSFFPDDGQARVPYTFRGIRLYAPGAERLRVRVSAVGDDAVRVECADEQGRLVCEIDALVVSPVSPAQLRPAGQDATQDMLHRVEWPVLPSPAGRATSTAAFRWIVVGPEDDGLGLAEVLSGTGTGIERHRNLADALTALRTPADTPGSPAAADKTPLIAVPVSPSPTMDAVSVRHAVHQALESVQGWLSADEAAGEGGSGAAGADGRLVLITSGAVSTGDADPLRDPVASAVWGLVRSAQSEQPDRFVLVDLDEGAVDGAALSAAIASGEPQLALREGKVHVPRLASLSARDSRMLLPPAGARAWHLVGARTGTLSDLALVPAQADTVPLAPGQVRIAVRAAGLNFRDTLIALGMYPGEGVMGAEGAGVITEVGPDVAGFAVGDRVLGMWTDGFGPYAVADHRMVAPMPRDWSYAEAASVPAVFLSAYYGLKHLAGLRAGQSVLVHAAAGGVGMAAVQLARYFGAEVFGTAGPAKWDVLRAQGLDDRHIASSRTLDFAARFLDATGGRGVDVVLNSLAGDFVDASLRLLPRGGRFVELGKADVRDAAQVAADRPGTGYRAFELMEAGPELIGRMLTELLELFESGALRLLPVTPYDIRRAPDAFRTLSQAGHVGKLVLTMPPAFDPPRPGRPACSCRPRHRTRRRGTRSAARPGAPARRCRTLVRCGHAGPCGGPGAPDHGRGIRHPGRTARREAARRTARRPQGARAHRNRLGARARGRPTRPTPVLLQGSRIRLAHRRRTPQQAHRRHRNEASRHTGLRPSDAGGTRRPPGTGTAEGRSETSRGRPGRSGGTRSDPGRTGHRCHRRQRPRPRRGTPSGTARHARPAGGGRPPGQRLERSRRAGPR

SEQ ID NO: 9917 - protein, 434 aa, Heterocapsa triquetra
MAISKIHARQVFDSRGNPTVEVELTTEKGVFRSIVPSGASTGENEACELRDGGKEFHGKGVRDAVENVKTIIAPALIGKDVCDQEGIDKIMLELDGTENKSKLGANAILGVSMAVCRAGAAAKGVPLYQHINSLAGSPKMVMPVPCFNVINGGVHAGNYLAFQEFFLIPVGAATFEEAMQMGSETYHTLKGIIKTKYGLDSTAVGDEGGFAPAVQDPEESLKLLMEAIGAAGYDGKIVIGSDPASSEFWKGEENVYDLDFKNPNPKKENKRSREEMVATYVRYCETYPIALLEDPFAEEDFEGHAMLTQKVGSKVEIVGDDLYCTNSKRVAMGLEKKATNAMLLKVNQIGSVTESIAAWKLCVDNKWGVFVSHRSGETEDTFIADLTVGLGTGHLKTGAPCRSERLAKYNQLLRIEEESGLKFCGKAFRTPWDA

SEQ ID NO: 9918 - protein, 272 aa, Staphylococcus aureus subsp. aureus Mu50
MKRLENKVAVVTGASTGIGQASAIALAQEGAYVLAVDIAEAVSETVDKIKSNGDNAKAYNVDISDEQQVVDFVSDIKEQFGRIDVLFNNAGVDNAAGRIHEYPIDVYDKIMNVDMRGTILMTKMMLPLMMNQGGSIVNTSSFSGQAEDLYRSGYNAAKGAVINFTKSIAIEYGRDGIRSNAIAPGTIETPLVDKLTGTSEDDAGKTFRENQKWMTPLGRLGKPEEVAKLVVFLASDDSSFITGETIRIDGGVMAYTWPGEMLSDDSWKRTLE

SEQ ID NO: 9919 - protein, 591 aa, Oryza sativa
MCGILAVLGVADVSLAKRSRIIELSRRLRHRGPDWSGIHCYQDCYLAHQRLAIVDPTSGDQPLYNEDKSVVVTVNGEIYNHEELKANLKSHKFQTASDCEVIAHLYEEYGEEFVDMLDGMFAFVLLDTRDKSFIAARDAIGICPLYMGWGLDGSVWFSSEMKALSDDCERFISFPPGHLYSSKTGGLRRWYNPPWFSESIPSTPYNPLLLRQSFEKAIIKRLMTDVPFGVLLSGGLDSSLVASVVSRHLAEAKVAAQWGNKLHTFCIGLKGSPDLRAAKEVADYLGTVHHELHFTVQEGIDALEEVIYHVETYDVTTIRASTPMFLMSRKIKSLGVKMVLSGEGSDEIFGGYLYFHKAPNKKEFHEETCRKIKALHLYDCLRANKSTSAWGVEARVPFLDKNFINVAMDIDPEWKMIKRDLGRIEKWVLRNAFDDEEKPYLPKHILYRQKEQFSDGVGYSWIDGLKDHANEHVSDSMMMNASFVYPENTPVTKEAYYYRTIFEKFFPKNAARLTVPGGPSVACSTAKAVEWDAAWSKNLDPSGRAALGVHDAAYEDTLQKSPASANPVLDNGFGPALGESMVKTVASATAV

SEQ ID NO: 9920 - protein, 359 aa, Salmonella typhimurium
MSKNYHIAVLPGDGIGPEVMAQALKVMDAVRVLICVYHSHYDVGGIAIDSSGIPLPKATVEGCEQADAILFGSVGGPKMGKFAPGKPAGARRLLPLRKHFKLFSNLRPAKLYQGLEAFCPLRADIAANGFDILCVRELTGGIYFGQPKGREGSGQYEKAFDTEVYHRFEIERIARIAFESARKRRCKVTSIDKANVLQSSILWREIVNDVAKTYPDVELAHMYIDNATMQLIKDPSQFDVLLCSNLFGDILSDECAMITGSMGMLPSASLNEQGFGLYEPAGGSAPDIAGKNIANPIAQILSLALLLRTADANDAATAIEQAINRALEEGVRTGDLARGAAVSTDEMGDIIARYVAEGV

SEQ ID NO: 9921 - protein, 468 aa, Magnetococcus sp. MC-1
MSDTFDLVVIGGGPGGYVAAIRAAQLGLKTACIDKRPTLGGTCLNVGCIPSKALLQSSHQLETAQHAMAAHGVEIKGVKANLTTMMQRKQEVVQGLTQGIAFLFKKNKVTHLMGSGTIVDSSHVQVTAADGSVQTLTTENILIASGSEVATLPGLEIDEKHIISSTGALALDKVPKKMVVIGAGVIGLELGSVWRRLGAEVTVVEFLDGILPGMDGEIRKTAQRTLSKQGMHFKLGTKVTAASVLKNGVKLTMEPVKGGEAEERQADVVLVAVGRRPYTQGLGLENIGVTLDERGFIPVDHDRQTTCAGVFAIGDVIGGAMLAHKAEEEGSAVAEALAGQVAHVNYDAIPAVVYTHPEIASVGQSEESLTAAGIPYKVGKFPFMANSRARAIGDAEGFVKILAHATSDAILGAHIIGPAAGDLIAEIVLAMECDISAEDIARTCHAHPGLGEAVKEAALAVDKRAIHA

SEQ ID NO: 9922 - protein, 386 aa, Glycine max
MEHKLATTEGQPIRCKAAVCRKAGEPLGIEEIMVAPPMPGEARIRIICSSLCRTDISFRNMQGPPANFPTILGHEAIGVVESVGEDVTEVAKGDVVVPIFLPDCGECIDCKSSKSNLCSKFPFEVSPWMPRYATSRFTDLKGEIIHHFLSVSSFSEYTVVDIAHLIKIDPAIPPNRACLLSCGVSAGIGAAWRAAGVEPGSTVAIFGLGSIGLAVAEGARLCGATKIIGVDVNPEKYEIGKRFGLTDFVHSGECENKSASQVIIEMTGGGADYCFECVGMASLMHEAYASCRKGWGKTIVLGLDKPGSKLSLSCSEILVSGKSLVGCMFGGLKPKSHVPILIKRYLDKELNLDGFVTHEVEFKDINKAFDLMIKGQCLRCVIWMDK

SEQ ID NO: 9923 - protein, 457 aa, Mesorhizobium sp. BNC1
MTDRSNELNAWDRDHFFHPSTHMGTHARGESPNRVVAGGEGVYITDVNGRTSLDAFAGLYCVNVGYGRQKIADAIAEQARNLAYYHAYVGHGTDASIRLAKMIIDRAPQGMSRVYFGLSGSDANETNIKLIWYYNNVLGRPEKKKIISRWRGYHGSGIMTGSLTGLDLFHNAFDLPRAPILHTEAPYYFRRPDRSMSEEQFSQYCADKLEEMILAEGPDTVAAFIGEPILGTGGIVPPPAGYWEKIQAVLKKYDVLLIADEVVTGFGRLGTMFGSDHYGIKPDLITIAKGLTSAYAPLSGVIVSDKVWQVLVQGSDKLGALGHGWTYSAHPLCAAAGVANLELIDEMNLVENAGTVGAYFRAELANAVGSHPNVGEVRGDGMLAAVEFVADRDDRVFFDASKKIGPQIAAALAERGVIGRAMPQGDILGFAPPLCLTKEEADKVIAATASAVDSVLG

SEQ ID NO: 9924 - protein, 328 aa, Trichodesmium erythraeum IMS101
MRKTAFIPFLAKLGKALTKKKITVLQINIGRRCNLACTHCHVEASPKRTEELSKEICEQLIELINRFPQIQTVDLTGGAPEMNYGFKPLVEAAIKNNKEVIVRSNLTIYFVPGFEDIPQYCAENKLRIIASLPCYLEDNVDKMRGNGVYQKSIRALQWLNRLGYGQNQSMILDLVYNPPVPNSYKFALPANQKNLEQDYKSYLKEHFNVKFNQLFTITNLPIGRTRLFLENLKIHQPYLDFLEANFNGETIENLMCRNELSIDYLGNVYDCDFNQMENIPAKTSKGETITVAKLLEGNSLDIIEQVQTANYCYGCTAGCGSSCGGALV

SEQ ID NO: 9925 - protein, 446 aa, Magnetococcus sp. MC-1
MATEIKVPTLGESVTEATVVQWLKQVGDAVAVDEPLVELETDKVTVEMPSPVAGVITEIYAGVDADVEVGAVLCVVDAQGSARVAVPAKPAAEPAPAPAVATAATPAPAVATPAPTVPVAPPSGGAALSPAVRKLLAEHGLDATQIPATGSGGRLTKGDVLAYLEQPKPAPTAAPTPAPTAAPTPAPTPTPAPAPMATPALAPAAQLPPAVEGPREERVKMSRLRQRIAQRLKEAQNTAAMLTTFNEVDMTAVMALRSQYKEVFEKRNHARLGFMSFFVKAAISALQEFPAVNAEIQGNEIVFKNYYDIGVAVGSPQGLVVPVLRGADAMSLAGIESTIAGMGKRARDGQLSMEEMSGGTFTITNGGIFGSLLSTPILNTPQSAILGMHKIQQRAMVMPDGSIQARPMMYLALSYDHRIVDGKEAVSFLVRIKDCIEDPARILLNA

SEQ ID NO: 9926 - protein, 195 aa, GIBBERELLA ZEAE PH-1
MAVVATIKCVVVGDGAVGKTCLLISYTTNKFPSEYVPTVFDNYAVTVMIGDEPYTLGLFDTAGQEDYDRLRPLSYPQTDVFLVCFSVTSPASFENVREKWFPEVRHHCPGVPCLIVGTQVDLRDDPSVREKLSKQKMQPVRREDGERMAKDLGAVKYVECSALTQYKLKDVFDEAIVAALEPPAPKKKSHKCLVL

SEQ ID NO: 9927 - protein, 473 aa, Glycine max
FGSSQNVPASAGGETRVEEKKPTREDVTDERKSESTSAIINASELPPHVLLEMPALSPTMNQGNIAKWRKQEGDKIEVGDILCEIETDKATLEFETLEEGYLAKILAPEGSKEVAVGHPIAITVEDASDIEAIMNSVSRSSTNQQKAPQRDTKSEAKAQKNNIIRISPAAKLLITEYGLDASTLNATGPYGTLLKGDVLSAIKSGKLSPKPASSKEKVSSFQSHQQVAASQESKSDLKLSDAYEDFPNSQIRKVIAKRLLDSKQNTPHLYLSSDVVLDPLLSLRKDLKEHYDVKVSANDIIVKVVAAALRNVPEANAYWNVETGDVVLNDSIDICIAVATEKGLMTPIIKNADQKTISAISSEVKELAAKARAGKLKPHEFQGGTFSISNLGMFPVDKFCAIINPPQACILAVGRGNKVVEPVIGTDGIEKPSIATKLSLTLSADHRVFDGKVGGAFLSALQSNFSDIRRLLL

SEQ ID NO: 9928 - protein, 421 aa, Magnaporthe grisea 70-15
MFSRRLITAARLVPVSQATSQPLRRFPLHRHFQHVRTYADQVVKVPQMAESISEGTLKQFTKQVGDFVEQDEELATIETDKIDVAVNAPAAGTIKELLASEEDTVVVGQDLIRLELGGAPAEGAEKKSEKPQETQAEKKPEPKEESKPEPTKKEEPAPSKKQESAPQPEKKETKQPAKESSPATLGNREERRVKMNRMRLRTAERLKQSQNTAASLTTFNEVDMSSLMEFRKLYKDDVMKKTGVKLGFMSAFSRAAVLAMRDIPAVNASIEGPNGGDTIVYRDYVDISLAVATEKGLVVPVVRNTESMDMITIEKSIAEMGAKARAGKLTIEDMAGGTFTISNGGVFGSLMGTPIINLPQTAVLGLHAIKDRPVVVNGKIEIRPMMYLALTYDHRLLDGREAVSFLVKIKEFIEDPRRMLL

SEQ ID NO: 9929 - protein, 478 aa, GIBBERELLA ZEAE PH-1
MATYYDAIIIGSGQSGNPVAKAFANAGHKTAVIERTALGGTCVNVGCTPTKTMIASGRAAYMARRGKDYGVHAGNGNFEIDMARVRQRKRAIVEQWNSGSVRGLNAAGVDVIMGEGSFVGDKKLKVVLNDGGEKEVSADKIFINVGERPLRPDISGLDGVEPARVLDSTSIMELDAVPEHLVVLGGGYIGLEFGQLFRRLGSEVTVIQRAKQLVPHEDPDVAECLYDILQQDGLTVYLSSTVNSVSASTDSKMPFTVNVQTANGQTDVAGSHILLAAGRVPNTDRLNLSEVGIKTTSKGHVVVDDKLQTSASNVYALGDCHGGAAFTHISYDDSRIIRTNLLPKTMASTTPAMPTTQSSTSRVLTPYVMYTDPQLGHVGLHARDLFNSKREVKIAKMPMSYVARALETAEPRGMMKATVEAKTGEILGFTCLGLEGGEIMSIVQTAMMGNLKWWDLEAAVYAHPTLAESLNNLWGHLE

SEQ ID NO: 9930 - protein, 425 aa, Porphyromonas gingivalis W83
MEIAKIIGREILDSRGNPTVEVDVHLACGIIGRAAVPSGASTGENEAIELRDQDKARYCGKGVLKAVKNVNEVIDPALCGMSVLEQTAIDRKLIELDGTKTKSNLGANAMLGVSLAVAKAAAAYLDIPLYRYIGGSNTYVLPVPMMNIINGGSHSDAPIAFQEFMIRPVGACCFREGLRMGAEVFHALKKVLHDRGLSTAVGDEGGFAPALNGTEDAIESILKAVEAAGYVPGKDITIAMDCASSEFFKDGIYDYTKFEGEKGKKRSIDEQVAYLTELVGKYPIDSIEDGMSENDWEGWKKLTVALGDKVQLVGDDLFVTNVEFLRRGIAEKCGNSILIKVNQIGTLTETLNAIEMAHRHGFTSVTSHRSGETEDTTIADIAVATNSGQIKTGSLSRTDRMAKYNQLLRIEEELGPCAVYGYKKV

SEQ ID NO: 9931 - protein, 43 aa, Quercus robur
KAHVTHPELKCTFNLDIIGVKKNPNGQMYTSPWCDDKGKPSLR

SEQ ID NO: 9932 - protein, 438 aa, Mycoplasma capricolum
MFKVKFADIGEGLTEGTVAEVLVKVGDVVKEGQSLYFVETDKVNSEIPAPVAGKIAVINIKAGQEIKVGDVVMEIEDGSDTSATSEPKAETKSEAKVEVVEENASVVGATPVSNDVIVRKQTTTVNKSSTIKATPLARKVAADLNIDLSLVTPTGPNQRILVADIKNHQASSTQLASQPISQPAPTPSPSAHQTIAPTIKVVEPSAPLSWDEVPMNGVRKATVKAMTKSHTEIAAFTGMKNTDITETHKMRTELKDHAAASGIKLTYLAFIIKAVAKSLRDMPNINVRGDFANNKIQFMHNINIGIAVDTPNGLMVPVIKGADHLSVFEIAIKISELANKAKDGKLTRAEMTEATFTVSNFGSVGLDYATPIINSPESAILGVGTMSQTPLYINGELQKRFIMPLSMTCDHRIIDGADAGRFLIKVQDYLSKPVLLFM

SEQ ID NO: 9933 - protein, 175 aa, Oryza sativa
MAPTVMASSATSVAPFQGLKSTAGLPVSRRSTNSGFGNVSNGGRIKCMQVWPIEGIKKFETLWYLPPLTVEDLLKQIEYLLRSKWVPCLEFSKVGFVSRENHRSPGYYDGRYWTMWKLPMFGCTDATQVLKELEEAKKAYPDAFVRIIGFDNVRQVQLISFIAYKPPGCEESGGN

SEQ ID NO: 9934 - protein, 277 aa, Shigella flexneri 2a str. 301
MRGRSIRRRINHPDRLNDPMKRVGKRGEGKFERISWDEALDTIASSLKKTVEQYGNEAVYIQYSSGIVGGNMTRSSPSASAVKRLMNCYGGSLNQYGSYSTAQISCAMPYTYGSNDGNSTTDIENSKLVVMFGNNPAETRMSGGGITYLLEKAREKSNAKMIVIDPRYTDTAAGREEEWLPIRPGTDAALVAGIAWVLINENLVDQPFLDKYCVGYDEKTLPADAPKNGHYKAYILGEGDDKTAKTPQWASQITGIPVDRIIKLAREIGTTKPAYIC

SEQ ID NO: 9935 - protein, 282 aa, Perilla frutescens
GSWRSLPKLAGLLRCGKSCRLPWTNYLRPDIKRGPFSTEEEKLVIQLHGILGNRWAAIASQLPGRTDNEIKNLWNTHLKKRLLLMGIDPHTHEPSLTSNGLLTRPPSSPSTRHMAQWESPRLDAEARLSKESLLSIHAPLPKSEADHFLRLSNSEVGETFRKIKNGEKAEPPSPSQSPGSSASTKCCSFSGTTTEIGLQSGLHETDCKSSKTCTEYVRTGTDSSSSNEMEDSSESTLQLLLDFPCKNDMSFLGNADCYSLYPGFTNGSLYDSSSQEKKGGFV

SEQ ID NO: 9936 - protein, 294 aa, Zea mays
MSETRFWEKYCRAEYLVRTKNTAAATAEAAGDEELAIFLKNDDILAKEAKLKIKRVDPTLDMEADTGDDYIHLPDHGFHRDGSKETVDADSELARRTLSQDLNRHAAVVLEGRSLDVESSDPKTLAEALARSKKEPPSTSNVDDDNHERLMKVARMTEIEDLQAPRSLLYAPLCIKDPREYFDSQQANALRSLGGSNGGRKAHSCSLSTEEVFHHLMDQMSSVKVNRLNCPIVQSDMALKVLNELNEGISRSRRLNLKNPQEGLLGQLPQHTRDELMDHWTAIQELLRHFWSSV

SEQ ID NO: 9937 - protein, 396 aa, Bacillus cereus ATCC 14579
MKQFELSRSAESLKPSGIRKFFDLAANMKGVISLGVGEPDFVTPWNVRQACIRSLEQGYTSYTANAGLLELRQEIAKYLKKQFAVSYDPSDEIIVTVGASQALDVAMRAIINPDDEVLIVEPSFVSYAPLVTLAGGVPVPVETKLENEFKVQPEQIEAAITAKTKAILLCSPNNPTGAMLNKSELEEIAVIVEKYNLIVLSDEIYAELVYDEAYTSFASIKNMREHTILISGFSKGFAMTGWRLGMIAAPVQFSELMLKIHQYSMMCAPTMSQFAALEALRAGNDEVIRMRDSYKKRRNFMTTSFNEMGLTCHVPGGAFYVFPSISSTGLSSAEFAEQLLLEEKVAVVPGSVFGESGEGFIRCSYATSLEQLMEAMKRMERFVENKKRTKRNTFCP

SEQ ID NO: 9938 - protein, 194 aa, Xylella fastidiosa 9a5c
MNMLNVLRFPVLALALALAFVSSGVLADAGSLLDLDYRPLAGKETVNLQRLYGGKVLLVVNTASKCGFTPQYEGLEALHQKLSPLGFAVLGFPSNDFKGQEPGDEQQIQKFCTLTYGVKFPMFQKVHVKGDEVTPLYQRLTQTTGVAPGWNFHKYLIARDGHVVAQFDSRTRPDDPILLEAIKRELAKPVQVAH

SEQ ID NO: 9939 - protein, 465 aa, Neurospora crassa
MSGLLLPILRRPSSLISTGFVVKSPQPLVQPQRHHLHYSYRLMSAKLKPAARVAGNRQDVWTIVNEAAAASPRQPIVNMGQGFFGYNPPEFILNAAKKALDRVECNQYSPTRGRPRLRKALSKAYAPHWGRELDPETEITITTGANEGMLSAFMAFIEPGDEVIVFEPFFDQYISNIEMPGGKIVYVPMHPPKEGHIKTLSASEWTIDFDELERAVTPRTKMLVINTPHNPVGKVFSRAELERIAELCVKNQIIILSDEVYDRLFYTPFTRMATLSPEVEKITLTVGSAGKNFYATGWRVGWLMGPAELIQYVAAAHTRICYSSVSPLQEACAIGFEEADQQGFWTQCIEDMQNKMSRFNAIWDELGLPYSIPEGGYFVMANLNKVEIPEGYPFPPHVAERPRDFKLAWFLIQELGVAAIPPSEFYTDVNAHIVEDWLRFAVCKPDEVLEDAKERLRGLKKFIKQ

SEQ ID NO: 9940 - protein, 71 aa, Glycine max
MGGGMEVNKNRWIEEWNAGRENLELNFRFTRRSLAVIGLFGLAVPILVYKGIVREFHMQDEDAGRPYRKFL

SEQ ID NO: 9941 - protein, 571 aa, Eremothecium gossypii
MAQLKWGAGRADDGQDGREVDIEERWHGGAKPDSADGSRRIQIQAVNDEDDTSELITFNQDVSWFIVMLTFVASLSGFLFGYDTGYISSALQSVGTDLGHQLTYRDKEYITSATSLGALIAALGAGICADLFGRRKCIMFSNILFVVGTVLQVAAFNFWQMVVGRLVMGFGIGFGSLISPLFISEIAPKMIRGRLTVINSLWLTGGQLIAYACGAGFQHVKHGWRILVGISMLPAVLQFVSFIFLPDTPRFYVMKGRLEDAANVLERTYVGAERALIDRKIEELVLLNKTIPGRTVFHRVWNTIVAIHTVPANLRALIIACGLQGIQQFCGWNSLMYFSGDIFSLVGFKDPVAVSIVVAATNFIFTLVAFFAIDKIGRRIILLIGLPGMTTAMTVCAIAFHYIKTEVDGEKLKPVGESNAWGIVVVIFIIVYAAFYALGIGTVPWQQSELFPQPVRGVGTSFATATNWAGSMVIASTFLTMFKNITPTATFGFFAGISVISLVAVYLCYPELSGLELEEVQFVLKDGFNIKASKALAKKRKFQMAESRKQARELDLESLHKAKPSDEFTES

SEQ ID NO: 9942 - protein, 908 aa, Pseudomonas aeruginosa PAO1
MSTDSPLRTTASTCCYCGVGCGVLIEHDGERILGVQGDPRHPANFGRLCSKGASLHLTGDLQARALYPQLRLGKQLARARSDWESALEHAAGRFAETIREHGPDSVAFYISGQLLTEDYYAFNKLARALVGTNNIDSNSRLCMSSAVVGYKRSLGADAPPCSYEDLDCADCVLIAGSNMAFAHPVLFRRLEAAKAARPEMRIVVIDPRRTDTCELADLHLALLPGTDVALFHGILHILLWEDWIDRSFIAEHTEGFADLKELVRDYTPAAVADICGIDRADLQRCAEWIGRSPRFLSLWCMGLNQSSAGSAKNSALINLHLATGKIGRAGCGPFSLTGQPNAMGGRETGSLANLLPGHREAADPGHRAEVAHYWGVEQLPTSPGLSAIELFDAVHDGRIKALWIACTNPAQSLPDQRKIHEALARCPFVVVQEAFAGTETCQYADLLLPAASWGEKEGSVTNSERRISHVRRAVPPPGEARQDWNIVCDFARRLEGHLRPAKPGLFAFADSRSLFDEYKLLTAGRDLDLSGLSYALLDRLGPQQWPFPTGAEQGTARLYADGRFPTASGRAQLVAEPYRAAQEKRDARYPLTLNTGRLRDQWHGMSRTGTCARLFGHEEEALVHLHPEELRRRQLLDGQLVRLKSRRGALVLPVSADDSVRPGQAFLPMHWGDRFLKGLGCNVLTLPAFDPLSKQPELKHAGVQVESVELPWRLFALVETDIQARFEALRALCEVFDHASFSLAGRERPALLVSAAHHEAPGADLLERIDRQLELLDGPILAYDDPRRAIGKRVRLEDGRIVAVRLAGETLARDWLKELWLTGRADSELRRWLLAPLGAAPGRPSQGAGGKTLCSCQNVSQQTVLGGIARGLDLDGLKREFGCGTGCGSCVPEIKRLLAAPRPMAANA

SEQ ID NO: 9943 - protein, 929 aa, Mesorhizobium sp. BNC1
MANGITFTLDGKTVTAGEEETIWDVAKREGTKIPHLCHVDLPGYRPDGNCRACMVDIEGERVLAASCIRRPTAGMVVNTSTERARKSREMVFELLASNMRPVSEGPDQQSLFWQWANSMGISGNRYGSKFAQDSVPAEFDVTNPAIAVNLDACIACGACVRACREVQVNDVIGMAERGNHSVPVFDMHDPMGLSTCVTCGECVQACPTGALFEKSLMDGEGKTRVVQSFDKVVDSVCPFCGVGCQTKVAVKDNRIVQIDGRNGPANENRLCVKGRFGFDYAMSPERLTKPLIRRDDAPKTGDLDLSNVDPLTVFREASWEEALERAAGGLKRIRDEHGGAALAGFGSAKGSNEEAYLFQKFVRQGFGTNNVDHCTRLCHASSVAALMEGVGSGAVSAPFMDALKADCVIIIGARPATNHPVAATYFKQAAKRGTKLIVMDPRGQELMRHASYALRFKPGSDVAMLNALLHVIIEEKLYDEQYIQANVSGFEALKEKVRDFSPEAMAPVCGIEANVLREVARTYAKAERSMIFWGMGISQHTHGTDNSRCLIALALITGHVGRPGTGLHPLRGQNNVQGASDAGLIPMYFPDYRSVENIDTRGQYENFWGQTLDPKRGLTVVEIVDAIHDGEIRGMYIMGENPAMSDPDQSHARAALAKLEHLVVQDIFLTETAWHADVVLPASAHAEKLGTYTNTNRQVQIGRPALELPGDARQDLDLIIELASRMGLGWNYGHVSEVYNEMASVMPSLKHISWERIEREESVIYPADGPDIPGNEIVFSSGFPTTDGRGRIVPADLLPPDEVPDEEYPLVLTTGRLLEHWHTGAMTRRAGVLNAIEPYGIAAMSPYEIRRRGLSQGDVIAVETRRGTVEAILRADREVAEGMVFMPFCFNESPANKLTNPMLDPYGKIPEFKYCAARVVPSSRGEAAE

SEQ ID NO: 9944 - protein, 388 aa, Xanthomonas axonopodis pv. citri str. 306
MAGLGVWGMLAVLLVFTQLTIFAVTLYLHRSQAHRGVDFHPVIAHFFRFWTWLTTSMITREWVAIHRKHHAKVETEEDPHSPQTKGIAQVFWRGVELYREARTQRADIEQYGKGAPSDWIERHLYTPHANAGPIALLVINAVLFGLPGIALWAIQMAWIPFWAAGVVNGLGHWWGYRNFESADTSTNLTPWALWIGGEELHNNHHAFPSSARFSMRRWELDIGWVAIRGLQALGLAKVLRVAPSLDIRPNIAVPDADTLKALLSHRFQAMTDYQRNVFKPALREEAAATGAKLRELLPRRLRKGLVDDGRWLKPDARAQLQAWVAQRPRMRTLVEYRARLTALLEARSHDASERLRQLQQWCHEAEASGNAALQAYAARLKGYALSGA

SEQ ID NO: 9945 - protein, 385 aa, Magnaporthe grisea 70-15
MHVSTTYRYTDDPDKLTYWGNVQAHLAHAKEHDQPNAPYDSHVYSRETAPNTTRLEAILTSLLGGPSLSYGSGLAAFHAMLTMLNPRRIAIGGGYHGCHGVIRLMNRLTGVEQLTLAPEDLEKLQAGDVLHVETPLNPTGEARDLEHYASIAKAKGAILTVDATFAPPPLLEPFVFGTDIVMHSGTKYFGGHSDMLCGVLSINPQRKSEGWFEKLFEDRLFLGSVMGSMEGWLGVRSLRTLELRVQRQSSTTDELVAWLASATGPDPASPLGGLLRRVQHASLQPEAADPNSWLRRQMPRGFGPVFSIYLDSEDHAKRLPGKLHLFHHATSLGGVESLIEWRAMTDPNLDKALLRVSIGIEALEDLKADFVQGFRALIEEDKTRS

SEQ ID NO: 9946 - protein, 205 aa, Oryza sativa
  unsure (1)..(205): unsure at all Xaa locations
MADSHAKASISNKLSVEDLDVKDXKVLIRVDFNVPLDKETGQVKDKQRIEGALPTIKYVLDKGAQAVVLVSHLGRPDGKRVEKESLKPVADELQKLLGKDVKFLNDCVGEEVEQAVNHASNGQVLLLENLRFHLEEEGSVKDXPGYNTKADXEAVDXFRASLSKLGDVYINDAXGTAHRAHSSVVGVKLEQRAAGYFMNKELDYF

SEQ ID NO: 9947 - protein, 142 aa, Glycine max
  unsure (1)..(142): unsure at all Xaa locations
AVVNRYLAESESARQWGSQLHTFCIGLKGSPDLKAAKEVADYLGTRHHELYFTVQEGIDALEEVIYHIETYDVTTIRASTAMFLMSRKIKALGVKMVRGGEGSDEIFGGYLYFHKAHNXXEFHEETCRKIKAHHLYDCLRAQ

SEQ ID NO: 9948 - protein, 449 aa, Oceanobacillus iheyensis HTE831
MHMYQTTTLKDKIKLFIIILLPILITQVSINLMSFFDTMMSGQFSARDLAGVAIGSSLWVPILTGINGIVLSITPIIAHLIGAKNKKDIPQVIQQGIYLSFVLSIIIIVIGGIALDPILQAMSLEKEVQRIAKYYLITLGTGIVPLFLFHTIRSFMDGLGQTRSSMIIILISLPINAVLNYILIFGKFGIPAFGGIGAGIATSLTYWIISGISIFMIHRVYPFHSYKVFQKILPPTLSYWADQLKIGLPIGLAIFFETSIFSAVTLLMSEYNTNTIAAHQAAMNFASLLYMLPLSVGMALTIAVGFEVGAKRLHDAKRYTYLGIMGGLFIAIFAGIILYTFDDVVARLYNSNPEVIELTKQFIIFAIFYQLADAIGAPIQGALRGYKDVNMTLVIALISYWIIGLPTGYLLANYTALEPFGYWVGIIVGLSTGAIALLARLLFIQKKSV

SEQ ID NO: 9949 - protein, 422 aa, uncultured bacterium 439
MSKKIQAIRGMNDLLPSESNLWLALEETINQLLISYGYKYCRTPIVENTETFSRAIGEVTDIVEKEMYTWKDLSGESLTLRPEATAGIVRMMIEHNLPREGIQKVFYHGPMFRHERPQKGRYRQFHQVDVEVFGAYDAKIDAELIDITNSLWKLIGINNASLEINSLGSSETRSSYRKLLQNYFIDNKSQLDEDSLRRLTTNPLRILDSKNSEMEALIESAPKMIDHLDDESDEHFSVFKNYLDCLEIPYSINPRLVRGLDYYNRTVFEWISNDLGAQGTICGGGRYDGLVEKMGGNPTPAIGFAIGIERLILLIKDQTNKLQKNKPHLYFTALGERAQMASMKLSRDIHSALPDITITNDMSGGSLKNQMKKANKSKADFALILGEEELSKNQLSIKPLKGQGDQQLIKLEGIIQRLQEIL

SEQ ID NO: 9950 - protein, 489 aa, Nicotiana tabacum
SKFRPSSAYDSPFLTTNAGGPVYNNVSSLTVGPRGPVLLEDYHLIEKLATFDRERIPERVVHARGASAKGFFEVTHDISHLTCADFLRAPGVQTPVICRFSTVVHERGSPESLRDIRGFAVKFYTREGNFDLVGNNVPVFFNRDAKSFPDTIRALKPNPKSHIQEYWRILDFFSFLPESLHTFAWFFDDVCLPTDYRHMEGYGVHAYQLINKAGKAHYVKFHWKPTCGVKCMSEEEAIRVGGTNHSHATKDLYDSIAAGNYPEWKLFIQIMDTEDVDKFDFDPLDVTKTWPEDILPLMPVGRLVLNRNIDNFFAENEQLAFNPGHIVPGLYYSEDKLLQTRIFAYADTQRHRIGPNYMQLPVNAPKCAHHNNHRDGAMNFMHRDEEVDYLPSRFDPCRHAEQYPIPSRVLTGRREMCVIEKENNFKQAGERYRSWEPDRQDRYVSKWVEHLSDPRVTYEIRSIWICSLSQADKSCGQKVASRLTLKPTM

SEQ ID NO: 9951 - protein, 908 aa, Pseudomonas aeruginosa UCBPP-PA14
MSTDSPLRTTASTCCYCGVGCGVLIEHDGERILGVQGDPRHPANFGRLCSKGASLHLTGDLQARALYPQLRLGKQLARARSDWESALEHAAGRFAETIREHGPDSVAFYISGQLLTEDYYAFNKLARALVGTNNIDSNSRLCMSSAVVGYKRSLGADAPPCSYEDLDCADCVLIAGSNMAFAHPVLFRRLEAAKAARPEMRIVVIDPRRTDTCELADLHLALLPGTDVALFHGILHILLWEDWIDRSFIAEHTEGFADLKELVRDYTPAAVADICGIDRADLQRCAEWIGRSPRFLSLWCMGLNQSSAGSAKNSALINLHLATGKIGRAGCGPFSLTGQPNAMGGRETGSLATLLPGHREAADPGHRAEVAHYWGVEQLPTSPGLSAIELFDAVHDGRIKALWIACTNPAQSLPDQRKIHEALARCPFVVVQEAFAGTETCQYADLLLPAASWGEKEGSVTNSERRVSHVRRAVPPPGEARQDWNIVCDFARRLEGHLRPAKPGLFAFADSRSLFDEYKLLTAGRDLDLSGLSYALLDRLGPQQWPFPSGAEHGTARLYADGRFPTASGRAQLVAEPYRAAQEKRDARYPLTLNTGRLRDQWHGMSRTGTCARLFGHEEEALVHLHPEELRRRQLRDGQLVRLKSRRGALILPVSADDSVRPGQAFLPMHWGDRFLKGLGCNVLTLPAFDPLSKQPELKHAGVQVESVELPWRLFALVETDIQARFEALRALCEVFDHASFSLAGRERPALLVSAAHHEAPGADLLERIDRQLELLDGPILAYDDPRRAIGKRVRLEDGRIVAVRLAGETLARDWLKELWLTGRADSELRRWLLAPLGAAPGRPSQGAGGKTLCSCQNVSQQTVLGGIARGLDLDGLKREFGCGTGCGSCVPEIKRLLAAPRPMAANA

SEQ ID NO: 9952 - protein, 473 aa, Bdellovibrio bacteriovorus HD100
MQNFDVVVIGAGPGGYVAAIRSAQLGFKTAVIEREFLGGVCLNVGCIPSKAMITATHLLHKAQHNFKEMGLNIKGGIDVDMKQLVKWKQSVSDKMSGGVNQLLKGYGVTIIKGDAEFKSSKEISVKSSAGTESVQAKYFVVATGSRPIEIPGFKFDEKDICSSTGALAFDTIPKRVAVIGGGYIGLEISSYLRKLGTEVTVIEAQSALLAGVVDPDCAQIVTRKLTKAGVNVLYGAKAKGQKKVKDGYEVTVEINGKDEVVKCDKILVTVGRRPNGDQANLKAAGIQVDERGFVKVDAQRRTNVSNIFAIGDIAGQPMLAHKASHEGVLVAEVIAGHNRVYDAKTVPAVVFTDPEIAAAGMTEAEAKAKGHTDLLISKFPFAANGRAVSMMETDGFVKMIADKKTHVLLGVHIVGPEASNLISEAVLAIEMGARIEDLALSIHPHPTLGETMMEAAEATLGHAIHIIQKPLKA

SEQ ID NO: 9953 - protein, 296 aa, Bacillus cereus ATCC 14579
MMKKVRKAIIPAAGLGTRFLPATKAMPKEMLPIVDKPTIQYIVEEAVKSGIEDIIIVTGKTKRSIEDHFDNAFELEQNLLEKKKYELLEKVQASSKMVDIHYIRQKEPKGLGHAVWCARKFIGDEPFAVLLGDDIVQAEKPCLRQLMDEYEKTLSSVIGVQTVPESETHRYGIIDPLEQEGRRYQVRNFVEKPAQGTAPSNLAIMGRYILTPEIFMFLEQQHVGAGGEIQLTDAIQSLNEIQRVFAYDFEGKRYDVGEKLGFVQTTIEMALQHPELRDDMVAMMKKILEEQANQES

SEQ ID NO: 9954 - protein, 113 aa, Triticum aestivum
  unsure (1)..(113): unsure at all Xaa locations
MAPTVMXSSXTSVAPFQGLXXTAGLPVXRRSNGASLXSVSNGGRIRCMXVWPXEGITXFXTLSXLPXLXTXALLKXVDXXSAPRWXXCLEFSXVGFIFRXHXASPXYXXGRYW

SEQ ID NO: 9955 - protein, 543 aa, Bdellovibrio bacteriovorus HD100
MNNERNSRNMATDVKLPELGEGVTEGELVKWLVKPGDAVKADQAIAEVLTDKATVEVPSPVAGVVKDLKFKSGDVVKVGATMITLDGAGAAKPAAAQPAAAAPAPAASTPAPAAGGGKAQDVKLPELGEGVTEGELVKWLVKPGDSVKADQAIAEVLTDKATVEVPTPVAGVVKELKFKSGDVVKVGSTMIILEGAGGAAAPKAAPAAAAAPAPAAAPATKAAAPVATASSDIFPPVADSKVLATPATRRLAREMGVDINSLTGTGLAGRVTREDVMSSGGGAAPAAAKAAPAAASMTIPKPAYQGPAGAAEERVPMIGIRKKIAENMQRSKHVIPHFTIMDEAKVDAMVALRESLKEHAEKNGTKITYLPIIMKALIATIREFPMFNASIDDAAGEIVYKKYFNLGFAADTPNGLVVPVIKNADQKSILEISKEILDLSKRARDGKLKPDEMKGATITVTNIGSIGGTYATPVINHPEVAILGMYKIDEKVVLKNGQVSAIKVMNYTMTADHRLIDGAVAARFLAAFIGRIENPGKLLVELI

SEQ ID NO: 9956 - protein, 428 aa, Trichodesmium erythraeum IMS101
METAIESIQAREILDSRGRPTVEAEVHLVNGSMGLAQVPSGASTGSFEAHELRDGDKGRYSGKGVLTAVKNVEEQITPNLVKINALNQNLVDSKMIEIDGSPNKSNLGANAILAVSLATAKAAANSVGMPLYRYLGGPQASLLPVPLMNVINGGAHAANNVDIQEFMIVPVGATSFKEALRWGAEVFATLSGVLKDKGLLGGVGDEGGYAPNLGSNQEALDILIAAIEKAGYKPGEQVALALDVAASEFYKDGNYIYDGATHSPSELIDYLASLVDQYPIVSIEDGLHEEDWESWVQLTQKLGSKVQLVGDDLFVTNGSRLQKGIDMAAGNSILIKLNQIGSLSETLETIDLATRNSYRSVISHRSGETEDTTIADLAVGTRAGQIKTGSLCRSERVAKYNRLLRIEDELGDRAVYAGVIGLGPKSRS

SEQ ID NO: 9957 - protein, 415 aa, GIBBERELLA ZEAE PH-1
MGFTKPPVQALKSANKLKRKELYVQYKKHQNKEKHEERHNRRREEAKDPELKAARLAKRKPATIDSKRVWDDVDDDSLGVQVDLERLKKRRIEEAEAAEQAAHEAAMRAEEELDEDDDVDSMLASDEEMDEERQAALEKKRERRAQRDTSVAPSTTSTNLDLTPTSLALKFPSLFTDVPAPEPKVLVTTSLNSTLHEQANVLCEFFPNSSYVPRSAHRYGHKYSLREICKYATNREYTAIILLKEDSKKPTGLTVVHLPSGPTFHFSITNWIEGKKLPGHGNPTNHYPELLLNNFKTPLGLLTAKLFMTLFPPKPEFQGRQVTTLHNQRDYIFVRRHRYVFREKRQTEKSIVGADGKEVKGVEGIRAGLQELGPRFTLKLRRVDKGIGRAGSDGDDATQWEWKAKMEKDRKRFNL

SEQ ID NO: 9958 - protein, 386 aa, Saccharomyces cerevisiae
MSAATVGKPIKCIAAVAYDAKKPLSVEEITVDAPKAHEVRIKIEYTAVCHTDAYTLSGSDPEGLFPCVLGHEGAGIVESVGDDVITVKPGDHVIALYTAECGKCKFCTSGKTNLCGAVRATQGKGVMPDGTTRFHNAKGEDIYHFMGCSTFSEYTVVADVSVVAIDPKAPLDAACLLGCGVTTGFGAALKTANVQKGDTVAVFGCGTVGLSVIQGAKLRGASKIIAIDINNKKKQYCSQFGATDFVNPKEDLAKDQTIVEKLIEMTDGGLDFTFDCTGNTKIMRDALEACHKGWGQSIIIGVAAAGEEISTRPFQLVTGRVWKGSAFGGIKGRSEMGGLIKDYQKGALKVEEFITHRRPFKEINQAFEDLHNGDCLRTVLKSDEIK

SEQ ID NO: 9959 - protein, 623 aa, Streptomyces collinus
MSGIAGWVDFERDLTPEAPTVRAMAAALAHRGPDGFGEWIEGHAALAHRRLSLIGSEHAGQPAIVESEAGSPVAVLTLDGSVTNAVELRRELAAKGHRFTGDGDAEVALHAYLEWGAAFPERLEGLFALAVWDVRRQELLLVRDRLGVKPLCYFLTPSGVVFGSEPKALLAHPAVRPVVDADGLRELFAHSRKPGTGVFRGTREVLPGHTMTVRAPGTGHRRYWSLPARPHTDSLETTVATVRRLLSEAVATHLRADVPVGAMLSGGIDSSALTALAAHRRRAEGAGLRSFSVNFSGYAENFEPHPTMRATPDAPYAALAAEHIGTEHTEILLDTAALADPGTHAAALRSQDAPSPLGDMDVSLLLFFEALRGAGITAVLSGETADEVFNGYFWAYDPGHSNSTTFPWVSFERGHDAAAGGLGCSLVDRTLRKELDFMDYADQHYRDALTEVPQVAGESPAERRAREVTYLALTRWAPTHLDRADRMSMAHGVQLRPPFCDRALVEYVYNVPAELKRVNGQEKSLLRAAVADLLPERVLNRPKSAYPTVQEAAYGEFVRHRFEDVAADRTAPVAPLLDAEATRVALGAAAAPSGAFAWVERASMEMVLQLNTWLSEYGVELRV

SEQ ID NO: 9960 - protein, 973 aa, Mesorhizobium sp. BNC1
MLTKRKGGQTNRTGLQAMMGSAASAPMDRRTFLRRSGLVAGGVAALGTFQLGTVRKAAAIAPPQPGVPIELKKSICTHCAVGCTVTAEVQNGVWTGQEPSWDSPINRGSHCAKGASVRELVHSDRRLKYPMRLSGGQWERVSWEEAINGIGDKLLEIREASGPESVYWMGSAKFSNEGTYLFRKLAALWGTNNQDHQARICHSTTVAGVANTWGYGAMTNSFNDIRNSKTMMIMGGNPAEAHPIAMQHLLEGKELNNANLIVVDPRFTRTAAHATEYVRFRSGTDIALIWGMLWHIFENGWEDKEFIAQRVYGMDEIRKEVAKYTPDEVELITGVPEEQVKRVAEMFATQRPSTMIWCMGQTHHTVGTANTRASCILCLATGNVGKPGTGANIFRGHDNVQGATDIGLDVVTLPFYYGLTEGAWKHWARVWEIPYEDLVGQFSSKELMETPGIPLTRWFDSVSLPKEDVQQPDVMRAMFVQGHASNSIARIPESMKGLAGLELLVIADPHPTTWASLAVQAGRQDNTYLLPVCTQFETSGSRVASNRAIQWGEQIVKPSFEQKDDYQVLYLLSQKLGLSDWMFKNIAVEGDRPVPEDVLREMNRGSWSTGYCGQSPERLKAHMRNQHKFDLVTMRAPKEDPEVGGDYYGLPWPCWGKPELRHPGTANLYSTGLHVMDGGSPFRARFGVERNGETLLAEGSYTEGSELTDGYPEFTMAVLQKLGWDQDLTPEERSIIEQIGADMGDVGKVSWSTDLSGGIQRVALSHGCHPYGNGKARAVAWNLPDPVPIHREPIYTPKVDLVAKYPTYPDAKQFRLPNIGFSVQKAAVDNGIANSFPIILTSGRLVEYEGGGEETRSNRWLAELQQEMFVEINPADAAERGISDGAWVWVNGAENNAKARVRALVTERVGKGVAFMPFHFGGWFQGQDLRANYPQGTDPYVLGESANTITTYGYDPVTGMQEPKVTLCQIAAA

SEQ ID NO: 9961 - protein, 550 aa, Vibrio cholerae O1 biovar eltor str. N16961
MLKNINPTQTQAWKALTAHFESAQDMDLKALFAQDSERFAKYSARFGQDILVDYSKNLVNAETMQHLFALAKETDLQSAITAMFKGEAINQTEDRAVLHTALRNRSNSPVLVNGEDVMPAVNAVLAKMKAFSERVIGGEWKGFTGKAITDVVNIGIGGSDLGPYMVTEALVPYKNHLTMHFVSNVDGTHMAETLKNVDPETTLFLVASKTFTTQETMTNAHTARDWFLKAAGDEAHVAKHFAALSTNGKAVAEFGIDTDNMFEFWDWVGGRYSLWSAIGLSIILSIGYDNFVELLAGAHEMDQHFVNTPFESNIPVILALIGIWYNNFHGAESEAILPYDQYLHRFAAYFQQGNMESNGKYVDRNGNPVTYQTGPIIWGEPGTNGQHAFYQLIHQGTKLIPCDFIAPAVSHNLVGDHHQKLMSNFFAQTEALAFGKSAQAVQAELEKAGKSAAEIAALVPFKVFEGNRPTNSILVKQITPRTLGNLIAMYEHKIFVQGVIWNIFSFDQWGVELGKQLANQILPELADSAAVTSHDSSTNGLINAFKAFRA

SEQ ID NO: 9962 - protein, 508 aa, Glycine max
  unsure (1)..(508): unsure at all Xaa locations
MASNDSDSQMKIVHGDAGYILEDVPHFADYIPNLPTYPNPLRSNPAYSVVKQYFVHMDDTVPQKVVVHKDSPRGVHFRRAGPRQKVYFKSDEVHACIVTCGGLCPGLNTVIREIVCGLSYMYGVNKVLGIDGGYRGFYSKNTITLTPKVVNDIHKRGGTILGTSRGGHDTGKIVDSIQDRGINQVYIIGGDGTQRGATVIYEEVRRRGLKVAIAGIPKTIDNDIPVIDKSFGFDTAVXEEAQRAINAAHVEAESIENGIGVVKLMGRYSGFIAMYATLASRDVDCCLIPESPFYLEGKGGLFEFIEKRLKENGHMVIVIAEGAGQDLLTESMQAMDQKDASGNKLLQDVGLWISHKIKDHFARKDKMPINLKYIDPTYMIRAIPSNASDNVYCTLLAQSAVHGAMAGYTGFTVGLVNGRQTYIPFIRINERQNKVVITDRMWARLLSSTNQPSFLSPKDLEEAKKAESPTQLLEENNCNDVGDAEKEQPPKDEQESGNHTDNGIKTQN

SEQ ID NO: 9963 - protein, 177 aa, Triticum aestivum
  unsure (1)..(177): unsure at all Xaa locations
MAPTVMASSATSVAPFQGLKSTAGPPXSARRSNGASLGSVSNGGRIRCMQVWPIEGIKKFETLSYLXPPLSTEALLKQVDYLIRSKWVPCLEFSKVGFIFREHNASPGYYDGRYWTMWKLPMFGCTDATQVINEVEEVKKEYPDAYVRIIGFDNMRQVQCVSFIAFKPPGCEESGKA

SEQ ID NO: 9964 - protein, 472 aa, Vibrio vulnificus YJ016
MNMSQNVYQFIDVQRVDPAKKPLQIRKIEFVEIYEPFTKQQATAQADRCLDCGNPYCEWKCPVHNYIPQWLKLANEGRILEAVELSHQTNSLPEVCGRVCPQDRLCEGSCTLNDDFGAVTIGNIEKYITDKAFEMGWKPDMSKVEWTDKKVAIIGAGPAGLAAADILVRNGVKPVVFDRYPEIGGLLTFGIPSFKLEKGVMENRRRIFSEMGVEFRMNVEVGKDVQMQELLEEYDAVFLGVGTYKYMRAGLENEDASGVYDALPFLISNTYKVMGLEYDQPFIDMAGKNVVVLGGGDTAMDCVRTSIRQGAANVVCAYRRDEENMPGSRREVKNAKEEGVNFMFNLQPLSIDVDTRGQVTGVKVVQTALGEPDEAGRRRPEPVAGSEHVLPADVVIMAFGFQPHQMSWLEPYGVELDQWGRIKAAAKQTYQFQTSNEKIFAGGDAVRGSDLVVTAIDEGRKAAEGILDYLEL

SEQ ID NO: 9965 - protein, 142 aa, Oryza sativa
MAEDDYNDMDMGYEDEPPEPEIEEGAEEEPENNNEDAVDDVVGAEDDKEQEKTARPRKTSKYMTKYERARILGTRALQISMNAPVMVELEGETDPLEIAMKELRARKIPFTIRRYLPDGSYEDWGVDELIVEDSWKRQVGGG

SEQ ID NO: 9966 - protein, 574 aa, Bacillus cereus ATCC 14579
MNWKQEFSRWLSYAQLDAELKEQLENMKQDEKKIEDSFYKNLEFGTGGMRGELGAGTNRLNVYTVRKATKGLASFIEKLGEEAKKRGVVVAYDSRHKSPEFAMEVAATLGARGITTYVFESLRPTPVLSFAVRHLHTVSGIVLTASHNPPEYNGYKVYGEDGGQLPPKEADELISYVNAVEDELTVEVADVEQLKADGLLHIIGQEVDDAYAAELNNVIINKEMVQKVGKDLKIVFTPLHGTSNISVRRGLKEVGFTDVTVVKEQELPDPNFSTVKSPNPEEHAAFEYAIRDGEKVGADVLIATDPDADRLGVAVRNHNGEFQVLTGNQTGALMLDYLLSQKKENGTLPENGVVLKTIVTSEIGRTIAKAYGLDTIDTLTGFKFIGEKIRQYEESGQYEFQFGYEESYGYLIRPFCRDKDAVQSVLFACEVAAYYKSQGKTLYDGLLEVFEKYGFFREDLVSLTLKGKDGAEKIQEMMATFRENPPKEVAGLTVVAVEDYKASIVTSLQDGHKEEIHLPKSNVLKYQLEDGSWFCLRPSGTEPKIKFYFGVKDSSLQNSEQKLLTIKEDIMNRL

SEQ ID NO: 9967 - protein, 553 aa, ASPERGILLUS NIDULANS FGSC A4
MTDSKVSSRDQGHDAVIQRRSRAVAEQLAEQESWLEKTLKPKKVSARYPFKGKPLLYATCAFGSLGDALFGYNSGIMSGLLVNPVFVSRFFKDYGGGDGTTSAVNSSITGISVACLQASAAVGALIAGRLGDIVGRKKCVRLGGFIYFFSAFIQMFAPGFATFLAGRTIQGLGVGFLSMTVPIIQTEIASPHSRGLMVGIEYTILIAGYMLSCWVDYGFNFMLPSEMSWKGPFIVQIGLSFILLAMSFFLPETPRWLAKNGFMEESLQTVADLHANGDTQAEHVQQVFTEIQEAVIYETNLGKSTWTEMFTRYRKRTIVGITVQMFAQLNGINIISFYLPSTLASAGFDNRKSLLFTAANAIPYTAATIATWWLADKWGRKPLLILGGLGMAVLLGIVCAFTEASLPVQTKADGQYAFVMLYNIVYGFTWGPMPWLLPAEIFPLRGRSKGMALATTSNWVFNFIIGMVSPDAFSGIHGYFYLIIAGFCLFSAGLVYFYYVETANSSLEEIAALFGDRAFEDEAVVGGHIDECDIKLYDVLCTGSLNWASEMPS

SEQ ID NO: 9968 - protein, 373 aa, ASPERGILLUS NIDULANS FGSC A4
MTIPLYDQLLSHQAVNEAFVLYPGGSFGYEKRDIPTLQAERDVLVRVVATGLCGSDVHYWQHGRIGRYVVEDPIVLGHESSGIVVQCGSQSGLTVGDRVVLEPGIACNTCHFCRAGRYNLCREMRFAATPPYNGTLATYYRVPAECCYKLPSHVSLRDGALIEPLSVAVHSCRLAGDMQEKSVVVFGAGPVGLLCAGVARAFGASTVVVVDVVMSRLQSAVKYGATHTHQATSESAEENAIAILGTAGLGLGADIVLDATGAEPCMNSGIHALAPGGTFVQVGLGRPNPSLPVGQICDKEIVFKGSFRYGPGDYKTAIGLVSSHRIRLEGLVTHEFSFSQAEEAFHNVASRAGVKSVIYGPGVDEHVARATLS

SEQ ID NO: 9969 - protein, 251 aa, Triticum aestivum
MATQTMKAVNYQGPYKVTVEDVELPKLEHPDDVIVKVTTAAICGSDLHMYEGRTAAQPGITFGHENMGIVEQLGEGVTLLKKGDRVVMPFNVADGRCRNCEEGKTAFCTGVNPGFAGGAYGYVAMGPYRGGQAQYIRVPYADFNALKLPAGKEHEADFILLADIFPTGWHGVEISGFRSGESVAVFGAGPVGLMAAYSAVLRGASRVFVVDRVPERLQAAEKIGCTPIDFSQGDAVDLIIRPMGELIDLPM

SEQ ID NO: 9970 - protein, 892 aa, Caulobacter crescentus CB15
MADGSAALTATRTACPYCGVGCGVIGATAAGARAVAISGDEAHPANHGRLCSKGTALGATVSLAGRLLEPTIQGRSASWDEATALVARRFRETIARHGPDSVAFYVSGQLLTEDYYVANKLMKGFIGSGNIDTNSRLCMASAVVAHKQAFGADLVPGCYEDLDLANLVVFSGHNAAWTHPVLFRRMEAAKARGQKHVVIDPRRTDTAEGADLHLALAPQSDVRLWNGLLADLIRRGAVDMDFLRDHVDGYAAVITSLAEDDQSPAAVAADCGLALADLQTFFDLFAAHPRTVSLFSMGANQSAQGVAKGLAIINAHLATGRIGKPGACPFSITGQPNAMGGRETGGMANTLAGHMDFSPEERDRVARFWGAPNTARAPGLKAIDMFEAVRDGRIKALWVMATNPAVSLPASGAVREALERCPFVVVSDCVETDTTAFADVKLPALAWGEKDGTVTNSERRISRQRTLFPPPGQARADWRIIAEVARAMGFDGFGWPHAASVFREWARLTAYENKGRLLNLEGLTRLDPQAYDALEPVQWPVDTEGRGRARLFEDGRFQTANGRARLVPVRPRGPAEATSDKFPMALNTGRIRDQWHTMTRTGLAPDLCRHAPEPYVEVHPDDARAVGLTEGALARVMTTRAEAVAVAKLSDRQRRGSLFMPMHWTDAFAPAGRANALVAPMTDPSSGQPEFKHTPARIGAYRETWRGFFLAREPALIVDPGLVWRRIPRDACHQHEFAGRGDRAQRATLRKRLVRALTGEIVAYEDAATGALREAWIRDDRLVAVLYMTEAGRLPPRDWLADLFAAPLTPETRATLLHGFPPGAPVDKGPMVCACLKVGGKAIEAAIIGGASTADAVGAATGAGTNCGSCRPEISRMIRAFTDAKQETADVL

SEQ ID NO: 9971 - protein, 56 aa, Glycine max
MLRQFGGPLQLVDIGSLSRNCGIKCTVDGMHYDGVVYEAGVQILLNALLIESHQRL

SEQ ID NO: 9972 - protein, 601 aa, Ustilago maydis 521
MTRSNTDGSMTPSKQEGNLVSATHPPLAKRRFGSTSLTEDLQRHWRVYLLGICASFGGLLFGWDTGLIGGVLNMAAFQNDFGLKNNPSKLAALKGNIVSVLQAGCFFGAASSFYLPHRFGRRNAMLISAAVFLVGSIIQTTCRLHGQSATSALNQLYVGRVIGGFGVGLASSVVPTYLSECAPRSIRGRLAGMYQLLIVTGICIAYFVNYGMVQNYPDQHSSAMWQVPFALQCLPGFLFVVTLFFQPESPRWLVEQGRSEEAHRALARINRTPIDDPSVVAILQEIQNDLQGKQGLSIRQQVRMAFAERVTTYRVFTGALLMFFQQFTGTNSINYYSPQIFASLGVTGQSSGLLATGVYGVVKIVTTGLFMVVAIEQLGRKWCLITGGIVQVFCLFWIAIYQAVRPSGTPVDGVGYLTIAMIYLFVVGYGLGWSSVTWAVSAEIAPNQLRALAMSAATMSQWFFNFVIALITPRALEHIKFGTFILFAVVTSVAVLWAAFFLPETSGVSLELMHRVFQGNIITRSIQDLSPKKRKAFRDRLMAEADGTIDQGTNPGVNQEQTASADVATLDRVPSKLPKGGEDGILNTSDAVSSDNDHGKR

SEQ ID NO: 9973 - protein, 321 aa, Parasitella parasitica
MAVDYLTLDRTGDKMPLRGFGCWKIEKKDAENTIYQAIKIGYRLFDGACDYGNEVEVGRGINKAIKEGLVKREELFIVTKLWNTFHSKQHVRTAFDRQLKDWGLEYFDLYLIHFPIPLQYVDPAVSYPPEWYVPHADKLNFERSPIHECWAEMEKLVQAKLTRNIGVANFNCQAILDLLSYSKIKPAVLQIEIHPLLPQERLVKWVQEQGIQVTAYSSFGPTSYVDLCESGKTYSSLLANADVKSIANKHNVNTGQILLRYALDRNIAVIPKSVHEDRMKSNLDILNIQLDQDDRKILNSLKTNQRFNDPMIFGFGLPLFD

SEQ ID NO: 9974 - protein, 288 aa, Staphylococcus aureus subsp. aureus Mu50
MKKIKKAIIPAAGLGTRFLPATKAMPKEMLPILDKPTIQYIVEEAARAGIEDIIIVTGRHKRAIEDHFDSQKELEMVLKEKGKSELLEKVQYSTELANIFYVRQKEQKGLGHAISSARQFIGNEPFAVLLGDDIVESEVPAVKQLIDVYEETGHSVIGVQEVPEADTHRYGIIDPLTKNGRQYEVKKFVEKPAQGTAPSNLAIMGRYVLTPEIFDYLKTQKEGAGNEIQLTDAIERMNNDNQVYAYDFEGERYDVGEKLGFVKTTIEYALKDDSMREELTRFIKALGL

SEQ ID NO: 9975 - protein, 71 aa, Zea mays
MGGGMEVHKNRWIEEWNAGRENLEFNFRWTRRSLAVVGLFGLAVPILVYKGIVREFHMQDEDAGRPYRKFL

SEQ ID NO: 9976 - protein, 405 aa, Streptococcus mutans UA159
MMKEFNKSAKLEHVAYDIRGPVLEEADRMIANGEKILRLNTGNPAAFGLTAPDEVIRDLIMNARESEGYSDSKGIFSARKAIMQYCQLKNIPDVDVDDIYIGNGVSEMITMSMQGLLDDGDEVLVPMPDYPLWTAAVSLAGGQAVHYVCDESSNWYPDIDNIKSKITSNTKALVVINPNNPTGALYPKDVLEDIVEVARQNDLIIFADEIYDRLVMDGGEHVAIASLAPDLFCVSMNGLSKSHRIAGFRVGWMVLSGPKKHVKDYIEGLNMLSNMRLCSNVLAQQVIQTSLGGVQSIDELLLPGGRIYEQRNFIYKAMNEIPGITAVKPQAGLYIFPKIDRNMYRIDDDEQFVLNFLKQEKILLVHGRGFNWMEPDHFRIVYLPRVEELSKIQEKMTRFLGQYRK

SEQ ID NO: 9977 - protein, 346 aa, Mycobacterium tuberculosis H37Rv
MVSPATTATMSAWQVRRPGPMDTGPLERVTTRVPRPAPSELLVAVHACGVCRTDLHVTEGDLPVHRERVIPGHEVVGEVIEVGSAVGAAAGGEFDRGDRVGIAWLRHTCGVCKYCRRGSENLCPQSRYTGWDADGGYAEFTTVPAAFAHHLPSGYSDSELAPLLCAGIIGYRSLLRTELPPGGRLGLYGFGGSAHITAQVALAQGAEIHVMTRGARARKLALQLGAASAQDAADRPPVPLDAAILFAPVGDLVLPALEALDRGGILAIAGIHLTDIPDLNYQQHLFQERQIRSVTSNTRADARAFFDFAAQHHIEVTTPEYPLGQADRALGDLSAGRIAGAAVLLI

SEQ ID NO: 9978 - protein, 374 aa, Zea mays
  unsure (1)..(374): unsure at all Xaa locations
GSSSRATPPPPATHAHRHSQREIREKRGEGRRRKKKKQQQLQLQGSRHGASSRKQAKAKAQREHALQDHRQETVEDGVERAYGRGPGGAGESQFPQGGHSQPLRAPALQPVPVHACLLHRGRRPAAVVGVVGDSRIRKPLLAMMEAAFSSIDLESQSGAHPRMGSEDRLXVDDLSFHPVGQATIEDAASLARQVASDIACIAAVPVFLYAAAHPAGKSVGAVRRELGYYRPNYRGNQWSGSVLPNVLPVKPDVGPAHVVSHKRGATTVGVTPWIENYNVPVLCKDVATVRRITRGVTGRSGGLPTVQALALFHGDDCTEIACLLDPDHASAYQVQTVVEQIAGDQGLEVEQGYYTDITKDEALDKYLKIACADD

SEQ ID NO: 9979 - protein, 434 aa, Cytophaga hutchinsonii
MRNKILSDGAKELSYEIREIVKKADLINKNGQSIVFENIGDPIQKNNVVPQWIRETISNLTLDNKSYSYSPSKGILKTRQFLAELNNKKAGAQITADDILFFNGLGDAIAKVYQFISRSSRVIGPSPAYSTHSSAEAAHASQDPITYKLDPNNHWYPDLDDLYNKVKYNPNIIGILIINPDNPTGMVYPLETLKRIVEIAREFNLFLLSDEIYLNITYNGARAYSLAEVIEDVPGIAMKGISKEFPWPGSRCGWMEYYNRGKDQDFDKFCSALDNAKMIEVCSTTLPQLAIPVIMSDPRYLPYREELNSKIGKRSKIIAGILGQIPELMFNETYGAFYNTIVFKDGVLNDKQTLPIENAANKALVEKWISEPNVDLDKRFVYYLLAAKGICVVPISSFCSDLKGFRVTLLEENEELLEQTFTSIRDAIRLYLKS

SEQ ID NO: 9980 - protein, 302 aa, Escherichia coli
MIKKIGVLTSGGDAPGMNAAIRGVVRSALTEGLEVMGIYDGYLGLYEDRMVQLDRYSVSDMINRGGTFLGSARFPEFRDENIRAVAIENLKKRGIDALVVIGGDGSYMGAMRLTEMGFPCIGLPGTIDNDIKGTDYTIGFFTALSTVVEAIDRLRDTSSSHQRISVVEVMGRYCGDLTLAAAIAGGCEFVVVPEVEFSREDLVNEIKAGIAKGKKHAIVAITEHMCDVDELAHFIEKETGRETRATVLGHIQRGGSPVPYDRILASRMGAYAIDLLLAGYGGRCVGIQNEQLVHHDIIDAIE

SEQ ID NO: 9981 - protein, 305 aa, Escherichia coli
MIKKIGVLTSGGDAPGMNAAIRGVVRSALTEGLEVMGIYDGYLGLYEDRMVQLDRYSVSDMINRGGTFLGSARFPEFRDENIRAVAIENLKKRGIDALVVIGGDGSYMGAMRLTEMGFPCIGLPGTIDNDIKGTDYTIGFFTALSTVVEAIDRLRDTSSSHQRISVVEVMGRYCGDLTLAAAIAGGCEFVVVPEVEFSREDLVNEIKAGIAKGKKHAIVAITEHMCDVDELAHFIEKETGRETRATVLGHIQRGGSPVPYDRILASRMGAYAIDLLLAGYGGRCVGIQNEQLVHHDIIDAIENMK

SEQ ID NO: 9982 - protein, 514 aa, Escherichia coli
MKIRSQVGMVLNLDKCIGCHTCSVTCKNVWTGREGMEYAWFNNVETKPGIGYPKNWEDQEEWQGGWVRDVNGKIRPRLGNKMGVITKIFANPVVPQIDDYYEPFTFDYEHLHSAPEGKHIPTARPRSLIDGKRMDKVIWGPNWEELLGGEFEKRARDRNFEAMQKEMYGQFENTFMMYLPRLCEHCLNPSCVATCPSGAIYKREEDGIVLIDQDKCRGWRLCISGCPYKKIYFNWKSGKSEKCIFCYPRIESGQPTVCSETCVGRIRYLGVLLYDADRIEEAASTEREVDLYERQCEVFLDPHDPSVIEEALKQGIPQNVIDAAHGSPVYKMAMDWKLALPLHPEYRTLPMVWYVPPLSPIQSYADAGGLPKSEGVLPAIESLRIPVQYLANMLSAGDTGPVLRALKRMMAMRHYMRSQTVEGVTDTRAIDEVGLSVAQVEEMYRYLAIANYEDRFVIPTSHREMAGDAFAERNGCGFTFGDGCHGSDSKFNLFNSSRIDAINITEVRDKAEGE

SEQ ID NO: 9983 - protein, 418 aa, Medicago sativa
MASQNITPSPTASSDSVFAHLVRAPEDPILGVTVAYNKDPSPIKLNLGVGAYRTEEGKPLVLDVVRRVERQLLNDMSRNKEYIPIVGLADFNKLSAKLIFGADSPAIQENRVTTVQGLSGTGSLRVGGEFLAKHYHQRIIYLPTPTWGNHTKVFNLAGLTVKTYRYYAPATRGLDFQGLLEDLGSAPSGSVVLLHACAHNPTGVDPTLEQWEQIRQLIRSKSLLPFFDSAYQGFASGSLDADAQPVRLFVADGGELLVAQSYAKNMGLYGERVGALSIVSKSADVSSRVESQLKLVIRPMYSSPPIHGASIVAAILKDRDLYNDWTIELKAMADRIINMRQQLFDALRARGTPGDWSHIIKQIGMFTFTGLNPEQVSILTKEYHIYLTSDGRISMAGLSSKTVPHLAHAIHAVVTRVA

SEQ ID NO: 9984 - protein, 220 aa, Helicobacter pylori
SLSLDYSKNRLNDTTLKLLFELANDCSLKEKIEAMFKGEKINTTEKRAVLHTALRSLNDTEILLDNMEVLKSVRSVLKRMRAFSDSVRSGKRLGYTNQVITDIVNIGIGGSDLGALMVCTALKRYAHPRLKMHFVSNVDGTQILDVLEKLSPASTLFIVASKTFSTQETLTNALTARKWFVERSGDEKHIAKHFVAVSTNKEAVQQFGIDEHNMFEFWDF

SEQ ID NO: 9985 - protein, 539 aa, Zea mays
MSAAQLLRHSRKLRSLQNAVGCENFSFVRHFSSGSGSFIARENGIGKRTRGTRFSQHNQPAKQLETFSAGVNGSCTWRIASNSLTPSAASWLSGSFSCGQVVSARPFSSSADLPPHQEIGMPSLSPTMTEGNIAKWLKKEGDKVSPGEVLCEVETDKATVEMECMEEGYLAKIIHGDGAKEIKVGEVIAITVEEEGDIEKFKDYKPSSSAEPVAPAEPKAEPEPSQPKVEEKKLTQAPEVKAPKIEEASQSGDRIFASPLARKLAEDNNVPLSSVKGTGPDGRILKADIEDYLAKGGLREAFADPGLGYVDIPNAQIRKVTANRLLASKQTIPHYYLTVDARVDKLVQLRGELNPLQDASGGKKISINDLVIKAAALALRKVPQCNSSWMNDFIRQYHNVNINVAVQTEHGLFVPVIRDADKKGLGAIAEEVKQLAQKARDNSLKPADYEGGTFTVSNLGGPFGIKQFCAIINPPQSAILAIGSAEKRVIPGSADGQFEFGSFMSATLSCDHRVIDGAIGAEFLKAFKGYIENPTSMLL

SEQ ID NO: 9986 - protein, 175 aa, Glycine max
  unsure (1)..(175): unsure at all Xaa locations
MASSMISSPAVTTVNRAGAGMVAPFTGLKSMAGFPTRKTNNDITSIASNGGRVQCMQVWPPVGKKKFETLSYLPDLDDAQLAKEVEYLLKKGWIPCLKFELKHSFVYQEHNXSPKYYDRHYXTIXXLAMFRYTNTSQVWKELQETKTTYANNFMHIIKFYNIRQIHYINFIGYEP

SEQ ID NO: 9987 - protein, 181 aa, Lactuca sativa
MASISSSAVATVNRSTPAQASLAAPFTGLKSNVAFPVTKKANNDFSSLPSNGGRVQCMKVWPPIGLKKYETLSYLPPLSDEALSKEIDYLIRNKWVPCLEFELEHGFVYREHHHSPGYYDGRYWTMWKLPMFGCTDSAQVMKEVGECKKEYPNAFIRVIGFDSVRQVQCISFIVSKPPGVL

SEQ ID NO: 9988 - protein, 422 aa, Bdellovibrio bacteriovorus HD100
MSEIISVISREILDSRGNPTVEVEVTTADGNMGRAAVPSGASTGAHEACELRDGDKNRFLGKGVYKAVDNVREKIAPEIVGLQATEQVYIDKILRDIDGTENKSNLGANAILGVSLAVAKAAAKDCRLPLYRYVGGSQASRLPVPLMNVLNGGAHANNGLDIQEFMIVPTVNNSYAESLRAGTEIFHTLKKILAKKGLSTAVGDEGGFAPKLGSNQEALDLLMNAIVDAGYDPGQNVFLALDVAATEMFKEGKYEWQGGHISPTELLGIYKSWAEKYPLVSIEDGFAEDDWDSWVQSTAQMGSTMQLIGDDLFVTNPKRLRMGLEKKAGNALLVKVNQIGTLTETYEAVNLAQRNKFRTIMSHRSGETEDVTIADLAVGLNCHQIKTGSLCRGERTAKYNQLLRIEEDLGGMGLYWDKAAFR

SEQ ID NO: 9989 - protein, 579 aa, Hordeum vulgare
MGEVAAEMYTQDGTVDIKGNPALKKDTGNWRACPYILANECCERLAYYGMSTNLVNFMKDRMGMANAAAANNVTNWGGTCYITPLIGAFLADAYLGRFWTIASFMIIYIFGLGLLTMATSVHGLVPACASKGVCDPTPGQSAAVFIALYLIALGTGGIKPCVSSFGADQFDEHDDVERKSKSSFFNWFYFSINIGALVASSVLVYVQTHVGWSWGFGIPAVVMAIAVGSFFVGTSLYRHQRPGGSPLTRIAQVLVAATRKLGVAVDGSALYETADKESGIEGSRKLEHTRQFRFLDKAAVETHADRTAAAPSPWRLCTVTQVEELKSVVRLLPIWASGIVFATVYGQMSTMFVLQGNTLDASMGPKFKIPSASLSIFDTLSVIAWVPVYDRILVPAVRSVTGRPRGFTQLQRMGIGLVVSMFAMLAAGVLELVRLRTIAQHGLYGEKDVVPISIFWQVPQYFIIGCAEVFTFVGQLEFFYDQAPDAMRSMCSALSLTTVALGNYLSTLLVTVVAKVTTRGGKQGWIPDNLNVGHLDYFFWLLAALSLVNFAVYLLIASWYTYKKTAGDSPDAKGGAHDQ

SEQ ID NO: 9990 - protein, 477 aa, Bdellovibrio bacteriovorus HD100
MKKTLTTSAGIPISENQHSLTSGPRGPVALQDYHLIEKLAHFNRERIPERVVHAKGSGAYGTFTVTHDITRFTKAAIFSKIGKKTEAFLRFSTVAGEKGSADTERDPRGFALKFYTEEGNWDIVGNNTPVFFERDPLKFPDFIHSQKRDPQTGYKNPVRMWDYWSKAPEALHQITILFSDRGIPDGYRFMNGYGSHTFSFINDKNERVWVKFHFKSMQGIKNLPVAKAVELAGTDPDYAGRDLFEAIERKEFPRWALKVQIMTERQAEQFRFDPFDLTKVWPHSEFPLLDVGILELNRNPENYFAEVEQAAFSPSNVPPGVGFSPDKMLQGRLFAYPDAQRYRLGVNYQYLPVNRPHSEVNSYHRDGSMRFDGNGGRQDNYEPNGFGGPVQNESFKDPALNLSGTLDRHDSHKDNDDFTQAGNLYRMLSEEEKDRLTSNIAGTMKTISEDLQTKNIEHFKRCDPDYGGRIAAKLGLD

SEQ ID NO: 9991 - protein, 285 aa, Zea mays
  unsure (1)..(285): unsure at all Xaa locations
GRDRAPRATRPIGCTALVVCTPLVTHTLPHIPFSPTALLAARNNMSNRATHWCYACRRPVHLRGQDIICPNCNDGFIQEISEMGGVLNTYGLIEPDFEERQTRRFGMMDAISSLMRQRLAEIGRDSLFDIHGRQGTGTEYGRRSTAIPTLVFGGIPSPAVGSSDVNVVIREGRRAGAARPNFSSLVVGPSLEALFEQLLLQNNRQGPPPAPQSAIDSMPVVKINRRHLDEDPQCAVCKDKFEVGAEAREMPCKHLYHTDCIIPWLVQHXSCPVWRHPLPSQRSGS

SEQ ID NO: 9992 - protein, 438 aa, Caulobacter crescentus CB15
MTPPGESLRLIKARGPVSCDFPQVRAAWLSDSRMVVVLVQRRLHVRVSRHNHRATGAMRELDVNHSIGDAETGLTTLIEMIETLSATRTINEVADVVRGAARRILDADGVAFVMRDKDLCWYVDEDAIGPLWKGKRFPMDQCVAGRVMKSGRVVVCPDIYADPDMPHDAYRPTFVKSLAIAPVRPRDPIAAIAVYWARPYDPPPEVLRKLQVVARATASALESGRLNDYLAASLEHGHFLLRELDHRVKNTLAIVQSITRQTLRTTPSPEAFADVFESRILALSQAHELLTRRAWGRPQLEEILQRTLATFADDVAGRFEVQGPAVAFSAETAVSVHMAIHELIANAARHGALSTPQGRVAIEWNVDKATAPGLLTLIWREQGGPALSGPPTRNGFGSKMVHQGLARDLGGQAVLDFAPTGLVFTLRAPLSERMSLAA

SEQ ID NO: 9993 - protein, 527 aa, Streptomyces coelicolor A3(2)
MAQTAREPARDGLPKGFRSAELGWPELHRIPHPPYRLPLLGDVVGASRRTPMQDSLRYARRLGPIFRRRAFGKEFVFVWGAALAADLADEARFAKHVGLGVANLRPVAGDGLFTAYNHEPNWQLAHDVLAPGFSREAMAGYHVMMLDVAARLTGHWDLAEASGRAVDVPGDMTKLTLETIARTGFGHDFGSFERSRLHPFVTAMVGTLGYAQRLNTVPAPLAPWLLRDASRRNAADIAHLNRTVDDLVRERRANGGTGGGTGSGSGSGDLLDRMLETAHPRTGERLSPQNVRRQVITFLVAGHETTSGALSFALHYLAQHPDVAARARAEVDRVWGDTEAPGYEQVAKLRYVRRVLDESLRLWPTAPGFAREAREDTVLGGTHPMRRGAWALVLTGMLHRDPEVWGADAERFDPDRFDAKAVRSRAPHTFKPFGTGARACIGRQFALHEATLVLGLLLRRYELRPEPGYRLRVTERLTLMPEGLRLHLVRRTAAAPAPGRRTAAPGAADDAGDTVSAPGCPVHRAGD

SEQ ID NO: 9994 - protein, 117 aa, Caulobacter crescentus CB15
MKTARVMIVEDEALVAMMVEDMLGDMGCEVAGSFGAVDAALAWLRDHPSPDGAVLDVNIGGEMVFPVAERLREQGVPFVFATGYGDLPRAGFESVQVLAKPINAGALRLAVERFRIG

SEQ ID NO: 9995 - protein, 483 aa, Ralstonia eutropha
MELQHTALLRTHCLIDGEWTGAQSGAELAVCNPATGERIGSVPLAGAAEAEQAVRAAERALPAWRAQTGKAVPPVLRRWADLMLAHQEDLARLMTAEQGKPLPDARGEVAYAASFLEWFGEEAKRVDGEVLASPRSSQKMLVLREPVGVCAAITPWNFPAAMITRKVGPALAAGCTIIVKPAEQTPLTALALAVLGEQAGVPRGVLQVVTGDAVQIGGVLCASPVVRKLSFTGSTAIGKLLMAQCAGTVKKLSLELGGNAPLIIFDDADMDSAVEGIIASKFRNTRQTCVCANRIYVHDRVYDEVARRLVSAVEQLLPGHGVDSGVTQGPLIDADAVAKVEAHIADALAQGATVLTGGQRHALGGTFFAPTVLANATASMRVAREETFGPLAPLFRFTSEAEVVAMANDTESGLAAYFFSRDMAKIWRVAQGLEYGMVGINTGLISNEVAPFGGVKQSGLGREGSRHGIDEYLETKYLCMEVE

SEQ ID NO: 9996 - protein, 455 aa, Vibrio parahaemolyticus RIMD 2210633
MEKVMATHFDYICIGGGSGGIASANRAAMYGAKVALIEAQDLGGTCVNVGCVPKKVMWHGAQIAEAMNLYAEDYGFDVDVKGFDWSKLVESRQAYIGRIHQSYDRVLGNNKVNVIKGFAKFVDEKTVEVNGEHYTADHILIAVGGRPTIPNIPGAEYGIDSNGFFDLAEQPKRVAVVGAGYIAVEIAGVLHALGTETHLFVRKESPLRSFDPMIIDTLVEVMEAEGPTLHTHSVPKEVVKEADGSLTLHLENGESQNVDQLIWAIGRHPATDAINLASTGVATNEKGYIKVDEYQETNVKGIYCVGDIMEGGIELTPVAVKAGRQLSERLFNNKPNAKMDYDLVPTVVFSHPPIGTIGLTTQEAEEKYGKDNIKVYTSGFTAMYTAVTKHRQPCKMKLVCAGEEETVVGLHGIGFTVDEMIQGFGVAMKMGATKADFDSVVAIHPTGSEEFVTMR

SEQ ID NO: 9997 - protein, 318 aa, Saccharomyces cerevisiae
RAAAAQKGITLYKYIAELADARQDPFVIPVPFFNVLNGGAHAGGSLAMQEFKIAPVGAQSFAEAMRMGSEVYHHLKILAKEQYGPSAGNVGDEGGVAPDIDTAEDALDMIVKAINICGYEGRVKVGIDSAPSVFYKDGKYDLNFKEPNSDPSHWLSPAQLAEYYHSLLKKYPIISLEDPYAEDDWSSWSAFLKTVNVQIIADDLTCTNKTRIARAIEEKCANTLLLKLNQIGTLTESIEAANQAFDAGWGVMISHRSGETEDPFIADLVVGLRCGQIKSGALSRSERLAKYNELLRIEEELGDDCIYAGHRFHDGNKL

SEQ ID NO: 9998 - protein, 491 aa, Xanthomonas axonopodis pv. citri str. 306
MRSDPTSPGVRMKTALFAGWKARFYSVCMLMLFSALMVGGMGSAHAQSTPQVTPLPTEPVTTEPLPSAQPAAPPAAAAEAAPVVEKGDVAWMLTSTLLVLLMVVPGLALFYGGMVRAKNVLSVLIQVAVVFSLLTVLWVFYGYSLAFSGEGAWIGNLDKALLKGVTIETLAATFTKGVSLPEYVFVAFQATFAGITGALIVGAFAERAKFAAVLLFSAIWFTFGYLPLAHMVWATGGYLFGLGALDFAGGTVVHINAGVAGLVGAYFVGKRAGLGREAIKPHNVTLTFVGASLLWVGWFGFNAGSNLEANAGAALAFLNTLLATAAAILGWSLTEKIIKGKSSALGVASGMVAGLVGITPACGTVGPFGAIVIGLAAGVLCVWGVTGLKRLLGADDSLDVFGVHGLGGIIGAILTGVFSAASLGGQKGGDYDIVHQVGIQALGVGITVGWIGVVSVVGFVVAKLVFGLRVSEEAEREGLDITSHGEAAYES

SEQ ID NO: 9999 - protein, 454 aa, Bradyrhizobium japonicum USDA 110
MPLLSRQQRSAAVTLHQIPNTIKTDSFWMPFTANRQFKKAPRLFSSAEGMHYTTVDGRKVIDGSAGLWCVNAGHGRKQIAAAVERQLMTLDFAPTFQMGHPLAFDFAERLAEIAPKGLDRIFFTNSGSESVDTALKIALAYHRATGQSSRTRLIGRERGYHGVGFGGTSVGGMVANRRAFATLLPGVDHIRHTHDLSRNAFAKDQPEHGAELADDLERLVGLHGAETIAAVIVEPVPGSTAVLPPPKGYLQRLREICDKHGILLIFDEVITGFGRLGTPFAANFFGVTPDLMTTAKGITNGTIPCGAVFASRKVHDGMMVGPENQMELFHGYTYSAHPTACAAGIATLDIYKDEGLLTRGASIAEYWRDALHSLKGLPNVVDIRNCGLMGAVELAPRAGVVGARGYDVMVDCFNTGLYLRMSGDSFAMSPPLIVEKSHIDQMVSILGDAIKKVA

SEQ ID NO: 10000 - protein, 466 aa, Pseudomonas putida
MKSYDVVIIGGGPGGYNAAIRAGQLGLTVACVEGRSTLGGTCLNVGCMPSKALLHASELYEAASGDEFAHLGIEVKPTLNLAQMMKQKDESVTGLTKGIEYLFRKNKVDWIKGWGRLDGVGKVVVKAEDGSETALQAKDIVIATGSEPTPLPGVTIDNQRIIDSTGALSLPQVPKHLVVIGAGVIGLELGSVWRRLGSQVTVIEYLDRICPGTDTETAKTLQKALAKQGMVFKLGSKVTQATASADGVSLVLEPAAGGTAESLQADYVLVAIGRRPYTKGLNLESVGLETDKRGMLAQRTPPTSVPGVWVIGDVTSGPMLAHKAEDEAVACIERIAGKPHEVNYNLIPGVIYTRPELATVGKTEEQLKAEGRAYKVGKFPFTANSRAKINHETEGFAKVIADAETDEVLGVHLVGPSVSEMIGEFCVAMEFSASAEDIALTCHPHPTRSEALRQAAMNVDGMAMQI

SEQ ID NO: 10001 - protein, 245 aa, Tontelea attenuata
ALSIAGAVQSQKLAVRAISQIQSLPGGDIKLLCDTVVESVRDLTGYDRVMVYKFHEDEHGEVVAESKRPDLEPYIGLHYPATDIPQASRFLFKQNRVRMIVDCHASPVRVIQDDGLMQPLCLVGSTLRAPHGCHAQYMENMGSIASLAMAVIINGNDEEVIGGRNPTRLWGLVVCHHTSARCIPFPLRYACEFLTQAFGLQLKMELQLAAQLLEKHVLKTQTLLCDMLLRDSPTGIVTQSPSIMD

SEQ ID NO: 10002 - protein, 77 aa, Glycine max
MGLWTLLEGFLLLANALAILNEDRFLTPRGWGLSDFSAGQTKSFKGQLIGLIYATQYLRFPLILLNSVFIIVKLVSG

SEQ ID NO: 10003 - protein, 177 aa, Triticum aestivum
  unsure (1)..(177): unsure at all Xaa locations
MAPTVMASSATSVAPFQGLKSTAGLPVSRRSNGASLGSVSNGGRIRCMQVWPIEGIKKFETLSYLPPLSTEALLKQVDYLIRSKWVPCLEFSKVGFIFREHNASPGYYDGRYWTMWNCXYFGCTDATQXDQRVEEVKKEYPDAYXRIIGFXTCAXXCVSSCLQHGLKIGRLTVTTAI

SEQ ID NO: 10004 - protein, 569 aa, Mesorhizobium sp. BNC1
MMEALAPRGPDGAGIVSHGNAGFGHRRLRIIDLSEKAQQPMVDSALGLTIAFNGCIYNYPELREALEAKGYSFFSHGDTEVILKAWHAWGETCVERFHGMFAFVIQERDTGRIVMARDRFGIKPLYLAEKSGVLRFASSLPALVKAGDVDTSIDRVALHHYMTFHAVVPPPRTILNGVRKLPPATIRVIEADGRSTERRYWDPPYRRDPADAGVSAEEWRDRVHEALRLAVKRRMVADVPVGVLLSGGVDSSLIVGLLAEAGQTGLMSFSVGFEEANGEKGDEFVYSDLIAKEFGTDHHKIFVPSDRLMDALPGTFAAMSEPMVSYDNVGFYLLSQEVSKHIKVVQSGQGADEVFGGYHWYPPLARSNDVVADYAKVFFDRSHETLKRQLGANWINGEDYSRGLVAAELMRPGADSPVDRALRLDANVMLVDDPVKRVDNMTMAWGLEARVPFLDHELVELAARIPPEEKLKDGGKGVLKDVARLVVPHEVIDRPKGYFPVPQLKYVAGPYLEMVRDALGSQRARERGLFRQDYLDRLFAQPADHITPLRGSELWQAGLLELWLQTHGI

SEQ ID NO: 10005 - protein, 245 aa, Tontelea attenuata
ALSIAGAVQSQKLAVRAISQIQTLPGGDIKLLCDTVVESVRDLTGYDRVMVYKFHEDEHGEVVAESKRPDLEPYIGLHYPATDIPQASRFLFKQNRMRMIVDCHASPVRVIQDDGLMQPLCLVGSTLRAPHGCHAQYMENMGSIASLAMAVIINGNDEEVIGGRNPTRLWGLVVCHHTSARCIPFPLRYACEFLMQAFGLQLKMELQLAAQLLEKHVLKTQTLLCDMLLRDSPTGIVTQSPSIMD

SEQ ID NO: 10006 - protein, 480 aa, SYNECHOCOCCUS SP. WH 8102
MSDASFDFDVIVIGAGYGGFDAAKHAAEHGLKTAIIESRDMGGTCVNRGCVPSKALLAASGKVRELADDQHLASFGIHAAPVRFERQKIADHANQLVQTIRTNLTKTLERAGVTILRGHGRLEGSQRVGLREPSGVDRVLSARDVIVATGSDPFVPPGIETDGRTVFTSDEAINLEWLPRWIAIVGSGYIGLEFADVYTALGCEVTMIEALDRVMPTFDPDIAKIAGRHLIDGRDIDARSGVLASKVTPGCPVRIDLADFNSRELVETLEVDAVLVATGRVPSSKGLNLESLNIETNRGFVPIDDSMRVLVNGQPVPHLWAVGDVTGKLMLAHTAAAQGTVAVDNILGQNRTIDYRSIPAATFTHPEISSVGLTEAEAKQLAETDGFQLGSVRSYFKANSKALAELESDGLMKLLFNKSSGEVLGAHIYGLHAADLIQEVANAVARRQSVRQLSTEVHTHPTLSEVVEVAYKQAASQLTA

SEQ ID NO: 10007 - protein, 298 aa, Mesorhizobium sp. BNC1
MKKVRKAVIPVAGLGTRFLPATKALPKEMLTIVDKPVVQYAVDEALEAGIEHIIFVTGRNKAVIEDYFDLQPELAGTLEKAGKTKELRLLEEMMPVAGSVSFTRQQAPLGLGHAVWCARDIVGNEPFAVLLPDMVSFGKKGCLAEAMELYGRTGGNVLAVEQCHPRETRKYGIVGRGAEVVPGFQITSMVEKPAPENAPSNFYINGRYILQPEIFEFLSRHERGAGNEIQITDAMAHLLREQPFYARPFTGRMFDCGSKSGFIEANVAFALKRDDIRESVIEPIRAMVGMDRETGQAA

SEQ ID NO: 10008 - protein, 374 aa, Tripterygium regelii
ALSIAGAVQSQKLAVLAISQLQSLQGGDIKLLCDTVVESVRDLTGYDRVMVYKFHEDEHGEVVAESKRPDLEPYIGLHYPATDIPQASRFLFKQNRVRTIVDCHALPVRVIQDDGLMQPLCLVGSTLRAPHGCHAQYMKNMGSMASLAMAVVINGNDEEVIGERNTTRLWALVVCHHTSARCIPFPFRYACEFLMQAFGLQLNMELQLAAQLMEKHVLKTRTLLCDMLLRDPPTGIVTQSPSIMDLVKCDGAALHYQGNYYPLGVTPTEAQIKDIVGWLLDFHGDSTGLSTDSLADAGYPEAALLGDAVCGMAVAYITNRDFLFWFRSHTAKEIKWGGAKHHPEDKDDGQRMHPRSSFKAFLEVVKSRSLPWEN

SEQ ID NO: 10009 - protein, 239 aa, Zea mays
  unsure (1)..(239): unsure at all Xaa locations
MAGADVDVGTELRLGLPGGGADAAKAAKRGFEDTIDLKLKLPTAGMEEAAAAAAAAAKPEPAAEKAKRPAEAPAADAEKPPAPKAQAVGWPPVRSYRRNVMTVQSVKSKKEEEPEKQQSAANAGGNGSAFVKVSMDGAPYLRKVDLKMYNXYTELSVALKKMFSTFTTSGNNMNEGKLVDPVSGADVVTTYEDKDGDWMLVGDVPWEMFVESCRRLRIMKSSEAIGLAPRTKDKCKNRS

SEQ ID NO: 10010 - protein, 201 aa, Glycine max
MAAARGLVLSRPVTFVTANAKKLEEVRAILGNSIPFQSLKLDLPELQGEPEDISKEKARIAALQVNGPVLVEDTCLCFNALKGLPGPYIKWFLQKLGHEGLNNLLMAYDDKSAYALCVFSFAAGPDSEPITFSGKTPGKIVPPRGPNDFGWDPIFEPDGYDQTYAQMPKEEKNKISPRSKSLALVKSHFAEAGYTFDIKNV

SEQ ID NO: 10011 - protein, 337 aa, Geobacillus stearothermophilus
MKAAVVEQFKKPLQVKEVEKPKISYGEVLVRIKACGVCHTDLHAAHGDWPVKPKLPLIPGHEGVGVIEEVGPGVTHLKVGDRVGIPWLYSACGHCDYCLSGQETLCERQQNAGYSVDGGYAEYCRAAADYVVKIPDNLSFEEAAPIFCAGVTTYKALKVTGAKPGEWVAIYGIGGLGHVAVQYAKAMGLNVVAVDLGDEKLELAKQLGADLVVNPKHDDAAQWIKEKVGGVHATVVTAVSKAAFESAYKSIRRGGACVLVGLPPEEIPIPIFDTVLNGVKIIGSIVGTRKDLQEALQFAAEGKVKTIVEVQPLENINDVFDRMLKGQINGRVVLKVD

SEQ ID NO: 10012 - protein, 420 aa, SYNECHOCOCCUS SP. WH 8102
MVDAADSKSAGHWSWGFKSPGSHPEAVMNTYNRFPLTLVRGRGCWVWDDQGRRHLDAVAGIATDTLGHSDRALRRSLGRQLRRLQHVSNLYRIPEQDALATWLVQHSCADSVFFCNSGAEANEAAIKLARKHGHLKRGIDRPRILTASASFHGRTLAAVSATGQPRYHQGFEPMVEGFDYFPYNDIHAFESLLERHEANGPAVAAVLLEPLQGEGGVHPGDAGFFQRLRHLCSERNILLILDEVQVGMGRSGRLWGYEQLGIEPDAFTLAKGLGGGHAIGALLVNAKADVFEPGDHASTFGGNPFACTAGLTVAQEIQRRGLLRNVEERGQQLQQGIQGLVARYPQLLQGVRGWGLLQGLVLHQDCGVTAPQLAKAAIEQRLLLVAAGATVLRMVPPLVISANEVRQLLRRLDATLAELV

SEQ ID NO: 10013 - protein, 371 aa, Tripterygium regelii
ALSIAGAVQSQKLAVLAISQLQSLQGGDIKLLCDTVVESVRDLTGYDRVMVYKFHEDEHGEVVAESKRPDLEPYIGLHYPATDIPQASRFLFKQNRVRTIVDCHALPVRVIQDDGLMQPLCLVGSTLRAPHGCHAQYMENMGSMASLAMAVVINGNDEKVIGGRNTTRLWGLVVCHHTSARCIPFPLRYACEFLMQAFGLQLNMELQLAAQLMEKHVLKTRTLLCDMLLRDSPTGIVTQSPSIMDLVKCDGAALHYQGNYYPLGVTPTEAQIKDIVGWLLDFHGDSTGLSTDSLADAGYPEAALLGDAVCGMAVAYITNRDFLFWFRSHTAKEIKWGGAKHHPEDKDDGQRMHPRSSFKAFLEVVKSRSLP

SEQ ID NO: 10014 - protein, 374 aa, Tripterygium regelii
ALSIAGAVQSQKLAVLAISQLQSLQGGDIKLLCDTVVESVRDLTGYDRVMVYKFHEDEHGEVVAESKRPDLEPYIELHYPATDIPQASRFLFKQNRVRTIVDCHALPVRVIQDDGLMQPLCLVGSTLRAPHGCHAQYMENMGSMASLAMAVVINGNDEEVIGGRNTTRLWGLVVCHHTSARCIPFPLRYACEFLMQAFGLQLNMELQLAAQLMEKHVLKTRTLLCDMLLRDSPTGIVTQSPSIMDLVKCDGAALHYQGNYYPLGVTPTEAQIKDIVGWLLDFHGDSTGLSTDSLADAGYPEAALLGDAVCGMAVAYITNRDFLFWFRSHTAKEIKWGGAKHHPGDKDDGQRMHPRSSFKAFLEVVKSRSLPWEN

SEQ ID NO: 10015 - protein, 191 aa, Zea mays
  unsure (1)..(191): unsure at all Xaa locations
MDGFSKTIGGGGPNVPAGSHPAGGSQAAAGGGATQRTQYPYVTGTSVIALKYKDGVIMACDTGASYGSTLRYKSVERIKAVGKHSIIGASGEFSDFQGILRYLDELTLSDHMWDDGNSLGPKEIHSYLTRVMYNRRNKFDPLWNSLVLGGVKXGPKGDEKYLGMVNMIGYHFEETMSQLDCNHLAIPILVL

SEQ ID NO: 10016 - protein, 568 aa, Zea mays
APRGVEPRLFVARAAGPAQQAADAKACSALCSPAARAVPAMESFGVPPAPVAAPEKRKKPLDLKDPVPAAAAAAANGGGATKASPAAKWAEKKKLVGGDAGYVLEDVPHLTDYLPQLPTYPNPLQDNPAYSVVKQYFVNPDDTVTQKIVVHKTSARGTHFRRAGPRQRVYFQPDEVNAAIVTCGGLCPGLNTVIRELVCGLYDMYGVTSVVGIEGGYKGFYSKNTVALTPRSVNGIHKRGGTVLGTSRGGHDTAKIVDCLQDRGINQVYIIGGDGTQKGASVIYEEVRRRGLKCAVVGVPKTIDNDIAVIDKSFGFDTAVEEAQRAINAAHVEAESAENGIGVVKLMGRNSGFIAMYATLASRDVDCCLIPESPFYLEGKGGLLEFVERRLKDNGHMVIVVAEGAGQDLIAKSMNSVDTQDASGNKLLLDVGLWLSQKIKDHFKKKPRFPITLKYIDPTYMIRAVSSNASDNVYCTLLAHSALHGAMAGYTGFIVAPVNGRHAYIPFYRITEKQNKVVITDRMWARVLCSTNQPCFLSHEDVENMKHDDDEHHLHNTLLLDSPENSSK

SEQ ID NO: 10017 - protein, 256 aa, Brassica oleracea var. botrytis
MGRGKVELKRIENKINRQVTFAKRRNGLLKKAYELSVLCDAEIALLIFSNRGKLYEFCSNPSGMAKMVEKYRKHSYATMDPNQSAKDLQERYQDYLNLKSRVEVLQHSQRHLLGEEIAGIGVDELEQLECQVDTSLRQIRSTKARSMLDQLSDLKSKEEMLLETNRDLKRKLEESDAALNQTLWGASSSAEHSQQQQEGMTSYHANPLSQEVGFFRPLQGNVALQMSHYNPGVPNASNSATTSQNVINGFFPGWMV

SEQ ID NO: 10018 - protein, 232 aa, Streptococcus agalactiae NEM316
MDIFGEFLGTALLVLLGNGVVAGVVLPKTKNHNSGWIVITFGWGLAVAIAVLVSGNISPAHLNPAVSLAFAIKGDLAWGTAILYMIAQIIGAMLGSLLVYLQFRPHYEAAENKADILGTFATGPALKDNFSNFLSEVLGTLVLVLTIFAIGKYNMPPGVGTMSVGMLVVGIGLSLGGTTGYAINPARDFGPRLLHALLPMKNKGDSDCTYSWIPIVGPMVGAILAALIFAMM

SEQ ID NO: 10019 - protein, 250 aa, Brassica oleracea var. botrytis
MGRGRVELKRIENKINRQVTFAKRRNGLLKKAYELSVLCDAEVALIIFSNRGKLYEFCSSSNMIKTLERYQKCSYGSIEVNNKPAKELENSYREYLKLKGRYEGLQRQQRNLLGEDLGPLNSKELEQIERQLDGSLKQVRSIKTQYMLDQLSDLQTKEQMLLETNRALAMKLDDMIGVRSHHMGGGGGGWEGNEHNVSYAHHQAQSQGLFQPLECNPTLQMGYDNPVCSEQITATTQAQAQPGYIPDWML

SEQ ID NO: 10020 - protein, 91 aa, Glycine max
  unsure (1)..(91): unsure at all Xaa locations
MSRKIESLGVERVISGEGSHGMFGGYLYFSKAPSKEEFLPEAMRXIKALLXYDCLRATRSTFDRGLEARVPFLNKECYEXAMNIDPQCAMI

SEQ ID NO: 10021 - protein, 536 aa, Magnaporthe grisea 70-15
MGKASVKVLQKIVRNDAMHTDPPEIYGWRVYTLAMSACFGAMCFGWDSSVIGGVIVLDAFKADYGLSPDSKDYRSQDLAANIVSTLQAGCFLGAIVASPMTDAFGRRRCLLGVAGIIMIGVIMQGAASGSLGALYAGRFVAGFGVGAASCINPIYVSENAPRAIRGLLTGMYQLFIVTGGMIAFWINYAVNLHHRGKTSYILPLSVQGVPAALLFITMWMCKESPRWLARKDRWEEARAVLSHTRNLPSDHPYLQEEMAEIADQLEQERRLVGDASWLQLNKEIWRQSIHRKRAIISIVLMICQQMTGTNAINTYAPTIFANLGIKGLDGQLLGTGVYGVVKVISCIAFLLFMADSLGRRRSLLWTSIAQGLVMFYIGIYVRIAPPKDGDPVPPAGYFALVCIFLFAAFFQFGWGPACWILASEIPSARFRSINVSYAAATQWLFNFVVARSVPVMLITIGGKTGYGTYLLFGSFAFTMFFFVWFFVPETKGLSLEAMDELFGGSPSGETLKNTQLSENADETTVVPMPPKQYGLA

SEQ ID NO: 10022 - protein, 150 aa, Glycine max
MGNYVSCTLAPPLMKNSKATRVLIPTAEVKQFTEIVKAALLMLEHPNYFWVNSRSLHIGRRFSALGADEELEFGNVYIFFPMRRVNSLVTAPDMAVLFLAVNFADNRLSCNDAHDFMHICGGKTWQHREDYDESSKDESLSVIPRLSLEG

SEQ ID NO: 10023 - protein, 533 aa, Oryza sativa
MATCAADLAPLLGPVAANATDYLCNRFADTTSAVDATYLLFSAYLVFAMQLGFAMLCAGSVRAKNTMNIMLTNVLDAAAGALFYYLFGFASLRDCLRTPSNGFIGKQFFGLKHMPARPGSDYDFFLFQWAFAIAAAGITSGSIAERTQFVAYLIYSAFLTGFVYPVVSHWIWSADGWASASRTSGPLLFGSGVIDFAGSGVVHMVGGVAGLWGALIEGPRIGRFDHAGRSVALKGHSASLVVLGTFLLWFGWYGFNPGSFTTILKTYGPAGGINGQWSGVGRTAVTTTLAGSVAALTTLFGKRLQTGHWNVVDVCNGLLGGFAAITAGCGVVDPWAAIICGFVSAWVLIGLNLAARLKFDDPLEAAQLHGGCGAWGILFTALFARQKYVERSTAPAAYGLFMGRRKLLVGAVIQILVIFGWVSCTMGPLFYGLKKLGLLRISGRDETSGMDLTRHGGFAYVYHDEDEHDKSGVGGFMLRSAQTRVEPAAAGCLQQQQPSVTNPEASTSQRRKKSRVSLPLRSRSSRHKFDPHI

SEQ ID NO: 10024 - protein, 371 aa, Tripterygium regelii
ALSIAGAVQSQKLAVLAISQLQSLQGGDIKLLCDTVVESVRDLTGYDRVMVYKFHEDEHGEVVAESKRPDLEPYIGLHYPATDIPQASRFLFKQNRVRTIVDCHALPVRVIQDDGLMQPLCLVGSTLRAPHGCHAQYMENMGSMASLAMAVVINGNDEEVIGGRNTTRLWGLVVCHHTSARCIPFPLRYACEFLMQAFGLQLNMELQLAAQLMEKHVLKTRTLLCDMLLRDSPTGIVTQSPSIMDLVKCDGAALHYQGNYYPLGVTPTEAQIKDIVGWLLDFHGDSTGLSTDSLADAGYPEAALLGDAVCGMAVAYITNRDFLFWFRSHTAKEIKWGGAKHHPEDKDDGQRMHPRSSFKAFLEVVKSRSLP

SEQ ID NO: 10025 - protein, 763 aa, Saccharomyces cerevisiae
MNDSQNCLRQREENSHLNPGNDFGHHQGAECTINHNNMPHRNAYTESTNDTEAKSIVMCDDPNAYQISYTNNEPAGDGAIETTSILLSQPLPLRSNVMSVLVGIFVAVGGFLFGYDTGLINSITDMPYVKTYIAPNHSYFTTSQIAILVSFLSLGTFFGALIAPYISDSYGRKPTIMFSTAVIFSIGNSLQVASGGLVLLIVGRVISGIGIGIISAVVPLYQAEAAQKNLRGAIISSYQWAITIGLLVSSAVSQGTHSKNGPSSYRIPIGLQYVWSSILAVGMIFLPESPRYYVLKDELNKAAKSLSFLRGLPIEDPRLLEELVEIKATYDYEASFGPSTLLDCFKTSENRPKQILRIFTGIAIQAFQQASGINFIFYYGVNFFNNTGVDNSYLVSFISYAVNVAFSIPGMYLVDRIGRRPVLLAGGVIMAIANLVIAIVGVSEGKTVVASKIMIAFICLFIAAFSATWGGVVWVVSAELYPLGVRSKCTAICAAANWLVNFTCALITPYIVDVGSHTSSMGPKIFFIWGGLNVVAVIVVYFAVYETRGLTLEEIDELFRKAPNSVISSKWNKKIRKRCLAFPISQQIEMKTNIKNAGKLDNNNSPIVQDDSHNIIDVDGFLENQIQSNDHMIAADKGSGSLVNIIDTAPLTSTEFKPVEHPPVNYVDLGNGLGLNTYNRGPPSIISDSTDEFYEENDSSYYNNNTERNGANSVNTYMAQLINSSSTTSNDTSFSPSHNSNARTSSNWTSDLASKHSQYTSPQ

SEQ ID NO: 10026 - protein, 360 aa, Wimmeria acuminata
AVQSQKLAVRAISQLQSLPGGDIKLLCDTVVESVRHLTGYDRVMVYKFHEDEHGEVVAERKRPDLEPYIGLHYPATDIPQASRFLFKQNRVRTIVDCHASPVRVIQDDGLMQPLCLVGSTLRAPHGCHAQYMENMGSIASLAMAVIINGNDEEVIGVRNATRLWGLVVCHHTSARCIPFPLRYACEFLMQAFGLQLNMDLQLAAQLSEKHVWKTRTLLCDMLLRDSPAGIVTQSPSIMDLVKCDGAALYYQGNYYPLGVTPTEAQITDIVGWLLDFHGDSTGLSTDSLADAGYPGAALLGDAVCGMAVAYITNRDFLFWFRSHTAKEIKWGGAKHHPEDRDDGQRMHPRSSFQAFLEVVK

SEQ ID NO: 10027 - protein, 374 aa, Wimmeria concolor
ALSIAGAVQSQKLAVRAISQLQSLPGGDIKLLCDTVVESVRHLTGYDRVMVYKFHEDEHGEVVAERKRPDLEPYIGLHYPATDIPQASRFLFKQNRVRTIVDCHASPVRVIQDDGLMQPLCLVGSTLRAPHGCHAQYMENMGSIASLAMAVIINGNDEEVIGVRNATRLWGLVVCHHTSARCIPFPLRYAWEFLMQAFGLQLNMELQLAAQLSEKHVWKTRTLLCDMLLRDSPTGIVTQSPSIMDLVKCDGAALYYQGNYYPLGVTPTEAQITDIVGWLLDFHGDSTGLSTDSLADAGYPGAALLGDAVCGMAVAYITNRDFLFWFRSHTAKEIKWGGAKHHPEDRDDGQRMHPRSSFQAFLEVVKSRSLPWEN

SEQ ID NO: 10028 - protein, 555 aa, Haemophilus influenzae R2866
MSKQIQIPDIGSDEVTVTEVMVNVGDTISVDQSIINVEGDKASMEVPAPEAGVVKEILVKVGDKVSTGTPMLVLEAAGAAPAADEPTAPVADAPTAPVVATAPTASAIVEVNVPDIGGDEVNVTEIMVAVGDTITEEQSLITVEGDKASMEVPAPFGGVVKEILVKSGDKVSTGSLIMRFEVLGAAPAESASASASTSAPQTAAPATTAQAPQATAPDTTAQAPQSNNNVSGLSQEQVEASTGYAHATPVIRRLAREFGVNLDKVKGTGRKGRIVKEDIEAYVKTAVKAYESGATAQATGNGVANGAGLGLLPWPKVDFSKFGEIEEVELSRINKISGANLHRNWVMIPHVTHFDKADITDLEAFRKEQNALAEKQKLGVKITPVVFIMKAVAKALEAYPRFNSSITEDAQRLILKKYINIGVAVDTPNGLVVPVFKNVNKKGIIELSRELMEVSKKAREGKLTASDMQGGCFTISSLGGIGTTHFAPIVNAPEVAILGVSKSSMEPVWNGKEFAPRLILPMSLSFDHRVIDGADGARFISYLGSVLADLRRLVM

SEQ ID NO: 10029 - protein, 167 aa, Triticum aestivum
MRCLVTLPAVAVPGRRPHPNLKPRRRSTPVAILGSCRCGRRHLLGASSAAGLLHLVNPPCLAAPAIDPDVMLERVHPARPGWYEKLYATAMDKGMQSYEAEIAQYKSDLFSQLSVAGKNILELGVGTGPNLKYYASAHGVNVIGVASVSATGQLTEPTEPKFSDVSI

SEQ ID NO: 10030 - protein, 259 aa, Brassica oleracea var. botrytis
MGRGRVEMKRIENKINRQVTFSKRRNGLLKKAYELSVLCDAEVALIVFSSRGKLYEFGSVGVERTIERYHRCYNCSVTNNRPEESKQNWCQEVAKLKAKYESLVRTNRHLLGEDIGEMGVKQLQALERQLEAALTATRQRKTQVMMEEMEDLRKKERQLGDINKQLKIKFEAGGHAFKSFQDFWPNSAASMAGDPNNSKFPVQPSHPDSVDCNTEPFLQIGLVLVYIRFQQHYYVQGEGSSVPKSNVACETNFVQDWFL

SEQ ID NO: 10031 - protein, 374 aa, Zinowiewia concinna
ALSIAGAVQSQKLAVRAISQLQSLPGGDIKLLCDTVVETVRVLTGYDRVMVYKFHEDEHGEVVAESKRPDLEPYIGLHYPATDIPQASRFLFKQNRVRMIVDCHATPVSVIQDAGLMQPLCLVGSTLRAPHGCHAQYMENMGSIASLAMAVIINGNDEEGIGGRNTTRLWGLVVCHHTTARCIPFPLRYACEFLLQALGLQLNMELQLAAQLSEKHVLRTQTLLCDMLLRDSHTGIVTQSPSIMDLVKCDGAALYYQGKYYPLEVTPTEAQIKDIVEWVLAFHGDSTGLSTDSLADAGYPGAASLGDAVCGMAVAYITDRDFLFWFRSNTAKEIKWGGAKHHPEDKDDGQRMHPRSSFKAFLEVVKSRSLPWEN

SEQ ID NO: 10032 - protein, 474 aa, Haemophilus influenzae R2866
MSKEIKTQVVVLGAGPAGYSAAFRCADLGLETVIVERYSTLGGVCLNVGCIPSKALLHVAKVIEEAKHANKNGIYFSEPRIELDEVRAGKEAVVAKLTGGLAGMAKARKVTVVEGLATFTDSHTLVARDRDGNPTTVKFDNAIIAAGSRPVQLPFIPHEDPRIWDSTDALKLKEVPKKLLIMGGGIIGLEMGTVYNALGSEVEVVEMFDQVIPAADKDVVGIYTKQVEKKFKLMLETKVTAVEAKDDGIYVSMEGKACNDTKRYDAVLVAIGRVPNGKLIDAGKAGVEVDDRGFIHVDKQMRTNVPHIYAIGDIVGQPMLAHKGVHEGHVAAEVIAGQKHYFDPKVIPSIAYTEPEVAWVGKTEKECKQEGLNYEVAKFPWAASGRAIASECSEGMTKLIFDKDTHRVLGGAIVGSNGGELLGEIGLAIEMGCDAEDIALTIHAHPTLHESVGLAAEVFEGSITDLPNAKAKKK

SEQ ID NO: 10033 - protein, 273 aa, Cicer arietinum
MDRRTHSLVNATNDFQNHITQKQSLYPSGFPRKVLAEVIGTYLLVFVGSGSAAMNAIDENKVSKLGASMAGGFIVTVMIYAIGHISGAHMNPAVSLAFATVSHFPWKQVPFYIAAQLTGAISASYTLKVLLEPSKQLGATSPSGSNIQALIIEIVTTFTMVLISTAVSTDPKAIGELSGVAVGSSVCIASIVAGPISGGSMNPARTLGPAIATSSYKGIWVYMVGPITGALLGTWSYVVIQETNKQALTTSLKLHHEMKGIELVGDKDNQCSV

SEQ ID NO: 10034 - protein, 374 aa, Zinowiewia concinna
ALSIAGAVQSQKLAVRAISQLQSLPGGDIKLLCDTVVETVRVLTGYDRVMVYKFHEDEHGEVVAESKRPDLEPYIGLHYPATDIPQASRFLFKQNRVRMIVDCHATPVSVIQDAGLMQPLCLVGSTLRAPHGCHAQYMENMGSIASLAMAVIINGNDEEGIGGRNTTRLWGLVVCHHTTARCIPFPLRYACEFLLQALGLQLNMELQLAAQLSEKHVLRTQTLLCDMLLRDSHTGIVTQSPSIMDLVKCDGAALYYQGKYYPLEVTPTEAQIKDIVEWLLAFHGDSTGLSTDSLADAGYPGAASLGDAVCGMAVAYITDRDFLFWFRSNTAKEIKWGGAKHHPEDKDDGQRMHPRSSFKAFLEVVKSRSLPWEN

SEQ ID NO: 10035 - protein, 234 aa, Streptococcus pneumoniae TIGR4
MMNELFGEFLGTLILILLGNGVVAGVVLPKTKSNSSGWIVITMGWGIAVAVAVFVSGKLSPAYLNPAVTIGVALKGGLPWASVLPYILAQFAGAMLGQILVWLQFKPHYEAEENAGNILATFSTGPAIKDTVSNLISEILGTFVLVLTIFALGLYDFQAGIGTFAVGTLIVGIGLSLGGTTGYALNPARDLGPRIMHSILPIPNKGDGDWSYAWIPVVGPVIGAALAVLVFSLF

SEQ ID NO: 10036 - protein, 490 aa, Zinnia elegans
MSRKMLIDGDVGSISDEDYDFDLFVIGAGSGGVRASRFSAQYGAKVGICELPFHPVSSETVGGVGGTCVIRGCVPKKILVYGASFGPEIQDAKEYGWQVNENLDFDWKKLLHKKTEEIVRLNGVYKRLLSNAGVKLFEGEGRIVGPNEVEVIQLDGTKLSYTAKHILISTGSRAHRPDIPGQELGITSDEALSLDELPKRVVILGGGYIAVEFASIWRGMGSTVNLCFRKELPLRGFDDEMRALVARNLEGRGVILHPQTNLTKLVKTESGIKVTTDHGEELMADVVLFATGRVPNTKRLNLQAVGVEVDKTGAIKVDEYSRTNVPSIWAIGDVTNRINLTPVALMEGTMFAKTVFGNEPSKPDHSNVPCAVFCIPPLSVVGLSEEQAIQQGTGDILVFTSTFKPMKNTISGRQEKTLMKLIVSAENDKVIGASMCGPDAPEIMQGIAIAIKCGATKAQFDSTVGIHPSAAEEFVTMRSVTRRITASGKR

SEQ ID NO: 10037 - protein, 568 aa, Zinnia elegans
MATSATTPKLTTTLSSSTLQTFIFRHKKSSILNRSSFLITNSPSSSSYHTPTFSLSKKTLGFLSDYKPKSRRFVTRAESSTNGAEPRSYDFDLFTIGAGSGGVRASRFAANFGASVAVCELPFATISSETTGGVGGTCVLRGCVPKKLLVYASKYSHEFEESLGFGWSYNSEPTHDWSTLMANKNAELQRLTGIYKNILNNAGVKLIEGRGKIVDPHTVDVDGKLYTARNILVSVGGRPFIPDIPGKEHVIDSDAALDLPSKPTKIAIVGGGYIALEFAGILNGLQSDVHVFIRQKQVLRGFDEEIRDFVAEQMSLKGIEFHTEETPQAVIKSADGSLSLKTNKGTIDGFSHVMFATGRKPNTKNLGLETVGVKLDKNGAILVDEYSRTSVPSIWAVGDVTDRMNLTPVALMEGGALAKTLFANEPTKPDFRAVPSAVFSQPPIGQVGLSEQQAIEEYGDVDVYTANFRPLKATLSGLPDRVFMKLLVSAKTNQVVGLHMCGEDSAEIVQGFAVAIKAGLTKAQFDSTVGVHPTSAEEFVTMRTPTRKIRNSSSGGKTDSEAKAAAGV

SEQ ID NO: 10038 - protein, 154 aa, Methanosarcina mazei Go1
MPKVAVGGTFQYLHDGHARLIEKAFEIAGSGKVYIGLTSDEMLQKNHSVESYKIRRSRLLEYIKKMGVPEEKYEVTRLNDPCGPTIEEDFDHIIVSPETYPVALKINTIREKKGKKPLEIVYVEYVMAEDGIPISSTRISKGEIDRHGRLKKEA

SEQ ID NO: 10039 - protein, 393 aa, Geobacillus stearothermophilus
MKLAKRVASLTPSATLAITEKAKELKAAGHDVIGLGAGEPDFNTPQHILDAAIKAMNEGHTKYTPSGGLPALKEEIIKKFARDQGLDYEPAEVIVCVGAKHALYTLFQVLLDEGDEVIIPTPYWVSYPEQVKLAGGVPVYVEGLEQNHFKITPEQLKQAITPRTKAVIINSPSNPTGMIYTAEELKALGEVCLAHGVLIVSDEIYEKLTYGGAKHVSIAELSPELKAQTVIINGVSKSHSMTGWRIGYAAGPKDIIKAMTDLASHSTSNPTSIAQYAAIAAYSGPQEPVEQMRQAFEQRLNIIYDKLVQIPGFTCVKPQGAFYLFPNAREAAAMAGCRTVDEFVAALLEEAKVALVPGSGFGAPDNVRLSYATSLDALETAVERIHRFMEARA

SEQ ID NO: 10040 - protein, 480 aa, Deinococcus radiodurans R1
MPLWRGGTLRSDMDTFDVLVIGGGPAGYVAAIRAAQLGFKTACVDAFERGGKPSLGGTCLNVGCIPSKALLDSSERFEMISHDTAEHGIQVAQPQIDVSKMLARKDGVVDKLTGGVAFLFRKNKVTSFHGYGKLVRQDGQEWVVDAAGTEVKAKNVIVATGSNPRALPGVPFGGHIVENSGALQIDQVPGKLGVIGAGVIGLELGSVWRRLGAQVTILEAMPGFLMAADDAIAKEALKQFQKQGLDFHFGVKIGEIKQDDSGVTVTYEENGSQVTAQFDKLIVSIGRVPNTGGLNADGVGLALDERGFVKVDQHYRTNLPGVYAIGDVIGGAMLAHKAEEEGVALAEMIAGQAGHVNYDVIPWIIYTSPEIAWAGLTEKQAKERGLNVKTGQFPFSANGRALGHGDPRGFVKVVADAQTDKLLGVHMIGGGVSELIGEIVAIMEFGGSAEDLARTIHAHPTLSEVVKEAALAVDKRAIHM

SEQ ID NO: 10041 - protein, 199 aa, Zea mays
MAMATRAIRCQLPSLVTRCESSEPIKQIQIQQRPRGGDLAENGKIVLQPRLCTLRSYGSEMIVAKKDGGGGGDEGSEVELASPFFETLTDYIESSKKSQDFETISGRLAMIVFAATVAEEVVTGNSLFKKLDVEGLSEAIGAGLGAMGCAAVFAWLTISRKRVGRIFTVSCNSFIDSLVDQIVDGLFYDTKPSDWSDEI

SEQ ID NO: 10042 - protein, 259 aa, Vibrio parahaemolyticus RIMD 2210633
MTDTSLQSNTALENETTHFGFTTVAKEEKVTKVAEVFHSVAAKYDIMNDLMSGGIHRLWKRFTIDCSGARPGQRILDLGGGTGDLTAKFSRIVGDQGHVVLADINNSMLNVGRDKLRDNGIVGNVHYVQANAEELPFPDDYFDVITISFCLRNVTDKDKALRSMFRVLKPGGRLLVLEFSKPVLEPLSKVYDAYSFHLLPKMGELVANDAESYRYLAESIRMHPDQETLEGMMQDAGFENTKYYNLTGGIVALHRGYKF

SEQ ID NO: 10043 - protein, 122 aa, Oryza sativa
ELDYLVGAVANPKKPFAAIVGGSKVSTKIGVIESLLAKVDILILGGGMIYTFYKAQGYAVGKSLVEEDKLELATSLIEKAKSKGVSLLLPTDIVVADKFAADAKSKVCSLPLIHKSWLKFTA

SEQ ID NO: 10044 - protein, 369 aa, Trichodesmium erythraeum IMS101
MEIKAAVAFEAGKPLTIETINLEGPKAGEVMVEIKATGVCHTDAYTLSGADPEGLFPSILGHEGAGVVVEVGHGVTHLKPGDHVIPLYVPECRQCEYCLSMKTNLCQAIRTTQGRGVMPNGTSRFSLNGEIIHHYMGTSTFANYTVLPEISLAKIRKDAPFDKVCYIGCGVTTGIGAVINTAKVEVGAKVIVFGLGGIGLNVIQGAKMVGADMIVGVDINPAKQELAKKFGMTHFVNPKEVEGDLVPYLVDLTKGGADYTFECIGNINVMRQALECCHKGWGMSVIIGVAGAGEEISTRPFQLVTGRVWKGSAFGGAKGRTDVPKIVDWYMEGKINIDDLITNVMPLEKINEAFDLMHEGKSIRSVVTF

SEQ ID NO: 10045 - protein, 483 aa, Porphyromonas gingivalis W83
MPKPNFDTASLLPILSRIASYPFPLGGKGVLSQHAMDATTQKTGHYGALLRLGLPIIIGQLGIIFVSFADNIMVGQHSTAELAAASFVNNILGLLLILGIGFAYGLTPLVASAEHRGQYFKAGILLRHSLRLNIAIGLFLAGVAAVMVPLFDTFNLPPSLRPLAIPYYWVQVGGLFLVTVFNAFKQFYDGMSDTRTPMYITISGNLFNVGLNYLLIFGKGGLPEMGLLGAGYATLLSRLLMLVTIVLFLYRRPSWTAIRHAFCRQMHIRRAYRRLFSVGLPVAVQMGLESASFTIAVLFVGRLGDQALAAHQIVCVITTLGYLVYYGLGAATTIRISHFKLHGKPDEVRRVAATAYRMAALTACVVVVLLLLTRHSFSFLFTPDEEVAHIVALTLIPVVVYQFGDALQAIYSNALRGMERVRFLAPAAAFCHVLLAPILSYLLGFVFILGNTPMQLAGIWSAFPISLTLLGILFYSYFRKVTR

SEQ ID NO: 10046 - protein, 243 aa, Triticum aestivum
MSMSVSMSGKASDPGSAWFGGGSRSPQPGPTHNVRLIAMAVAAFVSVLGLSLLLHLYICRVRRRNRRQAEAAAAALEAGSAAPKPAKVGLDPSAIAALPTAAYKETGEPGSGASECTICLGAMQEGEAVRVLPACAHVFHVPCVDTWLASSSSCPVCRALVEPPPSPAAPAWVQEKQGLEKECAASGSSAPPCGLGASLMRMLNRERPLARRLTQGDHAHPMEMHVEDLESQHPQQHHSVDTN

SEQ ID NO: 10047 - protein, 395 aa, Cytophaga hutchinsonii
MKTVDSFNFSGKKALIRVDFNVPLNKSFEITDDTRLKAVLPTVSKVLKDGGSAILMSHLGRPKGGPEEKYSLKHILPYLNKMFGQEVLFAADCIGEDAKAKAAALKPGQVLLLENLRFYPEEEKGDVEFAKKLSVLGDVWVNDAFGTAHRAHASTAVIGQFFKDKVCGYVMQAELDNANKLLKQGEKPITAVMGGSKISDKIMVIENLLDTVDNLIIGGGMSYTFTKALGGKIGKSINEPDKLELALSLIEKAKAKNVKLYLPLDNVVADDFSNDANKQTVKTGEIPDGWEGLDIGPETVKLFSEVVANSKTVLWNGPMGVFEFANFATGTIAIAKAVKEATQKGAFSLIGGGDSAAAINNLGFGNDVSYVSTGGGALLEYFEGKTLPGVAALEK

SEQ ID NO: 10048 - protein, 762 aa, Corynebacterium glutamicum ATCC 13032
MTTPPTEISNVNPTANEFDDPDVGRRITSAAGVPGVLHALQHAVPNRALLPLLTMNKPGGIDCPGCAWPEPSTANLGVVEFCENGAKAVAEETTPDRAGKEFWAEHSIYDLREKTDHWLGKRGRITEPMFYDRSSGDDHYRPISWDRAFAIIASKLREIEPDEAVFYTSGRAPNEPAYMLQLLARRLGTNNLPDCGNMCHESTGTALGETLGLGKGSVVMEDFYNTDLLISVGQNPGTNHPRALTAFKELKENGGKILALNPMPETGLMKFREPQSVKGALSISDKLADEYLQIRLDGDRAFFQALNKELIRRDALDHAFLDKFCSGVDETIEHLKSLDDEVLLKGCGLTAAEINKAADMVEKSDTVVVSWTLGVTQHKNAVYTIREMVNFLLLTGNIGKPGAGTAPLRGHSNVQGDRTMGIWEKMPEAFLAALENEFGFDVPRKHGFDTVNSLRAMREGKTKFFLSLGGNLVRVSSDTSVVEKGMESNELTVHLSTKPNGSQAWPGEQSLILPVIARTDKDVQKSGVQRVTVEDSAGAVHASTGKRTANKDLNLKSECDIIGTIGKQTFGDAFWQPMIDNYDVVRDHIEATIPGFHDFNRRIDNPGGFLLPNGPRERIFNTSNGKAQLTVNETNVIELPKDYLLMNTVRSHDQYNSTIYGLDDRYRGVRNGRRVVFVNPQDCKQRGLKDGDIVDIVSVFDDGERRAPNFRVVEYDTARDCVTTYFPEANVLVPLDSVAEKSNTPVSKSVVVRLEATGRTAS

SEQ ID NO: 10049 - protein, 510 aa, Vibrio vulnificus YJ016
MSAKKPLALVILDGYGYREDTASNAIANAKTPVMDALIANQPNTLISASGMDVGLPDGQMGNSEVGHTNIGAGRVVYQDLTRITKSILDGEFQQTAALVEAIDTAVKAEKAVHIMGLMSPGGVHSHEDHILAAVEMAAERGAEKIYLHCFLDGRDTPPRSAEGSLQRFQDLFAKLGKGRVASLVGRYYAMDRDNNWDRVQVAYDLLTQAKADFTYDSAVAGLAAAYERGENDEFVKATEIKAEGQESAAMQDGDAVIFMNYRADRARQITRTFVADFAGFERAAFPAVNFVMLTQYAADIPLAIAFPPASLENTYGEWLSKQGQTQLRISETEKYAHVTFFFNGGVETEFAGEERQLVASPKVATYDLQPEMSSTELTEKMVAAIKSGKYDTIICNYPNADMVGHTGVYEAAEKAIEALDASVGQVVEAIKEVGGQLLITADHGNAEMMVDPETGGIHTAHTSLPVPLIYVGDKAVEFKEGGKLSDLAPTMLSLAGLEIPAEMTGQVLVK

SEQ ID NO: 10050 - protein, 246 aa, Azotobacter vinelandii
MAQKLGVELADLKGSGPDGLVTRADVEAAAEGARARFGGEKLRGVRRSMAINMARAHAEVVPVTLFADADLHRWAQARDPMVRLAGAIAAACAAEPLLNAWFDGRSLSLRRHAQLDLGIAVDTPDGLFVPVLRDVGARSAEDLKEGMARLRADVRARSIPPQEMMGATLTLSNYGTLFGRYANPVVVPPQVAIVGAGAIRQEPVAVDGRVAVHPVLPLSLTFDHRAVTGGEAARFLKALVEALERP

SEQ ID NO: 10051 - protein, 408 aa, Shewanella oneidensis MR-1
MTVSELRFALDTFYFLISGALVMWMAAGFAMLEAGLVRSKNTTEILTKNVVLYAIACVMYLLVGYNIMYVDNAEGGWLPSFGTLIGSQAADANHALESDFFFQVVFVATAMSIVSGAVAERMKLWAFLVFSVVMTGIIYPVEGYWTWGKGFIASLGFVDFAGSGIVHMTGAAAAIAGVLLLGARKGKYGPNGQVNPIPGSNLPMATLGMFILWMGWFGFNGGSQLMVSDAANASAVAKVFVNTNTAAALGAISALIVCKMIWGKADLTMILNGILAGLVAITADPLSPSLLMAGVIGLVAGGLVVFSIVGLDRIKIDDPVGAISVHGVAGFLGLMCVPLSNANATITAQLTGAAIIFAWVFSASFAVWFVLKMTMGIRVSEEEEYNGMDASDCGIDAYPEFVTVKSAG

SEQ ID NO: 10052 - protein, 461 aa, Bacillus subtilis
MKKDTRKYMIYFFGALGGLLYGYDTGVISGALLFINNDIPLTTLTEGLVVSMLLLGAIFGSALSGTCSDRWGRRKVVFVLSIIFIIGALACAFSQTIGMLIASRVILGLAVGGSTALVPVYLSEMAPTKIRGTLGTMNNLMIVTGILLAYIVNYLFTPFEAWRWMVGLAAVPAVLLLIGIAFMPESPRWLVKRGSEEEARRIMNITHDPKDIEMELAEMKQGEAEKKETTLGVLKAKWIRPMLLIGVGLAIFQQAVGINTVIYYAPTIFTKAGLGTSASALGTMGIGILNVIMCITAMILIDRVGRKKLLIWGSVGITLSLAALSGVLLTLGLSASTAWMTVVFLGVYIVFYQATWGPVVWVLMPELFPSKARGAATGFTTLVLSAANLIVSLVFPLMLRPMGIAWVFMVFSVICLLSFFFAFYMVPETKGKSLEEIEASLKKRFKKKKSTQNQVLNERTL

SEQ ID NO: 10053 - protein, 503 aa, Mesorhizobium sp. BNC1
MSVLNENIARAVEYLKPFREGGVLNHVGGAQVPAASGETFETVSPVDMSTLAKVARGGAADTDKAVAAASEAFKTWSKTSGAERRKILIKVAEGIEARAEEIAFIECMDTGQALRFMSKAAIRGAENFRFFADQAPGSEDGRALRTPAQMNVTSRRPIGPVGVITPWNTPFMLSTWKIAPALAAGCTVVHKPAEFSPLTANLLVQIAEEAGLPKGVLNVVNGYGEEAGRALTEHKGIKAIAFVGESRTGSMIMKQGADTLKRVHFELGGKNPVIVFDDADLDRAVDAAAFMIYSLNGERCTSSSRLLVQESIYEEFTRRVAEVARGIKIRHPLDPETVIGPLIHPSHEKKVLSYFEKAKEEGAIIATGGEKYGEAGCFVRPTLFTNARNDMAIAQEEIFGPVLTAIPFKDEDEALAIANDVNYGLAAYLWTRDLGRAMRMTDNLEAGMIWVNSENVRHLPTPFGGVKASGIGRDGGDWSFDFYMETVNVSFPRREHKVSKLGG

SEQ ID NO: 10054 - protein, 310 aa, Eremothecium gossypii
MVRVMQKEDCHFRRLSDGTQIPSVGLGVYQVSEQTVQDLVYEALEVGYRLFDSAQAYHNEDGVARGIAAWLKHAPGRRREDVYFTTKINTQNHGYEATKKSLEKSLHAAGPLGYIDLVLVHAPMSDRTRRLGTWQALEEAVVEGQVRSIGVSNYGQQHLSELLGWEGLKIRPVVNQVEINPWLCRQELVQYCRENNIAVQAFSPLMRGKRLDDPILQKVAHQYDKGVAQILVRWSIQMGFIVLPKAAKKERLAPNFDIWDFELSAETMSELTHSDDYFVTVPGGIPRLMKAEVISTITDLQHETLVDMEA

SEQ ID NO: 10055 - protein, 321 aa, Oryza sativa
MASCMMIPIIVLILVSMAANALADDRRQLQLMQDPAAGDVLSYHGGAVLSGDIPVSIVWYGKFAPSQKDIVVDFVQSLTSTSSSSQRAATPSAAQWWSTLATVYLSNATTGGGGKPAAATRVVLSGQVSDEEYSLGKTLTLVQVFQLAAGAAPKRGAVVLVLTDPDVVVEGFCSVRCGVHGSDAGAGYAYAWVGNAERQCPGQCAWPFAAPPYGPQGSPLGAPNGDVGTDGMVVTLASTLAGAVTNPFGDAYYQGDKDAALEACTACAGVYGSGSYPGYAGKVLVDEANGGSYNAIGGGGKRFLLPAIYNPATTGCCSTTV

SEQ ID NO: 10056 - protein, 321 aa, Triticum aestivum
  unsure (1)..(321): unsure at all Xaa locations
MESKHTDQANVKAKLSTMHSKVICCKLYISESQNAAVVDAISRIGQKDPEVVLLNKFEDEYYNRVRYTLVSYITNESSTGGAVFSPIRKVLLAMIEAAFSAINLEVHCGTHPRIGVVDDISFHPLNQADTIEDAAQLAKLVASDIGNGLQVPVFLYAAAHPTSKSVSAVRRELGYFRPNHKGVQWAGPVLPDTLPMKPDVGPVHVPRERGATMVGAQPLVESYNVPIFCKDVPTVRRITRRVTXRSGGLPSVQALAXXHGDNCTEIACXLLDPDHVGADRVQWLVEQIAEEQGLEVEKGYFTDLSKHMMLERYSEMVSAAD

SEQ ID NO: 10057 - protein, 478 aa, Oryza sativa
PLQGDFPETIEEFLQYGSMKCIAFNRRGTLLAAGCANGTCVIWDFETRGIARELHDKDCTAPITSVAWSKYGHHLLASATDKSLTLWHVVNEKKIARITLQQTPLSVRLHPGGPSTPSICLACPLSSAPILVDLNTGSTTVLPAFLSDNGNLPAPNTRNKFSDGSPPFTPTAATFDKYGDLIYVGNSKGEILIIDSKSIKVHAVIPIPGGTVVKDIVFSRDGRYLLTNSNDRVIRVYDNLLPVKGKLKANGASCLAISCELLDAIAKIPWKAPCFSGDSEWIVGASASKGEHRLCIWNRSGRLVKILEGPKEALIDIAWHPVDPTIVSVSVAGLAYIWAKEHVENWSAFAPDFVELEENEEYVEREDEFDLNAYVEKAEEQLVNEDEYVDIETYDKNSTFSDLDDSSSTTMELIYLAAIPIPDTPDEQPDKCLGSSSKLEDSNHSDSPSSLDAVQNGQAIPPASSPMEGKVLDYGSRA

SEQ ID NO: 10058 - protein, 511 aa, Geobacillus stearothermophilus
MSKKPVALIILDGFALRDETYGNAVAQANKPNFDRYWNEYPHTTLKACGEAVGLPEGQMGNSEVGHLNIGAGRIVYQSLTRINIAIREGEFDRNETFLAAMNHVKQHGTSLHLFGLLSDGGVHSHIHHLYALLRLAAKEGVKRVYIHGFLDGRDVGPQTAPQYIKELQEKIKEYGVGEIATLSGRYYSMDRDKRWDRVEKAYRAMVYGEGPTYRDPLECIEDSYKHGIYDEFVLPSVIVREDGRPVATIQDNDAIIFYNFRPDRAIQISNTFTNEDFREFDRGPKHPKHLFFVCLTHFSETVAGYVAFKPTNLDNTIGEVLSQHGLRQLRIAETEKYPHVTFFMSGGREEEFPGEDRILINSPKVPTYDLKPEMSAYEVTDALLKEIEADKYDAIILNYANPDMVGHSGKLEPTIKAVEAVDECLGKVVDAILAKGGIAIITADHGNADEVLTPDGKPQTAHTTNPVPVIVTKKGIKLRDGGILGDLAPTMLDLLGLPQPKEMTGKSLIVK

SEQ ID NO: 10059 - protein, 349 aa, Emericella nidulans
MCIPTMQWAQVAEKVGGPLVYKQIPVPKPGPDQILVKIRYSGVCHTDLHAMMGHWPIPVKMPLVGGHEGAGIVVAKGELVHEFEIGDQAGIKWLNGSCGECEFCRQSDDPLCARAQLSGYTVDGTFQQYALGKASHASKIPAGVPVDAAAPVLCAGITVYKGLKEAGVRPGQTVAIVGAGGGLGSLAQQYAKAMGIRVVAVDGGDEKRAMCESLGTETYVDFTKSKDLVADVRHGRGCLGAHAVILLAVSEKPFQQATEYVRSRGTIVAIGLPPDAYLKAPVINTVVRMITIKGSYVGNRQDGVEALDFFARGLIKAPFKTAPLKDLPKIYELMEQGRIAGRYVLEMPE

SEQ ID NO: 10060 - protein, 373 aa, Ustilago maydis 521
MLNATVSASRAARSIVSVAQVARPALYGSARPSNTLAHTSPSSSRALSKTHNFGKAKKIKTPPFASTDDDVVVPYPEDSSRHPRDDVGHNTTGGRVGRHTQRTLASFSMEGKVCVVTGAARGIGNLIARTFVESGANHVAIVDLDEGESQHAAKEVDEWFTNHGGVKPGELDIQGYGCDISDEVQVQDVINRIHQRFGKINVAVNSAGIVENFPATEYPTAKLKKLFDININGSYFVAREVAKRMMQDKVQGSIVMIASMSASVVNVPQAQAPYNASKAAVKHLAKSMAVEWAKAGIRVNSLSPGYMLTSLSRAVLENSPNGKELRTNWENMTPMGRLGNPEDLKGAVVYLSSDASAFTTGADLIVDGGYTSV

SEQ ID NO: 10061 - protein, 250 aa, Glycine max
MSRRYDSRTTIFSPEGRLYQVEYAMEAIGNAGTAIGILSKDGVVLVGEKKVTSKLLQTSTSTEKMYKIDDHVACAVAGIMSDANILINTARVQAQRYTYAYQEPMPVEQLVQSLCDTKQGYTQFGGLRPFGVSFLFAGWDKNFGFQLYTSDPSGNYGGWKAAAIGANNQAAQSILKQDYKDDITREEAVQLALKVLSKTMDSTSLTSEKLELAEVFLSPSGKVKYQVCSPENLTKLLVKFGVTQPATDTA

SEQ ID NO: 10062 - protein, 279 aa, Pseudomonas aeruginosa
MTTAAPTPSLFGQCLSEFLGTALLIFFGAGCVAALKVAGASFGLWEISIIWGVGVSMAIYLSAGVSGAHLNPAVSIALWLFAGFEGRKLPFYITAQVAGAFCAAALVYTLYSSLFIEFEQAQNIVRGSQDSLALASVFSTYPHPALSVGQAFLVEVVITAILMAVIMALTDDGNGLPRGPLAPLLIGLLIAVIGSAMGPLTGFAMNPARDFGPKLMTYLAGWGPIAFTGGREIPYFLVPIFAPILGACLGAGGYRVLIARHLPSAAAPAEAEPEKVRAS

SEQ ID NO: 10063 - protein, 629 aa, Arabidopsis thaliana
MVVNGVSETETLLKFKNSLVIGRANALESWNRRNPPCKWTGVLCDRGFVWGLRLENLELSGSIDIEALMGLNSLRSLSFINNKFKGPFPEFKKLVALKSLYLSNNQFDLEIPKDAFDGMGWLKKLHLEQNNFIGEIPTSLVKSPKLIELRLDGNRFTGQIPEFRHHPNMLNLSNNALAGQIPNSFSTMDPKLFEGNKGLCGKPLDTKCSSPYNHSSEPKSSTKKTSSKFLYIVAAAVAALAASLIIIGVVIFLIRRRKKKQPLLSAEPGPSSLQMRAGIQESERGQGSYHSQNRAAKKMIHTTKLSFLRDDKGKFELQDLLKASAEILGSGCFGASYKTLLSNGSVMVVKRFKHMNSAGIDEFQEHMKRLGRLNHENLLPIVAYYYKKEEKLFVSDFVANGSLAAHLHGIIWQPSLDWPTRFNIVKGVGRGLLYLHKNLPSLMAPHGHLKSSNVLLSEKFEPLLMDYGLIPMINEESAQELMVAYKSPEYVKQSRVTKKTDVWGLGVLILEILTGKLLESFSQVDKESEEDLASWVRSSFKGEWTQELFDQEMGKTSNCEAHILNLMRIGLSCCEVDVEKRLDIREAVEKMEDLMKEREQGDDDFYSTYASEADGRSSRGLSSEGINLS

SEQ ID NO: 10064 - protein, 311 aa, Shewanella oneidensis MR-1
MKVAVLGAAGGIGQALALLLKTQLPAGSKLSLYDIAPVTPGVAVDLSHIPTAVEIKGFAGEDPTPALVGADVVLISAGVARKPGMDRSDLFNINAGIVRNLIEKVAVTCPKALVGIITNPVNTTVAIAAEVMKKAGVYDKNRLFGVTTLDVIRSETFIAELKGLNVADVKINVIGGHSGVTILPLLSQVEGVTFSDEEVASLTKRIQNAGTEVVEAKAGGGSATLSMGQAACRFGMSLVRGLQGEANVVECAYVDGGSEHAEFFAQPVLLGKNGIEKVLPYGEVSAFEANARDSMLDTLKGDIKLGVDFVK

SEQ ID NO: 10065 - protein, 3291 aa, Stigmatella aurantiaca
MSTSEFIVYLQQKGIELWIEGDTLRFRAPPGHLTPELRTALKDKKEQLLEHLRSASRSANLQTVASPPDAASRFAPFPLTDIQNAYWVGRQGAFDAGGVAAHSYLELAFDTLDLPRLESILQRLIEYHDMLRMVVLPTGEQVVLEKVPPFTLTAYDLAGAPASQIEAHFEAIRGELSHQVLPTDRFPLFDVRASKLAGGRVHLHISFDLLTADAFSVQILIEQCASLYLNPEAQLVPFKRTFRDYCVLAAQRADPSSRAYQNSLAYWRNRLEKLPNAPDLPLVNDTDVKGQHQFVRRKAGLDQASWRAFRNHAKAAGITASMALCAAYGETLRAYSRSNRLTLNLTLFNRLPLIEDVERIVGDFTSGILLELDGSKPESFAARARRLQGQFINDLEHSAVSSVKVLREAIRLGRWDAGTAMPYVFTSLISETGRSLSVSEGVKIVDVISQTPQVWLDHQVFELDGGIYYSWDSVDALFPAGLIDAVFESYGRLLHRLSSDASAWDALSRQPLLPAQLASRAEYNATERPVSQERIESLFLRQAERQPGAVAVIAGEQVLSYGKLERRSARIAAWLIAQGVKPDQLVAIVAEKGVEQVVAALAILRAGAAYLPLSPSLPPERLHALLEEAQADVVLTQSALESSLRWPEGPRRLSVDRDEFLEAPKGALPPVQGNNLAYVIYTSGSTGRPKGVMIDHRGAVNTLLDMNERFNVGPRDRVLALSSLSFDLSVYDLFGVLAAGGAIVMPEPGTSRDPGRWQVLLEKTGVTIWNSVPALMDMLVEFSEGSGLRLPDSLRLVLMSGDWIPVTLPGRIRALSKNAELVSLGGATEASIWSILYRIGDVGAGWRSIPYGRPMVNQRFYVLDEALEPCPDWVAGQMYIGGIGLSLGYYRDPVRTAERFIVHPKTGERLYATGDLGRFMPDGNIEFLGREDFQVKIQGYRIELGEIEAALDSHPAVRSSVVNAVGKPGGTRRLVAYVVPGELTSNAPPASAPSASTLSLESAPKLADEYSALESQGAGLITDTVERLEFKLKQHNLRPDAGSRAQVALKKPEFDEAFRKRYMERQSAQSFLSEPVSLERLSELLSCLMQIALEDSMMPKYRYASAGGLYPVQVYLHVKPGRVGGLAGGTYYYHPKRHELVLLTADAAMDRSQHASRNRPVFDAAAFSVFLVGKLSAIAPLYGSMARDFCMLEAGYMAQLLMSVAPAHKMGLCPIGVMDFEPLRSQLALDEHHVLLHSFLGGGAVTAAAAAKPAPKAADASLPDELRRYLASKLPEYMVPSSFVLLDSLPLTSNGKVDRSALRAPAELVEVKPPAARAPGSDVERSLAAIVQEVLQLQEVDVHRNFFDLGGTSVHIVQMHRRMKERLKADIPIAQMFRYTTVSALAEFIHSQRVQAASPAPAPSPQTAPEVVAKAVEAPSPVREAVREEAAPRALSATGVSKARDTASRPSTGRQEPVAIVGMSGRFPGAKNLGEFWRNLRDGVESISFLTERELRQSMDDPSMLSDPSYVRASSSLEDVELFDADLFGFMPKQARITDPQHRIFMECVWEAIEDAGYNPRKLDKLVGVYAGAIISNYLLFNLGPSVGREGAVRDLQTLIGNDKDYLATHVSYKLGLKGPSLSVQSACSTSLVAVHLACQALVNKECDMALAGGVSVRLPQKSGYLFEQGGILSPDGHCRAFDANAQGTIFGSGAGVVVLKRLSDALADGDNIRAVIRGSAINNDGSLKIGYTAPSQDGQAAVISAALAAAGVSPSTLGYIETHGTGTPLGDQIELSALQQVFGSSTGQASRCPIGSVKTNVGHLEVAAGIAGLIKTVLSLQHRRLPPSLNFKQPNPQLESSTSSFYVNTQLSDWPAGELPRRAGVSSFGIGGTNAHVVLEEAPEPGRQVAERERPLHVLSLSARSEVALKALAGRYAQHLASSGAVNLADVCHTANAGRAQFKHRLALVAESAAQLSQQLGLFAEGKPAEVLLGQAPNAGKAEVVFLFTGQGSQHEGMGRELYETQPVYRESLKKSDELLRPVLNESLLEVLYGGKGHLLEQSGVSQPALFAVEYALAQLWKSWGVKPAAVMGHSLGEYVAACVAGMCTQEEGLKVVAARGRLMEQLPEAGEMVAVLAAEAKVQEAVAPYAQSVSVAAVNGPEETVVSGRAAQVEQVVSKLKEQGVDCRKLKTTHAFHSPLMEPMLEEFEKEAGKVKWKRPEIEVVSNVSGQLAKGEEGQKGEYWKKHIRQPVKYWEGLKGLYEKGYRVFVEVGPKPTLVNVGKRNLPGGEAEWVGSLKQGSNEWQQMLGSVAKLYVKGVGVDWAGFDQDYPRAKVALPTYPFQRERYWVERSRGAAASAVSSAGSRRLLGRRMSSPALKETVFESFVGTRALPFIDDHRVNGTVVLPATVYMEMAQAAAVELFGAGPHTVESLLIHEALVLQDETERALQLVLTPGGEGEFSFQVFSAQGSPAEPQREASWTLHTAGTIRRAEKATSQPKPMSIEGLQSWCAQTVPVTALYENFEARGITYGTTFRGVQRLHVGRGEALGWIQLPEELNSEAVLAPIHPALLDACLQVCGATRLEEKVEAQADVLYLPVGMKRFRIWQSPGAACWSHVSIQPQAAASEKMLTGSVRLLDASGEVCAEIEGLQFRQVSRAALRRSIQVGREWTYDVSWEQRPRSGILEDAVLEGTWWVLADSAGVGTRLVEALQSHGARCVVVRPGPAYEARADRTFVLNPARVEDFERLLVDSQGPANLPCRGILHLWGLDEAPSLEAAQELGCRSVLNLAQALGKSRLEVSPRLWIATRGTQRTGHETQPPSLTHAALWGLGRTLAVEHPELSVALLDLDERAHASEDSLLIEEFLLDPDGEQVAFRNGRRYVSRLARCAVPNTQPSATRLREDVSYLLTGGLGAIGLHVARWMVERGARHLVMMGRTEAGSAAQEALQSLREAGARIRLEQGDVSQPGDVARVLASLAQSGPPLRGVMHLAGVVEDSMLQQQDWPRFKRVLAPKLQGSWNLHHQTKEMDLDFFVLFSSSSALLGAAGQGNYAAANAFLDSLAHHRRALGLKAVSINWGPWSGGGMAASFAGSEQRRWVDWIEPAQGLELLGWALDAAQAQVAVLPVDWAKYFQRFGDTGATKFLSRLLEETRSGTAKARQPKLLERLKGLTRNRQQDVLLEYVYSQVTQVLGLDPSRPLAGNQRLFEIGMDSLLAVELRNRFQSTLGVDRPLSSTLVFDHPTVEALTGYLAAEFLKLGPVDPVSAQASKGEEAAAQTLANLEQLPQNELGSLLDEKLALLEKLMGDG

SEQ ID NO: 10066 - protein, 416 aa, Methanosarcina mazei Go1
MLRVMTSRNFLTIDDFDIRGKTILLRVDMNSPMDTQGHILDDMRIRSHIATLKDLESAKVVVLAHQSRPGKKDFTTMKPHAHLLSRYLGRQVTYVDDIFGTFAKTQIASMEDGDVIMLENVRFYSEESLERTTAEQANTFMVKKLAPFVDIFLNDAFAVSHRSHLSVVGFTEVLPSGAGRVMEKELISLEKGVKSGERPSVFVLGGAKVDDSLRVTENVLTNGGADRVLLTGVVANVALAASGVNIGKANLDFIKSQGYEDQIERARGLLAKFEDKIGLPKDVALNDNKKRVEAPISELNSDSLPINDIGLETIVDYTNEIQNAKTVVLNGPAGVSEIEDFALGTHEIIKAAIKSDFSIIGGGHISVEVAHLGLEHRFSHISTGGGACIDFLAGEKLPGVEALKAAYNKYQEAKKL

SEQ ID NO: 10067 - protein, 293 aa, Saccharomyces cerevisiae
MESTSGERSENIHEDQGIPKVILPADFNKCSRTDLVVLISRMLVSLIAINENSATKKSDDQITLSRYHSKIPPNISIFNYFIRLTKFSSLEHCVLMTSLYYIDLLQTVYPDFTLNSLTAHRFLLTATTVATKGLCDSFSTNAHYAKVGGVRCHELNILENDFLKRVNYRIIPRDHNITLCSIEQKQKKFVIDKNALGSLDLDSYSYVNRPKSGYNVLDKYYRRIVQLVGSFNASPDKSRKVDYVLPPNIDIVSESGSQTTQLKGSSSPNSHSSQKRYSEAKDAHIYNKRSKAD

SEQ ID NO: 10068 - protein, 306 aa, Saccharomyces cerevisiae
MKVNMEYTKEKKVGEGTYAVVYLGCQHSTGRKIAIKEIKTSEFKDGLDMSAIREVKYLQEMQHPNVIELIDIFMAYDNLNLVLEFLPTDLEVVIKDKSILFTPADIKAWMLMTLRGVYHCHRNFILHRDLKPNNLLFSPDGQIKVADFGLARAIPAPHEILTSNVVTRWYRAPELLFGAKHYTSAIDIWSVGVIFAELMLRIPYLPGQNDVDQMEVTFRALGTPTDRDWPEVSSFMTYNKLQIYPPPSRDELRKRFIAASEYALDFMCGMLTMNPQKRWTAVQCLESDYFKELPPPSDPSSIKIRN

SEQ ID NO: 10069 - protein, 386 aa, Glycine max
  unsure (1)..(386): unsure at all Xaa locations
MEHKLATTEGQPIRCKAAVXRKAGEPLGIEEIMVAPPMPGEARIRIICSSLCRTDISFRNMQGPPANFPTILGHEAIGVVESVGEDVTEVAKGDMVVPIFIAECGECIDCKSSKSNLCSKFPFKVSPWMPRHATSRFADLKGEIIHHFLSVSSFSEYTVVDIAHLIKIDPAIPPNRACLLSCGVSTGVGAAWRTAGVEPGSTVAIFGLGSIGLAVAEGARLCGATRIIGVDVNPERYEIGKKFGITDFVHSGECEKKSASQVIIEMTDGGADYCFECVGNASLMHEAYASCRKGWGKTIVLGSDKPGSKLSLSCSEILVSGKSLVGCMFGGLKPKSHVPILIKRYLDKELNLDGFVTHEVEFKDINKAFDLMIKGQCLRCVIWMDK

SEQ ID NO: 10070 - protein, 444 aa, GIBBERELLA ZEAE PH-1
MASSTAEFWSKADSYVMTTGVPFSPVIISKALGTRLYDTNGKQILDFTSGQMSSLLGHSHPEVVEVVKHYVSELDHLLSNMITHPVVNLAERLAKFLPSPLQKSFFLNTGSESTEAAIKIAKCYTGKFEIVAFSASYHGLTQGSGSATYSAGRSRGGPTMPGSLAFPAPYGYRSPFRKADGSWDWETEMDFGWSLIDRQSVGSLAAFIMEPILSTGGILDLPTGYLKRMQDECRKREMLIIMDEAQTGVGRTGKMFAFEHEEGVVPDILALSKTLGCGLPLASVSTTSEIERGCKEAGFLWLTTHLNDPLTAAVGDKVLEIVERDNICQKASERGQQLRAGLEKLQQKYWCIGDLRGRGLLQGIEIIADPKTKAPGADLGQAISDKAMELGLSCNVVNLPGMGGVFRLAPAVTVTAEEIEQGLEILDKSFGAVLELRGQMTAAA

SEQ ID NO: 10071 - protein, 77 aa, Glycine max
MGLWTLLEGFLLLANALAILNEDRFLAPRGWGFQDFSGGRTKSFKGQLIGLIYATQYLRVPLILLNSICIFLKLVSG

SEQ ID NO: 10072 - protein, 268 aa, Cytophaga hutchinsonii
MKIAILGGGNMGMTYAKAFVSRKIVSKDELLIIEKHDEKREQLKQEGVASLSADIDDSIKNYDILIVAVKPQDFRVLSETLKKYLTENQMILSIMAGIQIAQIQTLLEHKNVVRAMPNTPAQLGFGITAFTVAKDASFENISVVDMLLETTGKAIFMKDETMLDAVTALSGSGPAYFYYIVQNMIEAGKQMGVDENVAGMLVKETMMGAFQILNHSKSSIDELIAMVASKGGTTEAALNTLKQREVGAHIIEALKNAEKRAKELSGNA

SEQ ID NO: 10073 - protein, 256 aa, Mycobacterium marinum
MRYPDLAGKATIVTGAGAGIGLAIAERLAAEGAAVLCADIDGASAEQAAAKIGSGAVGYQVDVSAEEQVAGMVEACVTSFGGLDKLVANAGVVHLAPILDTAVEDFDRVIGINLRGAWLCTKHAAPKMVERGGGAIVNMSSLAGHIGVGGTAAYGMSKAGISHLSRVTAAELRSANVRSNALLPAFVDTPMQQSAMAMFDEALGTGGANTMIARLQGRMARPEEMASIVAFLLSDDSSMITGTTQIADGGTIAALW

SEQ ID NO: 10074 - protein, 1004 aa, Shewanella oneidensis MR-1
  unsure (1)..(1004): unsure at all Xaa locations
MNRRQFFKLCAAGAATSAISALGLMSEKAYAAVREFKLLGAKETRNNCPYCSVGCGLLMYSQGSGGKNSEHAIFHIEGDADHPVNRGALCSKGAGLVDYVNSPHRLQYPEYRAPGSNKWERISWQDAFKRIARLMKDDRDANLIEKNADGVTVNRWLTTGMMTSSGMANESGLATQKFARALGLVAIDTIARNXHSPTVASLAPTFGRGAMTNHWIDIKNSNVVIIMGGNAAEAHPVGFGWVTEAMQHNNAKLIVVDPRFNRSASLADHYAPIRSGTDIAFLLGVIRYLISTNQVNFDYVKAYTNASYLVRDDFDFHDGLFSGFDEAKGEYNKESWFYQLDEDGYAIVDETLEHPRCVWNLLKQHVERYDFATVSNITGTPTEDYQVVCDAIASTHTKDRVATFMYALGWTHHSKGAQNIRSMAMIQLLLGNIGQLGGGVNALRGHANVQGSTDMGLLAQSLPGYLKLPNDKEPTLAAHLAANTPKPLRPGQTNYWQNYPKFYVSLLKAFWGENATPENEFGYQWLPKWDQMYDFGKHLDMMYRGKVNGCIVQGVNAINSMPNRNKNIKALSNLKFLVVLDNLSSETATFWQNEPGFNEVDTASIQTEVFRLPATVFAEEEGSIVNSGRWMQWHYKWANPPGEAMSDSEIVSGLLLELRKLYREEGGKLPEPIQAINWNYTDPHNPSSIELTKELNGYDVATKRQISSFAELKADGSTASACWVYAGSWTEAGNQMARRDNHDPSGKGITPGWAFAWPLNRRVLYNRASCDVNGKPWDEHRKIVEWKDGKWEGIDVPDFNAKLNPQESAHPFIMQADGVGRFFALKLLKEGPFPEHYEPVESPIGTNPLHPNVVHSPVLRWFEGVKDTIGTKEEYPYACTTYSLTEHFNFWTTHCRLAAIAMPETFVEMNEQLAAEKGIKNGDWVKVSSKRGHILTKALVTKRMRPLQVNGQTVHTLGIPRHGSHNALTRKSYSCNVLTTEMGDANTGVPEYKAFLVNVEKAEV

SEQ ID NO: 10075 - protein, 172 aa, Bdellovibrio bacteriovorus HD100
MAQLKDQMVSFLTSDEIKELVENLASQIEADYEGKEIVFICPLRGSIHFTADLMRKVDLPQQVDFVHVQAVERGGAIKIVKDISVNIAGKHVIVVEEIIDTGRTLSFLRSRLFASAPASLKIVTLLDKPARRELPIKADYIGKTIEDRYVVGYGMDSEELGRNYPDIYALKN

SEQ ID NO: 10076 - protein, 115 aa, Bacillus anthracis str. A2012
KGIARQITELAGKVRTKSLKADEMQGGTFTINNTGSFGSVQSMGIINYPQAAILQVESIVKRPVIMENGMFGARDMVNLCLSLDHRVLDGLICGKFLGRVKEILENTSENNTSVY

SEQ ID NO: 10077 - protein, 96 aa, Glycine max
KVENPAGLEACLPNRSPDEVALRATAMELLHDKYFSEEPLPVPVSELRVPMTRKGQDEDSLCGWGDIDEMDCDSDFDEFGPLNITRTGTGFSIQFP

SEQ ID NO: 10078 - protein, 217 aa, Glycine max
MQAWECSPGKEFAWNLLSLFTTSGMLFLEMSLLAFLLQGNSTTGLEALTRTFGISGIIVGFDILVKAIYLFAFGIPIFINSDYPTPHVKWNLWVAHELLLTLVYGFILVMYHSRWRERLPGYIVYLPLFAARPAYYKYVTIMFILNAIALFACGITGNGAAFGFWLYHFTVVCYHAAYLPLLYITFLADFFQEEDLHLENVYYSEMKDAGFFEADWN

SEQ ID NO: 10079 - protein, 1003 aa, Magnaporthe grisea 70-15
MYLPTRLCTTAIVLVSVVTALPAPINGAPSRSSLESRQNVAAVQNADGNCADMTVVFARGTTEAGNAGTVVGPPFLQAIRKLAPGLSVNMQGVPYPANFAGIMAGGDRQGTAKMANIIKTLATDCPNTGIVISGYSQGAMLMHNAAAQLDPETASHVVAAVSFGDPFRRRPVNGVDQSRTLVVCHAGDNVCQGGGMILPAHLTYGQDVGKAAAFVMEAAAAVVASMGAAPATEAAPGTEAVPGAGAVLGAGAVPGTGGAPGTEAAPGTGASPGTEAAPGTGAAPGTEAAPGTGAAPGTEAAPGTGAAPGTEALPSTGASPGAQVVPRAEGSSGARTLKKGPRALPGPGGSPIPGGLTGMGPLLGAGPLAKGGGLPGSGGPGGFPKGGGLGGAGGLGGAGGLGGAGGFPKGGGLGGAGGLGGAGGLGGAGGSPKGGGLGGAGGSPRLGGPPRAGGLPGLGGPPRSGGPPKAGGLPRGGGPPKPGGLPGAGGPPKPGGLPKAGGLPPAGGPSSAGGSPGGGGSSGGGGASGGGGASGGGGASGGGGSLGGGGASGGGDSLGGGGSSGGGGSLGGGGGSLGGGGSSGGGGSSGGGGLSGGGGLSGGGGLADAGGSSPGGGLPDTGGSSGGGGLSGSGGSPGGGGLTGGGGLLGGGLPPGGGLLGGGLPDPASLLGGGLPDPASLLGGGLSGGGGLLGGGLPGAGALPDPASLLGGGLPDPASLLGDGLPDPASLLGGGLPDPASLLGGGLPGGGGLLAGGLPGGLAGGGGLLGGGLPGAGALSGAGGSTGGGGLLGGGLPSPGGLTGGGGLLGGGLSGAGGLPKPSSLLGGGLPGGGGLSAGGLTGGGGLLGGGLAGAGGLPKPSSLLGGGLPGGGLAGAGGLPKPSSLLGGGLPGGGGLSAGGLTGGSGLLGGGLSGAGGLPKPSSLLGGGLPGGGGLSAGGLTGGGGLLGGGLAGAGGLPKPSSLLGGGLPGGGGLLGGGLPGIKTVQNTGGKAVDGDKDEVTS

SEQ ID NO: 10080 - protein, 337 aa, Acrosiphonia duriuscula
MPRNRDDSPDGAYLIHGRYEKIEKLGEGTYGKVYKARDSKTDQVVALKKCRLQLDAEGVPPTTIREVSLLQVLSRSNHVVKLLGVEQIEEDGKVVLYLIFEYLQHDLKKFMDFKKKEKHNPLQPELVKPYLFQLIRGMAFMHQHGVMHRDLKPQNLLVDPKTNVLKIADLGLGRVFALPCKAYTHEIVTLWYRAPEVLLGTKIYSLPVDVWSIGCIFAEMVKGIPFFPADCEIAQLFMIFQVLGTPNEEVWPGVTSLRDWHMYPQWQPMDLHTHLEGLLDHQGCDLLKKMLVYNPNKRIPAKQAMKHPYFDDLDMEVMDALENPEVLNAGMEYQENA

SEQ ID NO: 10081 - protein, 437 aa, Pseudomonas fluorescens
MAERLNNDFQFIDVGRKDPKKKLLRQRKKEFVEIYEPFKPQQSADQAHRCLGCGNPYCEWKCPVHNFIPNWLKLVAEGNILQAAELSHQTNTLPEVCGRVCPQDRLCEGACTLNDGFGAVTIGSVEKYITDTAFAMGWRPDMSKVKPTGKRVAIIGAGPAGLGCADVLVRGGVTPVVFDKNPEIGGLLTFGIPEFKLEKTVLSNRREVFTGMGIEFRLNTEVGKDVTMEQLLEEYDAVFMGMGTYTYMKGGFAGEDLPGVYDALDFLIANVNRNLGFEKSPEDFVDMKGKKVVVLGGGDTAMDCNRTSIRQGAKSVTCAYRRDEANMPGSRKEVKNAKEEGVKFLYNRQPIAIVGEDKVEGVKVVETRLGEPDARGRRSPEPIPGSEEIIPADAVVIAFGFRPSPAPWFEQFSIQTDSQGRVVAPEQGQYKHQTSNP

SEQ ID NO: 10082 - protein, 138 aa, Eremothecium gossypii
MSSVPIPTTVVNWDILNEVVSMDEDDPGFSQSLFVQYFDQADTTFQQIQRELESEAPELAALSSLGHFLKGSSASLGLQRVAWACERIQNYGKRGEGAASAHEPDAHYVQLISDTLQLARAEVQAARKELSEYYHTEL

SEQ ID NO: 10083 - protein, 384 aa, Enterococcus faecalis V583
MDRKNIATRYQQPTENLLMDIATLAKKTPNLIDLSIGDPDLITDERIIEQAANDAKNGHTKYTASDGSEAFIEAVIQFYQSHYQLSFQPNQVRATVGALHGMYLALQVILNPGDEVIIHEPYFSPYKDQVLLADGVPVFLPTYEEDGFQIDVALLKEKITPKTKAIILNSPNNPTGAVFSEETFREIAQVAIEHNLYILSDEVYEAFCFQETFTPMATFAPENTITFGSFSKAFAMTGWRIGYMIAPDYINEVAKLINEGVTYSAPTLSQQAGIYALQHFDEFVDPIVEVFQTRLEYVAQRVAKIPFLSLHPVKGSIYAFINIQKTGLTSVPFVEKLLKETQVLVIPGKAFGETTGDEYIRLAATQNLDLLKEAFDRIERMTFE

SEQ ID NO: 10084 - protein, 161 aa, Glycine max
GDLSNVGLRNVLARPSVGSERIPDLLYCVYQGMFACITVALASGAVSERGRMLPCVVFMFIWTTVVYDPLACWTWNPAGWSYRLGGLDFAGGTPVHIASGSAALAYSYILGKRAGHGTHALNYRPHNITFIVIGTVFLWVGWFGFNAGSALSANLRAVMAA

SEQ ID NO: 10085 - protein, 548 aa, Pseudomonas sp. BW13
MITLSISGMTCASCTHHVQEALLAVAGVSSAMVSYDEANAVIETDTDIQKTLLDAVATLGYKAKVVALGNNSRLTKDEDTEELHVAIIGSGSAAFACAIKAAEAAKVTLIEGADVIGGCCVNVGCVPSKILIRVAQLAEQRHNPFGGLENHSPQLSRSLLLAQQTARVEELRAAKYQNILDANPALSLIKGWARFKDANTLIVSQNDGTQQQVHADKVLIATGSTPTIPPIEGLSGTPYWTSNEALFAEEMPQHLVVIGSSVVALEIAQAYRRLGSEVTVLARHTLLYREEPLLGEQLSGCFEKEGIRVLNHTQASSVSYDGQQFTLEILSSEAGAGTLHCDKLLISTGRHANTGKLNLDAVGVKTEQNGVIIVNERMETSVPGVYAAGDCANMPQFVYVAAAAGSRARINMTGGETKLDLSAMPAVIFTDPQVATVGLTEDQAKAQYIETDSRVLSMENVPRALANFDTDGFIKLVVEKVSGRLIGPQILAHEGGELIQSAALAIRNRMTVTELSEQLFPYLTMVEGLKLCAQTFNKDVKELSCCAG

SEQ ID NO: 10086 - protein, 1299 aa, Ceratodon purpureus
SSTTSAKSKHSVRVAQTTADAALEAVYEMSGDSGDSFDYSKSVGQSAESVPAGAVTAYLQRMQRGGLIQNFGCMVAVEEPNFCVIAYSENASEFLDLIPQAVPSMGEMDVLGIGTDIRTLFTPSSSAALEKAAATQDISLLNPITVHCRRSGKPLYAIAHRIDIGIVIDFEAVKMIDVPVSAAAGALQSHKLAARAITRLQALPGGDIELLCDTIVEEVRELTGYDRVMAFKFHEDEHGEVVAEIRRMDLEPYMGLHYPATDIPQASRFLLMKNRVRLIADCYASPVKLIQDLDIRQPVSLAGSTLRAPHGCHAQYMGNMGSIASLVMAVIINDNEEYSRGAIQRGRKLWGLVVCQHTSPRTVPFPLRSVCEFLMQVFGMQLNLHVELGAQLREKHILRTQTLLCDMLLRDAPIGIVSQTPNIMDLVKCDGAALYYGKRVWLLGTTPTENQIKEIADWLLEHHNDSTGLSTDSLADANYPGAHLLGDAVCGMAAAKITAKDFLFWFRSHTATEVKWGGAKHDPDEKDDGRKMHPRSSFKAFLEVVNKRSPPWEDVEMDAIHSLQLILRGSFRDIADSDTKTMIHARLNDLKLQGVEERNALANEMSRVLETAAAPILAVDSRGMINAWNAKIAQVTGLPVEEAMHCSLTKDLVLDESVVVVERLLSLALQGEEEQNVEIKLKTFGTQTTERAVILIVNACCSRDASDTVVGVFFVGQDVTEQRMFMDRFTRIQGGEKTTVQDPHPLMRPSFDGDEFGRTFKRNSALGGLKDHATGSVERLDLYLRRAEECMEVMETIPSPKFNNKQCQYLAGKLKAVLQSASLFLRISHHEHHELGASIDMGRHVEIFKLLLALAKEIESFIQGCCKDEWIKAAMTLTNVSEYVSSMGFNLELCKIAFCKSCAASGSLTLDQIEVICKDEAEVVKRNATIDVDTLFAKVIYDLTEKTLSSDQNDLAIYLLQRLKRAKPILPSFSSRPSWWNFYDDWSFSEKFFQWIQITGSLGSGSSATVEKAVWLGTPVAKKTFYGRDNEDFKREVEILAELCHPNITSMFCSPLYRRKCSIIMELMDGDLLALMQRRLDGNEDHDSPPFSTLEVVDIILQTGEGMNYLHEKGIIHRDLKSMNILVKSVKVTKSEIGYVHVKVADFGLSKTKDSSTRYSNQTWNRGTNRWMAPEVINLGYESTEGEISFDGKVPKYPLKSDVYSFGMVCYEVLTGDVPFPEEKNPNNVKRMVLEGVRPDLPAHCPIELKALITDCWNQDPLKRPSFAVICQKLKYLKYLLMTGFSSYQDSYPSTEELS

SEQ ID NO: 10087 - protein, 517 aa, Dianthus caryophyllus
MGSYKGVYDREILSKIATNDGHGENLEYFDGWKAYDRDPYHSTKNSNGVIQMGLAENQLCFDLVTEWLLKNPQASICTNEGVNKFMDIAIFQDYHGLPEFRSAVAKFMGKARDEKVIFNPDRIVMSGGASASETLLFCLANPGDAFLIPSPYYPAFNRDLRWRTGVNLIPFTCSSSNNFKITKEALQSAYEDALKKNIKVKGIIVTNPSNPLGTVLDKDTLKMLLTFVNAKNIHLVCDEIYATTVFNSPSFISVAEVIKDMPHVNQDLVHILYSLSKDMGMPGFRVGIIYSYNDRVVSTARRMSSFGLVSSQTQFMIAALLSDDDFVRRFLVESRDRLFRRHQHFTSELAKIGIGCLQGNAALFVWMDLRHLLDEATVERELKLWRVIINEVKINVSPGSSFLCSEPGWFRVCFANMDNATLDVALNRIRSFVTRGRVDNSTMTTTSARAAATTTTTTTTTTTTTTTTTTIKKKRGQMELRLSFNNRRFEDGLMSPHSILLSPHSPMPQSPLVKART

SEQ ID NO: 10088 - protein, 380 aa, Pichia angusta
MSTVGKTITCKAAVAWEAGKDLTIETIEVAPPKAHEVRVKIAYTGVCHTDGYTLSGNDPEGQFPVIFGHEGAGVVESVGEGVTSVKVGDHVVCLYTPECRECKFCKSGKTNLCGKIRATQGKGVMPDGTSRFTCKGKTLLHYMGCSTFSQYTVLADISVVAVDPKAPMDRTCLLGCGITTGYGAAINTAKISEGDNIGVFGAGCIGLSVIQGAVKKKAGKIIVIDVNDAKKDWAFKFGATDFVNPTKLPEGQSIVDKLIEMTDGGCDFTFDCTGNVQVMRNALEACHKGWGESIIIGVAPAGKEISTRPFQLVTGRVWRGCAFGGIKGRTQMPDLVQDYMDGEIKVDEFITHRHPLNDINQAFHDMHKGDCIRAVVTMDE

SEQ ID NO: 10089 - protein, 254 aa, Sinapis alba
MGRGRVELKRIENKINRQVTFAKRRNGLLKKAYELSVLCDAEVALIIFSNRGKLYEFCSSSSMIRTLERYQKCNYGPPEPNVPSREALAVELSSQQEYLKLKERYDALQRTQRNLLGEDLGPLSTKELELLERQLDSSLKQIRALRTQFMLDQLNDLQSKERMLNETNKTLRLRLADGYQMPLQLNPNQEDHHVDYGRHDQQQQQNSHHAFFQPLECEPILQMGYQGQQDHGMEAGPSENNYMLGWLPYDTNSI

SEQ ID NO: 10090 - protein, 500 aa, Atriplex triangularis
MAFPMPVRQLFIDGERREPLLKNRIPIINPSTEEIIGDIPAATAEDVEVAVVAARKAFKRNKGRDWAATSGAHRAKHLRAIAAKITERKDHFVKLETLDSGKPFDEAVLDIDDVASCFEYFAGQAEALDAKQKAPVTLPMDRFKSHVLRQPIGVVGLISPWNYPLLMATWKIAPALAAGCTAVLKPSELASVTCLEFGEVCNEVGLPPGVLNILTGLGPDAGAPIVSHPDIDKIAFTGSSATGSKIMASAAQLVKPVTLELGGKSPVIMFEDIDIETAVEWTLFGVFWTNGQICSATSRLLLHESIAAEFVDRMVKWTKNIKISDPFEEGCRLGPVISKGQYDKIMKFISTAKSEGATILCGGSRPEHLKKGYYIEPTIITDITTSMQIWKEEVFGPVICVKTFKTEDEAIELANDTEYGLAGAVFSKDLERCERVTKALEVGAVWVNCSQPCFVHAPWGGVKRSGFGRELGEWGIENYLNIKQVTSDISDEPWGWYKSP

SEQ ID NO: 10091 - protein, 190 aa, Conocephalum supradecompositum
DEHGEVVAEIRRSDLEPYLGLHYPATDIPQASRFLFMKNRVRMICDCCAQPVQVVQDKELRQPLSLAGSTLRAPHGCHAQYMGNMGSIASLVMAVIINDNDEEYSSRGYQHKGRKLWGLVVCHHTTPRSVPFPLRSACELLMQVFGLQLNMEVELAAQLREKRILRTQTLLCDMLLRDAPIGIVSQSPNI

SEQ ID NO: 10092 - protein, 298 aa, Ralstonia eutropha JMP134
MENRVTKAVFPVAGLGTRFLPATKASPKEMLPVVDKPLIQYAVEEAMAAGITEMIFVTGRSKRAIEDHFDKAFELEVELEAKNKQALLDVVRSIKPANVECYYVRQPEALGLGHAVLCAAKLVGEAPFAVMLADDLIDGTPPVMKQMVDLYNHYNCSVLGVEEIAPEQSRSYGVVDGREWDEGVIKMSGIVEKPAPEDAPSNLGVVGRYILTPRIFDHLRELKPGAGGEFQLTDAIQSLLSQEQVLAYRYHGTRYDCGSKLGYLKATVEYALKHPEVSAGFRDYLEHRGTYLADGTMA

SEQ ID NO: 10093 - protein, 202 aa, Schizosaccharomyces pombe
MATELRRKLVIVGDGACGKTCLLIVFSKGTFPEVYVPTVFENYVADVEVDGRHVELALWDTAGQEDYDRLRPLSYPDSHVILICFAVDSPDSLDNVQEKWISEVLHFCSSLPILLVACKADLRNDPKIIEELSKTNQHPVTTEEGQAVAQKIGAYKYLECSAKTNEGVREVFESATRAAMLKHKPKVKPSSGTKKKKRCILL

SEQ ID NO: 10094 - protein, 253 aa, Zea mays
MDVKCRRLEGKVAIVTASTMGIGLAIAERLGLEGAAVVISSRKQKNVNEAVEGLRAKGITAVGAVCHVSDAQQRKSLIETAVKSFGHIDILVSNAAANPSVDSILEMKESVLDKLWDINVKASILLIQDAAPHLRKGSSVIIISSIAGYNPEQGLTMYGVTKTALFGLTKALAGEMGPDTRVNCVAPGFVPTRFASFLTENETIRKELNERTKLKRLGTVEDMAAAAAFLASDDASYITAETIVVAGGVQSRL

SEQ ID NO: 10095 - protein, 462 aa, Cytophaga hutchinsonii
METAVLDTIEAAVPAIDSIKAVAAITVDTLASKSSLAATDAAVSQLGLTANNIWMMLCTALVFIMNLGFATVESGLARSKNTTNILFKNTITPAIGIIIFCLWGFNLMYPGGAYEGGFFGFGGFGLTAPAAESGGLDLTYAGGYTYWTDFLFQAMFAATAATIVSGAVAERIKLTSYIIFTCIIIGVIYPVVGMWNWGGGWLKSLGFYDFAGSTMVHSLGGWAALAGVIVLGPRIGKYVDGKINPIPGHSLPLATIGVFLLWLGWFGFNGGSVLSADPALTSLVLVTTSLAAAAGAIGALLASVIYLKTLDLSMVLNGILGGLVGITAGADLMSPNDAILIGLISGAAVVFAVIFFDKIKVDDPVGATSVHLVCGILGTLFVGIFGDKGFGGSAEGAGMSQLIKQLIGVGAAASLVFPASYVIFTIISKTVGLRVAAKEEIEGLDIAEHGMKAYNIDVDKEY

SEQ ID NO: 10096 - protein, 488 aa, Photorhabdus luminescens
MTIINHWINGKNVSSKTYFETTNPATGEVLAEVAAGGQEEIDQAVAAAKEAFPKWADLPMKERARLMRRLGELIDENVPEIAAMETKDTGLPIHQTQNVLIPRASHNFNFFAEICQQMNGHTYPVDDKMLNYTLVQPVGVCALISPWNVPFMTATWKVAPCLALGNTAVLKMSELSPLTANRLGELALEAGIPAGVLNVVQGYGATAGDALVKHHDVRAVSFTGGTVTGRQIMKNAGLKKYSMELGGKSPVLIFEDADIERALDASLFTIFSINGERCTAGSRIFIQQSIYPEFIKRFAERANRLRVGDPQDPNTQIGALISKPHWEKVSGYIRLGIEEGATLLAGGPDKPIDLPAHLKEGNFLRPTVLADVDNRMRVAQEEIFGPVACLLPFKDEAEGLRLANDVEYGLASYIWTQDVSKVLRLARNIEAGMVFVNTQNVRDLRQPFGGVKASGTGREGGEYSFEVFAEMKNVCISMGDHHIPRWGI

SEQ ID NO: 10097 - protein, 421 aa, Hydrogenobacter thermophilus
MLKVESVYRWEGSLKVPQEGKFIKLKEDKSIEVPNFPIIPFIEGDGIGAEIMPAMIHIVNTAVEKAYGGSRNIFWVELLAGDKAEEKTGKRMPEETIEFLKEAVVGIKGPLGTPVGKGGKSLNAILRQSMDFYSAIRPVYWLGQPAPIPNPERVNVAVFRENSDDVYMSIEYMPKEERTQKVRKFFIEEMGVSEYALPEDCGITVKPMSEFKTKRHVRKALRWALQNNKKVVAVVGKGNIMKATEGAFMNWAFEVAKEPEFEGKVITEGEPKDGQVLMVKVITDQMLMQLVLKPEAYHVIITQNLNGDYISDLASALVGGPGFVPSGNIGDGYALFESTHGTAYDIAGKGIANPLSLTLSGAMMLEYLGWKEASELIYSAVKRTIAERLGTPDIANGFRKQGLEAKELTTLEFAKAIADRI

SEQ ID NO: 10098 - protein, 490 aa, Photorhabdus luminescens
MTNDVNTELLRQQAYINGQWVDADNQATFKVTNPANGQVIAHVSNMGAAETERAIAAAQQALPAWRAMTAKQRSQILQRWFQLMMANQQALAELLSREQGKSQAEAMGEIAYGASFIEWFAEEGKRTYGETIPSPMPGRRIVTIKQPIGVVAAITPWNFPNAMITRKVGPALAAGCTVILKPASETPLSALALAALAEQAGIPAGVFNVVTGVDAKTIGGVLTQSPIVRKLSFTGSTRIGKLLMAQSADTVKKLSLELGGNAPFIVFDDANIDAAVQGALIAKFRNSGQTCVCANRILVQETIYDAFAERLAQAVNKLQVGPASDAKSQQGPLINQAAVDKVEEHINDAVSRGARILAGGKPHALGGLFFEPTVLADVNESMLISQEETFGPVAPLFKFRDEAEAIHLANDTEFGLAAYFYSRDIGRIYRVAEALESGMVGINEGLISNEVAPFGGIKQSGLGREGSRYGIEDYLEVKYLCFGGIEDTGV

SEQ ID NO: 10099 - protein, 368 aa, Solanum tuberosum
NSSTYTQFVASRRMGICEPIHQMGMWDDFNASCPSTSATMILEVEKCLEDQIPNMIETEDTSHGTVGTSNRYEAETSKPIEKVLRRLAQNREAARKSRLRKKAYVQQLENSKLKLIQLEQELDRARKQGLYVGAGLDASQLSYSVTASSGTAVFDTEYGQWVEEQNRQTNDLRNALHHSQISEAELRIIVDGCLNHYFELFRVKATAAKADVLYIMSGMWKTSAERFFMWIGGFRPSELLKVLTPHLELLTEQQLREVCNLRQSCQQAEDALSQGMVKLHQILGEAVAAGRLGEGNYSLPQMGPAIEKLEALVRFVNQADHLRQETLQQMSRILNTHQAAQGLLALGEYFEQLRVLSSHWATRLHEPA

SEQ ID NO: 10100 - protein, 368 aa, Solanum tuberosum
STYTQFVASKRMGICDPIHQIGMWGDFKGSSFPDTLILEVENCLENEMPIMEKRLENEIEEPSQVTVGMSNRYEPETTKRIDKVRRRLAQNREAARKSRLRKKAYVQQLENSKLKLLQLEQELERNRQQGLYVGDGLDASQIGCSGTANSGIASFEMEYGHWVEEQDRQTDDLRNALHNSQMGEIELRILVESCLNHYFDLFRLKATAANADVLYLMSGTWKTSAERFFLWIGGFRPSELLKVLTPHVEPLSDQQIQEVSNLTQSCQQAEDALSQGMVKLHQILAEAVAAGTLGEGIILPQMTATIEKLEALVRFVNQADHLRQETLLQMSCILAAHQSAQGLLALGEYFKRLRALSSLWAGRLSEPA

SEQ ID NO: 10101 - protein, 539 aa, Glycine max
MDSSSSSPNNNNNHHASTTKTNGFLIHPKLGFEPARSRSRLAMASPANTSEPKIVTGTAGYILEDVPHFTDYIPNLPTYPNPLQDNPAYSVVKQYFVHVDDSVPQKVVVHKDGARGVHFRRAGPRQKVYFEADEVQAAIVTCGGLCPGLNTVIRELVCGLHHMYGVKKVLGINGGYRGFYARNTITLTPKSVNDIHKRGGTVLGTSRGGHDTKKIVDSIQDRGINQVYIIGGDGTQKGASAIFEEVRKRGLKVSVVGIPKTIDNDIPVIDKSFGFDTAVEEAQRAINAAHVEAESVENGIGVVKLMGRNSGFIAMYATLASRDVDCCLIPESPFYLEGPGGLYEYIEKRLKENGHMVIVIAEGAGQELVSESVQSMSKQDASGNKLFQDVGLWISQKIRDHFAAQKTLPITLKYIDPTYMIRAIPSNASDNVYCTLLAQSAVHGAMAGYTGYTSGLVNGRQTYIPFYRITERQNHVVITDRMWARLLSSTNQPSFLDAKGDNEEKEEEEALNQLPDGHCAKDTSLASKEINSSIYPTAC

SEQ ID NO: 10102 - protein, 569 aa, Pseudomonas sp. ED23-33
MQELNEVGLSVAGMTCPSCTRHVEDALLAVPGVTRAAVDYPSNKAQVTGNRLDVSALVAAVGALGYGATPTDEFESKERSVEQPGLLGKAAQWLSGERAVEKPAGQLHVAIIGTGGAAVAAALKAAENGARVTLIERGTIGGTCVNVGCVPSKIMIRAAHIAHLRRESPFDVGLSATPPVVLRDRLLAQQQARVDELRHAKYESILESNPSINLVRGSARFKDGQTLIVEAAEGDTREVAFDRCLIATGASAAIPPLPGLAGTPYWTSTEALVSEAIPKRLAVIGASVVALELAQAFARLGSEVTVLARRTLFASDDPAIGEAVTAAFRAEGITVLTQTQASAVTYCDRQFILTTAQGELKVDQLLVATGRTPNTASLNLELAGVTFDSQHRILIDQGMRTSASNIYAAGDCTDQPQYVYVAAAAGTRAGINMTGGDVKLDLDAMPAVVFTDPQVATVGYSEAEAQRIGLQTESRTLTLDNVPRALANFDTRGFIKLVAEAGSGRILVVQAVTPEAGEIIQTAAIAIRARMTVQDLANQLFPYLTMVEGLKLVAQTFSKDVTQLSCCAG

SEQ ID NO: 10103 - protein, 356 aa, Streptomyces coelicolor A3(2)
MKGYVFHGPGRSAWEDIPDPELKEPTDAIVRVDAVTICGTDLHILKGDVPEVRPGTVLGHEAVGEIVEVGTDVRTVRPGDRVLVSCITACGRCRYCREGVYGQCLGGGGWILGHLINGTQAEYVRVPYADLSVHSLPGAVTDEDAVLLADIFPTAYEVGVLNGRVSPGDTVVVVGAGPIGLAAVATARLFAPERIVVVDLATARLEAARKLGAEAVADAREDPEQLVADLTGGLGADVVIEAVGVPETFEMCTRVVRPGGHVANVGVHGRPATLHLEDLWSKNVTVTTGLVDTRSTPTLLRMAASGRLPTGQLVTHTFPLERMEEAYEVFSAAADTGALKVVLGGPKREVVAANAV

SEQ ID NO: 10104 - protein, 84 aa, Glycine max
  unsure (1)..(84): unsure at all Xaa locations
TQRPPSVRRIDKDVREGWNERDKQQFIEDWGTDIKTGDKLPWTHXNLALVGIFXIDIPVLVYTGIVREFHMQDLDNGRSYRKFT

SEQ ID NO: 10105 - protein, 349 aa, Xylella fastidiosa Dixon
MFINAYGAHAGDKPLESMQIARRAPGVHDVQIDIHYCGVCHSDIHLVRSEWAGTLFPCVPGHEIVGRVSAIGTHVQGFKAGDLVAVGCMVDSCKDCQECDAGLENYCDGMIGTYNFPTQDAPGHTLGGYSQKIVVHERFVLRIRHPEAQLAAVAPLLCAGITTYSPLRHWNAGPGKKVGIVGIGGLGHMGIKLAHAMGAYVVAFTTSESKRQDAKALGADEVVVSRDEERMAAHVKSFDLILNTVAASHSLDPFLTLLKRDGTLTLVGAPATPHPSPEVFNLIFKRRSIAGSLIGGIAETQQMLDFCAKHGIVADIELIRADGINEAYERMMKGDVKYRFVIDNATLAA

SEQ ID NO: 10106 - protein, 306 aa, Ipomoea batatas
GDQLYRMDYMDLVQNHIERNSDITLSCATVGDSRASDFGLVKIDRRGRVVQFCEKPKGTDLKAMQVDTTLLGLPPQDARLNPYIASMGVYVFKTDVLFRLLRWRYPTSNDFGSEILPAAVMEHNVQAYIFRDYWEDIGTIKSFYDANLALTEEFPKFEFYDPKTPFYTSPRFLPPTKIDNCKIKDAIISHGCFLRECTVEHSIIGERSRLDCGVELKDTLMMGADNYETESEIASLLADGKVPIGVGENTKIRNAIIDKNVRIGKDVVITNKDGVQESDRPDEGFYIRSGITIIMEKATIRDGTVI

SEQ ID NO: 10107 - protein, 433 aa, Haemophilus somnus 2336
MAKIVKVIGREIIDSRGNPTVEAEVHLEGGFVGLAAAPSGASTGSREALELRDGDKARFLGKGVLKAVSAVNNEIATALVGKEASNQAEIDQIMIELDGTENKSKFGANAILAVSLANAKAAAASKGMPLYAWIAELNGTPGVYSMPLPMMNIINGGEHADNNVDIQEFMIQPVGAKTLKEALRIGAEVFHNLAKVLKGKGLSTAVGDEGGFAPNLESNAAALACIKEAVEKAGYVLGKDVTLAMDCASSEFYNKENGMYEMKGEGKSFTSQEFTHYLEGLCKEYPIVSIEDGQDESDWDGFAYQTKVLGDKVQLVGDDLFVTNTKILKEGIEKGIANSILIKFNQIGSLTETLAAIKMAKDAGYTAVISHRSGETEDATIADLAVGTAAGQIKTGSMSRSDRIAKYNQLIRIEEALGEKAPFLGLKAVKGQA

SEQ ID NO: 10108 - protein, 586 aa, Vicia faba
MCGILAVLGCSDDSQAKRVRILELSRRLKHRGPDWSGLHQHGDNYLAHQRLAIVDPASGDQPLFNEDKSIIVTVNGEIYNHEELRKQLPNHTFRTQCDCDVIAHLYEEYGENFVDLLDGIFSFVLLDTRDNSFIVARDAIGVTSLYIGWGLDGSVWIASELKGLNDECEHFEVFPPGHLYSSKEREFRRWYNPPWFNEAIIPSTPYDPLVLRTAFEKAVIKRLMTDVPFGVLLSGGLDSSLVASVTARYLADTKAAKQWGAKLHSFCVGLKGAPDLKAGKEVADFLGTVHHEFQFTIQDGIDAIEDVIYHTETYDVTTIRAATPMFLMSRKIKSSGVKMLISGEGSDEIFGGYLYFHKAPNKEEFHQETCRKIKALHRYDCLRANKSTYAWGLEARVPFLDKDFIKAAMDIDPEFKMIKHDEGRIEKWILRKAFDDEENPYLPKHILYRQKEQFSDGVGYGWIDGIKDHAAKHVTDKMMFNASHIFPFNTPNTKEAYYYRMIFERFFPQNSARLTVPGGPSVACSTEKAIEWDASWSGNLDPSGRAALGVHVSAYENQINPITKGVEPEKIIPKIGVSPLGVAIQT

SEQ ID NO: 10109 - protein, 460 aa, Mesorhizobium sp. BNC1
MAKYDLDLFVIGGGSGGVRAGRVAASMGKRVAIAEEYRFGGTCVIRGCVPKKLFVYASQFPEHFEDAAGYGWAVGESRFDWATLIANKDKEIARLEGLYRKGLENAGARLIDGRAVLVDSHTVRVGGETFTAEHILVATGGRPNPHVALPGREHCITSNEAFHLEELPASIAIEGGGYIAVEFANIFHGLGVKTTLIYRGREILSRFDGDLRKGLHEAMEAKGIRILCQDIIEQVEKQPDGRLAAHLMSGGVETFDKIMLAIGRVPNTEGLGLEAAGVETGVRGEILVDGYSRTNVENIWAIGDVTDRVQLTPVAIHEAMCFIETAFKDNPTTVDHRDIATAVFSQPEIGTVGLAEEEAGKHFEELEIYRASFRPMRHTLAGRQDKMIMKLVVDAASKRVVGAHILGPDAGEMAQLLGIAIKGRLTKDVFDRTMAVHPTAAEELVTMYQPSYRVRNGERV

SEQ ID NO: 10110 - protein, 180 aa, Ralstonia metallidurans CH34
MMTAEQARELWLDSEEIVSAEEVQNSLDRMAHDITEKMGDAFPLVLSVMGGAVVFTGMLLPKLQFPLEFDYIHLSRYNNKTVGGEMQWRVAPRESVKGRVVLVLDDILDEGETMAAIRQRIMDMGAKECHAAVLCEKTLTKIKPMHPDFCGFQVPDRYVFGCGMDVKGYWRNLGAIRALV

SEQ ID NO: 10111 - protein, 466 aa, Glycine max
  unsure (1)..(466): unsure at all Xaa locations
MANTLYNGATCRIPLRDESLAFSRHVSRSLSFLLKTRAGKQSYAFAVKASSHSDFDVDLSLSPRVNAVKPSKTVAISDHATALFQAGVPVIRLAAGEPDFDTPAPIAEAGINAIREGYTRYTPNAGTMELRQAICRKLKEENGISYTPDQVVVSNGAKQSXWLQAVLAVSSPGDEVIIPAPFWVSYPEMARLADATPVILPTLISDNFLLDPKLLESKITERSRLLILCSPSNPTGSVYPKELLEEIARIVAKHPRLLVLSDEIYEHIIYAPATXHTSFASLPGMWDRTLTVNGFSKAFAMTGWRLGYIAGPKHXVAACGKIQSQFTSGASSIAQKAAVAALGLGHAGGEAVSTMVKAFRERRDFLVKSFREIDGVKISEPQGAFYLFLDFSFYYGREAEGFGKIEDSESLCQYLLDVGQVALVPGSAFGDDTCIRISYAESLTTLQAAVERVKRALIPLSSAALV

SEQ ID NO: 10112 - protein, 225 aa, Deinococcus radiodurans R1
MRGGALHQNRRVTLPSVPLPAVLPPLTDHAGAVAHLSRDPVLAQVTSLCGELPVLAPTPDPFGRLVRSVAGQQLSVKAAQAIYGRLEGLPGGVVPAALLKVSGDDLRGVGLSWAKVRTVQAAAAAAVSGQIDFAHLSGQPDELVIAELVQLPGIGRWTAEMFLLFALARPDVFSSGDLALRQGVERLYPGEDWRDVTARWAPYRSLASRYLWANSARMQAGGAPL

SEQ ID NO: 10113 - protein, 942 aa, Mesorhizobium sp. BNC1
MKVDNEQLAEVRTTCPYCGVGCGVIATPQPDGTVAIKGDPDHPANFGRLCSKGSALAETIGLEERLLYPDIHGRRAGWDEALTLVAQRFSDAIKEHGPDSVAFYVSGQLLTEDYYVANKLMKGFIGSANIDTNSRLCMASSVAGHRRAFGADTVPGTYEDLELADLVVLVGSNLAWCHPVLYQRLAAAKDKRPEMKVVLIDPRRTMTADIADLHLAVAPDGDAALFTGLLGYLDITGALSRDYIENHTNGFNEALAVARAFNTERVALESGLAASEVLAFFDLFVGNERTVTVYSQGVNQSVSGTDKVSAIINCHLATGRIGRPGMGPFSVTGQPNAMGGREVGGLANMLAAHMDLENSWHREIVRRFWRAPRLAEKSGFKAVELFRAVADGRIKALWIMATNPADSLPDADFVQAALKACPFVVVSDISAATDTLRHAHVKLPSAGWGEKNGTVTNSERRISRQRPFLPLPGEARPDWWQVVEVARRMGFAEGFAYSTPAEIFREHAALSAYENDGARDFDIGVYAGLSAPAFEALQPFQWPAPSLGSTPLWPAGHLPLKGGNQLSLGPSPIANVADEASELAAGIISPLEGEMAGRPEGGNIRFFADGGFYTPDRRARFIAVFPRVRNVADADFPLVLNTGRVRDHWHTMTRTGQSARLSAHLAEPYAELHPEDAARLGIGDADLVRVESQHGAVIVRALISARQRSGSVFVPMHWTDQFSAKGRVDALVAPITDPISGQPALKNVAVRVSRFEAALYGFAVLQSRPEWDGLDYWALARADGGWRIELAHGALSESPEILLRRLIKSTGKTQILAYHDPKRGDYRLAAFDGERMVGALYLSAHPVAVSRSFAVAQLGSAHPDPCSRYRVVAGRAEADRPEIGAIVCSCFGVGANQIAAAARGGCRTVEAIGRALSAGTNCGSCRGEIRGIVEAHVVEAAE

SEQ ID NO: 10114 - protein, 257 aa, Bacillus subtilis
MRTKKRTKEMLPIFDQKKVAFIGAGSMAEGMISGIVRANKIPKQNICVTNRSNTERLAELELQYGIKGASPNQICIEDMDVLILAMKPKDAESALSSLKTRIQPHQLILSVLAGITTSFIEQSLLNQQPVVRVMPNTSSMIGASATAIALGKYVSEDLQKLAEALLGCMGEVYTIQENQMDIFTGIAGSGPAYFYYLMEFIEKTGEEAGLDKQLSRSIGAQTLLGAAKMLMETGEQPEVLRDNITSPNGTTAAGLQA

SEQ ID NO: 10115 - protein, 263 aa, Mesorhizobium loti MAFF303099
MENRPKMHQPLVAISTDVRQFDNYTWHAAPQQYLEAAVAGAGVFPLLVPSFGDRLDLDELLSSVDGVMVTGSKSNVHPSLYGGDASEANGPYDPARDATTLPLIRRAIERGVPLLAICRGIQELNVALGGTLGTEIQEREGSLDHRAPVSDKQDERFAIHQTISIKPGSCLAGVFGAGEIKVNSLHRQAIDRLGSKLEIEAVATDGTVEAVSVKGARAFAVGVQWHPEYWVNSDSNSAKIFRAFGDAVRLHAAAKAGARAAAE

SEQ ID NO: 10116 - protein, 444 aa, Streptomyces avermitilis MA-4680
MSALPQERRVVTAIPGPKSQELQARRTAVVAAGVGSVLPVFTTRAGGGIIEDVDGNRLIDFGSGIAVTSVGASAEAVVRRASAQLQDFTHTCFMVTPYEGYVAVAEALAELTPGDHAKKSALFNSGAEAVENAVKIARAYTKRQAVVVFDHGYHGRTNLTMALTAKNMPYKNGFGPFAPEVYRVPVAYGYRWLTGPENAGAEASAQAIDMINKQIGADNVAAIIIEPVLGEGGFIEPAKGFLPAISKFAKDNGIVFVADEIQSGFCRTGQWFACEDEGIVPDLITTAKGIAGGLPLAAVTGRAEIMDAAHAGGLGGTYGGNPVACAGALGAIETMKELDLNAKAKNIEAVMKARLGAMAEKFDIIGDVRGRGGMIAIELVKDRDTKEPNPEAAGALAKACHQEGLLVLTCGTYGNVLRFLPPLVIGEDLLNEGLDIIEQAFSRI

SEQ ID NO: 10117 - protein, 450 aa, Bordetella parapertussis 12822
MAFDFDLYVIGAGSGGVRAARFAAGYGARVAVAESRYLGGTCVNVGCVPKKLLVYGAHFHEDFEQAAGFGWNPGRPEFDWPTLIANKNREIERLNGIYRNLLVNSGVALHEGHARIVDPHTVEINGQRHSAQHILVATGGWPFVPDIPGKEHAITSNDAFFLPELPRRVLVVGGGYIAVEFASIFNGLGAQTVQVYRRELFLRGFDGSVREHLRDELVKKGLDLRFNTDVERIDKRADGVLAVTLSDGSVLETDCVFYATGRRAMLDDLGLENTGVRLAESGYIEVDDEYRTSEPSILAIGDVIGRVPLTPVALAEGMAVARRLFRPQEYRKVDYDLIPTAVFSLPNIGTVGLTTEQALEHGFRVTRYESRFRPMKLTLTQSQKKTLMKLVVDADSQKVLGCHMVGPDAGEIVQGLAVALKAGATKQVFDDTIGIHPTAAEEFVTMRTAT

SEQ ID NO: 10118 - protein, 44 aa, Nicotiana tabacum
AVKRILQEVKEMQSNPSDDFMSLPLEENIFEWQFGIRGPRDSEF

SEQ ID NO: 10119 - protein, 209 aa, Zea mays
CGIWYLLCNCSRLGIEGIHGDACGFEQSNLGKRGRDEPCSSGPTSKACREKMRRDKLNDRFLELSSVMSHGKEAKLDKANILSDAARMVAQLRGEAEKLKESNEKLRENIKDLKEEKNELREEKVRLKVEKDRLEQQVKAMSVAPTGYVPHLPHPASYHPAAFTPFAPPAPANKSAPIPAPFPGMAMWQWLPPTIVDTTQDPKLWPPNA

SEQ ID NO: 10120 - protein, 458 aa, Arabidopsis thaliana
MKNGIAECPACHSKLVSPGSKTISRAYDDHKIRVSSKQRVLNVLLVVGDCMLVGLQPVLVYMSKVDGKFNFSPISVNFLTEIAKVIFAIVMLLIQARHQKVGEKPLLSVSTFVQAARNNVLLAVPALLYAINNYLKFTMQKLWLYGKSMSCGVLSVPLYFNPATVKMLSNLKVLVIAVLLKMVMKRRFSIIQALALLLIGISVNQLRSLPEGATAIGIPLATGAYVCTVIFVTVPSMASVFNEYALKSQYDTSIYLQNLGIVDLFVLFSGLLSSVITNVHNLFLYGYGAIFNFLGILGTVIYKGLQYALLRNFVMILTGPGSFDILQGHSRATMFLILNNAAQGILSSFFFKYADTILKKYSSTVATIFTGIASAALFGHVITMNFLLGISIVFISMHQFFSPLAKARDEQQQNGNLELGNTKDTHRANESFINMAAGANEEASHRGESDDRTPLLPR

SEQ ID NO: 10121 - protein, 256 aa, Arabis gemmifera
MEDYERNSNSPTHEEDSDVRKGPWTEDEDAILVNFVSIHGDARWNHIARSSGLKRTGKSCRLRWLNYLRPDVRRGNITLEEQFMILKLHSLWGNRWSKIAQYLPGRTDNEIKNYWRTRVQKQAKHLRCDVNSNLFKETMRNVWMPRLVERINAQSSPATCEPVESMITDPGQPIEEPIPVEPGFLQFNQQFVPASELSATSSNSPAETLSDVQGGVVNGSGSDPAGQTGFGEFNDWGCVGGDNIWTDEESFWFLQD

SEQ ID NO: 10122 - protein, 405 aa, Shigella flexneri 2a str. 2457T
MSSVDILVPDLPESVADATVATWHKKPGDAVVRDEVLVEIETDKVVLEVPASADGILDAVLEDEGTTVTSRQILGRLREGNSAGKETSAKSEEKASTPAQRQQASLEEQNNDALSPAIRRLLAEHNLDASAIKGTGVGGRLTREDVEKHLAKAPAKESAPAAAAPAAQPALAARSEKRVPMTRLRKRVAERLLEAKNSTAMLTTFNEVNMKPIMDLRKQYGEAFEKRHGIRLGFMSFYVKAVVEALKRYPEVNASIDGDDVVYHNYFDVSMAVSTPRGLVTPVLRDVDTLGMADIEKKIKELAVKGRDGKLTVEDLTGGNFTITNGGVFGSLMSTPIINPPQSAILGMHAIKDRPMAVNGQVEILPMMYLALSYDHRLIDGRESVGFLVTIKELLEEPTRLLLDV

SEQ ID NO: 10123 - protein, 80 aa, Glycine max
  unsure (1)..(80): unsure at all Xaa locations
SQTDTTVNRTDAGAIAXLTGLKSMAGLRTRXTNTDITFIASNCGRTQCMQVXSPIGXKKSETSFYLPDLDDAQLAKEVEY

SEQ ID NO: 10124 - protein, 248 aa, Rickettsia prowazekii
MYNTNFGFKKVDYTKKQWLINNIFSRVADKYDLMNDLMSIGLHRLWKDEFIMQIPNLNSNILDVASGSGDIALKLAKKAKDRGNNISLILSDINEEMLNNAKKKSIDLNLFQNIKFIVANAEELPFSDNSFDYYTIAFGIRNVPDINKALKEAYRVLKPMGKFVCLEFSKVKEGILKDFYKFYSFNIIPSIGQIIAGNKEAYEYLVESIALFPSQDDFRIMIKESGFEEVHYKNLSGGIVAIHSAYKI

SEQ ID NO: 10125 - protein, 492 aa, Avicennia marina
MDPYKYCPSSSFNTPHTTTNGGHPVYNDNSSLTVGTRGPVLLEDYQLIDKLAHFTRERIPERVVHARGATAKGFFEVTHDVSHLTCADFLRAPGVQTPLIVRFSTVIHERGSPETLRDPRGFAVKFYTREGNFDIVGNNFPVFFIRDAIKFPDVIHAFKPNPKSHIQESWRILDFCSHFPESLLTFAWFYDDVGIPQDYRHMEGFGVHSYTLINKAGKVNYVKFHWKPTCGVKCLMEDEAVRIGGTNHSHATQDLYDSIAAGNYPEWKLYFQIMDPDQEDRFDFDPLDTTKIWPEDIIPLIPVGRMVLNKNIDNFFAENEMLAFSPHMIVPGINFSNDKMLQTRIFAYGDTQRHRLGPNYLLLPVNAPKCAYHNNHYDGFMNFMHRDEEVDYFPSKYDPTRHAERHPIPNAVITGRRDRRVIEKEDNFKQAGDRYRSWAPDRQERFLRRWVDALSDPRLTLEIRSIWVSYWSQADKSFGQKLASRLNVRPTM

SEQ ID NO: 10126 - protein, 894 aa, Candida albicans SC5314
MLHNEDFIPNFLQDSSSASMTHTLRVKRNRPKSSYFEDFSPEASQDDTNVEDANCSSPTLMRKSALRKSSSKTLDNNSKSPSPTFSNTNATSGSPLSNLSRAPLRNLSNFVIPSSVKSKTKQFTNSLTRSMTEVVSKSSHSFFNNLHLATSTASSSVSSTTPKIEFNSIAENDDIPTNYDSDEEFEDGDTFDTIHLDSPVQRKSSNNNNNNNNTNDGNDNNIPTKIRRFHSMYQTDKEIASYQLHEDNSILKFTNIEYSHSESDLLPRIDAHQLARILRGDHDDQFDEFIIIDCRFEYEFNGGHITKAINISTQEALQEKLFQYQETDTKDTESKKRLIIFHCEFSMFRGPMMAKHLRKCDRMCNYDNYPLLTYPDIAILEGGYKNFYENYPQWCDPQGYVEMKNLRHKKLCESNLDKVRKDNKLTRAKSYQFGIQHRRGGSTGGLFGNYNYNVMNSSDQQFWSSSTSNTAHHRSSSSSGFINNMHSGASSYHHRSQSFVTINNEKIIKRQRSTPKVSNSPTKPTSSTVSPDKPIPLANIHRLTRANTISSDQTLFSNKSVSSPMISPLAASFEQSSIGMSSSELSVNTQDFQPPTTSFRNSTHNFNNMNRRRKSLSSNFSSCSINSITSSVADSDYAGSVDSALTEPYTSSSPILDSADYFDNGAKRQNLIAMPISKGQPSLLTSSSSSSSIHRKHASKSGSNIQASLANPPSLPPPPPPTTTTDSSSSTNPSQLSPGIQQQPCLQFQFPRSRSANKLLATPSKSSHSFTSPSTNNEISSNNNLPMVSPFFIPGTDASANITTNTYDGYNTSTINTNCHGNRSSIIDPINDTPVDFSVPTSISLSSSKSIRFKLHKRSGSLINSSISESQELYNVTSVEHGLQYHNHKDGTHC

SEQ ID NO: 10127 - protein, 227 aa, Triticum aestivum
  unsure (1)..(227): unsure at all Xaa locations
MDPCKFRPSSSFDTKTTTTNAGQPVWNDNEALTVGPRGPILLEDYHLLEKIAHFARERIPERVVHARGASAKGFFECTHDVTGLTCADFLRAPGARTPVIVRFSTVIHERGSPETIRDPRGFAVKFYTREGNWDLLGNNFPVFFIRDGIKFPDVIHAFKPNPKSHVQEYWRVFDFLXHQPESLHTFFFLXXDDVRXSPPNYRPHWTGFGGQQPTTFVFPCPAKFPLT

SEQ ID NO: 10128 - protein, 273 aa, Glycine max
MSVVADNSANNGSHQVVLNVNGDAPKKCDDSANQDCVPLLQKLVAEVVGTYFLIFAGCASVVVNLDKDKVVTQPGISIVWGLTVMVLVYSVGHISGAHFNPAVTIAHATTKRFPLKQVPAYVIAQVVGATLASGTLRLIFNGKNDHFAGTLPSGSDLQSFVVEFIITFYLMFVISGVATDNRAIGELAGLAVGSTVLLNVMFAGPITGASMNPARSLGPAIVHHEYRGIWIYLVSPTLGAVAGTWAYNFIRYTNKPVREITKSASFLKGSEAE

SEQ ID NO: 10129 - protein, 1094 aa, GIBBERELLA ZEAE PH-1
MDRPAKRQRSTEFEAHAPESLQRSISPPRKRARKPVAIPSPWQLTWIQDLPESENKDAVSLRDLLGDPLISECWEFNFLHDIPFLMNAFDPDTRHLVNVHLVHGFWKHEDKNRIALENAAAKFENVNVHIAPMPEMFGTHHSKMMILFRHGDTAQVIIHTANMIPKDWTNMTNGVWKSPLLPRMSKTQTPASSPEEFLVGSGERFKIDLLNYLKFYDKRKIICKPLSDKLKQYDFSTIKAALIASVPGRHDAHDMSETSWGWAALKRCLRHVPCHQHGDSDIVVQVSSIATLGPKDDWLQKTLFDHLGRCKDTGLRRPRFKVVFPTADEIRRSLDGYASGLSIHTKIQSPQQAKQLEYLRPMFHHWANDSPGGTKLPDGPVLESGRKRAAPHIKTYVRSNKSSIDWGLLTSANISKQAWGEAARPTGEMRIASWEVGVLIWPELLEPGSVMKPPLVLFLVPSLLLHLSLISCNQRIALRRGAGVSPYGTPRGSGAHPALSSSWRVGSPLAEAALAADIAACSDEEYDDSAIDDDVSVSDLPGDPIMYRRPSGVAFGGSRPIMNPQIYDEPGLTALERKQSRNAERSLLRDNHVLPPKHGHRQQDGFFTRIYQRLFSTKIPQDEEQAPAISVQPPSETDPLLGSRVDAVSPEHLNETWEHAVAEHRIKTTWQREAKTIASYSAPLIVTFLLQYSINVTSIFAVGRIGKLELGAVSLANMTAAITCLAPFQGLATSLDTLCAQAYGSGHKHLVGLQFQRMTCFLFVLAVPVAVFYWFSEGVIRALVPEPESARLAGMYLRVMIFSIPGFILFEGGKRFTQAQGLFRATTYVLLIVAPFNVFLSWLLVWKLEWGFIGAPAAVAISTNLLPIFLFLYVRFINGRQCWGGFSRRALSNWWIMIRLALPGMIMVEAEWLAFEILTLMASRFGPEYLAAQSVVTTITTLSYEIPFPMSIAASTRIANLIGAGLVEPAKKTGVVAFAAACLIGMFNLTLYTTLRYKLPLLFTKDDDVIELVAEVMPIVSVMQVFDGLAAGAHGLLRGIGKQSIGGPANILSYYALSLPVSLALAFGLGWKLEGLWIGVTCGTISEINEKFEH

SEQ ID NO: 10130 - protein, 460 aa, Bordetella parapertussis 12822
MPRSTARAAWKRELAATLALGLPLVLTNLAQMAMTVTDVIFIGRLGSQALAASALGANLFTAIEFFGLGLVAATAPMVAHALGRRGNTVRDVRRTVRQGLWTAVIYSVPGCLLLWHGEAILLAIDQPPELAAQAGAYLRALMWAMPPFLGFLVLRSFVTALQRPRSAFLIALAAIVLNVFGNWVLVFGNLGAPALGLVGAGLASALATLGLFLGMVGVVCLDRRFRRYHLFGDVWQPDWQRLAEFWKLGLPIGAATAFEVTIFNAAAFLMGWLGEPELAAHAIAIQIASVTFMIPYGIAQAATVRVGHAYGARQPDQVARAGWCAFSLGIGSMAIAAALMLLAPGLLVSAFLDIGDPANAQVLRLATAYLAVAALFQIVDGAQVLGAGMLRGLHDTRVPMLYAALGYWGVGLPSGAALAFWAGWRGVGVWSGLAIGLALVAVLMMQRWLRRDRVGLLRRA

SEQ ID NO: 10131 - protein, 521 aa, Simmondsia chinensis
MKAKTITNPEIQVSTTMTTTTTTATLPNFKSSINLHHVKLGYHYLISNALFLVFIPLLGLASAHLSSFSAHDLSLLFDLLRRNLLPVVVCSFLFVLLATLHFLTRPRNVYLVDFACYKPHPNLITSHEMFMDRTSRAGSFSKENIEFQRKILERAGMGRETYVPKSVTKVPPEPSIAAARAEAEEVMYGAIDEVLEKTGVKPKQIGILVVNCSLFNPTPSLSSMIVNHYKLRGNILSYNLGGMGCSAGLISIDLAKDLLQVYRNTYVLVVSTENMTLNWYWGNDRSMLITNCLFRMGGAAIILSNRWRDRRRSKYQLLHTVRTHKGADDKSYRCVLQQEDENNKVGVALSKDLMAVAGEALKANITTLGPLVLPMSEQLLFFATLVARKVFKMTNVKPYIPDFKLAAKHFCIHAGGKAVLDELETNLELTPWHLEPSRMTLYRFGNTSSSSLWYELAYAEAKGRIRKGDRTWMIGFGSGFKCNSVVWRALRSVNPAREKNPWMDEIENFPVHVPKIAPIAS

SEQ ID NO: 10132 - protein, 274 aa, Deinococcus radiodurans
MSTMKFTAAQEFVAELLGTLVLILFGCGVVAMVKLFGSSPAIPGEVVMGGYTNIVLGWGFAVLMGIFVAGTITGAHLNPAVTIALAATGRFPWAKVGYFILAQMIGAFLGAAIVFAVYHAKWLGVDPGLDHTAGIFSTFPAVPGFLPGFIDQVVGTALLVGLILAIGDKLNNPAGAAWGSLAVAFVVMAVGISFGGMNGYAINPARDLGPRLFALLAGFKNLGDINVWLVPVIGPIVGGLVGAFIYDFCIGRPLLRAGEAHVGVQGVDPEFNRQ

SEQ ID NO: 10133 - protein, 127 aa, Zea mays
QEEYEAALLASTTLYIGNMSFYTTEEQAYELFSRAGEIKKIIMGLDKNSKTPCGFCFVLYYSREDAEDAVKYISGTMLDDRPIRVDFDWGFEEGRQCGRGRSGGQVVPWSYSNKYTWGSSMLYAYIL

SEQ ID NO: 10134 - protein, 464 aa, Haemophilus influenzae Rd
MNFRLLSQYHADIKKLIKISLPILLAQIAQNSMGLADTIMAGRVSSTDMAAISIGASIWMPLMFFGQGLLLALPPTISYLNGSGQHHRIAHQVRQGIWLVLGVSIPLGLLIYFCEIPLQYMQMESKMSDLARDYLHAMLWGLPAYLMLINFRCLNDGIEKTKPAMVITFLGLLINIPLNYIFIYGKFGMPAFGAVGCGIATAIVNWAMCLMMIFYSYTNTQERSLKVFSQLIEMPNPKTLKKLLRLGLPIAIAICCEVALYALTSLMLSPLGATIVASHQITLNTSSFIFMFPMSIGMATTILVGQALGAGSPQNAKKIGYAALLLGLTVTIVTALITIFFRYEIASIFVTDEIVIAMAANLLLFAALYQFSDTIQMVVGGILRGYKDTKVILYITLFSYWVIGVPLGYTLGRTDWLVPHIDAKGFWIAFVVSLTFAAFLLSLRMKKMQAMNDNAILQRLEKLK

SEQ ID NO: 10135 - protein, 350 aa, Agrobacterium tumefaciens str. C58
MSGLPRENEVDWVLVLAPFRKDADYIAALLQDQKVGMVSAKVDDDLEGLLCSSPDIIIVTHEALTPSVLTKLSDHLKAQPDWSEIPIIVLLEKAAPVQDIRDRLQAAWPKSRLLFHLRPIAPLELANAVQLNLLVRLRQRQVRDSIERERELRLELNHRVKNILATVTSIFQMTRRGAASVEELAGDFGARLQALSGVHSAVFEAGGEEVGLSLIMATTVAPYNGDGSSRIAVSGPDIVVSRDAGTTIALCVHELTTNAIKYGALSVPEGNVEVIWEVTDGNDPLFSMNWIERGGPPAVTPSRQGYGTRYIRSALGSLLGTAPQLQFDTQGFRCRIAGPVSQLRTERQPG

SEQ ID NO: 10136 - protein, 396 aa, Haemophilus influenzae Rd
MFEHIKAAPADPILGLGEAFKSETRENKINLGIGVYKDAQGTTPIMHAVKEAEKRLFDKEKTKNYLTIDGIADYNEQTKALLFGKDSEVIQSNRARTVQSLGGTGALRIAAEFIKRQTKAQNVWISTPTWPNHNAIFNAVGMTIREYRYYDAERKALDWEHLLEDLSQASEGDVVLLHGCCHNPTGIDPTPEQWQELAALSAKNGWLPLFDFAYQGLANGLDEDAYGLRAFAANHKELLVASSFSKNFGLYNERVGAFTLVAENAEIASTSLTQVKSIIRTLYSNPASHGGATVATVLNDAQLRQEWENELTEMRERIKKMRHLFVQLLKEYGAEQDFSFIIEQNGMFSFSGLTGEQVDRLKNEFAIYAVRSGRINVAGITEDNIRYLCESIVKVL

SEQ ID NO: 10137 - protein, 387 aa, Photorhabdus luminescens
MSVIKMTDLDLAGKRVLIRADLNVPVKDGKVTSDARIRASLPTIEAALKQGAKVMITSHLGRPIEGEYNEEFSLKPVVDYLKEKLSSSVRLEKEYLEGVEVSEGELVVLENVRFNKGEKKDDESLAKKYASLCDIYVMDAFGTAHRAQASTHGVAKFAPVACAGPLLFGELEALGKALDNPARPMVAIVGGSKVSTKLTVLDTLSKIADQLIVGGGIANTFVAAEGHNVGRSLYEDDLIPEAKKLLISCDIPVPTDVRVATEFSETAEATLKSSSDIKDDEQILDLGDESAQRLADILKNAKTILWNGPVGVFEFPNFRQGTEIVARAIADSDAFSIAGGGDTLAAIDLFGIADKISYISTGGGAFLEFVEGKKLPAVVMLEERAKQ

SEQ ID NO: 10138 - protein, 1360 aa, Mycobacterium bovis AF2122/97
MSFVLVSPETVAAVATDLKRIGASLAHENASAAASTTAVVSAAADEVSTAVAALFSQHAQGYQAAAAQVAAFHSRFVQALTAGAGAYAFAEAANASPLQSAMGAVSASAQTLLSRPLIGNGANATTPGGNGGDGGWLFGSGGNGAPGAAGQSGGNGGSAGLWGNGGAGGAGGSGGAAGGNGGNGGWLFGAGGTGGIGGTGAPGAMGGTGGNGGNGALLIGGGGLGGAGGMGGTGGGTGGTGGNGGNGALLIGAGGVGGAGGIGGQGTGAGGAAGAGGTGGNGGAGGLFMNGGDGGAGGQGGDGAAGDAAASAGGTGGKGGQGGDGGTGGAGGAGPVLFGHGGAGGMGGQGGTGGMGGAGGDGTTVIAAGTGGEGGTGGTGGTGGNGADAAAVVGFGANGDPGFAGGKGGNGGIGGAAVTGGVAGDGGTGGKGGTGGAGGAGNDAGSTGNPGGKGGDGGIGGAGGAGGAAGTGNGGHAGNTGDGGDGGTGGNGGNGTGGVNGADNTLNPDTPGGAGEPGGAGGAGGAGGAAGGPGGTGGTGGNGGNAGNNSTNAPVGGEGGAGGDGGAGGAGGAANGGTAGSQGTGGVGGDGGAGGNGGGGKAGTGNSGNFGVDGEAGFSGGAGGNGGVGGAAGANGGTGGSGGNGGDGGAGGIGGAGGNGIPGTGTEPAGGTGAKGGDGGDGGAGGAGGNAGGAGGNGGAGGQGGNAGQGGAGGAGGNAVIPGDGVGKAPHGGAGGSGGDGGKGGQGGSGGTGGSGAPIGGGAGGTGGSGGHAGKGGAGGIGAQGTTITVPGNGGNAGDGGNGGGGGAGGTGGDGATGTPAGNGGNGGNAGDGGNGGSGDFGGNTTSGASGSGGNGGNAGTAGSGGAGGTGGTGLSGGNGGNGGDGGNGAHGTVGAQFVPATSLPTPNGGAGGNGGTGSNGGAPGPAGAPGPTTGGNAGSQGIGGDGGNGGDGGKGGDGADAVNVVFMPTEPQAATGTAGSAGDPTGGNGGPGTPGSPMVAPPPPTPITQVQQGGDGGAGGTGSTNANDGTATGGKGGEGGVGSILGGPGGNGGTGGNASATGTNGVANAGNGGKGGDGGQFGAGGNGGAGGSVTDGSAGSTAGNGGNGGNATNGTIAGQPAGGNGSAGGKGGDGGNIAAGATGTAGNGGNGGNGNDGAVNAGTGGSGGNGGNAGGGGANGGDGGAGGAGGAGGRGGKGIDGGFGGDGGNGGSNNGTGAGGNGGNGGTGGVGSVGAAGGDGGNGGTGGFAGFGGTAGNGGSGGTGGAGGDGGTGGGGGNGGTGVIAGGGGTGGNGGASGAGGAGGTGGFAGNGNAGGNGGTGGASEDGDNGNAGSGATGGTGGNGGTGGDGGAAGLGGVA

SEQ ID NO: 10139 - protein, 1460 aa, Mycobacterium bovis AF2122/97
MSFVLIAPEFVTAAAGDLTNLGSSISAANASAASATTQVLAAGADEVSARIAALFGGFGLEYQAISAQVAAYHQRFVQALSTGAGAYASAEAAAAEQIVLGVINAPTQALLGRPLIGDGANATTPGGAGGAGGLLFGNGGAGAAGAPGQAGGPGGPAGLWGNGGPGGAGGSGGGTGGAGGAGGWLFGVGGAGGVGGAGGGTGGAGGPGGLIWGGGGAGGVGGAGGGTGGAGGRAELLFGAGGAGGAGGAGTDGGPGATGGTGGHGGVGGDGGWLAPGGAGGAGGQGGAGGAGSDGGALGGTGGTGGTGGAGGAGGRGALLLGAGGQGGLGGAGGQGGTGGAGGDGVLGGVGGTGGKGGVGGVAGLGGAGGAAGQLFSAGGAAGAVGVGGTGGQGGAGGMGGSGADNASGIGADGGAGGTGGNAGAGGAGGAAGTGGTGGVVGAAGKAGIGGTGGQGGAGGAGSAGTDATATGATGGTGFSGGAGGAGGAGGNTGVGGTNGSGGQGGTGGAGGAGGAGGVGADNPTGIGGAGGTGGAGGTGGTGGAAGAGGAGGAVGTGGTGGVVGDVGNAGIGGTGGKGGAGGTGFAGGAGGAGGQGGSSGAGGTNGSGGAGGTGGQGGAGGAGGAGADNPTGIGGAGGTGGTGGAAGAGGAGGAIGTGGTGGAVGSVGNAGIGGTGGTGGVGGAGGAGAAAAAGSSATGGAGFAGGAGGEGGAGGNSGVGGTNGSGGAGGAGGKGGTGGAGGSGADNPTGAGFAGGAGGTGGAAGAGGAGGATGTGGTGGVVGATGSAGIGGAGGRGGDGGDGASGLGLGLSGFDGGQGGQGGDGGSAGAGGINGAGGAGGDGGDGGDGATGAAGLGDNGGVGGDGGAGGAAGNGGNAGVGLTAKAGDGGAAGNGGNGGAGGAGGAGDNNFNGGQGGAGGQGGQGGLGGASTTSINANGGAGGNGGTGGKGGAGGAGTLGVGGSGGTGGDGGDAGAGGGGGFGGAAGKAGGGGNGGVGGDGGEGATGLGLDLSGFAGGQGGQGGAGGNAGAGGINGAGGTGGTGGAGGDGAPATLIGGPDGGDGGQGGIGGDGGNAGFGAGVPGDGGIGGTGGAGGAGGAGGAGDAGADGDPSIDGGQGGAGGHGGQGGKGGLNSTGLASAASGDGGNGGAGGAGGNGGDGDGFIGGSGGTGGTGGDAGAGGLANTGGTAGNAGIGGAGGRGGDGGAGDSGALSQDGNGFAGGQGGQGGAGGNAGAGGINGAGGTGGTGGAGGDGAPATLIGGPDGGDGGQGGGAGFGSGVAGAAGAGGNGGKGGDGGTGGTGGTNFAGGQGGAGGRGGAGGNGANGVGDNAAGGDGGNGGAGGLGGGGGTGGTNGNGGLGGGGGNGGAGGAGGTPTGSGTEGTGGDGGDAGAGGNGGSATGVGNGGNGGDGGNGGDGGNGAPGGFGGGAGAGGLGGSGAGGGTDGDDGNGGSPGTDGS

SEQ ID NO: 10140 - protein, 1938 aa, Mycobacterium bovis AF2122/97
MSFVLISPEVVSAAAGDLANVGSTISAANKAAAAATTQVLAAGADEVSARIAALFGMYGLEYQAISAQVAAYHQQFVQTLRTGAASYMLAEATNVEQNLLNLINAPTQTLLGRPLIGDGANATTPGGAGGDGGLLFGSGGNGAPGAPGQAGGAGGSAGLLGNGGSGGAGGTGAPGGNGGNAGWLYGRGGVGGAGGIGGGTGGAGGHAWLFGHGGTGGIGGGPGGNGGWLLGNGGHGGAGGIGGGSGGAGGNGGWLLGNGGIGGAGGTGGGAGGTGGNAAWLLGGGGTGGAGGIGGGNGGHGGNGGWLLGNGGNGGLGGDGDGGTGGGHGGNGGNPGWLLGTAGGGGNGGAGSTGTAGGGSGGTGGDGGTGGRGGLLMGAGAGGHGGTGGAGGAGVDGGGAGGAGGAGGNGGAGGQAALLFGRGGTGGAGGYGGDGGGGGDGFDGTMAGLGGTGGSGGTGGDGGAPGNGGAGGAGQLLSHSGVAGASGKGGAGGTGGNGGAGSAGADAPAGSGAMGSTGFAGGAGGDGGNGGGSGASQGNGGNGGNGGTGGKGGTGGAGMNSLDPLLAAQDGGQGGTGGTGGNAGAGGTGFTQGADGNAGNGGDGGVGGNGGNGADNTTTAAAGTTGGAGGAGGAGGTGGTGGAAGTGTGGQQGNGGNGGNGGTGGKGGTGGAGMNSLDPLLAAQDGGQGGTGGTGGNAGAGGTGFTQGADGNAGNGGDGGVGGNGGNGADNTTTAAAGTTGGAGGAGGAGGTGGTGGAAGTGTGGQQGNGGNGGNGGTGGKGGTGGAGMNSLDPLLAAQDGGQGGTGGTGGNAGAGGTGFTQGADGNAGNGGDGGVGGNGGNGADNTTTAAAGTTGGAGGAGGAGGTGGTGGAAGTGTGGQQGNGGNGGNGGTGGKGGTGGDGALAGSSGGAGGKGGNGGDAGKAGTGSAPGTAGTGGDGGKGGNGGIGAAGTTGPVGTGASGGTGGSGGAGGTGGDGGAANGGTAGAGGAGGNGGKGGDGGAGVTSSTAGNSGGAGGSGGKGGDAGAGGAGATPGANGIAGNGGDGGDGAAGAVGISGATGAGDGGHGGTGGAGGNGGTGGAGGSGIDGVGGGTGGTGGNGGNGAIGGAGGDAGGSGNSGGNGGTGGKGGNAGAGGAAGSNGGTVGANGTGGDGGNGGAAGAATAGSNGGAGTGSAGGNGGTGGRGGSGGAGGDGIGGVGGGKGGNGADGEVGGAGGAGGSGPNTSPGGNGGQGGQGGSGGAGGAAGAGGAGGGANGTAGNGGQGGAGGTGGAGAASSATNGGSGGAGGTGGAGGTGGAGGDGVGGAGGGNGGHGGDAGDGGNGANGNNRSSGSFLAAGGTGGAAGDGGQGGQGGAGGGAGGQGGAGGAGGTGGNGGNITGGTAGTAGAAGNGGAAGKGGAGGQGGTGGGTGGQGGAGGDGGAGGTGGDRTVGGGTVPAGSGGQGGNAGGGGAGGQGGADGGSGGDGGDAGTGGNGGNGGNRNSGNGTGGAGGNGGGGANGGAGGAGGSGGGTGGNGGAGGDAGDAGNGGNGNGTGNGGNGGNGGIAGMGGNGGAGTGSGNGGNGGSGGNGGNAGMGGNSGTGSGDGGAGGNGGAAGTGGTGGDGGLTGTGGTGGSGGTGGDGGNGGNGGNGADNTANMTAQAGGDGGNGGDGGFGGGAGAGGGGLTAGANGTGGQGGAGGDGGNGAIGGHGPLTDDPGGNGGTGGNGGTGGTGGAGIGSLGGGTGGDGGNGGTGGNGGTGGEGGEVGGAGGTGGAAGNGGDGGTGGTGGGDGGAGGTGGTGGTGGLGDPRVGGSGGDGGTGGSGGAAGNGGNGGNAGAGGNGNGGTGGAGGIGGTGGNGGDAEPGVPPGAGGAGGAGTTGGKGGTGGNGSGTGSGGTGGDGGTGGGGGNGGTGWNGGKGDTGSGGGAGDGGKAPAGGTGGAGGDGGAGGKGGSGGV

SEQ ID NO: 10141 - protein, 282 aa, Hordeum vulgare
MAASRGTLLLATVLVILSLFVSPISGYWKASRTRTRRPSSRRSWSSGGATWYGSPYGAGSDGGACGYQSAVGQRPFSSMIAAGGSSFFKSGKGCGACYQVKCTGNKACSGRPVTVVITDSCPDGICASEDHFDMSGTAFGAMANRGMADRLRSAGQLRIHYARVPCKYNGMNIVFKVDAGSNPFYLSVLIMYQAGDGDLSAVDIMQGGCAPGHHNDHGQPWMAMKQSWGALWLLQSNNGKPLQAPFSFRLTSGSGKVLEVTNAIPSGWTAGTSYSSSVNYAS

SEQ ID NO: 10142 - protein, 545 aa, Mesorhizobium sp. BNC1
MSAYARALDALRQHRRETEDFDLRQAFGADPDRFSRCSAALDDMLLDYSKCAVSDETLALLDKIAEAAGVIERREEMFSAKRINVTENRAVLHTALRNDSTRPVMLDGKDVMPDVEAVLAAMSTFSEGIRSGTIKAATGKSFTDVVNIGIGGSDLGPAMATLALAPYHDGPRLHYVSNVDGAHIHDTLKALDPDTTLFIIASKTFTTIETMTNAGTARSWIAEKLGQDAVGSHFAAVSTALDKVAAFGIDESRVFGFWDWVGGRYSLWSAIGLPIMIAIGPENFRRFLDGAELMDRHFREAPSRENLPMMLGLIGFWHRVICGYPARAVIPYDQRLARLPAYLQQLDMESNGKRVTFEGESVTVPTGPLVWGEPGTNGQHAFFQLLHQGTDIIPVEFMIAARGHEPELKHHHDLLIANCLAQSEALMKGRTLQEAKAQLLAKGMSEAEADKLAPHRVFPGNRPSVTIIYEKLDPFTLGRLIALYEHRVFVEAALFRINAFDQWGVELGKELATELLPVVEGKKDASGRDSSTAGLVAQIAALRDS

SEQ ID NO: 10143 - protein, 992 aa, Mycobacterium bovis AF2122/97
MSFVLIAPEFVTAAAGDLTNLGSSISAANASAASATTQVLAAGADEVSARIAALFGGFGLEYQAISAQVAAYHQRFVQALSTGAGAYASAEAAAAEQIVLGVINAPTQALLGRPLIGDGANATTPGGAGGAGGLLFGNGGAGAAGAPGQAGGPGGPAGLWGNGGPGGAGGSGGGTGGAGGAGGWLFGVGGAGGVGGAGGGTGGAGGPGGLIWGGGGAGGVGGAGGGTGGAGGRAELLFGAGGAGGAGGAGTDGGPGATGGTGGHGGVGGDGGWLAPGGAGGAGGQGGAGGAGSDGGALGGTGGTGGTGGAGGAGGRGALLLGAGGQGGLGGAGGQGGMGGAGGAGADNPTGIGGTGGDGGTGGSAGEGGAGGAAGQLFSASGAAGNAGVGGAGGQGGDGGAGGAGADADQPGATGGTGFAGGAGGAGGAGGSSGAGGTNGSGGAGGTGGQGGMGGAGGAGADNPTGIGGTGGDGGTGGAAGAGGAGGAAGTGGTGGMIGTTGNAGVGGAGGQGGDGGAGGAGADADQPGATGGTGFAGGAGGAGGAGGSSGAGGTNGSGGAGGTGGQGGAGGAGGAGADNPTGIGGTGGDGGTGGAAGAGGAGGAAGTGGTGGMIGTTGNAGVGGAGGQGGDGGAGGAGGAGGSSGAGGTNGSGGAGGTGGQGGAGGAGGAGADNPTGIGGTGGDGGTGGAAGAGGAGGAAGTGGTGGMIGTTGNAGVGGAGGQGGDGGAGGAGADADQPGATGGTGFAGGAGGAGGAGGSSGAGGTNGSGGAGGTGGQGGAGGAGISFSNGSNGGTGGTGGVGGTGGDGGNAGTGAGDPGKGGTGGTGGSGGAGGSGGANFNGGTGGTGGTGGTGGKGGMGGIAGDGGPGGDGGNAGVGGKGGTNGNGGSGGTGGTGGPGGSGGAPTGSGTGGKGGAGGDGGDGADGGAATGVGDGGDGGNGGNGGNGGTGVGSPGGLGGAGGTGGLGGAGAGGGADGDDGDDGQPGNNGS

SEQ ID NO: 10144 - protein, 524 aa, Triticum aestivum
  unsure (1)..(524): unsure at all Xaa locations
MSMEDSTRPAGAGASAGERASSPSPSRRLPDFLQSVRLKYVKLGYHYLITHGMYLLLTPLIVLIAVHLSALSPGDVTDASTPLRGNILSVIASSTPLVSISSGYSATRPRSVYLVXFGCYKPGPERRCSRETFMRCSKLTGNFTEANLDFQRKILERSGLGEDTYIPPALVTVPPNPSMELARQEAQVCMFGAIDNMLAKTGVKPKDIGILVVNCSLFNPTPSLSAMVVNHYKLRGNIVRYNLGGMGCSAGLLSIDLAKDLLQVHPNSYAMVVSTENITLNWYFGNNRSMLVSNCLFRMGCAAILLSNKRSDRRRSKYELVHTVRTHKGADDKCFSCVTQEEDDSGKVGVALSKDLMAVAGDALKTNITTLGPLVLPFSEQLLFMVTLVGKKLFKMKIKPYIPDFKLAFEHFCIHAGGRAVLDEIEKNMDLTDWHMEPSRMTLFRFGNTSSSSLWYELAYSEAKGRIRRRDRIWQIAFGSGFKCNSAVWKALRSVNPAKEQNNPWMDEIDTFPVDVPKVSKVAE

SEQ ID NO: 10145 - protein, 294 aa, Eremothecium gossypii
MCFSQSGRLSAQAADTMRSIKCVVIGDGAVGKTSLLISYTTNSFPQDYIPTVFDNYSTTIAVQDPASSTGEQQLFKLNLWDTAGQEEYDRLRPLSYPQTDIFLICFSINEPVSFQNIRDKWFPEIKHNTNYENMELFLECGKYPILLVGTKADLRDDDHEEDRLREMNTDFVSQAEIERVVQDCGFMGYVECSAATQEGVREVFERAVKYVVYEPDRLMNRSKNMSILVNSPLPLDSYANEDASNPKNKGGDPSAGSGPLKKAVGDDGAHGKELRVSADKLKKKRRKRSRCTIL

SEQ ID NO: 10146 - protein, 520 aa, Zea mays
MKWTEKQRAEYRRREGGAGRRGRAGYPILISPPFFSAAAGQQHATRPTPASDPLLTRHPEMATAAAFSVSSPAASAVAARSKVFGGGVNQARTRTGCRVGITRKNFGRVMMALAVDVSRFEGVPMAPPDPILGVSEAFKADKSELKLNLGVGAYRTEELQPYVLNVVKKAENLMLEKGENKEYLPIEGLAAFNKATAELLLGADNPVINQGLVATLQSLSGTGSLRLAAAFIQRYFPEAKVLISSPTWGNHKNIFNDARVPWSEYRYYDPKTVGLDFEGMIADIEAAPEGSFVLLHGCAHNPTGIDPTPEQWEKIADVIQEKKHMPFFDVAYQGFASGSLDEDAFSVRLFVKRGMEVFVAQSYSKNLGLYSERVGAINVVCSAPEVADRVKSQLKRLARPMYSNPPIHGAKIVANVVGDPIMFGEWKQEMELMAGRIKNVRQKLYDSLSAKDKSGKDWSFILRQIGMFSYTGLNKAQSDNMTDKWHIYMTKDGRISLAGLSLAKCDYLADAIIDSFHNVN

SEQ ID NO: 10147 - protein, 490 aa, Synechocystis sp. PCC 6803
MVYTPAPIKFGTDGWRGVIAAEFTFERVVLVAAAAAQVLAAEFGSSGREHRLIVGYDRRFMAEQFALLVAQTVQELGFEVWLSESYAPTPAFSWAAHHENALGALVLTASHNPANYLGLKVKGAFGGSVGSDVTEKIEAQLQNSLPQPQAGGSLQYFDPWPSYCQGLQAKVNVQPIREAVQQGKLRVFADVMHGAAASGLERLLGCPIDEINGDRDPLFGGASPEPLPKYVPKLLAALQTAAKAGGPELRVGLIFDGDADRIAAVDGQGNFLSSQGLIPILIYHLATQKGLQGEIVKTVSGSDLIPKLAELYGIPLTETAIGYKYIADRMLTSPVLIGGEESGGIGYGGHIPERDALLSALYVLETVVQSQQDISEQYGRLQEKVCFVSEYDRIDLPLASMDVRTALVQTLNENPLTAIAGEQVTDLLTTDGYKFRMAGGGWLLIRFSGTEPLLRLYCEAPTSSRVQTVLHWAKDWANGVTPAKPAQSSH

SEQ ID NO: 10148 - protein, 521 aa, Arabidopsis thaliana
MTLTIPNAPGSSGYLDMFPERRMSYFGNSYILGLTVTAGIGGLLFGYDTGVISGALLYIKDDFEVVKQSSFLQVYNVSSFTSSKLETIVSMALVGAMIGAAAGGWINDYYGRKKATLFADVVFAAGAIVMAAAPDPYVLISGRLLVGLGVGVASVTAPVYIAEASPSEVRGGLVSTNVLMITGGQFLSYLVNSAFTQVPGTWRWMLGVSGVPAVIQFILMLFMPESPRWLFMKNRKAEAIQVLARTYDISRLEDEIDHLSAAEEEEKQRKRTVGYLDVFRSKELRLAFLAGAGLQAFQQFTGINTVMYYSPTIVQMAGFHSNQLALFLSLIVAAMNAAGTVVGIYFIDHCGRKKLALSSLFGVIISLLILSVSFFKQSETSSDGGLYGWLAVLGLALYIVFFAPGMGPVPWTVNSEIYPQQYRGICGGMSATVNWISNLIVAQTFLTIAEAAGTGMTFLILAGIAVLAVIFVIVFVPETQGLTFSEVEQIWKERAYGNISGWGSSSDSNNMEGLLEQGSQS

SEQ ID NO: 10149 - protein, 866 aa, Klebsiella oxytoca
MTETRTTCPYCGVGCGVIASRAPHGQVSVRGDEQHPANFGRLCVKGAALGETVGLEGRMLFPEVDGERATWPQALAAAGSRLREIIDRHGPQAVAFYASGQLLTEDYYAANKLMKGFIGAANIDTNSRLCMSSAVTGYKRALGADVVPCSYEDVENSDLVVLVGSNAAWAHPVLYQRLAQAKRDNPQMRVVVIDPRRTATCDIADRHLALAPGSDGGLFVGLLNAIAASGAISDDFNDAQRALTIAQDWDLDKVAQFCGLPRQQIADFYREFIAAPRAITLYTMGINQSASGSDKCNAIINVHLACGKYGRPGCGPFSLTGQPNAMGGREVGGLATMLAAHMNFEPDDLRRLARFWGSERLAQTPGLTGVELFAAIGRGEVKAVWIMGTNPVVSLPDSHAVSEALARCPLVIISDVVADTDTGRFAHIRFPALAWGEKSGTVTNSERRISRQRAFMPPPGEARADWWIVARVAEALGFGSAFAWQHPHEVFSEHAALSGYENDGQRAFDIGGLADLSREAWDALEPVRWPVSRSEAAWSVHKGWHRDGKLRMVPVAPQPTRATTDAFYPLILNSGRIRDQWHTMTRTGAVPRLMQHINEPVVEVAPADAQRYHLLEGELARVRSPKGVMVAKVTIGDGQRPGSLFVPMHWNNQFARQGRVNNLLAAVTDPHSGQPESKQTAVAIATWLPAWKGELFSRQPVPLPASLHWRRRAAQGIIHLSLAGDTRSRDWLVEWCQRQGWQMQVAEGGKVWNLLAWRAGELMLGWWSDASEPAIDADWIHAAFRVPPQNAARRHALLSGRKGGVEMPRGRIICSCFSVGERAIGEAIAGGCRTPGALGGKLKCGTNCGSCIPELKALLAAKLAQA

SEQ ID NO: 10150 - protein, 455 aa, Mesorhizobium loti
MDTQPAPFVPPAPKPRTSPPSTLEMIRIVYRNPLELWGEPTYNEPWISANGVGGHLIVANDPGLIRHVLVDNAKNYKMATVRQKILRPILRDGLLTAEGEVWKRSRKAMAPVFTPRHIFGFAQPMLKRTKEFVTRYEEGGASDIAHDMTLLTYDILAETLFSGEIAGEPGSFANEIDRLFETMGRVDPLDLLRAPDWLPRLTRIRGRKTMAYFRKIVTDTVKMREEKFRRDPDAVPQDFLTLLLKAEGPDGLTRSEVEDNIITFIGAGHETTARALGWTLYCLAESPWERNRVEQEIDEVLAREPDPTKWLDAMPLTRAAFDEALRLYPPAPSINREPIEPEMWKDLYIPRHAAVLVMPWVVHRHRKLWDRPDAFLPERFHPGNREKIDRFQYLPFGAGPRVCIGASFAMQEAIIALAILLSRFRFDTTAETKPWPVQKLTTQPQGGLPMQVTPR

SEQ ID NO: 10151 - protein, 431 aa, Escherichia coli
MVSLEKNDHLMLARQLPLKSVALILAGGRGTRLKDLTNKRAKPAVHFGGKFRIIDFALSNCINSGIRRMGVITQYQSHTLVQHIQRGWSFFNEEMNEFVDLLPAQQRMKGENWYRGTADAVTQNLDIIRRYKAEYVVILAGDHIYKQDYSRMLIDHVEKGVRCTVVCMPVPIEEASAFGVMAVDENDKTIEFVEKPANPPSMPNDPSKSLASMGIYVFDADYLYELLEEDDRDENSSHDFGKDLIPKITEAGLAYAHPFPLSCVQSDPDAEPYWRDVGTLEAYWKANLDLASVVPKLDMYDRNWPIRTYNESLPPAKFVQDRSGSHGMTLNSLVSGGCVISGSVVVQSVLFSRVRVNSFCNIDSAVLLPEVWVGRSCRLRRCVIDRACVIPEGMVIGENAEEDARRFYRSEEGIVLVTREMLRKLGHKQER

SEQ ID NO: 10152 - protein, 322 aa, Eremothecium gossypii
MGVWAAVTWKGGEKSAGSRDLSSLQAPAAMRMGLSVLAGLRSSPCVASRRALSAAAVRRSGDGGMTHFGSRTVPKDEKAKLVGNVFSSVASKYDVMNDVMSLGVHRLWKSHFISKLDAGKRPNASEPLHFIDVAGGSGDIAFGLLDHAEAKFHDTESTMHVVDINPDMLREGEKRAAEQGKYYNDPRVTFLVQNGETLEDIPTASKDVYTISFGIRNFTDIQKGLNTAHRVLKPGGIFYCLEFSKIENPVVDIAYQQWSKLLPVMGSMVANDYDSYQYLVESIQRFPSQDEFKGMIEKAGFASVGYENLTFGTCAIHWGIKV

SEQ ID NO: 10153 - protein, 484 aa, Schizosaccharomyces pombe
MIDSTSTATATSKTVELNTNGSKTDASSENGTASNYPEGLWCFDEAMKMDPETTVKLQLDHLNKLRTVHGHARNFVKADNSRFVDEKGTEHLDLIGGVGVVTVGNNNQYVWDCLQKCFDAKLYMMGAISYRNLAAAFGRNMALLSPGQKLTRTWTATGGAEANEGVIKLIRLATRYKPNKKKFLSTLNSFHGKTTGAVFLGGKEKWQKYQSPAPFDVDYVPYGDAEALQVALSSGMYRSFIVEPIQGEGGVIVPPPGYLAKARELCTKYDTYLVLDEIQTGCGRTGKFWACEYENIIPDCIAFAKGFSGGLIPFAGYIATEELWNAAYNSLETAFLHTATYQENTLGLAAGVATIDYIVQNDLLSRCRKLGGIMFDRLNKLQTKFPHVMKDVRGRGMIVGIEFYPIPESVQEEFGEYYATPIVNDLADTYHVQVYCSLNNPSVFRFLPPLTIPEADLDEGLSAVESAVAKFDAKVKEAVAAKST

SEQ ID NO: 10154 - protein, 636 aa, Neisseria polysaccharea
MLTPTQQVGLILQHLKTRILDIYTPEQRAGIEKSEDWRQFSRRMDTHFPKLMNELDSVYGNNEALLPMLEMLLAQAWQSYSQRSASLKNIDIERENNPDWILSNKQVGGVCYVDLFAGDLKGLKDKIPYFQELGLTYLHLMPLFKCPEGKSDGGYAVSSYRDVNPALGTIDDLREVIAALHEAGISAVVDFIFNHTSNEHEWAQRCAAGDPLFDNFYYIFPDRRMPDQYDRTLREIFPDQHPGGFSQLEDGRWVWTTFNSFQWDLNYSNPWVFRAMAGEMLFLANLGVDILRMDAVAFIWKQMGTSCENLPQAHALIRAFNAVMRIAAPAVFFKSEAIVHPDQVVQYIGQDECQIGYNPLQMALLWNTLATREVNLLHQALTYRHNLPEHTSWVNYVRSHDDIGWTFADEDAAYLGISGYDHRQFLNRFFVNRFDGSFARGVPFQYNPNTGDCRVSGTSAALAGLAQNDPHAVSRIKLLYSIALSTGGLPLIYLGDEVGTPNDDGWAQDGNKSDDSRWAHRPRYNEALYAQRNDPSTAAGQIYQGLRHMIAVRQSNPRFDGGRLVTFNTNNKHIIGYIRNNALLAFGNFSEYPQTVTAHTLQAMPFKAHDLIGGKTVSLNQDLTLQPYQVMWLEIA

SEQ ID NO: 10155 - protein, 636 aa, Neisseria meningitidis
MLTPTQQVGLILQYLKTRILDIYTPEQRAGIEKSEDWRQFSRRMDTHFPKLMNELDSVYGNNEALLPMLEMLLAQAWQSYSQRSASLKNIDIERENNPDWILSNKQVGGVCYVDLFAGDLKGLKDKIHYFQELGLTYLHLMPLFKCPEGKSDGGYAVSSYRDVNPALGTIGDLREVIAALHEAGISAVVDFIFNHTSNEHEWAQRCAAGDPLFDNFYYIFPDRRMPDQYDRTLREIFPDQHPGGFSQLEDGRWVWTTFNSFQWDLNYSNPWVFRAMAGEMMFLANLGVDILRMDAVAFIWKQMGTSCENLPQAHALIRAFNAVMRIAAPAVFFKSEAIVHPDQVVQYIGQDECQIGYNPLQMALLWNTLATREVNLLHQALTYRHNLPEHTAWVNYVRSHDDIGWTFADEDAAYLGISGYDHRQFLNRFFVNRFDGSFARGVPFQYNPNTGDCRVSGTSAALAGLAQNDPHAVSRIKLLYSIALSTGGLPLIYLGDEVGTPNDDGWVQDSNKSDDSRWAHRPRYNEALYAQRNDPSTAAGQIYQGLRHMIAVRQSNPRFDGGRLVTFNTNNKHIIGYIRNNALLAFGNFSEYPQTVTAHTLQAMPFKAHDLIGGKTVSLNQDLTLQPYQVMWLEIA

SEQ ID NO: 10156 - protein, 403 aa, Azotobacter vinelandii
MQVSKSNKLANVCYDIRGPVLKHAKRLEEEGHRILKLNIGNPAPFGFEAPEEILQDVIRNLPTAQGYSDSKGLFSARKAVMQYYQQKKVEGIGIEDIYLGNGVSELIVMVLQALLNNGDEVLIPAPDYPLWTAATSLAGGKAVHYLCDEQSNWYPDIADIEAKITRNTKALLLINPNNPTGAVYPREVLERIVEVARQHNLVIFSDEIYDKILYDDAQHISTASLAPDVLCLTFNGLSKAYRVAGFRSGWVAISGPRHKAQSYIEGLDILANMRLCANVPAQHAIQTALGGYQSINDLILPGGRLLEQRNRTWELLNDIPGVSCVKPMGALYAFPKIDPKVCPIHNDEKFVLDLLLQEKLLIVQGTAFNWPWPDHFRVVTLPRVDDLEQAIGRIGNFLKTYRQ

SEQ ID NO: 10157 - protein, 938 aa, Elaeis guineensis
MMSLLLRIFYFVIFLPFLAESRNPALNDDVLGLIVFKADLREPDSKLVSWNEDDDEPCCWTGIKCEPKTNRVTELSLNGFSLSGKIGRGLLQLQSLRTLSLSKNNFSGTLSSDLLRLESLRNLDLSENKLSGPIPDDFFGQCRSIRAISLAKNAFFGAIPSNVGFCSTLAALNLSSNRLSGSLPWRLWSLNALRSLDLSDNTLVGEIPVGISKMYNLRSISLHGNRLSGHLPDDIGDCLLLKSLDLAGNSLSGSLPESMRKLSTCSYLSLSSNFFSGEVPTWIGEMKSLETLDLSRNGFFGQLPGSLGDLQLLKALKLSRNGFTGSFPESLCSCKSLVDVDLSQNSLTGKLPLWVFESGLQQVLVSENKLNGSIVIPSSSASNLQVLVLSSNAFSGSIPEGLGKLKSLEVLDLSGNRLNGSIPLEIGGAVSLKELRLEKNSLKGAIPTQIGNCASLTSLDLSQNNLTGPIPPTLANLTNLQIINFSRNRLTGTIPKQLSNLPHLLSFNIAHNVLSGDIPSGSFFNTIPPSFLSDNPGLCGSIVNRSCPGVLPKPIVLNPENSSPNSSSGSTFSPSGLHHKKIILSVSTLIAIGAAAIIALGVITITVLNFRARASASQSAAALALSDDFLSQSPTTDANSGKLIMFAGGDPEFSAGAHALLNKDCELGRGGFGAVYKTMLQNGRPVAIKKLTVSSLVKSQEDFEREVKKLGKVQHPNLVALEGYYWTPSLQLLIYEFVSGGSLYKHLHESSASNALSWQERFDIILGTAKSLAHLHRLDIIHYNLKSAYILLDGSGEPKTGDYGLAKLLPMLDHYVLSSKIQSALGYMAPEFACRTVKITEKCDVYAFGVLVLEIQARKRLLEYMEDDVVVLCDMVRGALEEGKVAECVDGRLMWEVPHRGGHCSDEAGFDLHVAGSIESARHGGGGEHPGTYQMPSG

SEQ ID NO: 10158 - protein, 436 aa, Dioscorea quinqueloba
QKIDRMYNGEKINCTENRSVLHIALRAARDKVIESDGKNVVPDVWHVLDKIKEFSERIRSGSWVGATGKALTDVVAVGIGGSFLGPLFVHTALQTDPEAAECAKGRQLRFLANVDPIDVARSIAGLNPETTLVVVVSKTFTTAETMLNARTLREWISGALGPQAVAKHMVAVSTNLTLVEKFGIDPANAFAFWDWVGGRYSVCSAVGVLPLSLQYGFSVVHKFLKGAASIDDHFHSTPFEKNIPVLLGLLSVWNVSFLGYPARAILPYSQALEKFAPHIQQVSMESNGKGVSIDGIPLPFETGEIDFGEPGTNGQHSFYQLIHQGRVIPCDFIGVMRSQQPIYLKGEVVSNHDELMSNFFAQPDALAYGKVADQLLNEKVPDHLIPHKTFPGNRPSLSLLLPSLNAYNVGQLLAIYEHRIAVEGFVWGINSFDHWG

SEQ ID NO: 10159 - protein, 517 aa, Zea mays
MAMAAIASPSSRTLIPPRHHGAAPSPSTSGDSSLRLLRAHPRHGRRGRAVSVSTPAARSRPFVFSPRAVSDSKSSQTCLDPDASTSVLGIILGGGAGTRLYPLTKKRAKPAVPLGANYRLIDIPVSNCLNSNISKIYVLTQFNSASLNRHLSRAYGNNIAGYKNEGFVEVFAAQQSPENPNWFQGTADAVRQYMWLFEEHNIMEFLILAGDHLYRMDYQKFIQAHRETDADITVAALPMDEQRATAFGLMKIDDEGRIVEFAEKPKGEKLRSMMVDTTILGLDPERAKELPYIASMGIYVFSKDVMLRLLRENFPAANDFGSEVIPGATEIGLRVQAYLYDGYWEDIGTIEAFYNANLGITKKPVPDFSFYDRSAPIYTQPRYLPPSKVLDADVTDSVIGEGCVIKHCTINHSVVGLRSCISEGAVIEDSLLMGADYYETENDKNVLSETGGIPIGIGKNSHIRKAIIDKNARIGENVKIINFDNVQEAVRETEGYFIKSGIVTVIKDALIPSGTII

SEQ ID NO: 10160 - protein, 200 aa, Coxiella burnetii RSA 493
MLEIVLASQNSSKLAEMQELLRDLEIKFIPQTEFSVPDIEETGSTFVENAIIKARHAAKQTGLPALADDSGLTIAALNSAPGVFSSRYAGKNATDAERIQKVLEALEAADDSDRSASFHCVIALMENENDPAPLICHGVWEGEIAREPRGKNGFGYDPIFYVPSHQRTAAELDPQEKNAISHRGQALEQLSTVLTEAFLV

SEQ ID NO: 10161 - protein, 522 aa, Streptomyces coelicolor A3(2)
MSRDEATVGRVMAQVAMVMNLDKCIGCHTCSVTCKQTWTNRTGVEYAWFNNVETKPGVGYPRRYEDQDRWKGGWMLDRRGRLVLRSGGRVRRLLSLFSNPDLPSLEDYYEPVTYDYDNLVGAPAGPDMPVARPRSVLTGRPTSITWGANWEDGLGGAPENAGADPNLSGEWAERVRFEFEQTFLFHLPRLCEHCLNPACVSACPSGAMYKRVEDGIVLVDQDKCRGWRMCVTACPYKKVYVNHATGKAEKCTFCFPRIEAGQPTVCSETCVGRLRYLGLLLYDADRVGEAAATPDEKDLLDAQRGVFLDPADPDVIAAARESGIPEDWLAAARRSPVYDLVARHKVALPLHPEYRTLPMVWYVPPLSPVLDAVDAAGGNQDDPDHVFAAVTRLRIPLEYLAELFTAGDTDVVGGVLMKLTALRSYMRARTLGEDGDEAALKAVGLTAREAEDLHRLLAVAKYEDRYVVPAAHREDAAALSGMEDRCPVETSGDPQPAGSGGRIMLGIPTLRRSSAASTGDSA

SEQ ID NO: 10162 - protein, 89 aa, Glycine max
TRPPTRPRTRGRTRGRAGWGVMASHRSGETEDTFIADLSVGLSTGQIKTGAPCRSERLAKYNQLLRIEEELGDAAVYAGAKFRAPVEPY

SEQ ID NO: 10163 - protein, 546 aa, Shigella flexneri 2a str. 2457T
MAIHNRAGQPAQQSDLINVAQLTAQYYVLKPEAGNAEHAVKFGTSGHRGSAARHSFNEPHILAIAQAIAEERAKNGITGPCYVGKDTHALSEPAFISVLEVLAANGVDVIVQENNGFTPTPAVSNAILVHNKKGGPLADGIVITPSHNPPEDGGIKYNPPNGGPADTNVTKVVEDKANALMADGLKGVKRISLDEAMASGYVKEQDLVQPFVEGLADIVDMAAIQKAGLTLGVDPLGGSGIEYWKRIGEYYNLNLTIVNDQVDQTFRFMHLDKDGAIRMDCSSECAMAGLLALRDKFDLAFANDPDYDRHGIVTPAGLMNPNHYLAVAINYLFQHRPQWGKDVAVGKTLVSSAMIDRVVNDLGRKLVEVPVGFKWFVDGLFDGSFGFGGEESAGASFLRFDGTPWSTDKDGIIMCLLAAEITAVTGKNPQEHYNELAKRFGAPSYNRLQAAATSAQKAALSKLSPEMVSASTLAGDPITARLTAAPGNGASIGGLKVMTDNGWFAARPSGTEDAYKIYCESFLGEEHRKQIEKEAVEIVSEVLKNA

SEQ ID NO: 10164 - protein, 461 aa, Zea mays
HWVPRGRPGKNSNATRRWWRPARHPPPPQLRSAMASLQSFLAVKPTTAARRELSAASLAVVDGEARYLVSTYKRSRVVFEHGRGCKLYDTDGREYLDMAAGIAVTALGHADPDVCATIAEQAGKVVHVSNVFYTKPQVELAKRLVEVSFADRAFFASTGTEANEAAIKFSRKFQRAAHPESGDPPTEFLAFSSSFHGRTMGAVALTSKSQYREPFAPVMPGVTFVDYGDLEAAKKFVRSGRVAAVFVEPVQGEGGIHSATREFLQGLRDACDEAGALLVFDEVQCGFGRTGHLWAHEAYGVEPDIMTLAKPLANGIPIGVVLVKEKVAAAINYGDHGTTFGGGPLACQTAITVFDKITRPGFLAEVSRKGESFKQLLRAKLSGNPHVREVRGVGLLVGVELDVPAGPLVDACLDAGVIVLTAGKGNVVRLVPPLIVSEKELEHAADVIRDCLPALDVVAAA

SEQ ID NO: 10165 - protein, 511 aa, Salmonella typhimurium LT2
MKIRSQVGMVLNLDKCIGCHTCSVTCKNVWTSREGMEYAWFNNVESKPGVGFPNDWENQEKWKGGWIRKINGKLQPRMGNRALLLGKIFANPHLPGIDDYYEPFDYDYQNLHTAPESKHQPIARPRSLITGQRMDKITSGPNWEEILGGEFEKRAKDQNFENMQKAMYGQFENTFMMYLPRLCEHCLNPACVATCPSGAIYKREEDGIVLIDQDKCRGWRMCITGCPYKKIYFNWKSGKSEKCIFCYPRIEAGQPTVCSETCVGRIRYLGVLLYDADAIESAASTENEKDLYQRQLDVFLDPNDPAVIEQALKDGVPQSVIDAAQQSPVYKMAIDWKLALPLHPEYRTLPMVWYVPPLSPIQSAADAGELGSNGILPDVDSLRIPVQYLANLLTAGDTQPVLLALKRMLAMRHYKRAETVDGKVDTRALEEVGLSEAQAQEMYRYLAIANYEDRFVVPSSHRELARDAFPEKSGCGFTFGDGCHGSDTKFNLFNSRRIDAVDVTSKTEPHA

SEQ ID NO: 10166 - protein, 305 aa, Deinococcus radiodurans R1
MSASKIAALFPGQGSHAVGMGADLAGEFPQAGETYAALDATLPGLRSLIEGGPLDDLTRTANQQPALVAASVAAYRAWQAHTGLTPMVAAGHSLGEYSALVAAGVLTLEDALRLTRKRGELMQQAVPEGVGAMSAVMGDPAVVAEVCAAQAGVVQPANFNAPTQTVISGEKAAVDAASAELKTRGLKAIPLKVSAPFHCALMRPAAEGLSAELHAAAYGPYLFPVVANVSAELVDSPTHTADLLERQITGSVRWVETVQTLAELGTEVFIEFGPGSVLSGLVKRIVPGARTLNVGSTEQVRAFAL

SEQ ID NO: 10167 - protein, 357 aa, Oryza sativa
  unsure (1)..(357): unsure at all Xaa locations
MSRTLVQPVGQKRLTNVAVVRLRKHGQRFEIACFPNKVLSWRTRVEKDIDEVLQSHTVYSNVSKGVLAKSKDLLKAFSTDDHTAICLEILDKGELQVSGKEREAQLSSQFHEIATIVMDKTINPETRRPYTITMIERLMHDVHFAVDPNLTSKEQALKVIKKLTEHFPIKRAPLRVRFTAPKSKFASLTEKLEEWNANVISKDESGSQPSVVCEIEPSILRSCEERXRMCQGRLEVLSVSAHAEGGSSVDQYENTEESQSVPAVEIDPVARIGEAMQKQSISSEPENPGQGQGKQQRRCKECDVLVEDKLYREHCKSGWHKHNYTRHKNGLPPLSQEECLVEMELADSKRDLKDYDF

SEQ ID NO: 10168 - protein, 340 aa, Neurospora crassa
MTRLTTKAFSALRTTMVPNSASRLSPRLTTALFQHQPRAITQTIITPLSHTRSLHQTASCPLPASEPFKLDRTKRLPEFFSLQDKVILISGGGRGVGLTQAEAVLEAGARVHVVDILPDPSTDPDSPFSAVAKRATEELGSSITYHRVDVRNQQALNEVVQGIAKKEGRMDGLIAAAGIQQETSALEYSREDADKMMSVNVTGVFMTAQAVARVMVENGWPGSMVLIGSMSGTVANRGLICPAYNASKAAVLQLGRNLASEWGEHGIRVNTLSPGYIVTAMTAGLFEAFPERRTAWPDANMLKRLSYPEEYRGAAIFLLSDASSFMTGADLRIDGGHCAW

SEQ ID NO: 10169 - protein, 436 aa, Haemophilus somnus 2336
MSNSITKNLSKHKLVKDTLVLILAGGRGSRLHELTDKRAKPALYFGGNRRIIDFALSNCINSGLNRIGVVTQYAAHSLLRHLQKGWSFLPQERGEFIDMLPARQQIDDSTWYRGTADAVYQNMAIIRDHYRPKYILILAGDHIYKQDYSQMLLDHVSSNAKCTVGCIEVPREQASEFGVMAVDENLKVKAFVEKPKDPPAIPNKPDTSLASMGIYVFDADYLYDVLMREVNTPYTSHDFGKDILPKSLEEEVLYAHPFSRSCMGRNTDGEIYWRDVGTLDSFWQSNIDLVSEHPQLDIYDQRWPIRGNPTQTYPSKFFYNKQDIKPVDNSLISGGCVITDAEISYSVLFDQVKVKADSKVEYSVVLPQVTIGKNCILRNCIIDRQVVIPDNTVIGVNIEEDRKRFRVSSTGKVILVTESMMKKLNGEKVVSEIHLD

SEQ ID NO: 10170 - protein, 479 aa, Pseudomonas putida KT2440
MSKILTTASGAPVADNQNSRSAGPRGPLLLDDFHLIEKLAHFNRENIPERRVHAKGSGAYGTFTVTHDITGYTSAKLFEEVGKQTETFLRFSTVGGERGSADTERDPRGFAVKFYTEEGNWDIVGNNTPVFFIRDPLKFPDFIHTQKRHPQSNLKNAQMMWDFWSHSPEALHQVTILFSDRGIPDGYRHMHGFGSHTYSLINAKGERTWVKWHFKTQQGIKNLTPADAARLAGTDPDYAQRDLFEAIERGDYPRWTVCIQVMSEAEAASRDENPFDVTKTWSQKDYPLIEVGVLELNRNPLNYFAEVEQAAFGPSNMVPGVGLSPDRMLQGRVFAYADAHRYRVGTNHQQLPVNAPRCPVNSYQRDGSMATGSYGSAPNYEPNSYSDAPKQSPRHAEPALAMNGSADRYDHREDTDYFSHAGALFRLMNDEQKALLISNIAGTMAGVSEDVIQRQLQYFFKADPAYGEGIAKALGINLA

SEQ ID NO: 10171 - protein, 555 aa, Chlamydophila pneumoniae CWL029
MELLSLNKSYFEIQRLRYRPEILTLLETIRSKHIQETSSPPSPPPELQKHIPNLCRIPEVSIYTEQETSSKPLKIGVLLSGGQAPGGHNVVIGLFDALRVFNPKTRLFGFIKGPLGLTRGLYKDLDISVIYDYYNMGGFDMLSSSREKIKTEEQKKNILNTVKQLKLDGLLIIGGNNSNTDTAMLAEYFLAHNCKTSVIGVPKTIDGDLKNCWIETSLGFHTSCRTYSEMIGNLAKDALSAKKYHHFIRLMGQQASYTTLECGLQTLPNIALISELIATRKISLKQLSEQLALGLVRRYKSGKNYSTVLIPEGLIEHIFDTRKLIDELNVLLANGDSSIEKILSKLSPETLKTFHLFPKDIANQLLLARDSHGNVRVSKIATEELLAVMVKKEIEKIKPHMEFHSVSHFFGYEARAGFPSNFDCNYGIALGIISALFLVRQKTGYMITINNLAQSYTEWQGGATPLYKMMHLENRCGTETPVIKTDSVDPKSPAVQHLLQQSDSCLVEDLYRFPGPLQYFGKEELIDQRPLTLLWENQTHSPFQALYSTSGKRSL

SEQ ID NO: 10172 - protein, 380 aa, Zea mays
  unsure (1)..(380): unsure at all Xaa locations
SESESEAASRRQGEMGKGAQGSDAAAAGGEVEENMAAWLVAKNTLKIMPFKLPPVGPYDVRVRMKAVGICGSDVHYLREMRIAHFVVKEPMVIGHECAGVVEEVGAGVTHLSVGDRVALEPGXSCWRCRHCKGGRYNLCEDMKFFATPPVHGSLANQVVHPADLCFKLPDGVSLEEGAMCEPLSVGVHACRRAGVGPETGVLVVGAGPIGLVSLLAARAFGAPRVVVVDVDDHRLAVARSLGADAAVRVSPRAEDLADEVERIRAAMGSDIDVSLDCAGFSKTMSTALEATRPGGKVCLVGMGHNEMTLPLTAAAAREVDVVGVFRYKDTWPLCIDFLRSGKVDVKPLITHRFGFSQRDVEEAFEVSARGRDAIKVMFNL

SEQ ID NO: 10173 - protein, 853 aa, Sinorhizobium meliloti
MIKVTIDEQSLEVEAGSTVLAAAERLGIEIPTFCYWKRLPPLASCRMCLVEIEGLRRLQPACATVAADGMVVRTNTPLIEETRSSMLDMLLANHPLDCPICDKGGECELQDMVMAYGPGESRFRDPKRVFHSKDIRLSPVIIMNVNRCIQCQRCVRMCEEVVGAVALGTVEKGMDTAVTGFEGSLASCDQCGNCVEVCPVGALMSFPYRYRARPWDLAETDTICPHCGTGCQLTVGARKGEFMRVRSDWEHGVNRETLCVRGRFGLDFIESRDRIKRPMIRRDGALTPVSWEEAGDFLRQRLGVAEGKAAGGLISPRLPNEVLYQFQKLMRTVLRTNNVDCSSRWSAPLDILVPIVASFYSRDPLEQVIGKDCVLIIGGNVTEENPVTEYLLRDAARRRHTRLLMLSARPSRLDADARAVLRAHPGGEGQSLAAVVAALVAVTDEGLPDDILAKTSGTIASSGANDALDRLVSTLKEGRSVTLLVSVDLLRSPLARKTLEQLGNLLQLLRLLGKEPSLQFLFDRANQMGAWDMGVLPGVLPGLGPIADEATRTKFERSWGAEIPREPGADVDAMLELCEKGGMGVLYVVGSDPLISYPDREFVERALGAANLLIVQDAFLTDTAGLADVVLPAAGYGEESGTFTNNEGRTQALRKFREPAFDARSNLAIFGFIAALREQPLQPSTETVIFEEMTRLVPAYEGLTWEGLGADGAFTTSAPKPWTSGFFAPLSAPGVTDVLQLITGNCLFHNGYVSERSETLNSVADDPFIEMSAQDAAGLSLSDGDQVLVRSARGELTAKLKVNRRFPHGLVFVPENYRALRLNSLMRRGEYPCPVEIRECAKRAASALDEERV

SEQ ID NO: 10174 - protein, 396 aa, Mesorhizobium sp. BNC1
MTKRFNDDWKPQTRLVHGGTLRSSFGETSEALYLTQGFVYETAEAAEARFKGEDPGFIYSRYANPTVDMFESRMCALEEAEDARATASGMAAVAAALLCSVKAGDHVVAARALFGSCRWIVETLMPRYGIETTLVDGTRMEAWEEAVRKNTKLFFLESPTNPTLEICDIASIAKLADSIGARLVVDNVFATPLLQKPLELGAHVVVYSATKHIDGQGRCLGGVVLSDKEWIDENLHDYFRHTGPSLSPFNAWTLLKGLETLPMRVRQQMESAAHVADYLADHPKVERVIYPGRPDHPQADLVKRQMKGGSTLVCLDIKGGKQGAFAFSNALEIIRISNNLGDAKSLITHPATTTHKNLSEEARLEAGIQQGTLRLSLGLEDTEDLLKDIEQALATV

SEQ ID NO: 10175 - protein, 202 aa, Glycine max
RIYNYHLVHLNLSFQKNNPYPDVKYTFLPILIKSLSMALSKYPFMNSCFKEDALEVILKGSHNVGIAMATSHGLVVPNIKNVQSLSIMEITKELARLQQLASNNKLTSEDICGGTITLSNIGAIGGKFGSPLINLPEVSIIAVGRIQKVPRFADNGNVYPASLVNVNIGADHRVLDGATVARFCNEWKQLIENPELLTLHLK

SEQ ID NO: 10176 - protein, 469 aa, Corynebacterium glutamicum
MTEHYDVVVLGAGPGGYVSAIRAAQLGKKVAVIEKQYWGGVCLNVGCIPSKSLIKNAEVAHTFTHEKKTFGINGEVTFNYEDAHKRSRGVSDKIVGGVHYLMKKNKIIEIHGLGNFKDAKTLEVTDGKDAGKTITFDDCIIATGSVVNTLRGVDFSENVVSFEEQILNPVAPKKMVIVGAGAIGMEFAYVLGNYGVDVTVIEFMDRVLPNEDAEVSKVIAKAYKKMGVKLLPGHATTAVRDNGDFVEVDYQKKGSDKTETLTVDRVMVSVGFRPRVEGFGLENTGVKLTERGAIEIDDYMRTNVDGIYAIGDVTAKLQLAHVAEAQGIVAAETIAGAETQTLGDYMMMPRATFCNPQVSSFGYTEEQAKEKWPDREIKVASLPFSANGKAVGLAETDGFAKIVADAEFGELLGAHLVGANASELINELVLAQNWDLTTEEISRSVHIHPTLSEAVKEAAHGISGHMINF

SEQ ID NO: 10177 - protein, 442 aa, Schizosaccharomyces pombe
MFQRRSLLSVRSAGSQIAFRRFVSLTHKDPTPDTTSCNIIKKEGANIISVYARYPVVAAKGEGSYLFDKEGRKYIDFTSGVAVTSLGHAHPEVARLAADQCSKLVHSSNLFYNEPAIELSNVINNSLAKNSGIAGPTKIFFANCGTEANETDLKFARRAAFEKYGEGKSQIVYFNNSFHGRSLGSLSITANPKYKRGFQPLLPDVVQAVYNDPASIEQFVNDNSTSAPGDPPEPGEGGICPAKPEFLIALRKACDKVGASLIYDEIQCGLGRSGDLWAHSIVKDVDLQAFKIEFPPPDNGLPIEATIVSSKIAAEIHPGEHGSTFGGNPVACRVGTFCVNELGSSKILQNVRKQHKALTSRFDDFVAKYPNLIRGYAGRGLLLGLQFTEPPAKFIELARQQGLLLLPGGNNNTRVLPSLNVKDEVIAKGLDIMESTLKALSK

SEQ ID NO: 10178 - protein, 463 aa, Bradyrhizobium japonicum USDA 110
MTPTMLPSSQQARDVAYQLHAYTNARSHQRAGPLIIERGEGPYVFDTAGKRYLDAMAGLWSAGLGFSEKRLIEAAHRQMQILPFYHTFASRSNGPSIALAEKLVKMSPVPMSKVFFTNSGSEANDTVLKLIAYRSNAAGQPQRKKVISRLRGYHGVTIGAASLTGFPDNHRSFDLPLPNIMHTGSPHFYKDSRAGESEETFATRRAEELESLIQREGADTIAAFFGEPVMGAGGVIVPPPTYWDKIQSVLKKHSILLVADEVICGFGRTGKMFGCETYNIAPDVIVVSKQLTSSYFPLSAIIMNDYMFEPIADESNKVGLLAHGFTGGGHPVGAAVALENLKLIEERGLIANVGRIGAYMQERLRTLVDHPLVGEVRGVGLIAAIELVLDKKRKVAATTPGDVGSIASRLLHERGIIVRNVDDALSICPPLIVNKDQIDELIDGITGMLHDLKATVVNCREPH

SEQ ID NO: 10179 - protein, 509 aa, Yersinia pestis biovar Medievalis str. 91001
MSIEINVPDIGADEVEVTEIMVKVGDTVEAEQSLITVEGDKASMEVPSPQAGVVKEIKIAVGDKVATGSLIMVFDATGAAAAPVKAEEKPAAPAQVAAPAASAAKNVEVPDIGDDEVEVTEVMVKVGDKVDAEQSLITVEGDKASMEVPAPFAGIVKEIKISTGDKVKTGSLIMVFEVEGAAPAPAAAPAAKAESKGEFAENDAYVHATPVIRRLAREFGVNLAKVKGTGRKGRILREDIQAYVKDAVKRAEAAPAAAGGGLPGILPWPKVDFSKFGEIEEVELGRIQKISGANLSRNWVMIPHVTQFDEADITEVEAFRKQQNIEAEKKKQDLKITPLVFLMKAAAKALEEFPRFNSSISEDGQKLTLKKYINIGVAVDTPNGLVVPVFRDVNKKGIVELSRELSVISKKARDGKLTASDMQGGCFTISSLGGIGGTAFTPIVNAPEVAILGVSKSSMKPVWNGKEFAPRLMLPLSLSFDHRVIDGAAGARFAAYIATIMADIRRLVM

SEQ ID NO: 10180 - protein, 178 aa, Zea mays
MCDAAPRYRGVRKRPWGRFAAEIRDPAKRARVWLGTFDSAEAAARAYDVAARALRGPLARTNFPALATTSRRPAPTCSSGSTVESSSGPRAGDPRARAAHRGRAAAKPRRPPRQAPPPPTDADCHSDCASSASVVDDGDDASTVRSRARPSLDLNLPAPLDLDGGHDLGFCTDLRLCL

SEQ ID NO: 10181 - protein, 355 aa, Streptomyces griseoflavus
MKALVLSGGAGTRLRPITHSYAKQLVPVANKPVLFYGLEAIAEAGITEVGIVVGDTAAEIQQAVGDGSAFGLDVTYIRQAAPLGLAHAVLIAREFLGDDDFVMYLGDNFIVGGIADLVAGFRESRPDTHILLTKVADPSAFGVVELDDDGKAVALEEKPAAPRSDLALVGVFLFTSVVHEAVRGIEPSARGELEITDALQWLIDHGYDVRSTTISGYWKDTGNVIDMLEVNRAVLEGAKGRVDGYVDADSEVIGQVTIEAGAEIRGSRIVGPAVIGANTRITGSYVGPSTSIAADCRIESSEIEFSIVLAGATVQGVRRVESSLIGRNVEVTPAAGVPAAHRLVLGDHSEVRISS

SEQ ID NO: 10182 - protein, 388 aa, Glycine max
PWNTKVATTTEGQSIRCKAAICRKAGEPLCIEEIIVAPPMPGEARIRIICSSLCQTDISFRNMQDHPAIYPTILGHEAIGVVESVGEDVTEVAKGDMVVPIFIAECGECIDCKSSKSNLCSKFPFKLSPWMPRHATSRFVDLKGEIIHHFLSVSSFSEYTVVDIAHLTKIDPEVPPSKACLLSCGVSTGVGAAWRTAGVEPGSTVAIFGLGSIGLAVAEGARLCGATRIIGVDINSEKYEIGKKFGITDFVHSGECENKSASQVIIEMTDGGADYCFECVGNASLMHEAYASCRKGWGKTIVLGSDKPGSKLSLSCSEILVSGKSLVGCMFGGLKPKSHVPILIKRYLDKELNLDGFVTHEVEFKDINKAFDLMIKGQCLRCVIWMDK

SEQ ID NO: 10183 - protein, 475 aa, Yersinia pestis biovar Medievalis str. 91001
MMSTEIKTQVVVLGAGPAGYSAAFRCADLGLETILVERYSTLGGVCLNVGCIPSKALLHVAKVIEEAKALAEHGIVFGEPKTDIDKVRVWKDKVINQLTGGLAGMAKGRKVKVVTGFGKFTGANTLVVDGENGPTTINFDNAIIAAGSRPIQLPFIPHEDSRIWDSTDALALRTVPERLLVMGGGIIGLEMGTVYHALGSKIDVVEMLDQVIPAADKDVVKVFTKRISKQFNLMLETKVTAVEAKEDGIYVTMEGKKAPAEPQRYDAVLVAIGRVPNGKLLDAGQAGVEVDDRGFIHVDKQLRTNVPHIFAIGDIVGQPMLAHKGVHEGHVAAEVIAGMKHYFDPKVIPSIAYTEPEVAWVGLTEKEAKEKGISYETSTFPWAASGRAIASDCADGMTKLIFDKETHRIIGGAIVGTNGGELLGEIGLAIEMGCDAEDIALTIHAHPTLHESVGLAAEIYEGSITDLPNPKAKKK

SEQ ID NO: 10184 - protein, 310 aa, Streptomyces griseoflavus
MRAFLFPGQGTQKIGMGTYLRERYPHLIAPLWREADDVLGFPLTRLCEEGPGEKLRHMPVTQPAVFLCSYAALVAAQANGAEPDVIAGHSLGEYSALAAAGVLTWQEVLQLVHRRGQLMAEVQHKVDGKMAAVIGLAIGQVEEICEQVRSETGEVVEVANHNEPLQVVVSGQCAAIDLLVQRVATATDVRTSVLRIGGPAHSSLMGSVAGDFVEYLRRFDFCTPKTMLISGSTAEPYASAEEIRHQLGRQLVHRVRWVDVMAQLERLGVAQTWELGPGKVLSGFVQRSLPQVRTYRANDLPSFLAGVTGW

SEQ ID NO: 10185 - protein, 368 aa, Streptomyces avermitilis MA-4680
MPKPGELTFVAPRGAKKPPRHLADLSPAERKEAVAAIGEKPFRAKQLSQHYFARYAHDPEQWTDIPAGSRAKLQEALLPDLMTVVRHLSTDQDTTRKTLWRLFDGTLVESVLMRYPDRVTMCISSQAGCGMNCPFCATGQAGLDRNLSTGEIVHQIVDGMRALRDGEIPGGPARLSNIVFMGMGEPLANYKRVVGAIRALTDPEPDGLGLSQRGITVSTVGLVPAIHRFADEGFKCRLAISLHAPDDELRDTLVPVNTRWKVREVLDAGWEYAARSGRRLSIEYALIRDINDQAWRGDRLGRMLKGRPVHVNLIPLNPTPGSKWTASRPEDEKAFVEAIAAHGVPVTVRDTRGQEIDGACGQLAATER

SEQ ID NO: 10186 - protein, 619 aa, Oryza sativa
MSGARRCGDRRSERSSVVGDNRNGYVETDPTGRYGRLSEVLGKGAMKTVYRGFDELRGVEVAWNQATISDVLRTPDALHRMYAEVSLLADLRHDAIIAFHASWVHPSRRTFNFITELFSSGTLRSYRLRYPRVSRRAVAAWARAILRGLAYLHSRGVIHRDLKCDNIFVNGHLGQVKIGDLGLAAVLRGCTSARSVIGTPEFMAPEMYDECYGVGVDVYSFGMCMLEMLTNEYPYSECDNPAQIYKKVTAGKLPDAFYLLTDADARRFIGRCLVDAAHRPSAEELLLDPFLSPPQNHDDHNTIAHATAPPPPLPLACSNSSEEQEEEEAPAAKTTGMAITGKLNKEHDTIFLKVQIGGGGNVRNIYFPFDVANDTAMEVATEMVKELDIADREPTEIAAMIEQEIVRLVPGYKQHEYSYADDDDDDDVNGQPNPFYYLSSSPTSSQGSLCGVGPTSSEGFPGPHGKVDWSRDYCYYPPSSVSVSDDDDSSTSSLSAAVSAISLQQQHCSASSSRLGPASASASEDGGGHAGRPRQREGEEERRRRRMSRNRSMVDMRSQLLHRTLVEELNKRLFFNTVGAVHDIGFRDPTTYGSSSSSSSSQHRRRSSSKVDHKHHYMF

SEQ ID NO: 10187 - protein, 473 aa, Oryza sativa
  unsure (1)..(473): unsure at all Xaa locations
HCDTRSRAKRYHPPIHGGLHLRHLLLHSHQARLLLLLLLKSQLRLLRQXSGRCRMASVVVRAEAVDATISPTVSALRPSKTMAITDQATALRQAGVPVIGLAAGEPDFDTPHVIAEAGMNAIKDGYTRYTPNAGTLELRKAICNKLQEENGISYSPDQVLVSNGAKQCITQAVLAVCSPGDEVLIPAPYWVSYPEMATLAGATPVILPTSISENFLLRPELLASKINEKSRLLILCSPSNPTGSVYPKELLEEIADIVKKYPRLLVLSDEIYEHIIYQPAKHTSFASLPGMWDRTLTVNGFSKAFAMTGWRLGYLAAPKHFVAACGKIQSQFTSGASSISQKAGLAALNLGYAGGEAVSTMVKAFQERRDYLVKSFKELPGVKISEPQGAFYLFIDFSSYYGSEVEGFGTIKDSESLCMFLLEKAQVALVPGDAFGDDKCIRMSYAAALSTLQTAMEKIKEAVALIKPRVAAK

SEQ ID NO: 10188 - protein, 183 aa, Amaranthus hypochondriacus
MASSMLSNAAMATTAATAGAQASMVAPFNGLKSFATFPITKKSSNDFSSLPSNGGRVQCMQVWPPVGKKKFETLSYLPPLSDAQLLAQVQYLLNKGWIPCIEFELEHPFVYRENHRSPGYQDGRYWTMWKLPMYGCTDPAQVLNEVEEAKKAYPSAFIRIIGFDNKRQVQCVSFIAYKPAGGL

SEQ ID NO: 10189 - protein, 281 aa, Escherichia coli
MSQTSTLKGQCIAEFLGTGLLIFFGVGCVAALKVAGASFGQWEISVIWGLGVAMAIYLTAGVSGAHLNPAVTIALWLFACFDKRKVIPFIVSQVAGAFCAAALVYGLYYNLFFDFEQTHHIVRGSVESVDLAGTFSTYPNPHINFVQAFAVEMVITAILMGLILALTVDGNGVPRGPLAPLLIGLLIAVIGASMGPLTGFAMNPARDFGPKVFAWLAGWGNVAFTGGRDIPYFLVPLFGPIVGAIVGAFAYRKLIGRHLPCDICVVEEKETTTPSEQKASL

SEQ ID NO: 10190 - protein, 1112 aa, Arabidopsis thaliana
MGFESSSSAASNMKPQPQKSNTAQYSVDAALFADFAQSIYTGKSFNYSKSVISPPNHVPDEHITAYLSNIQRGGLVQPFGCLIAVEEPSFRILGLSDNSSDFLGLLSLPSTSHSGEFDKVKGLIGIDARTLFTPSSGASLSKAASFTEISLLNPVLVHSRTTQKPFYAILHRIDAGIVMDLEPAKSGDPALTLAGAVQSQKLAVRAISRLQSLPGGDIGALCDTVVEDVQRLTGYDRVMVYQFHEDDHGEVVSEIRRSDLEPYLGLHYPATDIPQAARFLFKQNRVRMICDCNATPVKVVQSEELKRPLCLVNSTLRAPHGCHTQYMANMGSVASLALAIVVKGKDSSKLWGLVVGHHCSPRYVPFPLRYACEFLMQAFGLQLQMELQLASQLAEKKAMRTQTLLCDMLLRDTVSAIVTQSPGIMDLVKCDGAALYYKGKCWLVGVTPNESQVKDLVNWLVENHGDDSTGLTTDSLVDAGYPGAISLGDAVCGVAAAEFSSKDYLLWFRSNTASAIKWGGAKHHPKDKDDAGRMHPRSSFTAFLEVAKSRSLPWEISEIDAIHSLRLIMRESFTSSRPVLSGNGVARDANELTSFVCEMVRVIETATAPIFGVDSSGCINGWNKKTAEMTGLLASEAMGKSLADEIVQEESRAALESLLCKALQGEEEKSVMLKLRKFGQNNHPDYSSDVCVLVNSCTSRDYTENIIGVCFVGQDITSEKAITDRFIRLQGDYKTIVQSLNPLIPPIFASDENACCSEWNAAMEKLTGWSKHEVIGKMLPGEVFGVFCKVKCQDSLTKFLISLYQGIAGDNVPESSLVEFFNKEGKYIEASLTANKSTNIEGKVIRCFFFLQIINKESGLSCPELKESAQSLNELTYVRQEIKNPLNGIRFAHKLLESSEISASQRQFLETSDACEKQITTIIESTDLKSIEEGKLQLETEEFRLENILDTIISQVMIILRERNSQLRVEVAEEIKTLPLNGDRVKLQLILADLLRNIVNHAPFPNSWVGISISPGQELSRDNGRYIHLQFRMIHPGKGLPSEMLSDMFETRDGWVTPDGLGLKLSRKLLEQMNGRVSYVREDERCFFQVDLQVKTMLGVESRGTEGSSSIK

SEQ ID NO: 10191 - protein, 577 aa, Mesotaenium caldariorum
VFGLQLNMEVELSSQLREKHILRTQTLLCDMLLRDAPMGIVSQSPNITDLVKCDGAALFYHGRAWLLGVTPSEAQVRDIAAWLLDSHKDSTGLSTDSLADAGYPNADSLGVSVCGMAAARITSKDFLFWFRSHAQKEVKWAGAKQEPGDRDREEGEEGGRMHPRSSFQAFLEVVKQRSLPWEDVEMDAIHSLQLILRGSFQDMEGEGGGSQQGNKRMINARLNDLKLQGMDELSTVANEMVRLIETATAPILAVDSLGCVNGWNAKVSELTGLPVSEAMGKSLVKDLVQRESREAVERVLYMALNGEEEQNVEIQLKTWGPQLHSHGGTVILVVNACASRDVSESVVGVCFVGQDVTGEKEVLDKFIRIQGDYTTIVRSRNSLIPPIFGSDEYGCCTEWNPAMEKLTGVRREDVIGRMLTGDVFGSALRLRGSDGLTQFMIVLNRAMDGADTDKFPFTFYDREGKCVDSLLTANKRTDADGAITGVFCFLHTVSLELQQALSVQKAAERVAEAKAKELAYIRQEIQNPLDGIHFARSFIEHTELSEDQKQLMETSATCEKQLRRILDDMDLESIEEG

SEQ ID NO: 10192 - protein, 643 aa, Chlamydomonas reinhardtii
MQLPGVLLGVVGSLGRGVFGQRLHYAFACSAKSQLQRHGAAAQSCGVLSRCFSGVPAHTIVGMPALSPTMSQGNIAKWHVKPGQEVSPGSVLADIETDKATLAFENQDEGFVAKLLVPDGARDIPIGQPVLVLVEDASSVAAFANFTPGQSAPADAAPAAPVEQPPAATAAPALMEHAYPPHTRLTMPSLSPTMDRGNIVAWKVSPGAAIKAGDVLADIETDKATLAYEAVAEEGYVAALLVPEGTRDVAVGTPLALLVEAPEHLAAFARLTPEQAHALALGPQSGQAAAAAGITPPASQGPAEAAPRVVASERLGPAARLLLESSGLKPEDVTPTGPNNIITKADVLAAIAGGVKPGSAAAAKPAATKPVAAATAPAAATLKAAAPVAAATAAAQHSAGSAGPSGSGGSGGGSYTDTPNSQIRRIIAARLLDSKRNTPSLYMRADACLDAVADLRASLAARGTKVSVNDCVLRAVALALRDVPAANVHWDEAAGDVRAFGGVDISVAVATERGLITPIVRAADVKGLLAVSREVRALALKAKDNKLKPEEFTGGSFTVSNLGMYGLTHFSAIINPPQAAILAVGGATERVVLVGGQPAVRSAMSVTLSADGRVYDGELAGAVLAAFRRHMEQPYELLGATSS

SEQ ID NO: 10193 - protein, 554 aa, Shigella flexneri 2a str. 2457T
MCSIFGVFDIKTDAVELRKKALELSRLMRHRGPDWSGIYASDNAILAHERLSIVDVNAGAQPLYNQQKNHVLAVNGEIYNHQALRAEYGDRYQFQTGSDCEVILALYQEKGPEFLDDLQGMFAFALYDSEKDAYLIGRDHLGIIPLYMGYDEHGQLYVASEMKSLVPVCRTIKEFPAGSYLWSQDGEIRSYYHRDWFDFDAVKDNVTDKNELRQALEDSVKSHLMSDVPYGVLLSGGLDSSIISAITKKYAARRVEDQERSEAWWPQLHSFAVGLPGSPDLKAAQEVANHLGTVHHEIHFTVQEGLDAIRDVIYHIETYDVTTIRASTPMYLMSRKIKAMGIKMVLSGEGSDEVFGGYLYFHKAPNVKELHEETVRKLLALHMYDCARANKAMSAWGVEARVPFLDKKFLDVAMRINPQDKMCGNGKMEKHILRECFESYLPASVAWRQKEQFSDGVGYSWIDTLKEVAAQQVSDQQLETARFRFPYNTPTSKEAYLYREIFEELFPLPSAAECVPGGPSVACSSAKAIEWDEAFKKMDDPSGRAVGVHQSAYK

SEQ ID NO: 10194 - protein, 1142 aa, Mesotaenium caldariorum
MSTSRMSQSSGESTAKTKREVRVAQATADAKLNTAFEASAAVGGSFDYTKSVGASLNAGSEAIPSSAVTAYLQRMQRGGITQTFGCMLMVEEGSFRVRAFSENAGEMLDLVPQAVPSMGQQSLIAVGTDIRTLFTSASVSLLEKAAMATDVSVMNPVSLQSRAAKKPFFAVLHRIDVGLVVDLEPVRPSDPNVSAAGAMQSHKLAAKAISRLQSLPGGDIGLLCDAVVEEVRELTGYDRVMAYKFHEDEHGEVIAEIRRSDLEPYLGLHYPATDIPQAARFLFMKNRVRIICDCSAPPVKVIQDPTMKHPISLAGSTLRGVHGCHAQYMANMGSVASLVMAVIINDNSSEEGATAAGGILHKGRKLWGLVVCHHSSPRYVPFPLRSACEFLMQVFGLQLNMEVELSSQLREKHILRTQTLLCDMLLRDAPMGIVSQSPNITDLVKCDGAALFYHGRAWLLGVTPSEAQVRDIAAWLLDSHKDSTGLSTDSLADAGYPNADSLGVSVCGMAAARITSKDFLFWFRSHAQKEVKWAGAKQEPGDRDREEGEEGGRMHPRSSFQAFLEVVKQRSLPWEDVEMDAIHSLQLILRGSFQDMEGEGGGSQQGNKRMINARLNDLKLQGMDELSTVANEMVRLIETATAPILAVDSLGCVNGWNAKVSELTGLPVSEAMGKSLVKDLVQRESREAVERVLYMALNGEEEQNVEIQLKTWGPQLHSHGGTVILVVNACASRDVSESVVGVCFVGQDVTGEKEVLDKFIRIQGDYTTIVRSRNSLIPPIFGSDEYGCCTEWNPAMEKLTGVRREDVIGRMLMGDVFGSALRLRGSDGLTQFMIVLNRAMDGADTDKFPFTFYDREGKCVDSLLTANKRTDADGAITGVFCFLHTVSLELQQALSVQKAAERVAEAKAKELAYIRQEIQNPLDGIHFARSFIEHTELSEDQKQLMETSATCEKQLRRILDDMDLESIEEGYLELETGEFMMATVMNSVVSQGMVQSSKKGLQLFCDTPPEFKSMCVFGDQVRLQQVLADFLMNAVQFTPASGWVEIKVVPNVRSLPGGITMAHMEFRVTHSGEGLPEDLVHQMFDRADAHSKSQEGLGLSMCRKIVRLMSGEVRYVREPGKSYFLVLLDLPLAQREDAGSAM

SEQ ID NO: 10195 - protein, 248 aa, Vernicia fordii
MARIAFGRFDDSFSLGSFKAYLAEFISTLLYVFAGVGSAIAYNKLTANAALDPAGLVAIAICHGFALFVAVAVGANISGGHVNPAVAFGLALGGQITILTGIFYWIAQLLGSIVACFLLKLVTGGLAIPTHSVAGRVGAIEGVVMEIIITFALVYTVYATAADPKKGSLGTIAPIAIGFIVGANILAAGPFSGGSMYPARSFGPAVVSGDFHDNWIYWVGPLIGGGLAGLIYGNLYISGDHTPLSNDF

SEQ ID NO: 10196 - protein, 447 aa, Ustilago maydis 521
MVLTRSRSATPAKSIAASFGASSKASIANKPAPAKRGLQRSATESQYNTFKARESPRKRPRIDGEPLSSSPKASTIARPPSASKAKAKAPEEPFVIPHDASEEDCLTRTNVPFPDLPFDLNRAQEHLCAVDRRFERLFQKVPVRCYEEALDPSNSETKNLNLFRTVTTSILGQQISWLAARSVLYKFCRLFSPDSMPEKPDFVGFPREQWPFPTPLMVLRTPDAELRAAGLSFAKIKYVKDLAARFVDGRLDIRQILELDDEEACVAELSKVKGVGRWTSEMILMFAMRKPDILPCADLGVQKGMLNFFLSGAQGPKISVKKRKPGEEEGTENNAVIKSRSNSKRTNNDGTSMVPTEEKGVHVPLLAQTEVMPKMESGFKPENHEGSLEYLIVPDHGLCREVLQSRAKGNKIKGGQYLSPDEMKALAAKWSPYRSVACMFMWALVDT

SEQ ID NO: 10197 - protein, 247 aa, Zea mays
  unsure (1)..(247): unsure at all Xaa locations
MAATIQSVKARQIFDSRGNPTVEVDVCCSDGTFARAAVPSGASTGVYEALELRDGGSDYLGKGVSKAVNNVNSIIAPALVGKDPTAQTELDNFMVQQLDGTKNEWGWCKQKLGANAILAVSLAVCKAGASVKKIPLYQHIANLAGNKQLVLPVPAFNVINGGSHAGNKLAMQEFMILPTGATSFKEAMKMGVEVYHNLKSVIKKKYGQDATNVGDEGGFAPNIQEXTRRGLELLKTAIEKAGYTRQV

SEQ ID NO: 10198 - protein, 371 aa, Pirellula sp. 1
MICLTPMVSLPLVTTTDSESTGPRKNHLLNWSLDQLKDWLQEQGQKPFRAKQIRRWLFSGRATSFEEMTDLPAKLRAQLEEHFAIFNATEAVVSKSKDGTEKILVRLADGGEVECVLLRDGPRRSICVSSQVGCAMGCVFCASGLDGVDRNLTGGEILEQMLRLQQRLPADERLSHIVMMGMGEPLANLPGVLSALDVARSEDGLGISPRRITISTVGLPPAIDKLAAAGIPYNLAVSLHAPNDELRSELVPVNRKIGIEPVLQAADRYFHASGRRLTFEYVLLGGINDGDEHARQLSQILRGRSVMMNVIPYNPVAGLPYRTPSGAAIARFRAILESAGVNVNFRQRKGDEINAACGQLRRNRGEVKATK

SEQ ID NO: 10199 - protein, 137 aa, Glycine max
  unsure (1)..(137): unsure at all Xaa locations
VLVVLSVPLNDNLYICDNTRGWAGAITIKYLTGNGSNVILYRHYRHPKGVTPKXYSLKPVVPRLFEIIEIYVQMVNDCIDEEVDIFFAQLPQSGVLLLENDMIYNVDDMNDPHFAXKIACIADLYMTDAFSAVHRAH

SEQ ID NO: 10200 - protein, 429 aa, Escherichia coli [sequence omitted]

SEQ ID NO: 10201 - protein, 473 aa, Neurospora crassa
MNLLLAEDYLLQDYPEHITNTIRSGHSTCVRFNRTGDFLASGRVDGTVVIWDLETMGVARKLRGHSKNITSLSWSRCGRYLLSACQGWKAILWDLQDGSKYCEVRFRAPVYGAELHPMHHHQFAAALFEEQPMLVDVKESAQGANPVEVRHILPSVEKRSDDGADTPTKEKHAKEDARHMTTAIVYTATGEHLLAGTTKGRLNIIDATTHKIIYSEKIAGGVITTLRLTESGKELLVNAQDRTIRTFKVPDLTSADLDPDTIQIPLEHKFQDLVNRLSWNHAAFSSTGEYVAASTFNNHELYIWERGHGSLVRMLEGPKEEQGVIEWHPHKPLLAACGLETGRINIWSVTSPQRWSALAPDFVEVEENVEYIEKEDEFDIHPHEEIQKRRLDAEDEDVDVLGGGGAGGGDVAPFRMPVLFNLGESDSEEEFVNVGLGTLRRKSPDDQDDGAPASEGRPPAKKTVTQRTRTRKR

SEQ ID NO: 10202 - protein, 250 aa, Helicobacter hepaticus ATCC 51449
MLPILTKPLIQYGVEEALESGCCNIGIVTGRGKRAIEDYFDVSYELEHQISGTDKEELLNEIRNLTDTCTFSYTRQIAMKGLGDAILKGKNLIGKEAFAVILADDLCINPQGKGVLAQMVELYKKYQCCIVAIEEVKRSDVDKYGIIEGEEIESGVYEVSNMIEKPSIDKAPSNFAIIGRYILTPDIFDILAVTKPGKKGEVQITDALLEQSKKGRVLAYKFQGKRYDCGSIDGYVKATIDFYQALNANV

SEQ ID NO: 10203 - protein, 390 aa, Oryza sativa
MALASGKIYEGEGFKYIQQSFENDGRDVLDGSSVKFVELIENDLAKLRDKGVDARIASGGGRMYVTMDRYENDWQVVKRGWDAQVLGEAPHKFQNALEAVKKLREDPKANDQYLPPFVIVDERGRPIGPIMDGDAVVTFNFRADRMVMLAKALEYESFDKFDRVRFPKIRYAGMLQYDASYLVILIFSETVKFGHVTFFWNGNRSGYFHPNLEKYEEIPSDIGIPFNEQPKMKAVEIAKKTRDAILSRKFDQVRVNIANGDMVGHTGDIEATIVGCKAADEAVKIVLDAIEQVGGIFVVTADHGNAEDMVKRDKSGKPLRDKDGNVQPLTSHTLNPVPIAIGGPGLQPGVRFRSDLPSAGLANVAATVMNLHGFEAPDHYEPTLIEVVDK

SEQ ID NO: 10204 - protein, 181 aa, Yersinia pestis biovar Medievalis str. 91001
MLAVKHTVEVMISEQEVKTRIAELGRQISEHYRDSGSDMVLVGLLRGSFMFMADLCRAIDVSHEVDFMTASSYGNGMSTTRDVKILKDLDEDIRGKDVLIVEDIIDSGNTLSKVREILQLRGPKSLAICTLLDKPERREVHVPVEWVGFTIPDEFVVGYGIDYAQRYRHLPYVGKVVTLDE

SEQ ID NO: 10205 - protein, 496 aa, Enterococcus faecalis V583
MSKKEINQVVASSYQLYINGEWTTGSGNKMIASYNPSNGEKLAEFVDATNADVDRAVEAAQEAFQTWKDVDVVTRSNLLLKIADLIEENQEHLAMVETLDNGKPLRETQSIDVPASADHFRYFASVIRGEEGSVKEFDKDTLSIVVKEPIGVVGQIIPWNFPLLMGAWKLAPALAAGNTVVIHPSSSTSLSLLELFKIFDQVLPKGVVNLITGRGSDSGNYMLAHPGFDKLAFTGSTEVGYTVAKAAADRLIPATLELGGKSANIIFEDANWERALEGVQLGILFNQGQVCCAGSRVFVQSGIYDQFVEALKEKFEQVNVGFPWEKDVEMGAQINEHQLEEILKYVEIGVKEGATLITGGQRLTENGLDKGAFLAPTLLANGTNAMCVAQEEIFGPVATVIKFETEEEVIRLANDSEYGLGGAVFSQDINVALRVARGVRTGRMWVNTYNQLPAGAPFGGYKKSGIGRETHKSMLDAYTQMKNIYIVTKEEADGLY

SEQ ID NO: 10206 - protein, 537 aa, Xanthomonas axonopodis pv. citri str. 306
MGAGTIGPVFSMTGLPLTTSISPGASAGARLPLQIPFIIGNEACERFSFYGMRNILVQFLITSLLLQEISGPGREAEAKHILHSFMIGVYFFPLLGGWLADRFSGKYNTILWFSLVYCAGHACLALFEGSRDGFFLGLGLIALGAGGIKPLVASFMGDQFDQSNKHLAKVVFDAFYWIINFGSLFASLLIPLALKNLSPAWAFGIPGILMFVATLVFWLGRKRYVLVPLPPKDPHGFAAVVRTALLTHAPGQGRPGLLLAVVSVLLALAGFALIEPLGIVVCLCIALVLLLAGIGGGTWWQLERARGTHPDVAVEGVRALLRVLVIFALVMPFFSLFDQKASTWVLQGREMTMPAWFTASQMQALNPLLVMLLIPFNNLVLYPLLRRGGWEPTPLRRMTSGIAFSGVAWIAVGAIQMIMDGGEPMHIAWQILPYALLTFGEVLVSATGIEFAYSQAPPSMKGVVMSFWYLTTTVGNLWVLLSNVAVRNATVTAHIADTGLSEAAFLMFFFAAFAFLAALAFGLYARRYRMVDNYRTA

SEQ ID NO: 10207 - protein, 444 aa, Methanothermobacter thermautotrophicus str. Delta H
MNDEPLIIPFIIFTGGIAVMDISRPRGTRDFLFAEMRNRKEVEGVLRRTFETYGYHEIKTPIFEELKLFTVKSGEEVVNQIYHFTDKGGRELALRPELTAPVARLYMNEMQKKPKPIKMYYFGSCFRYERPQAGRFRQFWQFGCELIGGRSPLAEAEVISLASESLHELGLDGFEVHIGHLGILRGILGREEIPSELQDRIMGVIDKGDVEELEALLGEVEVSGESRELLMKLIGTQGGPEVLDDVEEYLGGYSESLEALEEFRELVETLHYFGVDDYHVNLGIARGLDYYTGIVFEIYVPELGAQKQICGGGTYNLVETFGGERVESTGFAFGFDRLMNALGMDEENMRMVDVFVIPIQDSTVPEAIRITQELRAAGVSADLEVSGRKLRKALSHADNLGARFAVLTGEREIQDGKVTVKDMERNSQETLPRDEMVDKIKGRC

SEQ ID NO: 10208 - protein, 174 aa, Oryza sativa
QAKGQSSNLPPGTRAGRATAGGRRAWPWTSGLVSVDKFSGGSQAYFLTHLHQDHTRGLGAAGGWRHGPLYCSPVTARLLPTRFPGVDASLLRPLAPGASASLSLSSPSTGRAVSVVVTAIPALHCPGSLMYLFRGDLGCMLYTGDYRWELRCERARAAKKALLEALAGDTVDVL

SEQ ID NO: 10209 - protein, 128 aa, Glycine max
  unsure (1)..(128): unsure at all Xaa locations
VCSMISSPAVTTVNRAGACMVAPFTALKSMVGFPWRKTTIDITFVAINGGXVQCMLVSPPIANKKFETLSYSPYLNDAQLLYEVKYHLKTGWIPCSQFDTDHGLGYHDHNRAPGYYYGLYWTMWKLPM

SEQ ID NO: 10210 - protein, 409 aa, Haemophilus influenzae Rd KW20
MAIEILVPDLPESVADATVATWHKKLGDTVKRDEVIVEIETDKVVLEVPALSDGVLAEVVQAEGETVVSKQLLGKISTAQEGDVSSATLKATNEPTPSDRQNAAIENSHNHNADQSPVIRRLLAEHDLQADQIQGSGVGGRLTREDIEREIAKRQAQQVKQEAATEQNTISTVAYSARSEKRVPMTRLRKRIAERLLEAKNSTAMLTTFNEVDMQPIMTLRKTYGEKFEKQHSVRLGFMSFYIKAVVEALKRYPEVNASIDGDDVVYHNYFDISIAVSTPRGLVTPVLRDCDKLSMAEIEKQIKALAEKGRDGKLTVEDLTGGNFTITNGGVFGSLMSTPIINPPQSAILGMHAIKERPIALNGQVVIRPMMYLALSYDHRLIDGRESVGFLVTIKELLEDPTRLLLEI

SEQ ID NO: 10211 - protein, 161 aa, Xanthomonas axonopodis pv. citri str. 306
MSDISTFAFTDLEGRTQSMRDYAGNVLLVVNVASKCGFTPQYAGLQALWQRYRERGLVVIGFPCDQFGHQEPGDAAQIRQFCSLDYAVDFPLAAKIDVNGNGAHPLWQWLKHEQRGVLGSEAIKWNFTKFLIGRDGRVLERYAPTTKPEALATEIERALDA

SEQ ID NO: 10212 - protein, 418 aa, Ralstonia eutropha JMP134
MTASSGKRRFARIDRLPPYVFNITAELKMAARRRGEDIIDMSMGNPDGATPPHIVAKLVEAAQRPDTHGYSASKGIPRLRRAISHWYRERYDVEIDPDTEAIVTIGSKEGLAHLMLATLDRGDSVLVPDPSYPIHIYGAVIAGADIRSVPLVPGVDFFAELERTIRGSYPKPKMIVLGFPSNPTAQCVELDFFERVIALARKHDIFVVHDLAYADIVFDGWKAPSIMQVPGAKDIAVEFFTLSKSYNMAGWRIGFMVGNPDLVAALTRIKSYHDYGTFTPVQIAAIAALEGDQECVKEIAAHYQSRRDVLAKGLIESGWLVDIPKASMYIWARIPEPYRALGSLEFAKQLLAKAKVSVSPGIGFGDYGDEYVRFALIENEARIRQAVRGIKAMFRADGLVKVPASEHADGHGKEKGKG

SEQ ID NO: 10213 - protein, 267 aa, Vigna unguiculata
MANGSVLSPVVKRLEGKVAIITGGASGIGEATARLFSQHGAHVVVADIQDDVGLSLCNELKSAIYVHCDVTKEEDIEKCVDTAVSKFGKLDIMFNNAGTGDEFKKSILDNTKSDFERVISVNLVGPFLGTKHAARVMIPARRGCIINTASVAGCIGGGATHAYTSSKHALVGLTKNTAVELGQFGIRVNCVSPFAIVTPLLNKYFNLDEEGVRKTYMNLKGWYPVPNDVAEAALYLASDESKFVSSHNLVIDGGLINSNVGFPMFEM

SEQ ID NO: 10214 - protein, 368 aa, Shewanella oneidensis MR-1
MKKPPIIWLNVILFSLTFLSAVILVPWYGIVYGYGASEWIAFVVLAFASGLSITAGYHRLWSHKAYKTHPAIRFLYALGGALALQNSALHWASDHRVHHKHVDDNDKDPYSAKMGFWYSHIGWMLREYQAQRYHDYQNVRDLQNDRIVMWQHKHYLTLVLLMNIGLPALLGWFTGNIAGMLLMAGLLRLVVVHHCTFFINSLAHVWGCQPYTDKNTARDNGFLAVLTYGEGYHNFHHIFENDYRNGIKWWHYDPTKWLIKSLSWVGLAKDLRTSPQERIESARLQMQLLHAKNKVLNLPNADEIIEKIQQEYELMKQHLLEYYQAQKTLLEAKRKQLVDQQLLQQVEELKTRFLNQQKSWKSLTATYS

SEQ ID NO: 10215 - protein, 742 aa, Synechococcus sp. PCC 7002
MDQRKTKTLCPYCGVGCGLEVSEVIKNEQPTLKVMGDRQHPSSLGKVCVKGATIAESLDQDRLLYPMYRRSLQDQFQRISWDDAFELIVEQIKTVKATLGSEGIAMYGSGQLQTEDYYTAQKLLKGCLGTNNFDANSRLCMSSAVAGYIQSFGADGPPPCYEDLELTDCAFIIGSNTAECHPIVFNRLREHHKRSKAKLIVVDPRRTKTAEVADLHLAIKPGTDIDLLNGIAHLLLKWGKIDTLFIDECTKGFSKYAMLIQSYTPETVARRCGIRIDHLEQAAKYWANADNVLSLWSMGMNQSAEGTAKVRTLINLHLMTGEIGKPGAGPFSLTGQPNAMGGREAGGLAHLLPGYRLVKNPEHRATLEKAWQLPPGTISPLPGKDAWAMIEGLDMGTVGLLWVVATNPAVSMPDLERTKAALLKSPFTICQDAYYPTETSNYAHLLLPALQWGEKTGAMTNSERVVTYCPQFRDRPGEAWADWEIFAEVGRRLGFQQQFRAVSSAEVYAEFVQLTGDRPCDMTGLSHQRLATEGPIQWPCPANETKCDPETTADNRGLLQKLFHQDEPLKGKRLYTDRRFHTPDGRARFAAYHSRGLAEPPNTDYPFVLTIGRLYGHWHTMTRTGRIKKIQKMHPNPFLEIHPRDADRLSITDGEMVEVRSPRGMARFPALITKNITPGTVFAPMHWGALWGEDTEANALSHAEACPDSLQPELKACAVNVQKITGPVPQEKATAEPVLQQL

SEQ ID NO: 10216 - protein, 151 aa, Triticum aestivum
HTNSHSSHSVFNLIAFIHPISGLSLFGMGNFASCTLARIPGAAKGARVVLPDGGLRLVRPPATAAELMLEAPGHFLADARALQAGRRIEALAADEDLELGGVYAAFPMKRLGSKAAPADVARLAAVFAREAHGRRPALAKVAAIVVAPPEV

SEQ ID NO: 10217 - protein, 332 aa, Oryza sativa
MATTPSPPPSATTMRAVQYDGYGGGAEGLKHVEVPIPSPKKGEVLIKMEAASINPIDWKIQKGMLRPFLPWKFPSIPACDLAGKVAAVGGGVRRFELGDKVIAILSEQSGGGFAEYAVAQASLTVERPPEVSAAEGACLPLAAVTALQALRAAGAGLDDAPPPKNVLVTAASGGVGHFAVQLARLGGHRVTATCGARNLALVAGELGADEALDYATPDGAALRSPSGRRYDAVVHCAPHLPWQVFDRVLAEGDTGGVVVDITPSPAALATALLHRVTFSKKRLTPFMFSPSKADMELLVAMARQGKLKPAVDSCHPLSDATGKVVVKIGEEE

SEQ ID NO: 10218 - protein, 332 aa, Zea mays
MSSSPADLSCVLPRVLIVSRRTVRKNKFVDFVGEYHLDLIVGYGAVPVIVPRVAGVHALLDSFEPIHGVLLCEGEDVDPSLYESADASLSPEQLEAVRRLHASDAAVDREKDSIELRLARRCLERNIPYLGICRGSQVLNVACGGSLYQDVEHELAEAQQVQVQHINYADYDDHRHPVRVVPGTPLHEWFAGDLADGARLMVNSYHHQGVRRLAQRFVPMAFAPDGLVEAFYDPAAYSPGEGRFIMGLQFHPERMRRPGSDEFDYPGCARAYQEFVRAVVAPQEKTAAATQLPRPGAAPLPASSSPKLSKEMERRRKVISRSFSLAKDMPPS

SEQ ID NO: 10219 - protein, 362 aa, Lotus japonicus
MKNPKRHPSESSLRRVTSEETVTGLKNAHRRRLKIRRMKYSCQAKINAGDGDFPPSGKERREIHESVQISLSLANSSSSSSSEEDRERKRDDGVLPYGSVSVVGSRKEMEDAVSVETGCVTKCDYFAVFDGHGGAQVAEACRERLYRLVAEEVERCGNGVEEVDWEEVMEGCFRNMDGEVAGNAALRTVGSTAVVAVVAAAEVVIANCGDCRAVLGRGGEAVDLSSDHKPDRPDELMRIEEAGGKVINWNGQRVLGVLATSRSIGDQYLRPYVISKPEVTVTKRSSKDEFLILASDGLWDVISSEMACQVVRKCLNGQIRRICNENQSRASEAATLLAEIALAKGSRDNTSVIVIELRGTVT

SEQ ID NO: 10220 - protein, 260 aa, Magnaporthe grisea 70-15
MPQNEYIERWRKQHGQRLDHEERARKKAAREEGHGKSAKAQNLRGLKAKLFAQERRKEKIRMKKAIKQHEERNVKGAAADKDPTNPVPAYLLDRNTPNTSKALSSSIKQARAEKAAKFSVPIPKVRGISEEELFKVVHTGKSKRKSWKRMVTKPTFVGQNFTRRNPKYERFIRPMGLRYKKAHVTHPELNVTVHLPILGVKKNPSNPLYTQLGVLSKGTVIEVNVSELGIMAGNKVAWGRYAQVTNSPENDGCVNAVLLV

SEQ ID NO: 10221 - protein, 92 aa, Triticum aestivum
  unsure (1)..(92): unsure at all Xaa locations
MAFSMLSFGTMAAXSAAQATMVAHFNGLMSSAVFPATATANNDTTCMTSNGGRGNCMQVWPTIVKKKIETLSXLSDPTDSAWAYEVDYLIRN

SEQ ID NO: 10222 - protein, 479 aa, Mesorhizobium loti
MAQFRKNLIDGEWVGDAGSHNINPSDTGDVVGEYASAGVEQAKQAIAAAKAAFPSWSRSGPLARHAVLKKASDEIMARKDEIGRNLAREEGKTLAEGIGETIRAAQIFDFFAGETLRLTGEMVPSVRPGVGVEITREAVGVVGIITPWNFPIAIPAWKIAPALAHGNTIVFKPAELVPESAWSIVDILHRAGLPKGVLNLVMGKGSVVGQAMLDSPDINAITFTGSVGTGKRVAAASVEHMRKFQLEMGGKNPLVVLDDADLAVAVDCALNGAFFSTGQRCTASSRLIVTEDIHDRFVEALKERMGKLVIGDALDAQTQIGPVVDATQLKQDEDYIAIGVREGATLAFGGERLDRKTPGFYLSPALLTEATNAMRSSREEIFGPVASVIRVKNYDEALSVANDTPFGLTSGICTTSLKHATHFKRNSEAGMVMVNLPTAGVDFHVPFGGRKGSSYGPREQGRYATEFYTTVKTAYTFAG

SEQ ID NO: 10223 - protein, 367 aa, Mesorhizobium loti
MATKHLFLLPGDGIGPEAMAEVKKLISAMNEKLGSGFATDEGLVGGCAYDAHGAAISDADMAKAMAADAVLFGAVGGPKWDAVPYEVRPEAGLLRLRKDMELFANLRPAICYPALAASSSLKQEVVEGLDILIVRELTGGVYFGEPKQIIDLGNGQKRGIDTQVYDTFEIERISGVAFELARTRKNHVTSMEKRNVMKSGVLWNEVVTQTHKARYADVKLDHMLADAGGMQLVRWPKQFDVIVTDNLFGDMLSDIAAMLTGSIGMLPSASLGAPDVKTKKRKALYEPVHGSAPDIAGKGIANPIAMIASFAMCLRYSFGMVDEADRLEGAIAAVLDQGLRTKDIFSPGMTEVGTVEMGDAIIAKFLG

SEQ ID NO: 10224 - protein, 200 aa, Schizosaccharomyces pombe
MLQSQPIRRKLVVVGDGACGKTSLLSVFTLGYFPTEYVPTVFENYVSDCRVDGKSVQLALWDTAGQEEYERLRPMSYAKAHIILVGFAIDSPDSLENVSTKWIEEINTLCPNVPFILVGMKADLRSDPVAIEEMRRRNQNFVKSQQAELVAQRIGARKYMECSSLTGDGVDDVFEAATRAALTVRDSENDKSSTKCCIIS

SEQ ID NO: 10225 - protein, 509 aa, Mesorhizobium loti MAFF303099
MAREQTKAATFPVDRNDVELVRGAHPPRWKNPTPDGPYNLVVIGAGPAGLTAARDAASLGAKVALIERGLIGGACVNVGGVPSKSIIRTARLYADMRDAENFGGDTPARLPVDFERAMMRMRQIRQRLSRADSAAAITAEGIDLYFGEARFGGPDTVEVAGKTLHFKKALVATGAHPSGPAIPGLAEAGYLDNESMFNLTRRPERLLVIGGGPLGCETAQAFCLLGAKVILAQSDPMFLPGEERDAAQILSDTLAREGVEVRLNTEVVAVRKEGGRKLADLLRDGDTTTISVDEIITGVGRSPNVRGLGLEEAGVVYDANGIKVDDHLRTTNPHIYAAGDVCLEYKFTHTAEAAARIVVRNALFRGRERLSDLVVPWCTYTDPEIAHVGLYPIEARQNGIPVKTYTVLMHDVARAVMDGEEEGFVKIHVREGSDRILGATVVASHAGEMINAVTLAIRSGMGLHALADVIHAFPTQAQGIKMAGDAYRRTRFTSLRRRLAARWLAWSRR

SEQ ID NO: 10226 - protein, 460 aa, Pseudomonas aeruginosa PAO1
MKIKESPGAFHAASGTLRNVCRRKAAVRTTTTASSWCVEGRAWAFLVLSLYARRLPQSMDNLNSAVQVLIHGSNTLFILLGAVMVLAMHAGFAFLEVGTVRLKNQVNALSKILSDFAISALAYFFVGYWIAYGVTFFHPAAALTVDSGYALVKFFFLLTFAAAIPAIISGGIAERARFGPQLCATALIVAFVYPFFEGLVWNGNFGLQEWLKLEFGAPFHDFAGSVVVHALGGWLALAAVLLLGSRNGRYRDGKLVAMAPSSIPFLALGSWILIIGWFGFNVMSAQTLAGVSGLVAVNSLLAMVGGTMASLLIGRNDPGFLHNGPLAGLVAVCAGSDLMHPIGALATGLVAGALFVWAFTATQVRWKIDDVLGVWPLHGLCGVWGGIACGIFGQQALGGLGGVSLASQALGSLLGVTVAFAGGLLVYGLMKALLGIRLSQEEEYYGADLSIHKIGAISHE

SEQ ID NO: 10227 - protein, 667 aa, Zea mays
MVTLLAFRLPPLFFFFLVLLPLIAAAADDGNMPQEGAEAMAALLNLKKSFADPTGRLEAWSAASPFAPCDAASPWPGVQCYKGSLVGIRLTHMNLSGTFDFGAVAKLPRLHSVNLKHNAFSGPLPPSLGTLRGLRALYLSSNNFSGPIPAAVFANMRWLKKLYLDNNRITGPLPADAIASAPRLIELHLDHNQIDGPVPSKLPDSLKRFNVSHNRLSGSIPPSVAVRYDASSFAGNPGLCGSQGSDAAVCVAAGPALPPAMPSPTEADYAATEEETSVFVVVGIILLVILLVSGAMVLMLRQDERNSAAPAWDYYAGTAAGAGASASKSAAPRAGEMVAVDVAGGSSSHGGRRMGEFVLLNDHIPAFGLPDLMKASAEVLGNGTLGSAYKAAMRNGVTVAVKRLRDMNRVGREEFEQHVQMLGGLHHPNVLPPVGYHYRKEEKLIVSEYMPRGSLLYILHGDQSPNRLILDWQGRLRVAVGVVRGLAFLHERLGIPAGRLVSMDGADFDAPPPPPPHGNLKSGNILLDADMEPRLVDYGFFPLVNAAQAPQAMFAFRSPEGTTRGVVSARSDVYCLGVVLLELVTGRFPSQYLLNARGGTDVVNWAATAVAEGGERDLVDPAIAAAGRDAAVSLLRVGVRCANPEPERRLSVAEAASMVEEIGAGAS

SEQ ID NO: 10228 - protein, 246 aa, Lactobacillus plantarum WCFS1
MVKPIIGIAPGVVTVNSQMFPGRVRDYVNRDYLKSVTDNGGVPLVLPVTTDATTIERYVGMIDGLLLCGGADVAPLTYGEEPQPKLGGVDPERDQYEIALIRATHAVGKPVLGICRGLQILNVCYGGNLYQDMSELPAGQGTLKHMQGQLAAYGMHHVKVVPGTTLAEYLGTTSDAIAINSFHHQAVKQVATGFQVVAQSADQVVEAIEATAGGLQLGVQWHPEMMQQVNSMQARLFAAFVRACVA

SEQ ID NO: 10229 - protein, 503 aa, Micrococcus luteus
MEHQKTTPHATGSTRQNGAPAVSDRQSLTVGSEGPIVLHDTHLLETHQHFNRMNIPERRPHAKGSGAFGEFEVTEDVSKYTKALVFQPGTKTETLLRFSTVAGELGSPDTWRDVRGFALRFYTEEGNYDLVGNNTPIFFLRDPMKFTHFIRSQKRLPDSGLRDATMQWDFWTNNPESAHQVTYLMGPRGLPRTWREMNGYGSHTYLWVNAQGEKHWVKYHFISQQGVHNLSNDEATKIAGENADFHRQDLFESIAKGDHPKWDLYIQAIPYEEGKTYRFNPFDLTKTISQKDYPRIKVGTLTLNRNPENHFAQIESAAFSPSNTVPGIGLSPDRMLLGRAFAYHDAQLYRVGAHVNQLPVNRPKNAVHNYAFEGQMWYDHTGDRSTYVPNSNGDSWSDETGPVDDGWEADGTLTREAQALRADDDDFGQAGTLVREVFSDQERDDFVETVAGALKGVRQDVQARAFEYWKNVDATIGQRIEDEVKRHEGDGIPGVEAGGEARM

SEQ ID NO: 10230 - protein, 532 aa, Arabidopsis thaliana
AKGLVDHSRRQHHHKSPSFLSPQPRPLASSPPALSRFFSSTSEMSASDSTSSLPVTLDSINPKVLKCEYAVRGEIVNIAQKLQEDLKTNKDAYPFDEIIYCNIGNPQSLGQLPIKFFREVLALCDHASLLDESETHGLFSTDSIDRAWRILDHIPGRATGAYSHSQGIKGLRDVIAAGIEARDGFPADPNDIFLTDGASPAVHMMMQLLLSSEKDGILSPIPQYPLYSASIALHGGSLVPYYLDEATGWGLEISDLEKQLEEARSKGISVRALVVINPGNPTGQVLAEENQRDIVNFCKQEGLVLLADEVYQENVYVPDKKFHSFKKVARSLGYGEKDISLVSFQSVSKGYYGECGKRGGYMEVTGFTSDVREQIYKMASVNLCSNISGQILASLVMSPPKPGDDSYDSYMAERDGILSSMAKRAKTLEDALNSLEGVTCNRAEGAMYLFPRINLPQKAIEAAEAEKTAPDAFYCKRLLNATGVVVVPGSGFGQVPGTWHFRCTILPQEDKIPAIVNRLTEFHKSFMDEFRN

SEQ ID NO: 10231 - protein, 217 aa, Brucella suis 1330
MKFFVDTADVKEIRELNDLGLVDGVTTNPSLILKSGRDIIEVTKEICNIVKGPVSAEVAATEYEQMMKEAAVIARIADNICIKLPVTLDGLKACKALTSEGHKVNMTLCFSANQALLAAKAGATFISPFIGRLDDTGINGMELIAEIRTIYDNYDFRTEILAASVRTVNHVKEAALIGADVVTAPPATLKALVKHPLTDKGLETFLADWAKTGQKIA

SEQ ID NO: 10232 - protein, 256 aa, Zea mays
  unsure (1)..(256): unsure at all Xaa locations
MNSTATLRPREGEKRQGRNVQLEASAASSGTGSEAHPHFRRGSSVRLELEAQKTSRTQQNSSLTSLPLPLPLPLCGPNNLSLSLSLSLFFLSALQTISPSPSLLSKTNETKQETEKSPSPVAVAVAVAARIMSAAAAAEVGKEKGAATPGPGPGPGGACELCGAAARVYCGADEATLCWGCDAQVHGANFLVARHARSLLCRGCARPTPWXAAGPRLGPTVSLCVRCVRRGPRAVARRGHEDMRGAADRDADDAPH

SEQ ID NO: 10233 - protein, 162 aa, Zea mays
MGRPPCCDKESVKKGPWTPEEDLVLVSYVQEHGPGNWRAVPANTGLLRCSKSCRLRWTNYLRPGIRRGGFFDQEDKLIIHLQALLGNRWAAIASYLPDRTDNDVKNYWNTHLKKKLLAQQQQQLRASPSPPKGQWELKLQTDINLSRRALCDALSIYAGPPG

SEQ ID NO: 10234 - protein, 426 aa, Agrobacterium tumefaciens str. C58
MRPDRLASAIRHSMVRPELATNQDRPMPAFKTIDDLNDIAGKRVLVRVDLNVPVADGKVTDATRIERVAPTILELSSKGAKVILLAHFGRPKGEPVAEMSLSQIVPTVEDVLDHAISFATDCIGAPAADAVAKMNDGDILLLENTRFHKGEEKNDPAFVEELAANGDIYVNDAFSAAHRAHASTEGLARHLPAYAGRTMQAELEALEKGLGQPVRPVVAIVGGAKVSSKIDLLMNLVKKVDALVIGGGMANTFLAARGTNVGKSLCEHDLAETAKQIMIEAATSGCAIVLPEDGVVAREFTAGAANEIVDINAIPADAMVLDVGPKSVESIKAWISRAETLVWNGPLGAFEIEPFDAATVAAAKHAAECTKAGKLVSVAGGGDTVAALNHAGVSDDFTYISTAGGAFLEWMEGKELPGVAILTTAK

SEQ ID NO: 10235 - protein, 461 aa, Vibrio cholerae O1 biovar eltor str. N16961
MENSVHRYKKEASNLIKLATPVLIASVAQTGMGFVDTIMAGGVSAIDMAAVSIAASIWLPSILFGVGLLMALVPVVAQLNGAGRQHKIPFEVHQGLILALLVSVPIIAVLFQTQFIIRFMDVEEAMATKTVGYMHAVIFAVPAYLLFQALRSFTDGMSLTKPAMVIGFIGLLLNIPLNWIFVYGKFGAPELGGVGCGVATAIVYWIMLLLLLFYIVTSKRLAHVKVFETFHKPQPKELIRLFRLGFPVAAALFFEVTLFAVVALLVAPLGSTVVAAHQVALNFSSLVFMFPMSIGAAVSIRVGHKLGEQDTKGAAIAANVGLMTGLATACITALLTVLFREQIALLYTENQVVVALAMQLLLFAAIYQCMDAVQVVAAGSLRGYKDMTAIFHRTFISYWVLGLPTGYILGMTNWLTEQPLGAKGFWLGFIIGLSAAALMLGQRLYWLQKQSDDVQLHLAAK

SEQ ID NO: 10236 - protein, 175 aa, Hordeum vulgare subsp. vulgare
  unsure (1)..(175): unsure at all Xaa locations
MAAAGDAGEKKMITLKSSDGEEFEVEEAVAMESQTIRHMIEDDCADNGIPLPNVNSKILSKVIEYCNKHVQAKPADAGASSDTASAAXGAPAAPAEDLKNWDAEFVKVDQATLFDLILAANYLNIKGLLDLTCQTVADMIKGKTPEEIRKTFNIKNDFTPEEEEEIRRENQWAFE

SEQ ID NO: 10237 - protein, 378 aa, Schizosaccharomyces pombe
MSFEGKTITCKAAVAWGAKEPLSIEDIQVAPPKAHEVRVKVDWSAVCHTDAYTLSGVDPEGAFPIVLGHEGAGIVESIGEGVINVRPGDHVILLYTPECKECKFCRSGKTNLCSKIRETQGRGLMPVGTSRFSCRDKTLLHYMGCSSFSQYTVVADISLVAISHSAPLRSICLLGCGVTTGFGAVTHSAKVESGSTVAVVGCGCVSLAAMQGAVAAGASRIIAIDINADKEVYAKKFGATDFIDSSKVKDLVQYVIDVTDGGVDYAFDCTGNVTVMQQELQFCHKGWGKLCVIGVAAAGKTLDFRPFLVVTGRQVLGSAFGGVKGRSELPNFVDEYMQGHFKVDEYITNEEPLKNINKAFDHMHEGKCIRCVVDMNKP

SEQ ID NO: 10238 - protein, 423 aa, Mycoplasma gallisepticum R
MLKLMSNKQITAVRGTTDWFDQAMILFNAISHKIIALSDLYTFQRIKTPVFEHAELFSRNLEHSDIVKKELYQLIDRSERKLALRPEGTASIIRAVNEHKLLDQNPWPLKLYYLEPMFRYERPQKGRMREFYQYGIELVGELDQLDYLQTILFAKKILDTFNFDCVLNINWLGNFASRKCWVEQLNQYFKQYQDQLSELSVSRLDSYGVLRILDDKNESKKDFVRSAPTIDQFISLEEQTQFKQLLEQLDQLGIKYKYNSSLVRGLDYYSELVFEFILANNDQAQSTLIGGGCYQNLIAELTNKPLKAIGFALSIERFISYLDDKTKDSLINQDQKPRYLLINLVPNKELATLNLSQELINHNYQVYYQHKLNKVDKAIKYALRAKFTHLIIMGNDEWSKQTMTIKDLSSQTQQTIKYKEFIK

SEQ ID NO: 10239 - protein, 294 aa, Pisum sativum
MEQYEKVEKIGEGTYGVVYKARDRVTNETIALKKIRLEQEDEGVPSTAIREISLLKEMQHRNIVRLQDVVHSEKRLYLVFEYLDLDLKKHMDSSPEFSKDQRQVKMFLYQILCGIAYCHSHRVLHRDLKPQNLLIDRSSNALKLADFGLARAFGIPVRTFTHEVVTLWYRAPEILLGSRHYSTPVDVWSVGCIFAEMINQRPLFPGDSEIDELFKIFRITGTPNEDTWPGVTSLPDFKSAFPKWPSKDLATLVPSLEPSGLDLLSSMLRLDPSRRITARGALEHEYFKDIKFVP

SEQ ID NO: 10240 - protein, 487 aa, Candida albicans
MAPTFTNSNGQPIPEPFATQRVGQHGPLLLQDFNLIDSLAHFDRERIPERVVHAKGSGAYGVFEVTDDITDICAAKFLDTVGKKTRIFTRFSTVGGELGSADTARDPRGFATKIYTEEGNLDLVYNNTPVFFIRDPSKFPHFIHTQKRNPETHLKDANMFWDYLTSNEESIHQVMVLFSDRGTPASYREMNGYSGHTYKWSNKKGEWFYVQVHFISDQGIKTLNNEEAGALAGSNPDYAQEDLFKNIAAGNYPSWTAYIQTMTEAEAKEAEFSVFDLTKVWPHRKYPMRRFGKFTLNENPENYFAEVEQAAFSPAHTVPYMEPSADPVLQSRLFSYADTHRPHRLGTNYTQIPVNCPVTGAVFNPHSRDGAMTVNGNLGSHPNYLASDKPVEFKQFSSFQEDQEVWNGAATPFHWKATPADFKQAQELWKVLKRYPNQQEHLAHNIAVHAAGADAAIQDRVFAYFGKVSQDLADAIKKEVLELSPRK

SEQ ID NO: 10241 - protein, 384 aa, Pisum sativum
MAIHHHHHHHQQLHHNSLLDALYCDEEKLEEEQEDVSSQQSDVTTNNDNNILDSTSLFPLLLLEQNLFSQDEELTTLFSKEKTQQETYYEDLKNVVDFVSLSQPRREAVQWMLKVNAHYAFSPLTATLAVTYFDRFLLTFHFQKDKPWMIQLVAVTCISLAAKVEETQVPLLLDLQVQDTKYVFEAKTIQRMELLILSTLKWKMHPVTPHSFLDHIITRLGLKTNLHWEFLRRCENLLLSVLLDSRFVGCVPSVLATATMLHVIDQIEESDDNGVDYKNQLLSILKINKEKVDECYNAIVEVTNENNYGHKRKYEQIPGSPSGVIDAVFSSDGSNDSWKVGSSSYSTSEPVFKKTKTQGQNRNLSPLNRVIVGILATASATTSP

SEQ ID NO: 10242 - protein, 484 aa, Chloroflexus aurantiacus
MRRRIRTVLSPAEVFWKMSDVEERLSATISRPHRTLRAFLLPAIWLICFEEVVMSDAPRFTGFETLALHAGQTPDPTTGSRAVPIYATTSYQFKDTDHAARLFNLQEFGNIYTRIMNPTTDVFEQRMAALEGGVGALALASGQAAETLAILNLAGSGDNIVASSDLYGGTYNLFRHTLPKLGITTRFVDARDYDGFAAAIDGRTKAFFLELVGNPRLDVLDLERIAAIAHAQGVPVIVDATTVTPYLWQPIQHGADIVIHSATKYIGGHGTAIGGIIVDSGKFDWAASGRFPEFTNPDPSYHGLIYTQAFGNLAYIIKARVQGLRDIGAALSPFNSFLFLQGLETLPLRMERHSKNALAVARYLSEHPKVAWVNYPGLPSHPSYALAQKYLPRGQSGIVGFGLKGGRAAGRTFIERLRLFSHLANIGDAKSLAIHPATTTHSQLTPEEQLLTGVTDDYVRLSIGLETIDDILADLDHALAGTPS

SEQ ID NO: 10243 - protein, 446 aa, Streptomyces avermitilis MA-4680
MAPAITLAAEAPKLSAANTGFMLICSALVLIMTPGLAFFYGGMVRVKSTLNMLMMSFISMGIVTILWVLYGFSLAFGTDKGSLIGWTSDFVGFTGIGKVELWPGYTIPVYVFATFQLMFAIITPALISGALADRVKFTAWSLFVALWATVVYFPVAHWVWGTGGWAFDLGVIDFAGGTAVHINAGAAALGVILVIGKRVGFKKDPMRPHSLPLVMLGCGLLWFGWFGFNAGSWLGNDDGVGALMFINTQIATAAAMLAWLAYEKIRHGAFTTLGAASGAVAGLVAITPSGGAVSPLGAIAVGAIAGVLCAMAVGLKYKFGYDDSLDVVGVHLVGGVAGSLLIGFFASGGGQSDATGVFYGDHSFDQLWKQCAGVFAVLAYSLVVSAILAFLIDKTIGMRVSEDEEIAGIDQAEHAETAYDFSGAGGGAARILPAPLADTATKKVDA

SEQ ID NO: 10244 - protein, 541 aa, Arabidopsis thaliana
RFVIGQAKNLIDQSRRRQLHHHKNLSFVSLIPPFSAPSDSSSRHLSSSSSSDMSASDSSSSLPVTLDTINPKVIKCEYAVRGEIVNIAQKLQEDLKTNKDAYPFDEIIYCNIGNPQSLGQQPITFFREVLALCSYTALLDESATHGLFSSDSIERAWKILDQIPGRATGAYSHSQGIKGLRDAIADGIEARDGFPADPNDIFMTDGASPGVHMMMQLLITSEKDGILCPIPQYPLYSASIALHGGTLVPYYLDEASGWGLEISELKKQLEDARSKGITVRALAVINPGNPTGQVLSEENQRDVVKFCKQEGLVLLADEVYQENVYVPDKKFHSFKKVARSMGYGEKDLALVSFQSVSKGYYGECGKRGGYMEVTGFTSDVREQIYKMASVNLCSNISGQILASLIMSPPKPGDDSYESYIAEKDGILSSLARRAKTLEEALNKLEGVTCNRAEGAMYLFPCLHLPQKAIAAAEAEKTAPDNFYCKRLLKATGIVVVPGSGFRQVPGTWHFRCTILPQEDKIPAIVDRLTAFHQSFMDEFRD

SEQ ID NO: 10245 - protein, 245 aa, Capsicum annuum
MGRGRVELKRIENKINRQVTFAKRRNGLLKKAYELSVLCDAEVALIIFSNRGKLYEFCSTSSMVKTIEKYQRCSYATLEANQSATDTQNNYHEYLRLKARVELLQRSQRNFLGEDLGTLSTKDLEQLENQLESSLKQIRSRKTQFMLDQLADLQQREQMLAESNRLLRRKLEESTAGFPVRLSWEDGADQAMHQHNRLPHTEGFLQPLGLHSSPPHFGYNPVNTDEVNAAATAHNMNGFIHGWML

SEQ ID NO: 10246 - protein, 503 aa, Schizosaccharomyces pombe
MSTKLVDHVEITVPTGKTYIQPVGLFINNQHVDSVHGGRVKVYSPSTEKLICEVADADEEDVDIAVKVARAAFQTDAPWRKFSSAQRGRCLSRLADCIEQNLEYLASIETLDNGKSITLARGDVQAAADCFRYYGGWADKDYGQTIETDIKRFAYTRHEPIGVCGQIIPWNFPFLMCAWKIAPAVACGNTIILKTAELTPLSALCLTKFVPECGFPPGVINVLSGDGRRCGNAISSHMDIDKVAFTGSTGVGRMVMRAAASSNLKKVTLELGGKSPNIVFNDADLDSAAVWTNYGIFYNSGQVCCAGSRVYVQEDVYDEFIKRMVAKAKTLKVGDPFAEDTFQGAQVSKQQYERIVSYIESGIAHGAKLEIGGKRHGNLGYFVEPTILSNVTEDMAVGKEEIFGPVLAVIKFKTIEEAIRRGNNSTYGLAAGVHTNNITNAIKVSNALEAGTVWVNCYNLLHHQIPFGGYKESGIGRELGSYGLTNYTQTKAVHINLGMDSPI

SEQ ID NO: 10247 - protein, 369 aa, Arabidopsis thaliana
IVVGEGETAPVGAAIGLLAETEAEIEEAKSKAASKSSSSVAEAVVPSPPPVTSSPAPAIAQPAPVTAVSDGPRKTVATPYAKKLAKQHKVDIESVAGTGPFGRITASDVETAAGIAPSKSSIAPPPPPPPPVTAKATTTNLPPLLPDSSIVPFTAMQSAVSKNMIESLSVPTFRVGYPVNTDALDALYEKVKPKGVTMTALLAKAAGMALAQHPVVNASCKDGKSFSYNSSINIAVAVAINGGLITPVLQDADKLDLYLLSQKWKELVGKARSKQLQPHEYNSGTFTLSNLGMFGVDRFDAILPPGQGAIMAVGASKPTVVADKDGFFSVKNTMLVNVTADHRIVYGADLAAFLQTFAKIIENPDSLTL

SEQ ID NO: 10248 - protein, 470 aa, Streptomyces avermitilis MA-4680
MTSTAQAPGAREAHPEHLGHVIFIAAAAAMGGFLFGYDSAVINGAVEAIRSKYDIGSATLAQVIAIALIGCAVGAATAGRIADRIGRIRCMQIAAVLFTASAIGSALPFALWDLAFWRVIGGFAIGMASVIGPAYIAEVAPAAYRGRLGSFQQAAIVIGIAISQLVNWAILNAAGGDQRGKLLGLEAWQVMLGVMVVPAVLYGLLSFAIPESPRYLIEAGKDARAREVLEEVEGKEIDLDARVEEIRLAMYREEKPSFKDLLGGTFFFKPIVWVGIGLSVFQQFVGINVAFYYSATLWQSVGVDPTDSFLYSFTTSIINIIGTVIAMIFVDRVGRKPLAIIGSVGMVIGLALEAWAFSYDLVDGKLPATQGWVALIAAHVFVLFFALSWGVVVWVFLGEMFPNRIRAAALGVAASAQWIANWAITASFPSLADWSLSGTYIIYTVFAALSIPFVLKFVKETKGKALEEMG

SEQ ID NO: 10249 - protein, 646 aa, Xanthomonas axonopodis pv. citri str. 306
MCGLAGMLLASPRLHGEQLDALVRPMGAALRHRGPDDAGTWCDAQAGVALAHQRLSILDLSPLGHQPMRSADGRYVLAYNGEVYNFAQLRAALSALGHRFRGHSDTEVLLAAVVEWGLDETLTRCNGMFAIALWDERDNCLFLARDRVGKKPLYYGWAGDTLVFGSELKALWQHPDFDNGVDRDALTLLLRLGYIPAPACIHEHTFKLMPGRVLRIDAQAVAAGAAAHRPDQAQQPFWNAREAMQRALATPFTGTDAQAEEQLDRVLRDAVALRMVADVPVGVFLSGGTDSSIVTAMMQAQSAQPVHTFSIGFEGSHHDEAPLAREVATHLCTDHTELYVSGADALAVVPNLPDMFDEPFADASQVPTALVARLARGGVTVALSGDGGDELFFGYGRYQRALRNWRMHGLVPGPLRRLMAVAARRNGESSRTGGLAALVAEAGARGIGDIYRNRISRWRDPAAVVLGATEPDSFYSLADPLHGSGTPADAMMLADFAAYLPDDLLCKVDRTTMAVGLEARAPLLDWRVAEFAWSLPLSLKYRDGVSKYLLKRVLCRYLPDAMVYRGKRGFGAPVSAWLRGDLHGWADDLLAHGALQREGVFAADSVARLWRDFNGGERKWHTHLWTVLMFQAWQAHWREQRAAVVR

SEQ ID NO: 10250 - protein, 385 aa, Erwinia carotovora subsp. atroseptica SCRI1043
MSAALIPDSKLPSLGTTIFTQMSALAQQHQAINLSQGFPDFDGPDYLQQRLAYHVSQGANQYAPMTGVSPLRQAIAEKTEALYGWRPDADSEVTVTAGATEALFAAIAALVRPGDEVICFDPSYDSYAPAVTLAGGVLKRIALQPPAFRVDWSSFTDLLSDRTRLVILNTPHNPSATVWQKTDFEQLWQAIAARNIFVLSDEVYEHICFDNEGHASVLAHPSLRQRAIAVSSFGKTFHMTGWKVGYCVAPAALSAEVRKVHQYLTFSVNTPAQFAIADMLREQPQHWRELPDFYRARRDRFINALAGSRFEILPCEGTYFLLADYRAISDLDDVSFCRWLTEHVGVAAIPLSVFCADPFPHTLIRLCFAKQEATLDAAAERLCQL

SEQ ID NO: 10251 - protein, 463 aa, Arabidopsis thaliana
MSKASDAVREPLVDKNMAGSKPDQPWMVYLSTFVAVCGSFAFGSCAGYSSPAQAAIRNDLSLTIAEFSLFGSLLTFGAMIGAITSGPIADLVGRKGAMRVSSAFCVVGWLAIIFAKGVVALDLGRLATGYGMGAFSYVVPIFIAEIAPKTFRGALTTLNQILICTGVSVSFIIGTLVTWRVLALIGIIPCAASFLGLFFIPESPRWLAKVGRDTEFEAALRKLRGKKADISEEAAEIQDYIETLERLPKAKMLDLFQRRYIRSVLIAFGLMVFQQFGGINGICFYTSSIFEQAGFPTRLGMIIYAVLQVVITALNAPIVDRAGRKPLLLVSATGLVIGCLIAAVSFYLKVHDMAHEAVPVLAVVGIMVYIGSFSAGMGAMPWVVMSEIFPINIKGVAGGMATLVNWFGAWAVSYTFNFLMSWSSYGTFLIYAAINALAIVFVIAIVPETKGKTLEQIQAIVNP

SEQ ID NO: 10252 - protein, 425 aa, Erwinia carotovora subsp. atroseptica SCRI1043
MVNNDKHDPLMLARQLPLKSVALILAGGRGTRLKGLTALRAKPAVHFGGKFRIIDFALSNCLNSGIRRIGVITQYQSHTLVQHIQRGWSFLNAEMNEFVDLLPAQQRYSTDHWYRGTADAVCQNLDIIRRYRAEYMVILAGDHIYKMDYSRMLIDHVEKGAECTVACLPVPLEEASAFGVMSVDKQHRILDFAEKPDNPTPMPDNPDMALASMGIYVFNADYLYQLLETDRNASDSAHDFGQDLIPKIVSQRLAWAHPFTLSCVTSGEDEHQYWRDVGTLEAYWRANLDLASVTPELDVYDRHWPIRSAIESLPPAKFVQDRSGSHGMTMNSLVSGGCIVSGSVVTHSVLFPRVRVNSFCSIDSTVILPDVNVGRSCRLRRCVIDRACHLPEGMVIGENAEEDSRRFYRSEEGIVLVTRSMLEKL

SEQ ID NO: 10253 - protein, 319 aa, Zea mays
  unsure (1)..(319): unsure at all Xaa locations
METVTVVVAPAPVAVNQQPPQHKLAELKPSSFAGVAKSSPATKAKPAKTKKLAGGCGGYVLEDVPHLTDYLPELKSYPNPLQDHPAYSVVKQYFVNPDDTVAKKIVVHKSGARGTHFRRAGPRQRVYFQPDEVTAAIVTCGGLCPGLNTVIRELVCGLHDMYGVATVYGIEGGYKGFYARNTVELTPRSVNDIHKRGGTVLGTSRGGQDTAKIVDSIQDRGVNQVYIIGGDGTQKGAASIHEEVQRRGLKCAVVGVPKTIDNXDIAVIDKSFGFTPPWXEXAQRAINAAHVEAESAENGXGFVKLMGRNSGFIXMYATL

SEQ ID NO: 10254 - protein, 322 aa, Chloroflexus aurantiacus
MLGVRNGFQGLIDGDIHEMDWMSVSGWATMGGAELGTNRKVPQGSELYQIARNIERFGIDGILMIGGWTGYQAIYKLYSERHIFPAFNIPMICLPATIDNNLPGSELSLGADTALNSIVSAIDRIKQSAVASRRCFIVEVMGRDCGYLALMSGLATGAERVYLPEEGISLRKLQADLDEMMRWFRAGKRLSLIIRNEKANPIYTTSFICSLFEEEGGKLFEVRQAILGHLQQGGDPSPFDRIQATRLAVRCIEFLVEHADRREPIGAFIGYRGGKVQIHQLDDMPRLMDPVHARPREQWWMSLRQMTDLLTTPPSPTVESGK

SEQ ID NO: 10255 - protein, 536 aa, Deinococcus radiodurans
MSDENNKGVGTAVQGVGGPRDGRTAPGEQGTTLTTRQGHPVHDNQNSRTVGSRGPMTLENYQFIEKLSHFDRERIPERVVHARGVGAHGVFRATGKVGDEPVSKYTRAKLFQEDGKETPVFVRFSTVGHGTHSPETLRDPRGFAVKFYTEDGNWDLVGNNLKIFFIRDALKFPDLIHSQKPSPTTNIQSQERIFDFFAGSPEATHMITLLYSPWGIPASYRFMQGSGVNTYKWVNDQGEGVLVKYHWEPVQGVRNLTQMQADEVQATNFNHATQDLHDAIERGDFPQWDLFVQIMEDGEHPELDFDPLDDTKIWPREQFPWRHVGQMTLNRNPENVFAETEQAAFGTGVLVDGLDFSDDKMLQGRTFSYSDTQRYRVGPNYLQLPINAPKKHVATNQRDGQMAYRVDTFEGQDQRVNYEPSLLSGPKEAPRRAPEHTPRVEGNLVRAAIERPNPFGQAGMQYRNFADWERDELVSNLSGALAGVDKRIQDKMLEYFTAADADYGQRVREGIQAKEAEMKGQKQEAPVYGTEASSLY

SEQ ID NO: 10256 - protein, 252 aa, Pseudomonas putida
MRLKDKVAIVTGAATGIGNAIVRSYLAEGAKVVIADVKGAEAAAAELGEDLALGVFADVSDPDSTKQMAKAALDRFGKIDVLVNNAGIFTGLNYVPMESISVADWDKLYSVNVKGPWLCASAVSAAMREGGGGKIINIASVIAHIGAPFMLHYVSSKGAVAAMTRAMAREFATTKAGISVNSISPGYTHSENALANAQQHEQFEGVSASMRAIDRPQVPADIAGVALWLASDEASYVNGQNIVVDGGIYMSL

SEQ ID NO: 10257 - protein, 431 aa, Yersinia pestis biovar Medievalis str. 91001
MSKIVKVIGREIIDSRGNPTVEAEVHLEGGFVGLAAAPSGASTGSREALELRDGDKSRFLGKGVLKAVAAVNGPIAQAVIGKDAKDQANIDKIMIDLDGTENKSQFGANAILAVSLAAAKAAAASKGMPLYEHIAELNGTPGKFSMPLPMMNIINGGEHADNNVDIQEFMIQPVGAKTLKEAVRIGSEVFHHLAKVLKAKGLNTAVGDEGGYAPNLGSNAEALAVIAEAVKAAGYELGKDITLAMDCAASEFYKDGKYVLAGEGNKAFTSEEFTHFLEDLTKQYPIVSIEDGLDESDWAGFKYQTEVLGDKIQLVGDDLFVTNTKILKEGIEKGVANSILIKFNQIGSLTETLAAIKMAKDAGYTAVISHRSGETEDATIADLAVGTAAGQIKTGSMSRSDRVAKYNQLIRIEEALGDRAPFNGLKEVKGQ

SEQ ID NO: 10258 - protein, 166 aa, Buchnera aphidicola str. APS (Acyrthosiphon pisum)
MKHTLQVIITEKELDIRVRELGQEITKKYRNSRNKMILIALLRGSFIFISDLCRRIHIEHEIDFMTTSSYGRGMLSSGDVKIIKDLDEDIYNKNVLIVEDIIDSGKTLSKVLDILKLRNPKSLSICTLLDKPECREVNINVDFIGFSILENFFIVGYGIDYAQSYR

SEQ ID NO: 10259 - protein, 386 aa, Escherichia coli O157:H7 EDL933
MTNNPLIPQSKLPQLGTTIFTQMSALAQQHQAINLSQGFPDFDGPRYLQERLAYHVAQGANQYAPMTGVQALREAIAQKTERLYGYQPDADSDITVTAGATEALYAAITALVRNGDEVICFDPSYDSYAPAIALSGGIVKRMALQPPHFRVDWQEFAALLSERTRLVILNTPHNPSATVWQQADFAALWQAIAGHEIFVISDEVYEHINFSQQGHASVLAHPQLRERAVAVSSFGKTYHMTGWKVGYCVAPAPISAEIRKVHQYLTFSVNTPAQLAIADMLRAEPEHYLALPDFYRQKRDILVNALNESRLEILPCEGTYFLLVDYSAVSTLDDVEFCQWLTREHGVAAIPLSVFCADPFPHKLIRLCFAKKESTLLAAAERLRQL

SEQ ID NO: 10260 - protein, 456 aa, Zea mays
MACPRAPAVEGSGVSGVLYAVEPKDACSPLRAKAIQGSVSPFALIIRGGCQFDDKIRNAQNAGFKAAVVYNNEDNDILVSMAGSSLGVQIYAVFISKASGEELKKYSGQTDAELWIIPTYENSAWPIMAISFVSLLAMSAILVACFFARRHQIRRDRARLPRAQESHGMSSQLVKAIPSLIFTKVQEDNCTSATCAICLEDYSVGEKIRVLPCRHKFHAACVDLWLTSWRTFCPVCKRDASAGTSDPPVSESTPLLSSSATRLPESTVLASLRSTAAASPPRTISRHPLLRSISRNYSVSGSSILRTPDSRFDANSSICTSGSNLDLANVPSPWSGTWHRASAHSLCRGYLSPPIGIRNTSAHVSRSANGSPSRYVGSSRMSHGSSGQQHPHLRHCTLSGPSLFTMVPQSPQQNQLQHGGYSETNLSAAASAQSFRQLYLQHCPDSDTSSQSLPGC

SEQ ID NO: 10261 - protein, 204 aa, Oryza sativa (japonica cultivar-group)
MGRPPCCEKEGVKKGPWTPEEDMVLASYVQEHGPGNWRAVPPRTGLLRCSKSCRLRWTNYLRPGIRRGGFSHHEERLILHLQALLGNRWAAIASYLPHRTDNDVKNFWNTHLKKKLALTSSSSSPPTPTTPLVARGQWERKLQTDIDLARRALRDALSVDDAASPAMISSGPPAPAAAAAYALSERNISVMLSGWAAPPPARKG

SEQ ID NO: 10262 - protein, 204 aa, Oryza sativa (japonica cultivar-group)
MGRPPCCDKVGVKKGPWTPEEDLMLVSYIQEHGAGNWRAVPTNTGLMRCSKSCRLRWTNYLRPGIKRGNFTEQEEKLIVHLQALLGNRWAAIASYLPERTDNDIKNYWNTHLKKKLKKMQAAEGGEDSGAASEGGGGRGDGDGGGKSVKAAAPKGQWERRLQTDIHTARQALRDALSLDHPDPSPATAAAAATPAGSSAAYASS

SEQ ID NO: 10263 - protein, 136 aa, Triticum aestivum
AKIKPAVNQIGTHPYFQRDPLVKFCQKHGICVTAHTPLGGSTANTELFGSVSCLDDPVIKSLAEKYGKSPAQLVLRWGLQRNTVVIPKTSKEERLEENFAVFDFDISVEDMEKIKALDRNYRTNQPAKFWGSNLYA

SEQ ID NO: 10264 - protein, 419 aa, Methylobacillus flagellatus KT
MSDKFQSIKGFYDILPADTALWQRIEDSARQVLSQYGYRNIRLPIVEPTELFIRGVGEHTDIVEKEMYSWEDKLNGDRLTLRPEGTAGCVRAVVEHSLTYNGPQRLWYMGPMFRHENVQKGRQRQFHQIGAEAFGYTGPDVDAEQISMLARLWRELGVANEVELQLNTIGDASERAQYRQVLIRYFEQHESLLDDDAKRRLYANPLRILDSKNPAMQTMIEAAPKLLDSLGEESRAHFDGVTRQLDQLGIKWTLNTRLVRGLDYYNRTVFEWVTNKLGSQGTIAGGGRYDSLVQSLGGKETPACGFGIGLERVFLLMRECGIEAFHSPDVYLVNVGDAANKAALPIAEALRDSGLSVSLHAGGGSFKSQMKKADQSGAQYALILGDDEIAANEVCLKPLRENGEQRRMSLSQAIEALHT

SEQ ID NO: 10265 - protein, 441 aa, Escherichia coli
MNKYQAVIIGFGKAGKTLAVTLAKAGWRVALIEQSNAMYGGTCINIGCIPTKTLVHDAQQHTDFVRAIQRKNEVVNFLRNKNFHNLADMPNIDVIDGQAEFINNHSLRVHRPEGNLEIHGEKIFINTGAQTVVPPIPGITTTPGVYDSTGLLNLKELPGHLGILGGGYIGVEFASMFANFGSKVTILEAASLFLPREDRDIADNIATILRDQGVDIILNAHVERISHHENQVQVHSEHAQLAVDALLIASGRQPATASLHPENAGIAVNERGAIVVDKRLHTTADNIWAMGDVTGGLQFTYISLDDYRIVRDELLGEGKRSTDDRKNVPYSVFMTPPLSRVGMTEEQARESGADIQVVTLPVAAIPRARVMNDTRGVLKAIVDNKTQRMLGASLLCVDSHEMINIVKMVMDAGLPYSILRDQIFTHPSMSESLNDLFSLVK

SEQ ID NO: 10266 - protein, 502 aa, Agrobacterium tumefaciens
MKENQLVLVRRHILEIEMQNKVQFITYVDRLTRGGFRQLKELVDGKFAGLFGGVHVLPFFNPIDGADAGFDPTDHTIVDPRLGDWEDVRALSGSVEIMADLIVNHVSSQSGAFTDFIAKGSASEFADMFMTFEKVFPDGATEEDLLRIYRPRPGLPFSKVTLADGTQRMLWTTFTPEQIDIDVHSAKGTTYLETILDRFSEANVTAIRLDAAGYAIKKAGSSCFMIDDTYAFLEEVAGKARNRGMEVLVEIHSYHRDQIEIAKKVDRVYDFALPPLILHALFTGDATPLAKWLAISPRNAITVLDTHDGIGVIDVGARSDGRAGLLEPQAIDNLVEEIHRRSDGQSRQATGAAASNLDLYQVNCTYYDALGRNDNDYLIARAIQFFAPGIPQVYYVGLLGGVNDMDLLAKTGVGRDINRHYYGNDEIGTALETPLFHRLSNLIRFRNTHPAFGGALKATIADAGALVLSWQHGDAFAELKISFADRKASIAASGQSEMQIVE

SEQ ID NO: 10267 - protein, 389 aa, Sinorhizobium meliloti 1021
MFDALARQADDPLLALIGLFRKDERPGKVDLGVGVYRDETGRTPIFRAVKAAEKRLLETQDSKAYIGPEGDLVFLDRLWELVGGDTIERSHVAGVQTPGGSGALRLAADLIARMGGRGIWLGLPSWPNHAPIFKAAGLDIATYDFFDIPSQSVIFDNLVSALEGAASGDAVLLHASCHNPTGGVLSEAQWMEIAALVAERGLLPLVDLAYQGFGRGLDQDVAGLRHLLGVVPEALVAVSCSKSFGLYRERAGAIFARTSSTASADRVRSNLAGLARTSYSMPPDHGAAVVRTILDDPELRRDWTEELETMRLRMTGLRRSLAEGLRTRWQSLGAVADQEGMFSMLPLSEAEVMRLRTEHGIYMPASGRINIAGLKTAEAAEIAGKFTSL

SEQ ID NO: 10268 - protein, 1102 aa, Nostoc punctiforme
MTSNPEQNFLYSQEESLLRRITNRIRRSLELEEIITVTTAEVRSLLKTDRVMIYKFHADGNGQVIAESIYNNRLPSLLGLNFPADDIPLSARELFLKLRVRSVVNVDTQEIGQIHLRDLDNGETISEEIRYRSVDSCHIEYLTAMGVKSSVVAPILYQDQLWGLLVSHNSEARLISEYELEAVQMVVEQLSVAIAQSSLLTQVRKTAERETIINRIATLLHSLPTIVLQPALEAAIAAFNGVGGRLCIRNEAFDYYNGNLTSLTECLIPGNTCIKLFICGQQPVMPEQTIYPLIEQYSIWQEHYKSGKYDVWAISDLYNSPDLRSLQVAFQPTKIRGILTIPLQYRQQLLGYLSIFRNEVDTETLWAGQYDSDQRQLYPRRSFEVWRESKKAQAQKWTVEEIELARDIGKHFASAIQQYELQQQVQVFNENLEKQVKRRTVELQRTAEQEQAVFKVIAEIRESLDTDTIFQTTTKEVCQLIKADRVSVYRFDSNWGGEFVGDFEAASPYWSNESEIGINTVWNDTYLQDTEGGRYRNNETFAVDDIYKMGFAKCHIDNLEQFQIHAFVLAPIFVGQKLWGLLATYQHTGPRQWKASEVNFLSQIAAQMGVALQQAELLTQTRQQTLNLQQAAEQQRVLFEVVAKVRKSLDLDAIFQTTTQEICKSLQADRVAVFQFQADWSGEYIAEFVGDGWVKLVGSNTKTVWQDSYLQETQGGRYRHNETFAVDDIYQVGHSQCHVAVLEQIQARAYAIAPIFIGQQLWGLLAAYQNSAPRHWEASEIKFITQIANQLGVALQQAQLHNQTKEQTEKLTQALHDLKQTQTQLIQTEKMSSLGQLVAGVAHEINNPVNFIYGNINHVNNYAQDLLGILDLYLQNTPNPSPEIRDRTFEIDLEFLIEDLPKTLSSMKIGVDRIRQIVLGLRNFSRLDEAEMKPVDIHEGIDSTLLILQHRLKAKPESPAIKLVKEYSELPLVECYAGPLNQVFMNVLSNAIDALEDYRESPSKPHSSQITICTAIGELEGNIKSVVIRIADNGSGIPEALKARICDPFFTTKPVGKGTGLGLSISYQIVVDKHGGVFKCDSQPGLGTEFWIEIPVSQITKF

SEQ ID NO: 10269 - protein, 402 aa, Streptomyces avermitilis MA-4680
MEFRQSSKLSEVCYEIRGPVIEHANALEEAGHSVLRLNTGNPALFGFEAPEEILQDMIRMLPRAHGYTDSRGVLSARRAVAQRYQDRGLEVDVDDVFLGNGVSELVSMAVQALIEDGDEVLIPAPDFPLWTAVTTLAGGKAVHYLCDEQADWYPDLADMAAKITDRTRAVVIINPNNPTGAVYPKEIVEGILDLARRHGLMVFADEIYDQILYDDAVHHSAAALAPDLVVLTFCGLSKTYRVAGFRSGWLVVTGPKQHARSYLEGLTMLASMRLCANAPAQYAIQAALGGRQSIQELTAPGGRLYEQRDRAWQKLNEIPGVSCVKPKGALYAFPRIDPTVHKIHDDEKFVLDLLLREKIQVVQGTGFNWPRPDHFRILTLPHADDLDAAISRIGRFLSGYRQ

SEQ ID NO: 10270 - protein, 350 aa, ASPERGILLUS NIDULANS FGSC A4
MSIPTMQWAQVAEKVGGPLVYKQIPVPKPGPDQILVKIRYSGVCHTDLHAMMGHWPIPVKMPLVGGHEGAGIVVAKGELVHEFEIGDQAGIKWLNGSCGECEFCRQSDDPLCARAQLSGYTVDGTFQQYALGKASHASKIPAGVPLDAAAPVLCAGITVYKGLKEAGVRPGQTVAIVGAGGGLGSLAQQYAKAMGIRVVAVDGGDEKRAMCESLGTETYVDFTKSKDLVADVKAATPDGLGAHAVILLAVSEKPFQQATEYVRSRGTIVAIGLPPDAYLKAPVINTVVRMITIKGSYVGNRQDGVEALDFFARGLIKAPFKTAPLKDLPKIYELMEQGRIAGRYVLEMPE

SEQ ID NO: 10271 - protein, 576 aa, Yersinia pestis biovar Medievalis str. 91001
MNEKHPGPLVVSGKLSDGERMKSESNFLRGTIAEDLNNGLTGGFSGDNFLLIRFHGMYQQDDRDIRAERAEQKLEPRHAMMLRCRLPGGIITPQQWLGIDKFAADNTLYGSIRITNRQTFQFHGILKGNVKPAHQLLNELGLDALATANDVNRNVLCTSNPVESALHQEAYEWAKKISEHLLPRTRAYAEIWLDAEKVATTDEEPILGATYLPRKFKTTVVIPPQNDVDLHANDLNFVAVADKGKLIGFNVLVGGGLSIAHGDKNTYPRKASEFGYIPLKHTLAIAEAVVTTQRDWGNRTDRKNAKTKYTLERVGVETFKAEVEKRAGVSFSAIKPYQFIGRGDRIGWVKGVDKKWHLTLFVENGRLLDYPGRSLKTGVAEIAKIHQGDFRLTANQNLIVAGVPEKDKARIEALAREHGLMDDNVTSQRENSMACVSFPTCPLAMAEAERFLPEFVTRVEGILQQHGLADEHIVLRVTGCPNGCGRALLAEVGLVGKAVGRYNLHLGGNREGTRIPRMYRENITADEILLITDQLVGRWAKERHVDEGFGDFVIRAGVIAPVIDSARDFYDVQEAM

SEQ ID NO: 10272 - protein, 321 aa, Haemophilus influenzae Rd KW20
MIKKIAVLTSGGDAPGMNAAIRGVVRSALAEGLEVFGIYDGYQGLYNNKIKQLNRYSVSDVINRGGTFLGSARFPEFKDPNIRAKCAEILRSHGIDALVVIGGDGSYMGAKLLTEEHSFPCVGLPGTIDNDVAGTDYTIGYQTALQTAVDAIDRLRDTSSSHQRISIVEIMGRHCSDLTISAGIAGGCEYIVASEIEFNREELIQQIERSIIRGKRHAIIAITELLTDVHSLAKEIEARVGHETRATVLGHIQRGGSPCAFDRILASRMGAYAVDLLLQGKGGYCVGIQNEQLVHHDIIDAINNMQRVFKADWLKVAKRLE

SEQ ID NO: 10273 - protein, 341 aa, Chloroflexus aurantiacus
MRGTALYGPYDVRSEYVPDPTIIEPTDAIIRLSATCICGSDLWPYRGVDPITRPVPMGHEYVGIVEEVGSAVKIIKPGQFVVGSFFASDNTCPICQAGYQTSCVNRQPGAPTGAQAEYARIPLADGTLVPTPDLPPADLIPDLLAASDVLGTGWFAAVAAEVGPGKTVAVVGDGAVGLLAVLSARQMGAERIILIGSRHPQRQALAQEFGATDVIEARGDEAIEMLKELTDGLGVHSTIEAVGTQESMMQAIRATRPGGHVGVVGVLHDVAIPGREFFFSHVHLHGGPAPVRRFLPELINLIWQRVIKPGKVFDLTLPLEQVAEGYRAMDERRAIKVLLKP

SEQ ID NO: 10274 - protein, 136 aa, Triticum aestivum
MCGILAVLGVGDVSLAKRSRIIELSRRLRHRGPDWSGIHSFEDCYLAHQRLAIVDPTSGDQPLYNEDKTVVVTVNGEIYNHEELKAKLKPHKFQTGSDCEVIAHLYEEYGEEFVDMLDGMFSFVLLDTRDKSFIAA

SEQ ID NO: 10275 - protein, 477 aa, Pseudomonas syringae pv. syringae B728a
MPEWRLGLFKGVRMAVYNYDVVVLGSGPAGEGAAMNAAKAGRKVAMVDSRRQVGGNCTHLGTIPSKALRHSVKQIIQFNTNPMFRAIGEPRWFSFPDVLKNAEMVISKQVASRTSYYARNRVDVFFGTGSFADETSINVVCTNGVVEKLVANQIIIATGSRPYRPADIDFSHKRIYDSDTILSLGHTPRKLIIYGAGVIGCEYASIFSGLGVLVELVDNRDQLLSFLDSEISQALSYHFSNNNVMVRHNEEYEKVEGLDNGVILHLKSGKKIKADALLWCNGRTGNTDKLGLENIGLKANGRGQIEVDETYRTSVSNVYGAGDVIGWPSLASAAYDQGRSAAGSMVDNGSWRYVNDVPTGIYTIPEISSIGKNEHELTQAKVPYEVGKAFFKGMARAQISGERVGMLKILFHRETLEVLGVHCFGDQASEIVHIGQAIMSQPGEANTMKYFVNTTFNYPTMAEAYRVAAYDGLNRLF

SEQ ID NO: 10276 - protein, 412 aa, Escherichia coli O157:H7 EDL933
MKALTYHGPHHVQVENVPDPGIEQADDIILRITATAICGSDLHLYRGKIPQVKHGDIFGHEFMGEVVETGKDVKNLQKGDRVVIPFVIACGDCFFCRLQQYAACENTNAGKGAALNKKQIPAPAALFGYSHLYGGVPGGQAEYVRVPKGNVGPFKVPPLLSDDKALFLSDILPTAWQAAKNAQIQQGSSVAVYGAGPVGLLTIACARLLGAEQIFVVDHHPYRLRFAADRYGAIPINFDEDSDPAQSIIEQTAGHRGVDAVIDAVGFEAKGSTTETVLTNLKLEGSSGKALRQCIAAVRRGGIVSVPGVYAGFIHGFLFGDAFDKGLTFKMGQTHVHAWLGELLPLIEKGLLKPEEIVTHYMPFEEAARGYEIFEKREEECRKVILVPGAQSAEAAQKAVSGLVNAMPGGTI

SEQ ID NO: 10277 - protein, 358 aa, Haemophilus influenzae Rd
MQSYNIAVLAGDGIGPEVMAEAIKVLNRVQEKFGFKLNFNEFFVGGAAIEHCGYPLPAETLKGCDQADAILFGSVGGPKWTNLPPDQQPERGALLPLRKHFKLFCNLRPATLYKGLEKFCPLRADIAAKGFDMVVVRELTGGIYFGQPKGREGDGVQTKAFDTEVYYKYEIERIARAAFEAAMKRNKKVTSVDKANVLQSSILWRETVTEMAKDYPEVTLEHIYIDNATMQLIKSPESFDVLLCSNIFGDIISDEAAMITGSMGMLPSASLNEEGFGLYEPAGGSAPDIAGKGIANPIAQILSAAMMLRYSFNLNEAADAIESAVQKVLASGHRTADLADDSTPVSTAEMGTLITQAI

SEQ ID NO: 10278 - protein, 506 aa, Pseudomonas putida KT2440
MRYAHPGTEGAKVSFKSRYGNYIGGEFVTPVKGQYFENTSPVNGKLIAEFPRSTAEDIDKALDAAHAAADAWGRTSVQDRSNVLLKIADRIEQNLELLAITETWDNGKPIRETLNADIPLAVDHFRYFAGCIRAQEGGAAEINEGTVAYHIHEPLGVVGQIIPWNFPILMAAWKLAPALAAGNCVVLKPAEQTPLGITVLLEVIGDLLPPGVLNVVQGYGREAGEALATSKRIAKIAFTGSTPVGSHIMKCAAENIIPSTVELGGKSPNVYFEDIMQAEPSFIEKAAEGMVLAFFNQGEVCTCPSRALVQESIYPQFMEVVMKKVLQIKRGDPLDTDTMVGAQASQQQFEKILSYLQIAQEEGAELLTGGKVEKLEGSLATGYYIQPTLLKGNNKMRVFQEEIFGPVVSVTTFKDEAEALAIANDTEFGLGAGVWTRDINRAYRMGRGIKAGRVWTNCYHLYPAHAAFGGYKKSGVGRETHKMMLDHYQQTKNLLVSYDINPLGFF

SEQ ID NO: 10279 - protein, 469 aa, Pseudomonas aeruginosa PAO1
MHVATSVIEDQPLRATPAEGETLYEFSQSPLLERQSRQESNARSYPRRIPLALKKARGLLVEDVEGRTFIDCLAGAGTLALGHNHPVVIEAIRQVLADELPLHTLDLTTPVKDQFVQDLFGLLPPALAAEAKIQFCGPTGTDAVEAALKLVRTATGRSTILSFQGGYHGMSQGALGLMGNLGPKKPLGAVLSTGVQFLPYPYDYRCPFGLGGEAGVKANLHYLENLLNDPEGGVQLPAAVIVEVVQGEGGVVPADLDWLRGLRRITEQAGVALIVDEIQSGFARTGRMFAFEHAGIVPDVVVLSKAIGGSLPLAVVVYREWLDKWQPGAHAGTFRGNQMAMAAGSAVMRYLKEHDLAAHAAAMGERLAEHLRILQRDYPQLGDIRGRGLMLGVEIVDPQGEADALGHPPTDGALASRVQRECLRRGLILELGGRHGSVVRFLPPLIIGAEQIDEVARRFARALGAALAG

SEQ ID NO: 10280 - protein, 473 aa, Buchnera aphidicola str. APS (Acyrthosiphon pisum)
MNKKIYTQVVVIGSGPAGYSAAFRCADLGLDTVLIERYDKLGGVCLNVGCIPSKTLLHIAKVIKEAKELHKTGVSFNKPDIDIKKIKNWKQHIVNKLTDGLSSMRKKRKIRIFQGHAIFETDKSLCVTNTEDKFTIFFDNAIIATGSKPIKIPSIPHDDIRIWDSTDALSLKKIPNNFLIIGSGIIGLEMATIYSALGSKVDIIDRFNHFLPVIDEDISSIYKKSINQQFNLMLNTHIDKVEVKKDALIVDMIHENIPKKNILYDAVLVAIGRTPNIDSLGLDRIGLKINNFGFIQVNNQLKTNIPHIYAIGDVAGTPMLAHKGVHEGHIAAEVISGKNHYFEPKVIPSIAYTDPEIAWVGLSEKEAKQENINYEVAIFPWNASGRAIASNCSIGKTKLIFNKQNNKIIGGSIVGSNAGELIGEVGLAIEMGCDAEDIALTIHAHPTLSESIGLSAEVFQGTVTDVLNFKLNK

SEQ ID NO: 10281 - protein, 342 aa, Coxiella burnetii RSA 493
MKVLSKLKPAPGLWLHKAPTPKPGRDEVLIKIKKTAICGTDLHIYKWDEWAQKTIPVPMHVGHEFVGEIVEVGEAASALAVGDRVSGEGHITCGDCRNCRAGKRHLCRYTVGVGVNRPGAFAEYLVIPAKNAYKIPAKISDDIAAILDPFGNAAHSALEFDLVGEDVLITGAGPVGLMSAAIARHVGARHVVITDVNDYRLALAEKVGVTAAVNSTKTPLTETMKNLGMTEGFDVGLEMSGNAEAFRSMLTVMNNGGKIAFLGIPPEPFAIDWNQVVFKSLLIKGIYGRRMFETWYKMTNLLLSGLDISPIITHEFPMKDFQQAFDVMLSGKTGKVILNWEQ

SEQ ID NO: 10282 - protein, 687 aa, Oceanobacillus iheyensis HTE831
MSDQDNQQEKRKQDDNKKIDQLKKFYRDNTDKIMTTDEGVKISNDENTLSAGDRGPQLLEDFMYREKLAHFDRERIPERNVHARGYGAHGVFECYESQSDLTKAHFLQKAGQQTPVFVRFSQVAGSKGANETLRDVRGFATKFYTNEGNFDLVGNNIPIFFIQDGIKFPDLIHALKPEPNNEIPQGQTAHDTFWDFIGSNEESAAMMMWIMSDRTIPRSFRTIQGFGVHTFRLVNAEGKSVFCKFHWRPVLGIHSLIWNEAQKIGGADPDFHRRDLWENIEQGFYPEYELGVQVIEEGQEFDFDFDILDATKLWPEEEVPLQMIGKMTLNKNVENVFAETEQVALHPGNIVPGIDFTNDPLLQGRLFSYTDTQIYRVGTNFKQLPINRPVCPFHNNHRDGSQRYIIDKGQVAYHQNYLAGNTPYTVPGSQGGFVTYPSLVEGLKVRKTAPSFLDHFSQARLFWNSMTDVEQSHILQAFSFELGKVNVPEVRQRVVNLIGHISRPLATAVAEQVGVEPPDKSIKQSDVTKSSPTLSLMNTKFLPNTLKVAIIVGNGYGGNALESLLESLKEVELKPYIISERLGEITADNGDTLNVDATFLTTSPVLYDGLLVVGGDHINDQFAYEAGNFITEQFNHYKPIGGMEEGATLIQQLGIANRPGVFISQSGSRQFTRQFIDGMAKQRFWDR

SEQ ID NO: 10283 - protein, 523 aa, Rhodopseudomonas palustris CGA009
MAEKPKKPQKLRARLPRGLADRGPAEIAATRAMVEKIREVYERYGFEPVETPAFEYTDALGKFLPDQDRPNEGVFSLQDDDEQWISLRYDLTAPLARYVAENFDQLPKPHRSYRFGWVFRNEKPGPGRFRQFMQFDADTVGAPTAAADAEMCMMAADTMEALGIPRGSYVVKVNNRKVLDGVLESIGLGGDENAGRRLTVLRAIDKSDKFAPEEIKKLLGPGRWDGGEEGKGDFTKGAMLSDDQSELILRATSPSFIAGRFNADGSGGISNIDTVELLRSTADNETLKQGCDELAVIADLLDACGYGATSANPDVRVVIDPSVVRGLEYYTGPVYEVELLLDTKDEKGRPVRFGSVGGGGRYDGLVSRFRGEPVPATGFSIGVSRLQAALTLIGQLGNKPQAGPVVVTVFGGEIAGYQKMVATLRKAGIRAELYLGNPKHSLGQQMKYADKRNSPCAIIQGSDEKQQGIVQIKDLILGAELASLEKDRDEYLKKQAEAQFSCNEDEMVAKVQELLQRRGVAWG

SEQ ID NO: 10284 - protein, 355 aa, Arabidopsis halleri subsp. halleri
ISYLTYDRADMAFAHYGPFWRQMRKVCVMKVFSRKRAESWASVRDEVDKMVRSVSCNVGKPINVGEQIFALTRNITYRAAFGSACEKGQDEFIRILQEFSKLFGAFNVADFIPYFGWIDPQGINKRLVKARNDLDGFIDDIIDEHMKKKENQNAVDDGDVVDTDMVDDLLGFYSEEAKLVSEAADLQNSIKLTRDNIKAIIMDVMFGGTETVASAIEWALTELLRSPEDLKRVQQELAEVVGLDRRVEESDIEKLTYLKCTLKETLRMHPPIPLLLHETAEDTSIDGFFIPKKSRVMINAFAIGRDPTSWADPDTFRPSRFLEPGVPDFKGSNFEFIPFGSGRRSCPGMQLGLYA

SEQ ID NO: 10285 - protein, 521 aa, Pueraria montana var. lobata
MLLELALGLLVLALFLHLRPTPTAKSKALRHLPNPPSPKPRLPFIGHLHLLKDQLLHHALIDLSKKYGPLYSLYFGSMPTVVASTPELFKLFLQTHEATSFNTRFQTSAIRRLTYDNSVAMVPFGPYWKFIRKLIMNDLLNATTVNKLRPLRTEQIRKFLRVMAQSAEAQQPLNVTEELLKWTNSTISMMMLGEAEEIRDIAREVLKIFGEYSVTNFIWPLMYLKVGKYEKRIDDIFNKFDPVIERVIKKRREIVRRRKNGEVVEGEASGVFLDTLLEFAEDETMEIKITKEQIKGLVVDFFSAGTDSTAVATEWALAELINNPRVLQKARDEVYSVVGKDRLVDEVDTQNLPYIRAIVKETFRMHPPLPVVKRKCVEECEVNGFVIPEGALILFNVWAVGRDPKYWDRPLEFRPERFLESGAEGEVGPIDLRGQHFQLLPFGSGRRMCPGVNLATSGMATLLASLIQCFDLQVVGPKGEILKGNDAKVSMEESAGLTVPRAHNLRCVPLARTSVAAKLLS

SEQ ID NO: 10286 - protein, 437 aa, Streptococcus mutans UA159
MELINNKRRASMTREFSFETLQLHAGQSVDPTTKSRAVPIYQTTSYVFNDAQDAEDSFALRTPGNIYTRITNPTTAVFEERMAALEGGVGALATASGMAAVTYIALALAHAGDHIVSAATVYGGTFNLLKETLPRYGITTSFVDVANFAEIEAAITDKTKFIIAETLGNPLGNIADLEKLAEIAHRHAIPLVIDNTFGTPYLLNVFSYGVDIAVHSATKFIGGHGTSIGGVIVDSGNFDWEKSGKFPQFVEPDPSYHDISYTRDIGKAAFVTAVRTQLLRDTGACLSPFNAFLLLQGLETLSLRVERHVENAKKIAYYLENHPKVTKVNYASLPSSPYYDLAQKYLPKGASSIFTFNVAGSAKAAREVIDSLEIFSDLANVADAKSLVVHPATTTHGQMTEEDLRACGIEPEQIRVSIGLENADDLIEDLRLALEKI

SEQ ID NO: 10287 - protein, 580 aa, Zea mays
MRRGTFCVKCGGKVRCTCKQRCALLTEFELSRGGEAEPQSRPRPAGDIHTVRAPEAGSTGDEAFRVITHQDLRVLFRFAGVGNPSMARKMLIDGEVAAVADGGHYDYDLFVIGAGSGGVRGSRTAASFGAKVAICELPFHPISSEWLGGHGGTCVIRGCVPKKILVYGASFRGEFEDSKNFGWEINGDINFNWKTLLENKTKEIVRLNGVYQRILTSAGVTMIEGAGSLVDAHTVEVSQPDGSKQRYTAKHILIATGSRAQRVNIPGKDLAITSDEALSLEELPKRAVILGGGYIAVEFASIWRGMGAEVDLFYRRDLPLRGFDDEMRAIVASNLEGRGIKLHPGTNLSELSKTADGIKVVTDKGEELIADVVLFATGRTPNSQRLNLQAAGVEIDRVGAIKVDEYSRTSAPSVWAVGDVTNRINLTPVALMEATCFAKTVFGGQQVKPDHRDVPCAVFSIPPLSVVGLSEEQALEEANGDILVFISSFNPMKNSISKRQEKTIMKLVVDAETDKVLGASMCGPDAPEIIQGIAIAVKCGATKADFDSTVGIHPSAAEEFVTMRTVTRRLSPTSKPKTNL

SEQ ID NO: 10288 - protein, 340 aa, Treponema pallidum subsp. pallidum str. Nichols
MEWCCALSGLLPEEIQKVCAFAERFRGVQVFRWIAAGCTDFHAMSDLSSETRARLARACVISDTRVYTTLRDVDGTLKLGIELKDKRRVEAVLLVDQVSRKTACLSCQVGCPMACAFCQTGQLGFARNLSASEIVEQFLHLERCVGTLDNVVFMGMGEPMLNLDAVCRAIEILSHPQGRDLSEKRITISTSGHCRGIYSLADRALQVRLAVSLTTANAPLRARLMPRAAHDSLAKLKSAIRYFNEKSGKRVTLELALMRGVNTSERHAQEVIDFAHGLNVHVNLIPWNPVASIHFETPREVEVAHFEALLMRARIPVTRRYQRGNGIGGACGQLGKTAGV

SEQ ID NO: 10289 - protein, 343 aa, Streptomyces kanamyceticus
MKALVFHSPEKATFEQRDVPTPRPGEALVHIAYNSICGSDLSLYRGVWHGFGYPVVPGHEWSGTVVEINGANGHDQSLVGKNVVGDLTCACGNCAACGRGTPVLCENLQELGFTKDGACAEYMTIPVDNLRPLPDALSLRSACQVEPLAVALNAVSIAGVAPGDRVAVMGAGGIGLMLMQVARHLGGEVTVVSEPVAERRAVAGQLGATELCSAEPGQLAELVARRPELTPDVVLEASGYPAALQEAIEVVRPGGRIGLIGYRVEETGPMSPQHIAVKALTLRGSLGPGGRFDDAVELLAKGDDIAVEPLLSHEFGLADYATALDLALSRTNGNVRSFFNLRD

SEQ ID NO: 10290 - protein, 668 aa, Ustilago maydis 521
MHASQFMIHDYASEARLDGEIGSKEQQPTSMHGEVVLCLTHDSRLYLCTIHDSRFTIRLTHASTLSKVNAVSKPSLTQNHVAYGLRRTAEITKYESQSRIVNSRLVGEQTNVDDCGKREEVKTRRPNHRRENHEITNHESRITNHESRIVKSWMTRGPGSSARTDALKSRTRTHVEHLHEASSARMTRVLSATWFHLPKRLLPTIGRSIMTSCSAADRTRWATHRAQRIHQELDSGVDVWSLFNPVVFPTAINLGQGFMNWQPPSYILDTLTHEFANRVDLHHYSHPKGRARLRQAISDFYSSQFHLPRGAAEEVPIEVGKQRAAGHRKLDVETEIQITSGANGGIYSVMGAFINDGDGVVCIEPFFDQYNAEILFHGGKPLYVPLLPPAASGTSHIDANDWTLDMAHLERVLSQASTKALILNTPHNPVGKVFSHAELASIAELCVKYDILVVADEVYDCLTFDGQPHTRIASFSGMWDRSVTVGSAGKSFACTGWRVGWLIGPDHLIAPSRAVHTRITFAVNSSAQEGAAIGLESADSHHFFQSQINQYAHRRQLLSNALDQIGLSYTIPHGGYFIMADATKIQIPDTWIESNNVPDAILNKPQDYLKAWFIAKVCDVVVIPATAFYAEKGAEQVGKNYVRFSFCKDDQIEQAAPRLKKLIPYLTK

SEQ ID NO: 10291 - protein, 480 aa, Desulfovibrio vulgaris subsp. vulgaris (strain Hildenborough)
MDYDADLLVIGGGAAGLTVAAGAARLGARVVLADRGPTLGGDCLHHGCVPSKTLIASARARRTMRDAPRFGLPEVALPPVDFKAVAAHIAGVQSVIQKHDSVERFSGLGVEVRFGDAVFVDEHTVAVEGRRISARRIVVATGSSPQIPAFPGLADTPYLTNRDIFTLETLPASLIVLGGGPIAVEMAQAFARLGSRVVLVQRGGHILSREDADMAAVVHEALEQDGVRIMTGATVEVARRQDAGVVVTVRVGDEHVDVHGERLLVALGRTPNVEGLHLGNAGVVFSERGVPVDARMRTSQSHILAAGDVTGAWQFTHAAGYEGSVVVANAVLRLPRKAKYDRMPWCTFTDPELASVGLNEREAHRQGIGVDVHTESFSSNDRALAEGTACGLLKLVLARGTQRVLGVQIAGPHAGELINGWCMALGGGVRLTTLAGGVMPYPTLGEISRRVAGNIVSEALFSDKVRNVLCTLFRYRGKGC

SEQ ID NO: 10292 - protein, 295 aa, Actinobacillus pleuropneumoniae serovar 1 str. 4074
MKVIIPVAGLGTRMLPATKAIPKEMLTIADKPLIQYIVNECVAAGIKEIVLVTHSSKNAIENHFDTSFELETMLEKRVKRQLLEEVHSIVPKDVTLMHVRQGQAKGLGHAVLCGRAVVGNEPFAVVLPDVILADFTANQKTENLAAMIKRFNETQHSQIMVAPVPREDVSSYGVADCAGVEIPAGETAKIVKMVEKPSVEEAPSNLAVVGRYVFSAGIWDLLEKTPVGVGDEIQLTDAIDMLIEQETVEAFHMTGRTFDCGDKLGYMQAFTEYSLRHDKFGNDFKEFIKKLAKTL

SEQ ID NO: 10293 - protein, 485 aa, Streptomyces avermitilis MA-4680
MSKRVLTTESGAPVADNQNSATAGVGGPLLLQDQHLLEKLARFNRERIPERVVHARGSGAYGHFEVTDDVTGFTYADFLNTVGKRTEVFLRFSTVADSLGGADAVRDPRGFAVKFYTEEGNYDLVGNNTPVFFIKDPLKFPDFIHSQKRDPFTGKQEPDNVWDFWAHSPEATHQVTWLMGDRGIPASYRHMNGYGSHTYQWTNAEGEAFFVKYHFKTNQGIRSLSAEQAQEIAGTDPNSHQTDLLQAIERGVRPSWTLYVQIMPAAEAAEYRFNPFDLTKVWPHTDYPLQRVGRLVLDRNPDNVFAEVEQAAFSPNNFVPGIGPSPDKMLQGRLFAYADAHRYRLGVNHTQLAVNAPRATVVSNYGRDGLMASPAQGRAAKNYEPNSYDGPAETGRPLSAPLAVTGHTGTHEAPPHTKDDHFFQAGELYRLMSAEERSRLVANIAGGLSQVSRDDVIEKNLTHFHAADPEYGTRVEEAVRALRED

SEQ ID NO: 10294 - protein, 362 aa, Pseudomonas putida KT2440
MNDLSHTHMRAAVWHGRHDIRVEQVPLPADPAPGWVQIKVDWCGICGSDLHEYVAGPVFIPVEAPHPLTGIQGQCILGHEFCGHIAKLGEGVEGYAVGDPVAADACQHCGTCYYCTHGLYNICERLAFTGLMNNGAFAELVNVPANLLYRLPQGFPAEAGALIEPLAVGMHAVKKAGSLLGQTVVVVGAGTIGLCTIMCAKAAGAAQVIALEMSSARKAKAKEAGANVVLDPSQCDALAEIRALTAGLGADVSFECIGNKHTAKLAIDTIRKAGKCVLVGIFEEPSEFNFFELVSTEKQVLGALAYNGEFADVIAFIADGRLDIRPLVTGRIGLEQIVELGFEELVNNKEENVKIIVSPGVR

SEQ ID NO: 10295 - protein, 177 aa, Glycine max
MNKCELCKVPARIFCESDQASLCWDCDAKVHSANFLVARHARTLLCRTCRSPTPWKASGASLASAVSVCDRCAASEEPEESEAGNDDEPDTEDDDNDDEDGDNQVVPWSSSPPPPPPSSSSGSEWSECKNDDASISASEQETTTCSLKRQREDDDDASSDRDPRVLRRVGRLNGGCV

SEQ ID NO: 10296 - protein, 391 aa, Bifidobacterium longum DJO10A
MNPPIYNSTTYAFERVDAMPRYDYARSGNPTRDFLEQQIAQLEQGTRGFAFASGLAAIHAVLSIFKPGDRIVVGDNIYGGSYSQLNEFFTRWGIIVEAVDTQDIAALEAAVKGDRANGIAPAQAVYFETLTNPLLKVNDVHAISTVAHRFGALSIVNNTFVTPYLQKPLALGADVVIHSATKYLAGHSDVNAGLVVVSGEDLANRVYFAQNRLGGVLAPAECDAVRRGIQTLALRMDRQQENANAIARYLLVHPLVKAVHYPGLPGAGDQRLAAKGLKGAGGVLSFEVVPGVDPADVLNNLHLFRLAVSLGAVESLAELPCRMTHFELPREERLKIGITDELVRLAVGIEDANDLIEDLGQAFDIAYARYIDRHADFDVFQQLTSGGVCLI

SEQ ID NO: 10297 - protein, 355 aa, Arabidopsis lyrata subsp. petraea
ISYLTYDRADMAFAHYGPFWRQMRKVCVMKVFSRKRAESWASVRDEVDKMVRSVSCNVGKPINVGEHIFALTRNITYRAAFGSACEKGQDEFIRILQEFSKLFGAFNVADFIPYFGWIDPQGINKRLVKARNDLDGFIDDIIDEHIKKKENQNAVDDGDVVDTDMVDDLLAFYSEEAKLVSEAADLQNSIKLTRDNIKAIIMDVMFGGTETVASAIEWALTELLRSPDDLKRVQQELAEVVGLDRRVEEADIEKLTYLKCTLKETLRMHPPIPLLLHETAEDTSIDGFFIPKKSRVMINAFAIGRDPTSWADPDTFRPSRFLEPGVPDFKGSNFEFIPFGSGRRSCPGMQLGLYA

SEQ ID NO: 10298 - protein, 65 aa, Glycine max
MGGGMEANKNKFIEDWGTARENLEFNFRWTRRNLALVGIFGIAIPVLVYKGIVREFVSSHFPIPN

SEQ ID NO: 10299 - protein, 232 aa, Bacillus megaterium
MSKKPVALIILDGFALRDEDKGNAVTHAKKPNFDRFWNEYPHATLQASGEAVGLPEGQMGNSEVGHLNIGAGRIVYQSLTRVNVAIREGEFEQNETLLAAVKHAKEKGTNLHLFGLLSDGGVHSHIEHLYALLRLAKSEGLEKVYIHGFLDGRDVAPQSAETYLKELNEKIEEYGVGEIATLSGRYYSMDRDKRWERVEKSYRAMVYGEGPSYTSAEECVKDSYENGIYDEF

SEQ ID NO: 10300 - protein, 355 aa, Arabidopsis lyrata subsp. petraea
ISYLTYDRADMAFAHYGPFWRQMRKVCVMKVFSRKRAESWASVRDEVDKMVRSVSCNIGKPINVGEHIFALTRNITYRAAFGSACEKGQDEFIRILQEFSKLFGAFNVADFIPYFGWIDPQGINKRLVKARNDLDGFIDDIIDEHMKKKENQNAVDDGDVVDTDMVDDLLAFYSEEAKLVSEAADLQNSIKLTRDNIKAIIMDVMFGGTETVASAIEWALTELLRSPEDLKRVQQELAEVVGLDRRVEEADIEKLTYLKCTLKETLRMHPPIPLLLHETAEDTSIDGFFIPKKSRVMINAFAIGRDPTSWADPDTFRPSRFLEPGVPDFKGSNFEFIPFGSGRRSCPGMQLGLYA

SEQ ID NO: 10301 - protein, 355 aa, Arabidopsis lyrata subsp. petraea
ISYLTYDRADMAFAHYGPFWRQMRKVCVMKVFSRKRAESWASVRDEVDQMVRSVSCNVGKPINVGEHIFALTRNITYRAAFGSACEKGQDEFIRILQEFSKLFGAFNVADFIPYFGWIDPQGINKRLVKARNDLDGFIDDIIDEHMKKKENQNAVDDGDVVDTDMVDDLLAFYSEEAKLVSEAADLQNSIKLTRDNIKAIIMDVMFGGTETVASAIEWALTELLRSPEDLKRVQQELAEVVGLDRRVEEADIEKLTYLKCTLKETLRMHPPIPLLLHETAEDTSIDGFFIPKKSRVMINAFAIGRDPTSWADPDTFRPSRFLEPGVPDFKGSNFEFIPFGSGRRSCPGMQLGLYA

SEQ ID NO: 10302 - protein, 105 aa, Zea mays
MNRARRGGRLFPLWLCAVVCLMARPGACSVVLMANNTTLSFSDVEATFTPEVKGSGLNGVIYTVEPLDACSPLTKKAVEGPASPFALILRGGCQFDDKSRNAQDA

SEQ ID NO: 10303 - protein, 440 aa, uncultured bacterium 580
MSSEQILIPDIGDFDSVDVIEVLVNVGDSIEYDTPLITVESDKASMDIPAPKDGVIKDIKIKVGDKVKEGSLIGMIEVSEPKLDVKSEIKSSPKDDKKEDIEKVTNTPSRPAPEPPQKKVAKETPIPIGESVLNDENKKAHASPSVRKFARNLGVNLSFVNGSGNKNRILIEDIERFVKGELTKPRSENMGASFAPIPMPNIDFSEFGKVETKSLSKIKKLSGANLHRNWVTAPHVTQFDNADITDLEIFRKSMQKEAEKRGAKLTLLAFLIKASVNALKAYPMFNSSLSPDGNNLIMKSYYNIGFACDTPDGLVVPVVKDVQKKDVIDIAEDLGNLSEKARARKLKMDEMQGGCFTISSLGGIGGTKFTPIINCPEVAILGVSRASMQPVFNKSSEDFEARLMLPLSLSYDHRVVDGADGARFTSHLCMMLSDVRRLLL

SEQ ID NO: 10304 - protein, 580 aa, uncultured bacterium 580
MAELKKIHIPNIGDFDSVEVIEVMVKVGDKINIEDSLITVESDKASMDIPSPASGLIKSIDIKVGDEVKEGSLILSIDSEIEDSSGEKAPEEKKQATQKKEVQPAPQGDKSDEEYDVAVLGSGPGGYTAAFRAADLGLKVALVEKYTTIGGVCLNVGCIPSKALLHTAKVITDAEDTASHGVSFTQPKIDLEQLRNWKSNKVVKKLTMGLSQMAKQREVEVIEGEGKFSSPNQIIVNLKDGTKKSIGFKSAIIAAGSQSSKIPNTPDDERIMDSTGALELRDIPKKLLIIGGGIIGLEMGTVYDALGSEVSVVELSDGLIQGCDRDIVKPLHRRMEKRFEDIWLKTKVTKIETIKEGVVVHFEGDDAPEKLTFDRVLVAVGRKPNGHKIDAEKAGVKVDEHGFINVNKQMKTNVDHIYAIGDIIGQPMLAHKATHEGKVAAEVIAGEKVEFQAMTIPSVAYTDPEIAWAGVTEEDAKTQNLEIEKSVFPWAASGRAISTNRTEGMTKLIFDKKTQRIIGAGIVGTNAGELIAETVLSIEMGADAHDIGLSIHPHPTLSESVAMASEIKEGTITDLFIKKR

SEQ ID NO: 10305 - protein, 422 aa, Pseudomonas fluorescens PfO-1
MEFSMGYKKIQVPAVGDKITVNADHSLNVPDNPIIPFIEGDGIGVDVSPVMIKVVDAAVEKAYGGKRKISWMEVYAGEKATQVYDQDTWLPQETLDAVKDYVVSIKGPLTTPVGGGIRSLNVALRQQLDLYVCLRPVVWFEGVPSPVKKPGDVDMVIFRENSEDIYAGIEWKAGSPEATKVIKFLKEEMGVTKIRFDQDCGIGIKPVSKEGTKRLVRKALQYVVDNDRKSLTIVHKGNIMKFTEGAFKDWGYEVAKEEFGAELLDGGPWMKFKNPKTGREVVVKDAIADAMLQQILLRPAEYDVIATLNLNGDYLSDALAAEVGGIGIAPGANLSDTVAMFEATHGTAPKYAGKDQVNPGSVILSAEMMLRHLGWTEAADLIIKGTNGAIKAKTVTYDFERLMEGATLVSSSGFGEALIKHM

SEQ ID NO: 10306 - protein, 283 aa, Pseudomonas fluorescens PfO-1
MTTALQQPSLSSQCLAEFLGTALLIFFGTGCVAALKVAGASFGLWEISIIWGVGVSMAIYLTAGVSGAHLNPAVSIALSIFADFEKRKLPFYILAQVAGAFCGALLVYTLYSNLFFDYEQTHHMVRGTEASLELASVFSTFPNPALSTAQAFLVEVIITAILMGVIMSLTDDNNGLPKGPLAPLLIGLLIAVIGSSMGPLTGFAMNPARDFGPKLMTFFAGWGEISFTGAREIPYFLIPIFAPIVGACLGAAGYRGLIARHLTGATPATKDAEPAIDGKPRTS

SEQ ID NO: 10307 - protein, 423 aa, Rhodobacter sphaeroides
MKAQPPLRLTAQAMAFVLAGGRGSRLKELTDRRAKPAVYFGGKARIIDFALSNAMNSGIRKMAIATQYKAHSLIRHIQRGWNFFREERNEYLDILPASQRVDENRWYLGTADAVTQNIDIVDSYDIKYVIILAGDHVYKMDYEIMLRQHCETGADVTIGCLTVPRAEATAFGVMHVDANLRITDFLEKPADPPGIPGDEANALASMGIYVFDWAFLRDLLIRDAEDPNSSHDFGHDLIPAIVKNGKAMAHRFSDSCVMTGLETEPYWRDVGTIDAFWQANIDLTDFTPKLDLYDREWPIWTYSQIVPPAKFIHDSENRRGTAISSLVSGDCIVSGSEIRSSLLFTGCRTHSYSSMSHVVALPHVTVNRKADLTNCVLDRGVVVPEGLVIGQDAEEDARWFRRSEGGIVLVTQDMLDARARALN

SEQ ID NO: 10308 - protein, 242 aa, Zea mays
MTVPDAESRFHVLAVDDSLVDRKLIEMLLKTSSYQVTTVDSGSKALELLGLRDASSPSPSSPDHQEIDVNLIITDYCMPGMTGYDLLKRMKGSSSLKDIPVVIMSSENVPARISRCLQDGAEEFFLKPVKLADMKKLKSHLLKRKQPKEAQAQAQAQAQQGQAVELEPEQQLDPRTQPAHDAEETAAEPPPAASNGTTDGGNKRKAAAMEEEGMLAVMTVAAPESSTKPRLSTTTSSLAVET

SEQ ID NO: 10309 - protein, 230 aa, Mycobacterium leprae
MSRAALDKDPRDVVAMFDDVAHRYDLTNTVLSLGQDRYWRRATRSALRIGPGQKVLDLAAGTAVSTAELSKSGAWCVAADFSVRMLATGGARKVPKVAADATQLPFSDGVFDAVTISFGLRNIADYQAALREMARVTRPGGQLVVCEFSTPTNALVANVYTEYLMRALPQVARLVSSNPDAYIYLAESIRAWPDQVTLACQLSRTGWASPRWRNLTGGIVALHAADKPVR

SEQ ID NO: 10310 - protein, 337 aa, Streptococcus mutans UA159
MKRIAVLTSGGDAPGMNAAVRAVVRKAISEGMEVCGINRGYAGMVEGDIFPLDAKGVSNILSRGGTFLQSARYPEFAKLEGQLKGIEQLKKHGIEGVVVIGGDGSYHGAMRLTEHGFPAVGLPGTIDNDIVGTDYTIGFDTAVNTATDALDKIRDTSFSHGRTFVVEVMGRNAGDIALWSGIAAGADQIIIPEEPYDIKEVVANVKNGYLSKSKNHHLIVLAEGVMHGEEFAAQMKEAGDNSDLRVTNLGHILRGGAPTPRDRVIASWMGAHAVELLREGKGGLAIGIQNEELVEHPILGSAEDGALFSLTEQGEIVVNNPHKARLDFAALNRDLSN

SEQ ID NO: 10311 - protein, 282 aa, Zea mays
MSAAWEGGKEKGAATPAPGGACELCGAMARVYCGADEATLCWGCDAQVHGANFLVARHARALLCRGCARPTSWRAAGPRLGPSASLCDRCVRRGSGAVGVGGDVEMGGTGDGRGDDEEEEDDDEDDDDVVVEDDDDEEEGEGENQVVPWTEEAEATPPPVASSTSSSSREAPANGASGGECAKENMPCSTSQTGVLCHNWSSARHGGPNGEVHVCRNGGRFLAWGHRKRSPSDDIRRSLLVYRILGKTWITTRSASTRHTPSFGHRIGACNFFRSQPCTLGS

SEQ ID NO: 10312 - protein, 256 aa, Yersinia pestis biovar Medievalis str. 91001
MPNDYKWFDTAFSLSGKVAAITGGATGIGHAIAELYLAKGARVVLMDCADNVAEIAEQLDRDNAVGLHCDVSDSQSVRQAVAQAIGAFGQLDILVNSAGIAALDPAEKVREQDWDRTIDINLKGVFLMCQEVGKHFIQHGHGKIVNLASQAGVVALPNHLAYCASKFGVIGITKVLALEWGPLDIQVNAISPTVVLTALGQKAWSGQLAEDMKLKIPARRFAYPAEVAACALFLASDAANMITGENLVIDGGYTIQ

SEQ ID NO: 10313 - protein, 324 aa, Neurospora crassa
MSNSLEQLKATGTVVVCDSGDFATMAKYKPQDATTNPSLILAASKKPEYGALLDAAIADAKKGPGSPEEKVDAALDYLLVQFGKKILEIVPGKVSTEVDAALSFDTKASVDKALHIIKLYEAEGISKDRILIKIASTWEGIKAAEILQRDHGINCNLTLMFSLTQAIAAAEAGAFLISPFVGRILDWFKAHTGKNYSKEEDPGVASVKTIFNYYKKFGYKTIVMGASFRNIGEITELAGCDYLTISPNLLEELLNSDAPVPQKLNAADAASLSIEKKTYINSEPTFRFDFNEDQMAVEKLREGISKFAADAVTLKEIIKQKLAE

SEQ ID NO: 10314 - protein, 390 aa, Zea mays
MAPSCYDAAASMLLCAEEHSSILWYDEEEEELEAVGRRRGRSPGYGDDFGADLFPPQSEECVAGLVERERDHMPGPCYGDRLRGGGGCLCVRREAVDWIWKAYTHHRFRPLTAYLAVNYLDRFLSLSEVPDGKDWMTQLLAVACVSLAAKMEETAVPQCLDLQVGDARYVFEAKTVQRMELLVLTTLNWRMHAVTPFSYVDYFLNKLSNGGSTAPRSCWLLQSAELILRAARGTGCVGFRPSEIAAAVAAAVAGDVDDADGVENACCAHVDKERVLRCQEAIGSMASSAAIDGDATVPPKSARRRSSPVPVPVPVPQSPVGVLDAAACLSYRSEEAATATATSAASHGPPGSSSSSSTSPVTSKRRKLASRCDGSCSDRSKRAPAQWTKE

SEQ ID NO: 10315 - protein, 305 aa, Aneurinibacillus thermoaerophilus
MKGIILAGGSGTRLYPLTRAISKQLLPVYDKPMIYYPLSVLMLAGIRDILVISTPEDTPRFEQLLGDGSELGISLSYAIQPSPDGLAEAFIIGEDFIGQDNVALILGDNIFYGQGFTPLLQRAVNRKKGATIFANVVKDPERFGVVEFDENNKVLSIEEKPVYPKSNFAVTGLYFYDNDVVKIAKQIEPSARGELEITDVNKIYLERGDLNVELLGRGFAWLDTGTHESLLEASQFIQTIEKRQGLKVACLEEIAYYKGYINKEQLIRLAEPLKKNEYGAYLLELAEKGSLQTGSINTKEAVLYG

SEQ ID NO: 10316 - protein, 399 aa, Desulfovibrio vulgaris subsp. vulgaris str. Hildenborough
MSDVFRVSRRVQQIRISATKLMPMLAARVGGCVSLGQGVPSFRTPEHIVEAVCRALRDKADAGRYTLQPGMPALREAIAADLAARKGYMVNPDSEVGVTVGAMEALLMALLTVVDRGDEVIIPSPGYASHAEQVLMAEGVPVHVPLRADDWGLDVDAIRAAVTPRTRAVIVCNPGNPTGTVYDDADVRALCELALERNIMLISDETYDYMVYGGGEPLSPASLPEMRRHVIVVNSFSKKYALTGWRVGYCAADAAWMGELLKVHDAAAICAPAVSQYAALAALTGPQDCVDDMRAALSARRNLACARLDAMAPHFDYVQPRGAFYIMARYTFTDAPSDMVARRLLEEGRVITVPGASFGPTGERHLRLSFGMEEAELDEAFDRMAAWTQRVVASGGLGG

SEQ ID NO: 10317 - protein, 1660 aa, Mycobacterium tuberculosis H37Rv
MSYVIATPEMMATAAFDLARIGSQVSAASAVAAMPTTEVVAAGADEVSAGIAALFSAHAQEYQALSAQAAAFHDQFVHTLTAAARWYTATEIANAAAMRVVLGAVNAPTQTLLGRPLIGDGAHGTAPGQPGGAGGLLFGNGGNGAAGAVGQVGGAGGAAGLFGIGGAGGAGGAGAPGGTGGTGGWLAGGGGVGGMGGAGGGAGGAGGNAGLFGNGGAGGAGGAGGGAGGAGGNAGWFGHGGAGGVGGVGAAGANGATPGQDGAAGVAGSDDGAGGDGLAGSDGGDGGAGGVGGNGGRGGWLLGNGGAGGVGGVGGAGGAGAAGGAGGAGATGINGPAGISAAGGDGGAGGNGGAGGNGGVGGAGGAGGSAGLLGYVGRAGDGGAGGGGGLGGAPGDGGAGGNGGSWLAAGDGGAGGHGGDPGLGGAGGAGGASGGAGARAGANGLAAGNDGPVSGGNGGKGGNGAHAPVAGGHGGNGGAGGNGGLVGDGGAGGHGGDGAAGAGYADMTAIFLGSSGTPGEDGGNGGAGGAGGAGGAHAGDGGAGGAGGNGGAGGAGGNGAHGFNAVLVSDGGNGGDGGAGGRGGDGGAGGAGGDAPAGRAGSQGVGGDGGAGGAGGAPGNGGSGGRGDMAFKDGDGGAGGDGGDPGAGGKGGAGGAGATEGVTGATGATVHSGGNGGKGGNGADATVAGANGGKGGAGGNGGLVGDGGAGGDGGSGAAGANGANVGEDGADGTLSGQPGEGSEANGGQGGVGGGGAGGAGGDGGAGSSALGSGGNGGRGDAGQAGGAGGAGGAGGAGGSVSGDGGPGGKGGAGGAGGAGASGGGGGKGASGADSAEAVGGAGGKGGDGGVGGVGGDGGPGGDGGAGGAAPAGQVGSHGVGGVGGDGGLGGAGGNGGDGGHGSDGGDGGDGGDPGAGGLGGLGGDSGNGTRAASGVDASDHGPGSGGNGGNGGNGAQASVAGGAGGNGGDGGNAGRVGDGGAGGNGGDGAAGANGANSGAPGSDALALGQPGGNGGQGDAGQAGGAGGAGGAGGAGGSVSGDGGAGGNGGAGGNGGVGASGGAGARGANGIDSIGGTGGAGGGGGDGGAGGVGGHGGDGGVGGAAPSGTVGSHGTGGVGGDGGLGGAGGVGGAGGNGGIGITVGGAGGAGGNGGDPGAGGRGGLGGDSGNGTSAANGVDASKHGPLTGGDGGVGGNGAKAAAAGGDGGQGGDGGNAGLFGDGGAGGDGADGTAAEALGGDGGAGGAGGKGGDAGDIGDGGDGGKGGDGAHGALGGLTVAGGNGGAGGAGGAGGAGGAFLGDGGNGGAGGQGGAGRGGSPGGGGGVGGHGGAGGDAGMNGGGGTGGQGGNGAAGGAGWSPDSDLKGFDGFDGGSGGAGGDGGAGGAGGTQTGDGGDGGAGGLGGAGGVGGNGVDGFDINETTGRDGGDGGDGGYGGWGGAGGNGGAGGSAPAGEVGNRGVGGDGGDGGSGGDAGNGGLGGDGFTYLADFDGEPGGDGGDGGDGGWGRPGGQGGFGSTSGAHGKAGFGAPGGDGGDGGNGGHGGDGNGSFADAGDGGPGGNGGNGGLGGAGRDGGAPGGDGGDGGTGGSGGFGAPPPRSIGGGDGGDGGRGGDGGRGAGGLTSGGVGSSGESGGSGNGRGDPGSGGSGGEGGEGGPSISVNVT

SEQ ID NO: 10318 - protein, 355 aa, Arabidopsis lyrata subsp. petraea
ISYLTYDRADMAFAHYGPFWRQMRKVCVMKVFSRKRAESWASVRDEVDKMVRSVSCNVGKPINVGEHIFALTRNITYRAAFGSACEKGQDEFIRILQEFSKLFGAFNVADFIPYFGWIDPQGINKRLVKARNDLDGFIDDIIDEHMKKKENQNAVDDGDVVDTDMVDDLLAFYSEEAKLVSEAADLQNSIKLTRDNIKAIIMDVMFGGTETVASAIEWALTELLRSPEDLKRVQQELAEVVGLDRRVEEADIEKLTYLKCTLKETLRMHPPIPLLLHETAEDTSIDGFFIPKKSRVMINAFAIGRDPTSWADPDTFRPSRFLEPGVPDFKGSNFEFIPFGSGRRSCPGMQLGLYA

SEQ ID NO: 10319 - protein, 351 aa, Arabidopsis lyrata subsp. petraea
ISYLTYDRADMAFAHYGPFWRQMRKVCVMKVFSRKRAESWASVRDEVDKMVRSVSCNVGKPINVGEHIFALTRNITYRAAFGSACEKGQDEFIRILQEFSKLFGAFNVADLIPYFGWIDPQGINKRLVKARNDLDGFIDDIIDEHMKKKENQNAVDDGDVVDTDMVDDLLAFYSEEAKLVSEAADLQNSIKLTRDNIKAIIMDVMFGGTETVASAIEWALTELLRSPEDLKRVQQELAEVVGLDRRVEEADIEKLTYLKCTLKETLRMHPPIPLLLHETAEDTSIDGFFIPKKSRVMINAFAIGRDPTSWADPDTFRPSRFLEPGVPDFKGSNFEFIPFGSGRRSCPGMQL

SEQ ID NO: 10320 - protein, 351 aa, Arabidopsis lyrata subsp. petraea
ISYLTYDRADMAFAHYGPFWRQMRKVCVMKVFSRKRAESWASVRDEVDKMVRSVSCNVGKPINVGEHIFALTRNITYRAAFGSACEKGQDEFIRILQEFSKLFGAFNVADFIPYFGWIDPQGINKRLVKARNDLDGFIDDIIDEHMKKKENQNAVDDGDVVDTDMVDDLLAFYSEEAKLVSEAADLQNSIKLTRDNIKAIIMDVMFGGTETVASAIEWALTELLRSPEDLKRVQQELAEVVGLDRRVEEADIEKLTYLKCTLKETLRMHPPIPLLLHETAEDTSIDGFFIPKKSRVMINAFAIGRDPTSWADPDTFRPSRFLEPGVPDFKGSNFEFIPFGSGRRSCPGMQL

SEQ ID NO: 10321 - protein, 329 aa, Saccharomyces cerevisiae
MRSIKCVIIGDGAVGKTSLLISYTTNSFPTDYVPTVFDNYSTTIAIPNGTASSPLELDNGNDKRGSLSSASSSPSTDRKLYKINLWDTAGQEDYDRLRPLCYPQTDIFLICFSVSEHASFANVTEKWLPELKQTSNIEGTSLYTKLGKYPILLVGTKSDLRDDPATQKKLQEANSDYVSQEEIDELVQRCGFMGYTECSAATQAGVREVFEQAVRYAIYEPESPNQKSANHTLTDELTTATTNTNGDKNIREQKQQPHHNNSTDSTLPKGSLQQEKEALNIKPTKKGQKDKIHEQSKSKGSKIASNNIITTSKLNQRRETTRRKRSQSV

SEQ ID NO: 10322 - protein, 351 aa, Arabidopsis lyrata subsp. petraea
ISYLTYDRADMAFAHYGPFWRQMRKVCVMKVFSRKRAESWASVRDEVDKMVRSVSCNVGKPINVGEHIFALTRNITYRAAFGSACEKGQDEFIRILQEFSKLFGAFNVADFIPYFGWIDPQGINKRLVKARNDLDGFIDDIIDEHMKKKENQNAVDDGDVVDTDMVDDLLAFYSEEAKLVSEAADLQNSIKLTRDNIKAIIMDVMFGGTETVASAIEWALTELLRSPDDLKRVQQELAEVVGLDRRVEEADIEKLTYLKCTLKETLRMHPPIPLLLHETAEDTSIDGFFIPKKSRVMINAFAIGRDPTSWADPDTFRPSRFLEPGVPDFKGSNFEFIPFGSGRRSCPGMQL

SEQ ID NO: 10323 - protein, 136 aa, Glycine max
  unsure (1)..(136): unsure at all Xaa locations
NQLLLTMHSHTVRVAWPADPLSCRVMQLDDAISDDSGGHSSAPVVVGVATGAFLFLADLVRKIDLSIAADFVRVESYGSGTVSNGAPTISFDLKVDNNSRHVIWVKDNXDTGHTLSKVIEHLKSKGAVSVSVALSL

SEQ ID NO: 10324 - protein, 413 aa, Deinococcus radiodurans
MKPRVLGMILAGGQGSRLAPLTQKRSKPAVPFGSKYRIIDFAINNFINSGMFSVYVLTQYKAQSLTEHIQRGWRFGTFLSDYFITLVPAQMYRFEELGDAWYRGTADAVYQNMHLIDNFEADYVAIFSGDHIYKMNVEHMLEKHIETRADVTIAAYPMPQSQAHQFGVMQVDERWRVTEFHEKVPDPPTIPGQADLSLTSMGNYIFSRRALEELLEASISGQETGYDFGHNVIPRALSDGYHVQAYDFHKNPIPGQERPNTYWRDVGTLDAYFEANMDLVSVNPEFDIYNPEWPLRTSSEFSPPAKFVHESEGRKGQAFNSIMAGGAIISGGTVRDSVLGRNVRTHSYSLVESCVLFDDVQVGRHSHLRRVIVDKDVVIPPGTTIGLNREHDEQRGFTVTEHGVVVVPKGYVF

SEQ ID NO: 10325 - protein, 434 aa, Methanococcus maripaludis S2
MRTDIVSSGVGELSYEIREIVKVAKKAESSGLEVVWENIGDPIAKGEKLPLWIKEIVSETTMDDSSYGYCPTRGLLETREFLTDLNNSRNGAQITPDEIVFFNGLGDAITNIYGLMRKECRVIGPTPAYSTHSSAEGLYSNCRPVMYELDKDDGWNPDIDDLRNKVKYNPSIASILLINPGNPTGAVYSKKILSEVVDIANEYDLFILADEIYSNLVYNGKKHNYLSEVLDDVPGISLKGISKDLPWPGSRCGWTEFYNTQSDELFKKYTENICKFKMIEVCSTTLPQKVIPKIMSDKRYNKYLEERKSYYETASKYAYNKMKNIDGLNVNRTDGAFYNTIVLEKEYLNENQSLKIQDSELKNYVESISKGIPEDKRFVYYLLASTGICGVPLTSFCSEHNGMRFTLLERDEEKRNWVFETIAEKVEEYFNSSN

SEQ ID NO: 10326 - protein, 506 aa, Rhodopseudomonas palustris CGA009
MNLITTMHPDASTVFKARYGNFIGGRWVAPVDGRYFDNTTPITGAKLTEIPRSQKEDVELALDAAHTASVTWSKTTTTERSLILNRIADRMEANLDLLAIAETLDNGKPIRETRAADLPLAIDHFRYFAGALRAQEGSISEIDHDTIAYHFHEPLGVVGQIIPWNFPLLMAAWKLAPALAAGNCVVLKPAEQTPASILVWAELVGDLLPPGVVNVVNGFGVEAGKPLASSPRIAKIAFTGETSTGRLIMQYASENLVPVSLELGGKSPNIFFGDVTAEDDPFFDKAIEGFVMFALNQGEVCTCPSRALVQESIYDRFMERALARVAAIRQGDPRDPATMIGAQASQEQLDKILSYIDIGRHEGAELLAGGGRAQLPGGLAGGYYVHPTVFRGHNQMRIFQEEIFGPVVSVTTFKDEAEAIAIANDTQYGLGAGVWTRDGTRAYRFGRAIAAGRVWTNCYHAYPAHAAFGGYKQSGIGRETHKMMLDHYQHTKNLLVSYGTGPLGFF

SEQ ID NO: 10327 - protein, 454 aa, Bacillus cereus ATCC 10987
MKETSTFSQKLKQFVLLFFPIFITQMSLFAMSFFDTTMSGHASPIDLAGVAIGTSIWIPVSTGLTGILMATTPIVAQLVGSKKKEDVPQVVIQAVYLAICASFVVMLIGFFAVTPILNGMRLEEPVERIAAQFLSIIAIGIIPLFTYTVLRGFIDALGKTRTTMIITLLSLPINVILNYVLIFGHFGFPKLGGVGAAIASTATYWCILIITVMIIRTKEPFASFHIFKQLYRPSLSSWKEFLKLGVPIGFAIFFETSIFAAVTLMMSNFSTTTIAAHQAAMNFASLLYMTPLSLAMAMTIAVGFEVGAKRYNNAKQYGFIGIGLALAFALLYSILLYFFDDEIASIYTTDIQVHHLAKEFLIFAILFQISDAIATPVQGALRGYKDVNVSLIMTLIAYWVIGLPLGYILATYTDWAAKGYWIGLIIGLAFGATFLLIRLFQVQRKYTIENRRSR

SEQ ID NO: 10328 - protein, 1489 aa, Agrobacterium tumefaciens str. C58
MRVQFLIQRELPMSDYTSASNQDRNAFRVAVIGMAGRFPGASDIESFWDNLVHGRESVKQWTDEELIALGVPPEQLADPDFVRASAPLEGADQFDAEFFGYSPSEAEILDPQQRLFLECAWAALERAGYQGDTFDGSIGVYASSGFNTYLLNLHANAAVRQSISPFELFVANDKDFLATRTAYKLNLRGPAMTVQTACSSSLVAVHVAAQSLIAGECDIALAGGVTVSRSHGYVAREGGILSPDGHCRAFDTDAAGTVPGSGVGVVVLKRLEDALADGDTIDAVIIGSAINNDGALKASFTAPQVDSQALVISEAHAAAGISADSIGYIEAHGTGTSLGDPIEIAALTQAFRKTTPRSGYCAIGSVKTNIGHLDTAAGIAGFIKTVLCLKHGRIPASLHFRQANAKIDFPASPFAVNTVLRDWTALESPRRAGISSLGIGGTNAHVVLEEAPAGASACAKAQPALPQLLVFSARNATALSALLAAHAKAFEANPELALEDIAFTLRHGRKAFSHRQSLVADDVASAAAELHRLAAQKPSIVGSTPSPVFLFPGQGSQYAGMGKDLYERLELFRAPFDACADRLSKIMQRDFRADLFAGHEDIQNTEFAQPALFAVEYALAKAWMAQGVIPQALHGHSIGEYVAACLAGVFDLDTALSLVVARGRLMQQAAPGAMLAVVHPDAPIDRWLGADIALAASNAPGLSVVSGSMDAITRLETELKQARYATRRLKTGHAFHSPMMAQAAARYLEELRHVRLSPPSIAMISNVTGTWLSPSQATDPNYWAAHLEQTVRFDEGMRTLFGIDNAVFIEAGPGSALSGLIREHAIAADRIIPCLGRSRPENETSQYLAALGDYWRTGGQLDWQAVSPEGARVPLATYPFQGQRYWISAETAENQAPITTPVDSARIYRPTWQRLSPATPADCRNRRVLILDEGRIGKSLAARLEGAGAQVYRAIAGDRFDECDFRCFSLAGHTAADFAQLLETLSERGALPQDILYLWPLKPGRRDEIEALLNLVRALTAQGHKGKLTLVTNGAADVTGLESLDDLQSQLPGILKVAGQEYEDLTCRHIDIMVAQDMADQAIADRLLAEFNGTGAVVAIRGPHRWSHGFAPLDLPEPQASARLKKNGVYVVIGNIAEGVGTVWLDHLAKISGTRLSVLQPVEDAETAIQSDAAIDTRQIDCNDPAALGAALDEVVSMHGRIDGIFLSMPQANRQAAAPLSMMDETHLSYNEAVRIAPLRALIEAMEQRRAGFCCIQSSLATVIGGVGLAAYTSGYQAVELLVAAQSRSARMPWFAIGYPLIDVLAAGKRSSLDTNAYAVASDDAWDLTRKIIENGITGTTMLSRSDITVAPTAGKKAQLSKVPVSGRARPAMSTPFIAPRTHTETTVAGIFEEMIGVSGIGVDDGFYELGGHSLLAIRVVAKLRETFPVKIEMRELLFENPTVARVASMITAHMHDEGDLDEMAALLMEIEGLSDSEVQSALGGAEAR

SEQ ID NO: 10329 - protein, 262 aa, Bacillus anthracis str. A2012
MKAIICTQYGPPNVLQLQNIEKPIPKKNEVLVKIHATSVSTGDCRIRGFNSPLLFWIPMRLILGLRKPRNPILGVELAGEIEDIGTDVTQFKKGDQIFALTELNLGGYAEYTCVHESGLITLKPTNVTYEEAAVIPFGGTSALHFLRKSRIKKGQQVLIYGASGSVGTAAIQLAKYFGATVTAVCSNSNFELVQSLGADKVIDYTKEDFTKRRERYDIIFDAVGKHKKSLCKQVLAPNGKYVSVNGMMAKVSKEDMILLKKL

SEQ ID NO: 10330 - protein, 260 aa, Streptomyces avermitilis MA-4680
MAGLDLTGRTAVVTGASRGIGLAIAQAIAAAGGNVVLTSRSQEAADAAAARVGGTAVGVGAHAVDEEAARRCVDLTLERFGSLDILVNNAGTNPAFGPVIDQDHGRFAKTFDVNLWAPVLWTGLATRAWMGEHGGAIVNTASVGGMAFEANIGLYNASKAALIHLTKQLALELSPKVRVNAVAPGVVRTKLAESLWKEHEQAVSAATALGRIGEPADIASAVAFLVSDAASWITGETMVIDGGQLLGDALPFREGAGIGL

SEQ ID NO: 10331 - protein, 180 aa, Lycopersicon esculentum
MASSIVSSAAVATRGNGAQASMVAPFTGLKSTASFPVSRKQNLDITSIASNGGRVSCMQVWPPINMKKYETLSYLPDLSDEQLLSEIEYLLKNGWVPCLEFETEHGFVYRENHKSPGYYDGRYWTMWKLPMFGCTDATQVLAEVQEAKKAYPQAWVRIIGFDNVRQVQCISFIAYKPEGY

SEQ ID NO: 10332 - protein, 180 aa, Lycopersicon esculentum
MASSVMSSAAVATRGNGAQASMVAPFTGLKSTASFPVSRKQNLDITSIASNGGRVSCMQVWPPINMKKYETLSYLPDLSDEQLLSEIEYLLKNGWVPCLEFETEHGFVYRENHKSPGYYDGRYWTMWKLPMFGCTDATQVLAEVQEAKKAYPQAWVRIIGFDNVRQVQCISFIAYKPEGY

SEQ ID NO: 10333 - protein, 520 aa, Brassica napus
MATMAAIGSLKVPSSSSNHTRRLSSSSQRKTLSFSSSSLTGEKLNPTQEIIISNLPRGNERRTPSIVSPKAVSDSQNSQTCLDPDASRSVLGIILGGGAGTRLYPLTKKRAKPAVPLGANYRLIDIPVSNCLNSNISKIYVLTQFNSASLNRHLSRAYASNMGGYKNEGFVEVLAAQQSPENPNWFQGTADAVRQYLWLFEEHNVLEFLVLAGDHLYRMDYEKFIQAHRETDADITVAALPMDEKRATAFGLMKIDDEGRIIEFAEKPKGEQLKAMKVDTTILGLDDERAKEMPFIASMGIYVVSKNVMLDLLRDQFPGANDFGSEVIPGATDLGLRVQAYLYDGYWEDIGTIEAFYNANLGITKKPVPDFSFYDRSAPIYTQPRYLPPSKMLDADVTDSVIGEGCVIKNCKIHHSVIGLRSCISEGAIIEDTLLMGADYYETDADRTLLAAKGSIPIGIGRDSHIKRAIIDKNARIGDNVKIINTDNVQEAARETDGYFIKSGIVTVIKDALIPSGTVI

SEQ ID NO: 10334 - protein, 1280 aa, ASPERGILLUS NIDULANS FGSC A4
MSELPSRSISPRDPSPGETPGRDPSTPSTDAGVGYSASQDAPSFGAYDRVYPIRSLVSLEPPATSEPSSNKSKSPLSPTSGARQFSIIDGHTWTRLRSDSRANSTDYSGGTGLSPESSEAPSSQRMSDSSSARPPSNTTGLRRGDDHTTFTPSSEDSHPQVQEPYELMTTRFRHVVTDDGHAVITGRTVDSFKACEDEPIHIPGAIQSFGALVAVREEPGEQMVVRIVSENSQDILGYSPNDLFSLPTLCDIFPEDQADNFLDHVDFVKEEGYDPSVDGPEVFILTVNQPNGSTIRVWCAIHTNPALNGLVICEFELEDDHVNPLTSSGHISPAVPTNTLDVVPTIEQMAGSTITINQPLRVLRRARRRKGEAAAMEVFSIVSQIQEQLARADNMEALLDTTSGIVKELTGFHRILVYQFDSEFNGKVVSELVDPTMSIDLFKGLHFPAADIPKQARDLYRINKVRLLYDRDHVTARLVCRALEDLETPLDMTHAYLRAMSPIHIKYLANMQIRSSMSISINSMNDLWGLISCHSYGPRGMRVSFPIRKMCRLIGDTVSRNIERLSYASRLQARKLINTVPTDANPSGYIVASSDDLLRLVDADYGALCIRGEVKILAKSPQSQEMLALLEYLKVRKYNSVLTSNHIVKDFQDLNYPPGFKDISGLLYVPLSTDGLDFIVFFRRGQLTEVKWGGNPNEAKFTEGHLEPRKSFQTWRETVLDRCRDWTESEVDTAAVLCLVYGKFIKVWRQQEAALESSSLTKLLLANSAHEVRTPLNAIVNYLEIALEGALDGETRDHLSKSYSASKSLIYVINDLLDLTNVEKGQSLIKDEPFDLPTTFSEATAMFESEAKRKGLNYKVLSQPGIPETVIGDQRRVRQSISNLISNAVQNTSSGGVTVEVWHAPGEGDTDKATVKIAVLDTGRGISSSTLELLFRELEQVSGEDDSHYYGGSEEGEESAPEAKASKDKAVLGLGLALVARIVRNMHGQLTVRSEEGKGSRFQISLQFPIPEGSDTKSPTAEHRPVATGDSAAPFSTGDDVILVDSTTGSKRNSQDSLTRPDVPRKSEPEDTAPADGAGEQASGESEAQTRPKKTGESTASTSHEQSETARSRPSGPSSGPSAPERRPLRVLVAEDDPINAKIIEKRLEKLGHTVQRTVNGEECANAYSAESTQWDVVLMDIQMPILDGIESTKRIRQHESQSEVANLHIPIFAVSASLLEKDVQMYMDIGFDGWIMKPINFVRLNTLLAGIHEERARNGAVYQPGQWEKGGWFTPYTHS

SEQ ID NO: 10335 - protein, 401 aa, Methanocaldococcus jannaschii DSM 2661
MLSYDYENALKVGEISLEDINKVDFANAYSNLMEKLDNGVVGFRDVIYDENLDKYKSLNGYENVVVIGMGGSILGTMAIYYAISPFNNNAYFIDNSDPEKTLSILKKVDLNESIIYIISKSGNTLETLVNYYLIKKRIEKLNSFKGKLVFITNGGKLKREAEKNNYDIFSIPENVPGRFSVFTAVGLAPLYSLGVDISKILEGAREMDKICQNEDILKNPALLNGVIHYLYDKRGKDISVIMSYVESLKYFGDWYKQLIGESLGKNKHGITPLLSIGAKDQHSLLQLYMDGKKDKIITFMVAKKYRLDEEIEFEDINDEKISCRYSDIIRSQQKATEIALTNNGVPNVRITLDEINEMAMGALLYMYEMQVGFMGELYNINAYNQPAVEEEKKICWRLIKQ

SEQ ID NO: 10336 - protein, 464 aa, Mesorhizobium loti MAFF303099
MKEISCKLLVIGAGPGGYICAIRAGQLGVDTVIVEAGKPGGTCLNVGCIPSKALIHAAEEFEKVAHMAGGKSPLGISVSAPVLDLGKTIAWKDGIVSRLNSGVAGLLKKAGVKTVHGWAMFRDGKTVEVETETGSQVIRAETIVIATGSAPVELPFLPFGGPVISSTEALALSVVPKKLAVVGGGYIGLELGMAFAKMGAEVTLVEALPRVLAQYDAELTRPVVKRLAALGVEVMTEAKAKGLSTKGDALLVETADGKNTKVSADKILVTVGRKPVTEGWGLDQIDLDMSGKFIRIDDQCRTSMRGIFAIGDVTGEPMLAHRAMAQGEMVAEIVAGHKRNWDKRAIPAVCFTDPELVTVGLSPEEAKAQGEIKIGLFPFAANGRAMTKLGEDGFVRVVARADNHLVLGIQAVGQGVSELSTAFGLALEMGARLEDIAGTIHAHPTQGEGFQEAALKALGHALHI

SEQ ID NO: 10337 - protein, 179 aa, Actinobacillus pleuropneumoniae serovar 1 str. 4074
MKKHHVETLISREEVQSRIMELAKEINHHYAHAHCENLVVVGLLRGSFMFMADLVRLIDVPVEVDFMTASSYGSGTESSRDVKILKDLDGEIHGKDVLIVEDIIDTGFTLSKVRDILNLREPRSVAICTLLDKPSRREVEVPVEWVGFAIPDEFVVGYGIDYAQKYRNLDFIGKVVMDA

SEQ ID NO: 10338 - protein, 438 aa, Mesorhizobium loti MAFF303099
MGEHIIKLPDVGEGVAEAELVEWHVKVGDMVREDTVLAAVMTDKATVEIPSPVDGEILWLGAEIGDTVAIGSPIVRLKVAGEGNVKPKGDAKAEAVAAEPPAKLPTPKPETAGPVAKASPKAGAPEAKPAPAVAKSTGQRSISGAPRPEGERPLASPAVRLRAKEAGIDLRQVAGSGPAGRIGHEDIEAFLARGPQVAKTSGLTRNDAVEDIKVVGLRRKIAEKMTLSKSRIPHITYVEEIDVTALEELRAALNKEKRADRPKLTLLPFLMRAMVKAIAEQPQLNSLFDDEAGIIHQHGGIHIGIAAQTPSGLVVPVVKHAEARDIWDCGAEVNRLAEAAKSGTATRDELSGSTITITSLGAMGGIATTPVINHPEVAIIGVNKMMVRPVWDGTQFIPRKMMNLSSSFDHRVIDGWDAAVFVQRIKALLETPALIFVD

SEQ ID NO: 10339 - protein, 380 aa, Actinobacillus pleuropneumoniae serovar 1 str. 4074
MKMTKYSNIETTLVQLGNRTDPRTGAVATPIVLSTAYGRGGLGESTGWDYIRTKNPTRAVLEQGIADLEGGDAGFAMASGMAAIQLVMSLFKAPDEWIISSDVYGGSYRLFDFSHKHHNTVKPVYVNTADLAAIEAAITPNTKAIFVETPSNPLMEECDVDAISKIAKKHNLMLIVDNTFLTPILFRPIEHGADIVIHSATKYLSGHNDVLAGLIVAKDSEATKNEAGQKLSERLFYFQNCAGAVLSPFDSYLAVRGLKTLALRMERHQSNATELARFLSEQPEIECVLYSGKSGMLSFRLQKEEWVPKFLKAIKLITFAESLGGTESFITYPSTQTHMDIPEAERIARGITNNLLRFSVGLEHVEDLKVDLRQAFGQLK

SEQ ID NO: 10340 - protein, 393 aa, Mycobacterium tuberculosis H37Rv
MSGEDSIRSFPVPDLGEGLQEVTVTCWSVAVGDDVEINQTLCSVETAKAEVEIPSPYAGRIVELGGAEGDVLKVGAELVRIDTGPTAVAQPNGEGAVPTLVGYGADTAIETSRRTSRPLAAPVVRKLAKELAVDLAALQRGSGAGGVITRADVLAAARGGVGAGPDVRPVHGVHARMAEKMTLSHKEIPTAKASVEVICAELLRLRDRFVSAAPEITPFALTLRLLVIALKHNVILNSTWVDSGEGPQVHVHRGVHLGFGAATERGLLVPVVTDAQDKNTRELASRVAELITGAREGTLTPAELRGSTFTVSNFGALGVDDGVPVINHPEAAILGLGAIKPRPVVVGGEVVARPTMTLTCVFDHRVVDGAQVAQFMCELRDLIESPETALLDL

SEQ ID NO: 10341 - protein, 583 aa, Neurospora crassa
MGGGGGSGAAGFYDAALQRREAVMGKSGPAALVKNFRVFSIACFACIGGVLYGYNQGMFSGVLAMPAFQKHMGEYDPIDENASQTKKGWLTAILELGAWLGTLLSGFMAEVLSRKYGVLVACLVFMLGVVIQATSISGGHETILAGRFITGMGVGSLAMIIPIYNSEVAPPEVRGALVALQQLAICFGIMVSFWIDYGTNYIGGTKLETQSDAAWLVPVCLQLAPALILFFGMMFMPFSPRWLIHHGREAEARKILSTLRGLPQDHELVELEFLEIKAQSLFEKRSIAELFPELREQTAWNTFKLQFVAIEKLFRTKAMFRRVIVATVTMFFQQWSGINAILYYAPQIFKQLGLSGNTTSLLATGVVGIVMFIATVPAVLWIDRVGRKPVLTIGALGMATCHIIIAVIVAKNVDQWETHKAAGWAAVAMVWLFVIHFGYSWGPCAWIIVAEIWPLSTRPYGVSLGASSNWMNNFIVGQVTPDMLKAIPYGTYIIFGLLTYMGAAFIWFFVPETKRLTLEEMDMIFGSEGTAQADNERMEEINAEIGLTRFLQGGSGANQGAADGSDTGYDAEKGKSEHYSQHV

SEQ ID NO: 10342 - protein, 272 aa, Chloroflexus aurantiacus
MLSDLPIAVIGAGAMGEAIIGGLLRNELVAADQILASHPREDRRRELSHHYGIQTTHDNLAAAQWGRVVIFAVKPQQLRRVLPPLRGALRDDDLAISVIAGATIASFAEALDHQAVVRSMPNTPAQIGCGMTVWTAAPAVNERQRGWAATVLGALGRELFVDNETYLDMATAINGTGPAYVFLMMEAMIDAGVHLGLSRRIAEELVQQTMLGSVQYAIQSGLHPAQLRNAVTSPGGTSAAALSELERGGLRTVLADAIWAAYRRSVELGRNG

SEQ ID NO: 10343 - protein, 826 aa, Actinobacillus pleuropneumoniae serovar 1 str. 4074
MHMKTQEKINASRRGFIKNTSLGLAGTSLAGGSVNALISTEAAAAEMQTVMTAAHWGALGIVVENGKVVRSGPAMPPSIENELQTVVPDQVHGETRVKYPMVRKGYLEGNKDTTLRGRDEWVRVSWDKAFELVANEMKRVRDAHGPSAIFGGSYGWYSSGSLHAARTLLQRYLNITGGFVGVKGDYSTGAAQVIMPHVLGTIEVYEQQTSWEVVLESTDVIVLWSANPLNTLRIAWTSTDQQGLEYFKKFKESGKRIICIDPVRSESCEYLGAEWVPVHTGTDVALMLGMAHTLVAENKHDKEFLKKYTKGYEQFEKYLLGTEDKQPKDAEWASKICGVPAETIKKLALELQSKRTMLMAGWGIQRQRHGEQSHWMLVTLAAMLGQIGLPGGGFGLSYHYSNGGVPTATGGILGSISANPTTEAGAKTWLDETSKFSFPLARISDALLNPGKTIDYNGTKVTYPDIKVIWWSGGNPFTHHQDTNTLVKAWQKPDSVFVTECHWTPTARMADIVLPATTSYERNDLTMSGDYSMMNIFPMKQVVPPQFEAKNDYDIFAELSKRAGKEQEFTEGKSEMDWLKGFYQTAFDAARKNRVLMPKFEQFWADNKPITFKATEKAKKWVRYEEFRNDPLLNPLGTPSGKIEIFSDVVAKMNYDDCKGHPTWMEHEEFAGNATEEAPLALVTPHSKYRLHSQLAYSALRKLYAVNDREPVLINTEDAAARGIANGDIVRIFNKRGQVLAGAVVTDGIIKGTVALHEGAWYDPMDLGKSEQPLCKNGNPNVLTRDEGTSKLAQGNSPNTATVQVEKFTGVAPEVTVFKEPKYTQA

SEQ ID NO: 10344 - protein, 477 aa, Triticum aestivum
MQRLASSRRLLQAALAPGRAHSSLSAAAVAAAPENGAGAPKMPPFAYTPPPYDGPRVAEIAQKRAQFLSPSLFHFYDRPLNIVDGKMQYLFDEDGRRYLDAFGGIATVCCGHCHPDVIEAIVNQAKKIQHSTVLYLNHAIADFAEALAAKMPGDLKVVFFTNSGTEANELALMIARLYTGSHDIISLRNGYHGNAAATMGATAQANWKFNVVQTGVHHALNPDPYRGAFGSDGEKYARDIQETIDYGTTGRVAGFISEAIQGVGGILELAPGYLPAAYDMVRKAGGLLIADEVQAGVARTGSHFWGFEGQGVIPDIVTMAKGIGNGIPIGAVVTTPEIAKVLTRRSYFNTFGGNPVSTAAGHAVLKVLEKEKLQENAFVVGSYLKEKLNALKEKHDIIGDVRGKGLLLGVELVTDRQKKTPAKAEIAQVMNHMKDMGVLVGKGGFFGNVFRVTPPLCFSKEDSDFMIEVMDIALSKL

SEQ ID NO: 10345 - protein, 380 aa, Staphylococcus aureus subsp. aureus N315
MNKKTKLIHGGHTTDDYTGAVTTPIYQTSTYLQDDIGDLRQGYEYSRTANPTRSSVESVIAALENGKHGFAFSSGVAAISAVVMLLDKGDHIILNSDVYGGTYRALTKVFTRFGIEVDFVDTTHTDSIVQAIRPTTKMLFIETPSNPLLRVTDIKKSAEIAKEHGLISVVDNTFMTPYYQNPLDLGIDIVLHSATKYLGGHSDVVAGLVATSDDKLAERLAFISNSTGGILGPQDSYLLVRGIKTLGLRMEQINRSVIEIIKMLQAHPAVQQVFHPSIESHLNHDVHMAQADGHTGVIAFEVKNTESAKQLIKATSYYTLAESLGAVESLISVPALMTHASIPADIRAKEGITDGLVRISVGIEDTEDLVDDLKQALDTL

SEQ ID NO: 10346 - protein, 203 aa, Neurospora crassa
MNPEYDYLFKLLLIGDSGVGKSCLLLRFADDTYTESYISTIGVDFKIRTIELDGKTVKLQIWDTAGQERFRTITSSYYRGAHGICVVYDVTDMDSFNNVKQWLQEIDRYATEGVNKLLVGNKSDMTDKKVVEYTVAKEFADSLGIPFLETSAKNASNVEQAFLTMARQIKERMGSSIATNNTKASVNVSPGHGVSNNSSGGCC

SEQ ID NO: 10347 - protein, 476 aa, Zea mays
  unsure (1)..(476): unsure at all Xaa locations
MAAAAVTSNGGAVAANGPAPGRLASVYSEVQTSRLLHTLPLPSVLRSNFSVVDGPASSAAGNPDEIAKLFPNLFGQPSASLVPSAEPAATRPLKVGVVLSGGQAPGGHNVICGIFDYLQERAKGSTLLGFKGGPAGIMKCKYVELTSDFVYPYRNQGGFDMICSGRDKIETPEQFKQAEDTANKLDLDGLVVIGGDDSNTNACLLGEYFRSRNLKTRVIGCPKTIDGDLKCKEVPTSFGFDTACKIYSEMIGNVMTDARSTGKYYHFVRLMGRAASHITLECALQTHPNAALIGEEVAAKKETLKNVTNYITDIICKXADLGYNYGVILIPEGLIDFIPEVQKLIAELNEILAHDVVDEAGAWKSKLQAESRELFEFLPKTIQEQLMLERDPHGNVQVAKIETEKMLISMVETELEKRKAEGRYSAHFRGQAHFFGYEGRCGLPTNFDSNYCYALGYGAGALLQSWEDRRRFQRGL

SEQ ID NO: 10348 - protein, 551 aa, Rubrobacter xylanophilus DSM 9941
MRFLREGQRLNQVEKWKLERHPLDVREAVLEVYSKEGVEAIERVPGEHERLKWVGIYPQNQGGNNFMQRIKVPGGRLTPEQARVIGRIARDFARGPEPNPHFGNNFLDITTRQDIQMHWIQIEEVPEIWRRLEEVGMTTVQACGDSARNVLCCPVSGLDREEAFDAYPAAQAITAYFVGNREYANLPRKFKMSVTGCLEDCAQAEINDIGMLPARLPDGTLGFNVRVGGGLGDGPRMASDIDVFVLPGEAVEITRGIAQVYGELGNRENRWINRLRYLVQELGPEGFREELEKRVSIPLRPAGEDLTRRYRGDHVGVHPQKESGLYYVGLNVPVGRMSGEQFEEAGRLAGEYGRDIRLATDQNLIITGVPEGRLDDLLSEPLLRRYSPDPGPFERGIVACTGSEFCRFAIVETKIRALEWAREMDRRFGDEIGQEAVRMHFSGCSASCAQPQIADVGFRGETAKKGDRIVEGVDIGLGGSLGRDAAFIDWVEGARPAEDVPEALSRVFERFRRERREGERFHEWARRVRNAELRDTLRGTSVPVVGTREGR

SEQ ID NO: 10349 - protein, 317 aa, Shigella flexneri 2a str. 2457T
MTDKLTSLRQYTTVVADTGDIAAMKLYQPQDATTNPSLILNAAQIPEYRKLIDDAVAWAKQQSNDRAQQIVDATDKLAVNIGLEILKLVPGRISTEVDARLSYDTEASIAKAKRLIKLYNDAGISNDRILIKLASTWQGIRAAEQLEKEGINCNLTLLFSFAQARACAEAGVFLISPFVGRILDWYKANTDKKEYAPAEDPGVVSVSEIYQYYKEHGYETVVMGASFRNIGEILELAGCDRLTIAPALLKELAESEGAIERKLSYTGEVKARPARITESEFLWQHNQDPMAVDKLAEGIRKFAIDQEKLEKMIGDLL

SEQ ID NO: 10350 - protein, 241 aa, Enterobacter aerogenes
  unsure (1)..(241): unsure at all Xaa locations
VDCCARVXHGPSVAGLHQSVGNGAMSNAITEIDNTDLVFIFGYNPADSHPIVANHVINAKRNGAKIIVCDPRKIETARIADMHIALKNGSNIALLNAIGHVIIEEDLYDKSFVASRSEGFEEYRKIVEGYTPESVEEITGVSAQEIRACARMYASAKSAAILWGMGVTQFYQGVETVRSLTSLAILTGNLGKPSVGVNPVRGQNNVQGACDMGALPDTYPGYQYVKFPENREKFARAWGVD

SEQ ID NO: 10351 - protein, 384 aa, Pleurotus sajor-caju
MPTQEVFDKQDGAVYTTSNGAPVAEPYAAQRAGLHGPLLLQDFHHIDLLAHFDRERIPERVVHANAAGAHGYFEVTHSCADITSNKLLCSVGKKVRLTARFSTVGGESGSADTARDPRGFALKLRTEEGNWDWVFNNTPIFFIRDPAKFPHFIHTQKRDPQTHLKDADMFWDYLGQNPESIHQMMILFSDRGTPDGVRQMHGYSGHTFKWLKDDGSFTYVQVHCRADSGFKTLDGDTAHRLTADNPDYSTEMLFRTIEAGKFPSWTVYIQTMTPEQAENFRYNILDLTKVWPHKEFPLRPIGRFVLDENPKNYFAEIEQAAFAPSHLVPYIEPSADPVLQSRLFSYPDTHRHRLGANYHQIPVNAPIVPVANFQRDGPMTVNNN

SEQ ID NO: 10352 - protein, 206 aa, Brassica oleracea
MAAFEESSDLDAIQEHLLEDFLVADGFMGDFDFNASFVSGLWCIEPVMNQVPKQEPDSPVLDPDSFVREFLQVEAESSSEQNSSPHETDQSVSPRKEAKRLEEEEEPRHYRGVRRRPWGKFAAEIRDPAKKGSRIWLGTFESNVDAARAYDCAAFKLRGRKAVLNFPLDAGKYEAPVNLGRKRKRSDVQEELQRSQSNSSSSSSDL

SEQ ID NO: 10353 - protein, 116 aa, Glycine max
MVFWEGYVSDELMGTFAPIVLYWVYAGFYHLLPPLDRYRLHTRRDEETKNLVPFSTVVKGVLLQQLVQAIVALFLLTATASASGVIVQPSIPKQILQIAIAMFVMDTWQYFVHRYM

SEQ ID NO: 10354 - protein, 309 aa, Salmonella typhimurium LT2
MTQFAFVFPGQGSQSVGMLAEMAANYPIVEETFAEASAALGYDLWALTQQGPAEELNKTWQTQPALLTASVALWRVWQQQGGKMPALMAGHSLGEYSALVCAGVINFADAVRLVEMRGKFMQEAVPEGTGGMSAIIGLDDASIAKACEESAEGQVVSPVNFNSPGQVVIAGHKEAVERAGAACKAAGAKRALPLPVSVPSHCALMKPAADKLAVELAKITFSAPTVPVVNNVDVKCETDAAAIRDALVRQLYNPVQWTKSVEFIAAQGVEHLYEVGPGKVLTGLTKRIVDTLTASALNEPAALSAALTQ

SEQ ID NO: 10355 - protein, 102 aa, Oryza sativa
  unsure (1)..(102): unsure at all Xaa locations
MAPYVMAASVTTVAPLQGLKFTGGMPVDRRSGNFSFGNVSNGRRIKCMQVWPIEGIKKFETLSYLTPLTVEDLLKQIXYLLRSKWAPWLEFNKVCLDYRENH

SEQ ID NO: 10356 - protein, 641 aa, Bordetella parapertussis 12822
MCGIVGIWGPLRDKANVLAESCRRIRHRGPDSNGYWEDAEADLALAHVRLAILDLTEAGHQPMVSACGRYVIVLNGEIYNHMELRERLQQDGLAPAWRGHSDTETVLACFAGWGLEQTLQAAVGMFAIALWDRAERKLALMRDRMGEKPLYYGYSQANLLFGSELKAFMPVPGFGRELDRNALASFMRHNYIPAPQSIYAGIRKLPPGAWVEIDAAQMRRGELPEPQVYWSARRAADQGLGDRRRFESDAQAIDALEQVVSQAVRGQMLSDVSLGAFLSGGIDSSTVVALMQAQSAQPVRTFAIGFHEKGYNEAEHAKAVAAHLGTEHTELYVTAEDGLAVVPSLADMYDEPFADSSQIPTSLVTRMARQHVTVALSGDGGDELFGGYSRYFRVDNWWRKCAAMPGPLRHLAGAALRGSAALPGAGAWRGKVGKLGELLGADTRGEFYRLFVSYWADPGRVVIGGTEPLSPFEQPMEGSTFDAMMKLDTVTYLPDDILVKVDRAAMAVSLETRVPLIDHRVYEFAWQLPFEYKVRGGTGKWLLRQLLYRHVPQAMVDRPKRGFAVPLAAWLRGPLRDWAEALLDPARLRQEGWFEPEPILRKWREHLSGHRNWDSHLWGVLMMQAWLDRYRAGAGDEAGRR

SEQ ID NO: 10357 - protein, 561 aa, Mesoplasma florum L1
MVFDKNNKVYSEWINSQKLDDELKSLLVNATDDELHAAFEGIELEFGTAGIRGILGAGPGRFNVYTVKKVTIAFAELLKQNYPNRLNDGIVVGHDNRHNSKQFAKVVAEVLSSFGIKAYLFKENEMMPTPVVSYATKFLNCIGGIVITASHNPSEYNGYKIYDPYGCQLQDEQTAIIAKRMDEITDILNWEYKINDSLIETVSENVIKEYVDMIKNLEFYKKEQEAKKDLKIIFSAVNGTGTKFTPKILRESGYNVIEVEEHAFEDETFKNVVNPNPEFDPAWKIPLEYGIKHDADIIIMNDPDADRFGMAIKHDGHFVRLDGNQTGPILIDWKLSNLKRLNSIPKNPALYSSFVTSDLGDRIAHEKYGVNIVKTLTGFKWMGREIAKEEDNGLNFVFAYEESYGYVIDDSARDKDGIQASILIAEAAWFYKKQNKTLVDYLEDLFKEMGAYYTFTLNLNFKPEEKKLKIEPLMKSLRATPLTQIAGLKVVNVEDYIDGMYNMPGQDLLKFYLEDKSWFAVRPSGTEPKLKIYFIGVGESVQNAKVKVDEIIKELKLKMNI

SEQ ID NO: 10358 - protein, 268 aa, Gossypium raimondii
GAWTKEEDQRLINYIRVHGEGCWRSLPKAAGLLRCGKSCRLRWINYLRPDLKRGNFTEEEDELIIKLHSLLGNKWSLIAGRLPGRTDNEIKNYWNTHIKRKLISRGIDPQTHRPLNQTANTNTVTAPTELDFRNMPTSVSKSSSIKNPSLDFNYNEFQFKSNTDSLEEPNCTASSGMTTDEEQQEQLHKQQQYDPSNGQDLNLELSIGIVSADSSRVSSANSAESKPKVDNNNFQFLEQAMVAKAVCLCWQLGFGTSEICRNCQNSNS

SEQ ID NO: 10359 - protein, 364 aa, Neurospora crassa
MASLLNQLRGLTTVDCDTLDAHGEQHNTAISAENKAIVLAEITKLDANGKLIYQTLIDEIIPIAHWMFGNQTDATVEELASELLAVGLALRFIPHLNGFIHIQTNPKWCYSTEKTVKNAERIVAHLKHLAPDFDTSRICIKIPATWEGLQACRELERRHSIATLATIVFSMEQVALAVDAGCRYVAPYVNELRVHFDATYTDANKDRAALFCGAAQRYCDEVASSASAAEAAHGSLNLQMQTQVMAASLTSVEEVMRLAGAVKHITVSPPLLMELEATPAAGWPGASTVGAAAAITGSRVNGDAVRLRELVRDQSQWRLAFTRAEAGESERKLGQAIGIFCDMQDQLERLVRRWDLTGKKYARG

SEQ ID NO: 10360 - protein, 422 aa, Actinobacillus pleuropneumoniae serovar 1 str. 4074
MNFETLCLHAGYTPKNGEPRALPIVQSTTFTYDSAESIGKLFDLEEAGFFYTRLANPTTNAVEEKIAALEGGVAAMCTASGQSAVFYALMNLLESGDHFISASSIYGGSYNLFAHTFRKMGIEVTFVDQFAPIEELKKAIRPNTKAVFGETIANPALRVLDIEKFAALAQAAECPLVVDNTFATPYFCRPFEFGANIVVHSSSKYLDGHAVALGGVIIDGGNFDWNNPKFKAFHQPDETYHGLVYTETFGKAAYMVKARVQLMRDLGATPAPQNSFLLNLGLETLSLRMKQHFANAKAVAEFLEAHPQVKSVYYPALASSPDFALQQKYTPNGLCGVLSFELKGNKETAMKWLNALKLVSREVHVADIRTCALHPATSTHRQLSTEDLKAANISETLIRLSVGIETLEDILADLTQAFEQAV

SEQ ID NO: 10361 - protein, 521 aa, Bordetella parapertussis 12822
MPTPLPSSSAWLAFADAARHSSRRGARLRVIEAAGLRVDLTAQAHSDDLDSAAEDLLAQQDFDNARAQLFDGGPANWTEHRPAWHTALRAARPPTPVAGAILGERDRLRRFVQDADMRGAYRHVLHLGIGGSDWGPRMVTRALRHNGLKREVRFASNVDSHAVADALHHLDPHDTLIIVASKSFTTTEPLANAEVAMNWLRNAGVADPVRQVVAITANVDAALDFGISPQHIFRFWDWVGGRYSLWSAIGLPVALALGCDALDELLAGAAAMDQHFLHTPMRRNAPLQMALAGVANRSVLGYGSLAITPYDSRLTHLVPWAQQLEMESLGKVAGHDGSPAGVPTGPVVWGMTGTDCQHTFFQWLHQDTAGAPVDFIVCEQADHPYDHFHKLLIANCLAQRAALLRGKPFDEALKEARLVESDPQQAEILAHHRVHPGGRPSTLIMLPRLSAHALGALLAMYEHKVFAQGVLWGINPFDQWGVEYGKALARNIIRELENPSSEVNQQDPSTRYWIDALRKQP

SEQ ID NO: 10362 - protein, 265 aa, Gossypium herbaceum
TKEEDQRLINYIRVHGEGCWRSLPKAAGLLRCGKSCRLRWINYLRPDLKRGNFTEEEDELIIKLHSLLGNKWSLIAGRLPGRTDNEIKNYWNTHIKRKLISRGIDPQTHRPLNQTANTNTVTAPTELDFRNSPTSVSKSSSIKNPSLDFNYNEFQFKSNTDSLEEPNCTASSGMTTDEEQQEQLHKKQQYGPSNGQDINLELSIGIVSADSSRVSSANSAESKPKVDNNNFQFLEQAMVAKAVCLCWQLGFGTSEICRNCQNSNS

SEQ ID NO: 10363 - protein, 263 aa, Gossypioides kirkii
AWTKEEDQRLIDYIRVHGEGCWRSLPKAAGLLRCGKSCRLRWINYLRPDLKRGNFTEEEDELIIKLHSLLGNKWSLIAGRLPGRTDNEIKNYWNTHIKRKLISRGIDPQTHRPLNQTANTNTVTAPTELDFRNTPTSVSKSSSIKNPNFNYNEFQFKSNTDSLEEPNCTASSGMTTDEEQQEQLHKKQQHDPCNGQDLNLELSIGIVSADSSRVSSANSAESKPKLDNNNFQFLEQAMVAKAVCLCWQLGFRTSEICRNCQNS

SEQ ID NO: 10364 - protein, 160 aa, Gloeobacter violaceus PCC 7421
MATVSDITVQTVDGQARSLGRYKGQVLLIVNVASYCGYTPQYAGLEKLYRRYKDAGLRVLAFPCNDFGGQEPGSNAEIAEFCSRYDVSFELFDKVGARGYYKHPLYVRLSEAAEPAGEVSWNFEKFLIAKSGEIVGRYRSGIGPEDPQLVADIERELAKS

SEQ ID NO: 10365 - protein, 648 aa, Zea mays
MIHPLVLSLPSPAIISRPRRPRHHTTTPSLPSHSRSLHHYRLLRVTPLVASCGYRRRIVRGASATMGLFTVTKKATTPFEGQKPGTSGLRKKVTVFQQPHYLQNFVQSTFNALPADQVKGATIVVSGDGRYFSKDAVQIITKMAAANGVRRVWVGQNSLMSTPAVSAVIRERIGADGSKATGAFILTASHNPGGPTEDFGIKYNMGNGGPAPESVTDKIFSNTTTISEYLISEDLPDVDISVVGVTSFSGPEGPFDVDVFDSSVNYIKLMKTIFDFEAIKKLLTSPKFTFCYDALHGVAGAYAKHIFVEELGADESSLLNCVPKEDFGGGHPDPNLTYAKELVERMGLGKSSSNVEPPEFGAAADGDADRNMILGKRFFVTPSDSVAIIAANAVQSIPYFASGLKGVARSMPTSAALDVVAKNLNLKFFEVPTGWKFFGNLMDAGMCSICGEESFGTGSDHIREKDGIWAVLAWLSIIAFKNKDNLGGDKLATVEDIVRQHWATYGRHYYTRYDYENVDAGAAKELMANLVSMQSSLSDVNKLIKEIRSDVSEVVAADEFEYKDPVDGSVSKHQGIRYLFGDGSRLVFRLSGTGSVGATIRVYIEQYEKDSSKTGRDSQEALAPLVDVALKLSKMQEYTGRSAPTVIT

SEQ ID NO: 10366 - protein, 367 aa, Neurospora crassa
MGKKKRGHPDVEELLARPWCYYCERDFEDLKLLISHQKAKHFKCDRCGKRLNTAGGLSVHMNQVHKESLDKVENALPNRQGLDIEIFGMEGVPDDIVQQHNQRIITNFYTAQAERHAATGNPPPGQAGGQGPAKKIKIETPEELKKRLADHRAKVAAIKANGGVLPVPVVAPKAQPASVSPVTGQSPAQGASPFPPPQPGFPYPPPVGVPGAFPPPGQPGVVGAYPPVYPPPGATPTPPGAPGGPGFNLPARPTGGALPQRPPYYNNYNGGAVPPPGAYPGGASTVDELVSGAARQGGGGAQGDEIDQLIRAAEQGSKAPARAGEDSAGGEKKGKSKDKNMRMVYGDSEVSPEEKMALLPRYAVSAA

SEQ ID NO: 10367 - protein, 642 aa, Desulfovibrio vulgaris subsp. vulgaris str. Hildenborough
MAAHPLRAIGACTLDCPGCCSLVVTTDAEGKPHVSGNPDHPFTQGSICRKGRRMFERLHAPDRVTTPLVRQGDALRPASWDEALGLCATRIDALRDMPERILHIRGFGFRGALAEASRYLFRSLGASATRGSLCDEAGLAASELDFGDNDQHAPADLANASAIVNWGKDLTRSSHHLSLIVRERRKAGIPVLTISPGGDANDAFTDARIRIRPGTDRFLAAAALRRMVIAGDIPPPVIAACTGFEHLRALLLAHEESDLLHTCDARPTDLELLLRWFRSNGGRTATLLGWGMQRHVAGGENVRWVDALAMLSGNVGHAGGGVYYGISSSRNIDARWGKEAGTPARTLCLPLLAHELEQADPPVDFVWVDGSNVVNQIPEATRAAKAFERCGFKVVVDAFLTDTARRADVVLPCALLLEREDILGSYQHDNVQYAAAIFPPPGAAREDFDIIRDLGARLSSPVALPPREDILRRAIDTPNLEVSLEELRERGFSTADRPQVAYEGMRFAHDDGKFHLVDRLSPEPALTQEYPLYLLTVVRATHLHSQMPEDAQQGQPTVHVAPDCTTLAHLDITRPARLVSPYGEMPVRVETLPGLHPDAVMMGRGGWLATGWCPNVLIGARLTDVGEGAAYYSQTVRLEKMD

SEQ ID NO: 10368 - protein, 199 aa, Oryza sativa (japonica cultivar-group)
MRRGGAAEEDAEAARFRGVRKRPWGRYAAEIRDPAKKARVWLGTYDSAEDAARAYDAAARALRGAKAKTNFPLSLPHAQPQLHHHHHHHLTYPAAAVVAARPATSSLSSTVESFGTRPRPVLPPRPPPPPPIPDGDCRSDCGSSASVVDDDCADAAASPSCRLPFQFDLNLPPGGGGGGGGGFGCAYDDEELRLTALRL

SEQ ID NO: 10369 - protein, 478 aa, Xanthomonas axonopodis pv. citri str. 306
MSEQFDVVVIGAGPAGYHAAIRAAQLGMKVACIDAALGKDGKPALGGTCLRVGCIPSKALLDSSRQFWNMGHLFGDHGISFNDAKMDVPTMIGRKDKIVKQFTGGIAMLFKANKITPYYGFGQLQPGNIVKVTQHEGGEIELKGTNVILAAGSESIELPFAKFDGDTIVDNVGGLDFTAVPKRLAVIGAGVIGLELGSVWKRLGAEVTILEALPDFLALADAEVAKTALKEFKKQGLDIKLGAKVGKTEITGSDDAKQVVLSYTDATGEQTLTVDKLLVAVGRKAATKNLLADGTGVKVTDRGQIEVDGHCHTGVDGVWAIGDCVRGPMLAHKGFEEGIAVAELIAGLPGHVNFDTIPWVIYTEPEIAWVGKTEQQLKAEGVAYKAGSFPFAAIGRAVAMGEPAGFVKVIADAETDRVLGMHLVGVGVSELVHEGVLTMEFSGSADDLARICHAHPTLSEAIHDAAMAVSKRAIHKAN

SEQ ID NO: 10370 - protein, 392 aa, Methylobacillus flagellatus KT
MSQHEWHAETLGVRAGSEHTPFGENSEAMFLTSSFVFENAAQAAARFGGQEPGNIYSRFTNPTVSMFQNKLAALEGAEFCVATSSGMSAILACVMGVCSAGDHVVASRSIFGTSVQLFSNILKRWGLETTFVQLSDPEAWTAAVKPNTKLFFLETPSNPLTEICDIAVVAEIAHQAGALLAVDNCFCTPALQKPLALGADIVVHSATKYIDGQGRCLGGAVLGRKDVLEPVYGFLRTAGPTMSAFNAWVFLKGLETLHLRMEAHARNALALAQWLEQQPRVERVYYPGLPSHPQYALAQKQQKSGGAIVSFDVKGGQPAAWHLIDATRMLSITANLGDAKSTITHPATTTHSRVSAEARAAAGIGDGLVRIAVGLEHIDDIKADLAWLGHQD

SEQ ID NO: 10371 - protein, 403 aa, Xanthomonas axonopodis pv. citri str. 306
MATEVKVPVLPESVSDATIASWHKKAGEAVKRDENLVDLETDKVVLEVPSPVDGVLKEIKFETGSTVTSNQILAIIEEGAVAAAAPAEEKQAAAPAATAAAPAAAPAPAAAAAPAASKSAADSLPPGARFSAITQGVDPSQVEGTGRRGAVTKEDIVNFAKAGGVGKASGARPEERVPMTRVRKTIAKRLMESKNSTAMLTTFNEVNLAKVSAARKELQDEFQKAHGIKLGFMSFFVKAAANALQRFPLVNASIDGDDIIYHGYSDISIAVSTDKGLVTPVLRNVERQSFADVEQGIADYAAKARAGKLGLDDLQGGTFTITNGGTFGSLLSTPIINPPQSAILGMHAIKERPIAENGQVVIAPMMYLALSYDHRIIDGKDSVQFLVDIKNQLENPGRMLFGL

SEQ ID NO: 10372 - protein, 554 aa, Vibrio cholerae O1 biovar eltor str. N16961
MCSIFGILDIKTDAATLRPIALEMSKKLRHRGPDWSGIYASDKAILAHERLAIVGLNSGAQPLYSPDRKLILAVNGEIYNHKEIRERYKGQYEFQTDSDCEVILALYRDKGADLLEELNGIFAFVLYDEEKDEYLIGRDHIGIIPLYQGHDEHGNFYVASEMKALVPVCKTLSEFPPGSYLSSKDQAVTRYYVRDWNSFDEVKDNVSSKEELTQALEAAVKRQLMTDVPYGVLLSGGLDSSITSAIAKRFAAMRIEDDEKSAAWWPQLHSFAIGLEGAPDLKAAREVAEKIGTVHHEMTYTIQEGLDAIRDVIYHIETYDVTTIRASTPMFLMGRKIKAMGIKMVLSGEGADEIFGGYLYFHKAPNAKEFHEETVRKLLALNLFDCARANKSLAAWGVEGRVPFLDKEFIDVAMRLNPADKMCGNGKMEKHILRECFEHYLPESIAWRQKEQFSDGVGYGWIDTLKATAEAKISDQQMETAKFRFPYNTPTTKEGYVYREIFEELFPLESAARCVPGGPSVACSSAKAIEWDESFKNCIDPSGRAVKAVHKQAY

SEQ ID NO: 10373 - protein, 364 aa, Trichodesmium erythraeum IMS101
MKALILSGGKGTRLRPLTYTGTKQLVPVANKPILWYGIEGIIAAGVTDIGIIISPETGEEVQELTGNGEKFGGNITYILQDKPAGLAHAVKTAQPFLGDSPFIMYLGDNIIESQLGNFLDTFKKKQLDALILLRKVPNPTAFGVAKIDDNGRVLRLVEKPKVPPSDLALVGVYLFSKKIHNAIANIKPSERGELEITDAIQYLIDQQISGEEPEISVEASILEGWWLDTGKKDDLLSANQIILDTRIIKSINGEIDSKSKIIGRVKMGKNTKLINSSVRGPVIIGDNCYLENCFIGPYSSIADNVTLIDVDIEHSVILQGAKIIEINQRIVDSLLGRRAQLINAPQHPKALRFMIGDDSQIELT

SEQ ID NO: 10374 - protein, 577 aa, Erwinia carotovora subsp. atroseptica SCRI1043
MSEKYVFSEKHPGPLVVEGKLTDAERMKTESNFLRGTIAEDLNDGLTGGFKGDNFLLIRFHGMYQQDDRDIRAERAEQKLEPRHAMLLRCRLPGGVMTPQQWLRIDKFAGENTIYGSIRITNRQTFQYHGILKSNVKPVHQMLNSIGLDALATANDMNRNVLCTSNPIESELHQQAYEWAKTISEHLLPRTRAYAEIWMDQEKVATTDEEPILGSTYLPRKFKTTVVVPPQNDVDLHANDLNFVAIADNGRLVGFNVLVGGGLSIAHGDKETYPRTASELGYISIEHTLAIAEAVVTTQRDWGNRTNRKNAKTKYTLERVGVDNFKQEVEARAGVKFEAVRPYEFTERGDRIGWVKGIDNKWHLTLFIENGRILDYPGRPLKTGLAEIAKIHKGDFRLTANQNLIVAGVPARSKAKIDALAREHGLIDDSVSEQRKNSMACVSFPTCPLAMAEAERFLPEFVTKVEGIMQQHGVGDEHIVLRVTGCPNGCGRSMLAEIGLVGKAMGRYNLHLGGNREGTRIPRMYRENINETEILAEIDRLVGLWAQDRLQNEGFGDFVIRTNIIRPVLDPARDFYD

SEQ ID NO: 10375 - protein, 259 aa, Triticum aestivum
MGGGSRSRAKEADGESEVRPGGMFVQRRDGEEGPTVRLRVSHGPALRDVFVPAQATFGELKRILAQTIGLEPERQRLFFRGKEKRDDEFLHASGAKDGAKLLLLEKHVPANVEQKVEPVMMDESMMRACEAVVRVRSEVDKLSAKVCELEKSVLAGKKVEDKEFVVLTELLMVQLLKLDGIEAEGEARAQRKAEVRRVQNLVETLDKLKARNANPFSDSAKSVSVSTEWETFENGVGSLNAPPARFSSTQNDTDWEQFD

SEQ ID NO: 10376 - protein, 136 aa, Lactobacillus delbrueckii subsp. lactis
  unsure (1)..(136): unsure at all Xaa locations
AGGTXVXINAGITALVLSIFLGPRYQKQTRPYSLPWVLLGTAILWLGWYGFNAGSAFGMNQTALTACLTSTVAAAASMMTWLLLEETFSGKASLDGICTGTLCGLVGITPGAGYETCAGALFTGILCSLASYFFIS

SEQ ID NO: 10377 - protein, 462 aa, Streptomyces seoulensis
MANDASTVFDLVILGGGSGGYAAALRGAQLGLDVALIEKDKVGGTCLHKGCIPTKALLHAGEIADQARESEQFGVKATFEGIDVPAVQKYKDDVISGLYKGLQGLIASRKVTYIEGEGRLSSPTSVDVNGQRIEGRHVLLATGSVPKSLPGLQIDGDRIISSDHALVLDRVPKSAIILGGGVIGVEFASAWKSFGADVTVIEGLKHLVPVEDENSSKLLERAFRKRGIKFSLGTFFEKAEYTQDGVKVTLADGKEFEAEVLLVAVGRGPVSQNLGYEEQGVNIDRGYVLVDEYMRTNVPTISAVGDLVPTLQLAHVGFAEGILVAERLAGLKTVPIDYDGVPRVTYCHPEVASVGITEAKAKEIYGADKVVALKYSLAGNGKSKILKTAGEIKLVQVKDGAVVGVHMVGDRMGEQVGEAQLIYNWEALPAEVAQLIHAHPTQNEALGEAHLALAGKPLHAHD

SEQ ID NO: 10378 - protein, 379 aa, Cucumis melo
MPSLTAPHGLPLFLFLLLFLFSSVSAQFQPAPDPRSDPYQYRLSGSMAVIIVILIAALFFMAFFSVYIRHCNDSPSNTVRPITAAAGRSRRATRGLDPAVIETFPTLIYSDVKEHKIGKSALECAVCLNEFEDDETLRLIPKCDHVFHPECIDAWLASHSTCPVCRANLSPQPTDSVHRADDSNAVVNSDTDGGDIEAQSNDVVSETTAPPTVQIQTESELSTTTSNKALNRTRTRGSRSNRLRWLFPRSHSTGHSLVQPGEDTERFTLRLPVEIRKQVVNRKLHRATSMVVLARQSSSMRGYRFGSGEGSSRGKYYRRLERLDRTSKSDRWVLSMTPPFFTRMSSMKTPRGGSNRAEPGSGRELGQGNTAVDSSRLPV

SEQ ID NO: 10379 - protein, 383 aa, Cytophaga hutchinsonii
MQQSYTSKLPDIGVNIFSTMSALAQQYKAVNLAQGFPDFAPSEELIRLVHDYMLKGFNQYAPLAGVRPLVVNLAEKTEKLYGLSYDPDTEITITCGATEACYTALTSILHEDDEVIIPEPCFDVYLPAIQLSKAKAVFVPLTLPDFSYDWELIRSKVTPRTKLIIINSPHNPTGSILTAKDVEQLQLLVEAYPGLYVLSDEVYEHIVFDGNKHISISGNPVLKERAFIIGSFGKTYHVTGWRLGFCLAPAYMMKEFKKVHQYNTFSPVAPMQFAVADFMKKTDEYESLPAFFQNKRDLFLRHIKESKFDVIPASGTYFQMLSYKNISDENDLDFAARLTREFGLASIPVSVFYNDKTDHKLLRFCIAKKEETLLKAAHILCKI

SEQ ID NO: 10380 - protein, 329 aa, Microbulbifer degradans 2-40
MLDTKPLLLNSDFPAINRGALSVLQVNLGYLCNLSCTHCHVNAGPKRTELASLETISAILAYIDLTGVTTLDLTGGAPEMNPHFKYLVREASARNVTVIDRCNLTILNEPGYEDLAEFLALHQVVVSASLPCYSEKNVNEQRGKGVFGSSITALQKLNKLGYGTSENLSLNLVYNPNGPFLPPSQQALQQDYKQKLAQDFGISFNELLTITNMPISRFGSMLLSKGLYEDYLQLLKDNFSAANLAGVMCKNLISIDWQGYVYDCDFNQMLDMPLQTHSAGAKGMIASDAKRTHISDLLQQDITGNPIVIGDHCYGCTAGQGSSCGGALA

SEQ ID NO: 10381 - protein, 443 aa, Triticum aestivum
  unsure (1)..(443): unsure at all Xaa locations
MKPEQATHNKMTTAASSPSPVVGLRGVVSSLVAFFIVVSSVSLLFDRGHESQVQLAVQHRHQEVKVAAAGRREAQVQWTDELMGEAVRGSGEECNWSXGRWVYDNASQPLYSGLNCSFSFDEVAXEKYGRNDTRYXYWRWQPDGCDLSRFNATKLLEKLRNKRMVFVGDSINRNQWVSMVCMVEASIPEGQKMRVYNGSLISFTAFEYNATIDFYGPPLILESNSDNPIIHRVEYRIIRAEKIEKHARAWGNADVIVFNSYLWWRKQKPDMKMKVMYGSFEDGDAKLDEVEMVEGFEIALKKLTEWVGANVNNKTKIYFAGSSPTHTWASDWGGDDSNKCLNESEPIQKVGYKGATTDYSMMDKAKQIFRPLEQKGINVQILNFTQLTDYRIDAHPTVFRRQFTPLTKEQIANPSSYADCTHWCLPGVPDVWNHFLYSYLVQK

SEQ ID NO: 10382 - protein, 410 aa, Zea mays
  unsure (1)..(410): unsure at all Xaa locations
ALCIWCPLRSRSISAGTVPVRHGGRTGSPKPIHCKAAVCRAAGEPLTIEEIVVDPPKAYEXRIRVICTSLCHTDITFWKAKVAPVFPRILGHEAYGVVESVGEHVEGFAAGDTVVPTFLGQCERCASCASEHSNVCDGGAVRHRPRDAARRHHXRFRDRAGGAPLHDLLAVSSFSEYTXVVDVNQVVKGRTPAVPPKLACLLSXAAPAPGVGAAWRSAKVEPGSTVAIFGLGSVGLAVVQGAKMCGASKIIGVDLNPDKEEVGRSFGVTDFVNPSQLDKRSVVEVIVEMTGGGVDYSFECIGXPSVMTDAFRCTKMGKGKTIVLGLGRDSDEVCLPSLELLFGRCVMGSLFGGLKPKTHIPVLAKKCMDKELQLDALVTHELGLQDINKAFDLLLQGKSLRCILWMDKDK

SEQ ID NO: 10383 - protein, 420 aa, Agrobacterium tumefaciens
MSEKRVQPLARDAMAYVLAGGRGSRLKELTDRRAKPAVYFGGKARIIDFALSNALNSGIRRIGVATQYKAHSLIRHLQRGWDFFRPERNESFDILPASQRVSETQWYEGTADAVYQNIDIIEPYAPEYMVILAGDHIYKMDYEYMLQQHVDSGADVTIGCLEVPRMEATGFGVMHVNEKDEIIDFIEKPADPPGIPGNEGFALASMGIYVFHTKFLMEAVRRDAADPTSSRDFGKDIIPYIVEHGKAVAHRFADSCVRSDFEHEPYWRDVGTIDAYWQANIDLTDVVPDLDIYDKSWPIWTYAEITPPAKFVHDDEDRRGSAVSSVVSGDCIISGAALNRSLLFTGVRANSYSRLENAVVLPSVKIGRHAQLSNVVIDHGVVIPEGLIVGEDPELDAKRFRRTESGICLITQSMIDKLDL

SEQ ID NO: 10384 - protein, 213 aa, Glycine max
MSRTLVQPIGQKRLTNVAVVRLKKHGMRFEIACYPNTVLSWRSGVEKDPDEVLQSHTVYTNVSKGVLAKSKDLISAFGTDDHSKICLDILKKGELQVAGKERESLLSSQFRDIATIVMHKTYNPETQRPYTISMIERLMREIHFAVDPHSTSKKQALELIQELQKHFPIKRCPLRIRATAPDDQVPELLGKLNEWNATGISKEGSSAQVSGIF

SEQ ID NO: 10385 - protein, 420 aa, Synechococcus elongatus PCC 7942
MVHQPPAGTRDLLPQDVTQKRWIESRLQQVFQQWGYQRIITPTLERLDTLVAGGAVQRSAVIQVQSDEESGLGLRPELTASIARAAVTRLAGSSLPLRLYYLANVFRPAFQGDRLQQRELFQAGVELLGVGGTLADAEVLHVLADALAELGFGQPPLGSWHLVVGEASLTRSLLQPFPKDLREKVRQAIAQLDRVTLESLPLESQLRDRALLLHDLRGQPDQVFAKLQQLTLTPLEQTLRDRLAQLVELYNASAGPQDSPLLLDLSLLRSFDYYTGIVFEVVYETPTGPWVLAQGGRYDRLLDVYDPQAAGQPGIGFSCNIENLQQVLLAANRLPHRPPAIDQLVIPVDSEAYGAALAEAQRLQRQDQLRVELYLDSDRRPEVVQAFAQRRRIGRIVWVSSGSAPQSEAVAVAERATTTC

SEQ ID NO: 10386 - protein, 212 aa, Nostoc punctiforme PCC 73102
MTQIPELESLTEESLTRGLMVLANIDSDLARILETLGPPPIWSREPGFATLLCIILEQQVSVAAARAVFNRLCGVIVPLTPENFLTLDDVQLRGIGFSRQKILYSRGLANAIASDQLDLSKLERMDETTIRTELKRLKGIGDWTVDIYLLMALQRPDVFPKGDLAIAIALQKLKNLATRPTPVQLEGMTQHWRPWRAVAARLLWHYYLSNPK

SEQ ID NO: 10387 - protein, 166 aa, Chloroflexus aurantiacus
MTIYQFSAQRIDGSTQSLADFRGQVLLIVNVASMCGLAPQYAGLEQLYRRYRDQGFTVLGFPSNQFMQEPRNNEAIAEFCERTYQVTFPLFAKIDVNGPNEHPLFTYLKTQLPGLFGSTAIKWNFTKFLVDRNGKPYRRYAPTDLPSQIEDDIVLLLRQQPKSLSA

SEQ ID NO: 10388 - protein, 157 aa, Gossypium herbaceum
NKGSWTAEEDRRLAKYIEIHGAKRWKTIAIKSGLNRCGKSCRLRWLNYLRPNIKRGNISDEEEDLIIRLHKLLGNRWSLIAGRLPGRTDNEIKNYWNSHLSKKIINHDVRTEQTSSSEQIVPHKAWETVQMEEEEVVKGSDEIENSEFSIDVDEFFD

SEQ ID NO: 10389 - protein, 228 aa, Gossypium sturtianum
FTSLCHTDVYFWEAKGQTPLFPRIFGHEAGGIVESVGEGVAHLKPGDHVLPVFTGECGNCRHCKSKESNMCDLLRINTDRGVMLSDGKTRFSINGKPIYHFVGTSTFSEYTVAHVGSVAKINPAAPLDKVCILSCGISTGLGATLNVAKPTKGSTVAIFGLGAVGLAAAEGARIAGASRIIGVDLNPNRFEEAKKFGCTEFVNPKDHNKPVQEVLAEMTNGGVDRSVE

SEQ ID NO: 10390 - protein, 293 aa, Zea mays
HASEELAFNEEENDRNKQIQASIAEAFRKQSEVIGRKSTAKATAAAFVRRSRRNIRPNGQNTYFRGRGKASSDDVALACSEDEEDGNGESCSKEASSAEESSPEKKQKRLPKWPTPRSSPARACNDEVASDEKDDVGISRENFSTSPLRAWGKNGTRSQTRHSSFSGSNGRMVKGGRMIKLVECLRNSDDNEGERDVHLCLLPLDGQTAPNLEKSYLCCGPTLSIKQLCQFVASQTSHKDEEVEMYALKPSCSKPVSTNTCGPDKARLAGEERLSDLRSSFTFPNGVLVRSNT

SEQ ID NO: 10391 - protein, 157 aa, Gossypioides kirkii
NKGSWTAEEDRRLAKYIEIHGAKRWKTIAIRSGLNRCGKSCRLRWLNYLRPNIKRGNISDEEEDLIIRLHKLLGNRWSLIAGRLPGRTDNEIKNYWNSRLSKKIINHDVRTEQTSSSEQFVPHKAWETFQMEEEEVVKGSGEIENSELSIDVEDFFD

SEQ ID NO: 10392 - protein, 511 aa, Desulfovibrio vulgaris subsp. vulgaris str. Hildenborough
MSLKPTLLLILDGWGKAPAGPGNAVTLAGMPHLSSLLRQAGCTELACSGRAVGLPEGFMGNSEVGHMNIGAGRVVYQDMTRIDIAVERGELASNPALTGLFEAVRATGGRVHLMGLLSDGGVHSHIAHVEALALAARDAGVEVVVHAFLDGRDTAPTSGVGYVKRLASFLESNRAGRIGSLVGRYYAMDRDKRWDRNLLAWAMLTRGEGAPADDPVGAVEAAYAAGETDEFVKPRVVVEGGSPIGTIRDGDGVFFFNFRADRARQLSHMFVDGTFEHGDRGHVPSLAGFATMTSYDPALGLPVAFDKQPLDGTLGEVVANQGLRQLRIAETEKYAHVTYFLNCGREEPFPGEERRLLPSPRDVATYDLKPEMSAEAVTDTLLEEWAGGGYTLAVCNVANLDMVGHTGVIPAAVRACETVDACVRRIADAVLASGGRLVITADHGNAEELLDESGNPQTAHSMNRVPFTVVEQGRVHTFREGGVLGDIAPTILGLWGVPASAGMTGTSLITE

SEQ ID NO: 10393 - protein, 181 aa, Gossypioides kirkii
NKGAWTAEEDRKLAEVIAVHGAKRWKTIPTIAGLNRCGKSCRLRWMNYLRPNIKRGNISDQEEDLILRLHKLLGNRWSLIAGRLPGRTDNEIKNYWNSHLSKKVNQKEKHSGASAGQVCKFAQKRLVENAKEQVREENTSTGVEESNISFDVNDFFDFSNVDTRNFEWVNRFLEVDEGFKF

SEQ ID NO: 10394 - protein, 554 aa, Escherichia coli O157:H7 EDL933
MCSIFGVFDIKTDAVELRKKALELSRLMRHRGPDWSGIYASDKAILAHERLSIVDVNAGAQPLYNQQKTHVLAVNGEIYNHQALRAEYGDRYQFQTGSDCEVILALYQEKGPEFLDDLQGMFAFALYDSEKDAYLIGRDHLGIIPLYMGYDEHGQLYVASEMKALVPVCRTIKEFPAGSYLWSQDGEIRSYYHRDWFDFDAVKDNVTDKNELRQALEDSVKSHLMSDVPYGVLLSGGLDSSIISAITKKYAARRVEDQERSEAWWPQLHSFAVGLPGSPDLKAAQEVANHLGTVHHEIHFTVQEGLDAIRDVIYHIETYDVTTIRASTPMYLMSRKIKAMGIKMVLSGEGSDEVFGGYLYFHKAPNAKELHEETVRKLLALHMYDCARANKAMSAWGVEARVPFLDKKFLDVAMRINPQDKMCGNGKMEKHILRECFESYLPASVAWRQKEQFSDGVGYSWIDTLKEVAAQQVSDQQLETARFRFPYNTPTSKEAYLYREIFEELFPLPSAAECVPGGPSVACSSAKAIEWDEAFKKMDDPSGRAVGVHQSAYK

SEQ ID NO: 10395 - protein, 359 aa, Magnetococcus sp. MC-1
MAKKVLVLPGDGIGQEITAEAVKVLNWAIQNGADITLEEGLIGGTAYDATGTPLPAETITQAKAAQAVLLGAVGGTKWEPLDISVRPEKGLLGIRKALDLYCNLRPAAVYPQLADASTLKKEVVAGIDIMVVRELSSGIYFGQPRGVEDLGDGRKKGFNTLVYTTDEIERIARKAFEAARKRSNRVCSVDKANVLESTELWREVVSDLHKREYADVELSHMYVDNAAMQLIRNPRQFDVIVTTNMFGDILSDAASMLTGSIGMLPSASLGDQFALYEPIHGSAPDIAGKGIANPLATILSVAMMLRYSLELPQLADGVEAAVVTVLDQGLRTADIMQPGMTQVGTAQMGDAVLAALNNA

SEQ ID NO: 10396 - protein, 285 aa, Triticum aestivum
  unsure (1)..(285): unsure at all Xaa locations
ASKNSFQXVVSIGRLQHRNLAPLLGYCRRRGELFLVYKYMPNGSVDKYLHGREGKPILNWAQRWHIVKGIASCLVYLHEEWEKVVIHRDIKASNVLLDGDMNGRLGDFGLARLYDHDTDPQTTHMVGTIGYLAPELGHTSKATPLTDVFAFGVFILEVTCGQRPVNPNLEDSQVLLVESVLDQWNKGSLLDPVDKQLGGNYNADEACVALKLGLLCSHPFANARPTMRQVMQYLDGDMPLPEMSPTDLSFQMMTIMQNGGFDQFIMTYPSSTARIDSTSVLTVGR

SEQ ID NO: 10397 - protein, 251 aa, Oryza sativa
MASRSSALLLLFSAFCFLARRAAADYGSWQSAHATFYGGGDASGTMGGACGYGNLYSTGYGTNTAALSTVLFNDGAACRSCYELRCDNDGQWCLPGSVTVTATNLCPPNYALPNDDGGWCNPPRPHFDMAEPAFLQIGVYRAGIVPVSYRRVPCVKKGGIRFTINGHSYFNLVLVTNVAGPGDVQSVSIKGSSTGWQPMSRNWGQNWQSNSYLDGQSLSFQVAVSDGRTVTSNNVVPAGWQFGQTFEGGQF

SEQ ID NO: 10398 - protein, 577 aa, Vibrio cholerae O1 biovar eltor str. N16961
MSANQNPSVQEVLGEVLGPWSDNERLKRESHFLRGTIEQDLQDRITGGFTADNFQLIRFHGMYQQDDRDIRAERSKQKLEPLHNVMLRARMPGGIITPHQWLAIDKFATEHTLYGSIRLTTRQTFQFHGVLKPNIKLMHQTLNSIGIDSIATAGDVNRNVLCTSNPVESELHLQAYEWAKKISEHLLPKTRAYAEIWLDGEKIEGPDEEPILGSNYLPRKFKTTVVIPPHNDVDVHANDLNFVAIGENGQLVGFNVLVGGGLAMTHGDTSTYPRRADDFGFIPLEKTLEVAAAVVSTQRDWGNRSNRKNAKTKYTLDRVGVEVFKAEVEKRAGITFAPSRAYEFTSRGDRIGWVEGIDGKHHLTLFIENGRILDFPGKPLKTGVAEIAKVHQGDFRMTANQNLIVAGVPADQKPHIEQLAREHGLIDDGVSEQRINSMACVAFPTCPLAMAEAERFLPSFVTEVEGILAKHALPKEENIILRVTGCPNGCGRAMLAEIGLVGKAPGRYNLHLGGNRNGTRIPKMYKENITDTQILQEIDELVGRWASERLDGEGFGDFTIRAGIIEEVIISKRDFYA

SEQ ID NO: 10399 - protein, 806 aa, Haemophilus influenzae Rd KW20
MSNFNQISRRDFVKASSAGAALAVSNLTLPFNVMAKETQRLNENNQERIVWSACTVNCGSRCPLRMHVKDNRITYVETDNTGTETYNLDHQVRACLRGRSMRRRVYNPDRLKYPMKRIGKRGEGKFKRISWDEALTEIADALKRNIKKYGNESIYLNYGTGTLGGTMAKSWPPASTMIARFMNCIGGYLNHYGDYSTAQIAVGLDYTYGGGWALGNGMADIENTKLIVLFGNNPAETRMSGGGLTYCIEQAKARSNAKMIIIDPRYNDTGAGREDEWIPIRPGTDAALVAALAYVMIQENLVDQPFLDKYCVGYDEKTLPTDAPKNGHYKAYILGYGNDGIAKTPEWAAKITGIPAERIIKLAREIGSTKPAFISQGWGPQRRSNGELISRAIAMLPILTGNVGIHGGNTGARESAYSIPFVRMPTLKNPVKASIPMFLWTDAIIRGTEMTALTDGIRGVDKLSSPIKVIWNYASNCLINQHAQINRTHDILQDDTQCEMIITIDNHMTSTAKYSDILLPDCTTSEQMDFALDAFVSNMAYVIFADQVIKPSFECRPIYDMLSDLAEKMGVKEKFTEGRTQEEWLRHIYEQSREKLPELPTFEEFRQQGIFKKVDPNGFKVAYKDFRDNPEAHPLKTPSGKIEIYSSRLAEIAKTWKLAEDDVIHPLPIHAQSFEHYGDPLMEKYPLQLSGFHYKARTHSTYGNVDVLKAANPQEVWMNPIDAEPRNIKNGDMIRIFNDRGEVHINVKITPRIIPGVVALSEGAWYAPDKDRIDHSGCINVLTTQRPSPLAKGNPQHSNLVQVERL

SEQ ID NO: 10400 - protein, 138 aa, Nocardia brasiliensis
DQVPDFIRSQKRLPGNGLRDHNMQWDFWTLRPESAHQVTWLMGDRGIPKTYRHMNGYGSHTYQWINAAGERFWVKYHFKTDQGIDYLTQADADRIAGENADYHRKDLWDAIERGEFPSWTLHVQVMPVAEAENYRFTR

SEQ ID NO: 10401 - protein, 119 aa, Triticum aestivum
MVSSSPSSSRTMRAVQYDKYGGGAEGLKHVEVPIPSPKKGELLLRMEAASINRVDWKFQNGKARPFLPGKFPFTPVCELAGEVVELGAGVSGFSQGDKVIAVNFPGGGGLAECRRRKQR

SEQ ID NO: 10402 - protein, 461 aa, Treponema pallidum subsp. pallidum str. Nichols
MAHLPKEYDFSIESLGESKIPSPIYLSHTLGDFIPNYVSDNEYISHELSARLGETVGPFTHKNLMERAGPRQKIFFNPHHVHAGIVTCGGLCPGLNDVIRAIVRCLWGRYGVKRISGIRFGYKGLLPDYNFDILPLTPEVIDNCHKTGGSLLGTSRGGGNRVVDIVDGIERLNLHILFIIGGDGSQKGAKEIADEIKHRNLKISIIGIPKTVDNDISFVQKSFGFDTAIVKATEAVAAAHMEARSQINGIGLVKLMGRESGFIATYTAIASHETNFVLIPEVSFDLDGPNGLLAHLEKRIALRKHAVLVVAEGAGQDLMVNADGVPSGDSQGGSLRVSSGTDASGNKRLADIGLFLKEKIGVYFKEKRIHINLKYIDPSYLIRSAVAAPIDSIYCERLGNNAVHAAMCGKTKMIIGLVHNKFVHLPIDVVVCQRKHVNPEGSLWRDALDATGQPIVMKNII

SEQ ID NO: 10403 - protein, 624 aa, Bordetella parapertussis 12822
MCGVAGLIHLDGAAVDPAVLQGMTDAIAHRGPDGEGHWIDGNVGLGHRRLAIIDLSPAGHQPMISADSRYVLSYNGEIYNFRELRAELETAGYRFKSRTDSEVLLYAVIAWGLKALKRFNGMFAFALWDCHERRLILARDRYGIKPLYYAEQGGTLAFGSEQKAILALPGFRRKLDKAALLEYFTFQNIFTSKVLLEDIQILPAGHYAIVEPDRCASISLTQYWDFCFREPDVAATDQEYREELDRLFVQAVKRQLVTDVELGSYLSGGMDSGSIAAVAAAEHPYIKTFTCGFDLNSASGIELGFDERSKAEYMSYCFKTEHYEMVLKAGDMERILPHVACHLEEPRVGQSYPNFFAAKLASRFVKVVLSGAGGDELFAGYPWRYYRAVVNDDFEHYVDKYYNFWQRLLPNSELKRVFAPIAGEVEHVWTRDIFRNVFRHHADQLYRPEDYINHSLYFEAKTFLHGLLVVEDKLSMAHGLETRVPFLDNDLVEFAMRCPIRLKLNNLAEVVKINENETGNKVRKFFEKNRDGKTILREVMNHRLPADISKAEKQGFSAPDASWFKGESLEFVRRKLLDGHSPLYEIMDAATVRELVNEHLGGIRNRRLLIWSLLSVDAWMRQTF

SEQ ID NO: 10404 - protein, 347 aa, Haemophilus somnus 2336
MKAIVLESNRNMAICDIPKPLVEDPDDVLVKVHYSGLCGSDIPRIFHHGTHFYPIVLGHEFSATVEEVGSDVTELDKGDLVSCAPLQPCFKCDECNRGFYSLCKNYNFIGSRRFGANSEYLCVKKSNLVKLPQGSDTLQASFIEPITVGLHAIHLAGGCKGKNVVIVGAGTIGLLAAQSTKALGANSVSVIDINQEKLVLAKTLGADYVFNSMDLKADEILACLDGNRFDQLILETAGVPKTVELSIQIAGPRAQVVLVGTLHHDLNLDQKEFGLILRKELIIFGSWMNYSKPWPGVEWREAVNLIAENKICFEPLISSINTIEDYVEEVKSLDGKPMNGKLVLKFD

SEQ ID NO: 10405 - protein, 394 aa, Mesorhizobium loti MAFF303099
MTSHTPPPSGKNRLAFSTRTIHGGQSHDPLTGAVMVPIYATSTYGQQSPGVHKGFEYARSQNPTRFAFERAVADLESGTAAFAFASGLAAISTVLELLDSGAHIVATDDIYGGSFRLMERVRKRSAGLQVSFVDFTDLAAVEAAIRPETKLLWVETPTNPLLRIVDLEGVAALAKRKGVLTVADNTFCSPYIQRPLELGIDIVVHSTTKYLNGHSDMVGGVAVVGDNKELATQLKFLQNAIGAISGPFDSFLALRGLKTLALRMERHSDNGLKIAQWLEARKDVRRVLYPGLASHPQHSIAVQQMHAFGGMITAVLDRDLAGTKRFLERTQLFTLAESLGGVESLIEHPALMTHGSIPAEKRSEIGISDSLVRLSAGIEDGDDLIADLEQALGG

SEQ ID NO: 10406 - protein, 236 aa, Arabidopsis thaliana
MINFEATELRLGLPGGNHGGEMAGKNNGKRGFSETVDLKLNLSSTAMDSVSKVDLENMKEKVVKPPAKAQVVGWPPVRSFRKNVMSGQKPTTGDATEGNDKTSGSSGATSSASACATVAYVKVSMDGAPYLRKIDLKLYKTYQDLSNALSKMFSSFTIGNYGPQGMKDFMNESKLIDLLNGSDYVPTYEDKDGDWMLVGDVPWEMFVDSCKRIRIMKGSEAIGLAPRALEKCKNRS

SEQ ID NO: 10407 - protein, 228 aa, Gossypium robinsonii
FTSLCHTDVYFWEAKGQTPLFPRIFGHEAGGIVESVGEGVAHLKPGDHVLPVFTGECGNCRHCKSKESNMCDLLRINTDRGVMLSDGKTRFSINGKPIYHFVGTSTFSEYTVAHVGSVAKINPAAPLDKVCILSCGISTGLGATLNVAKPTKGSTVAIFGLGAVGLAAAEGARIAGASRIIGVDLNPNRFEEAKKFGCTEFVNPKDHNKPVQKVLAEMTNGGVDRSVE

SEQ ID NO: 10408 - protein, 228 aa, Gossypium bickii
FTSLCHTDVYFWEAKGQTPLFPRIFGHEAGGIVESVGEGVTHLKPGDHVLPVFTGECGNCRHCKSKESNMCDLLRINTDRGVMLSDGKTRFSINGKPIYHFVGTSTFSEYTVAHVGSVAKINPAAPLDKVCILSCGISTGLGATLNVAKPTKGSTVAIFGLGAVGLAAAEGARIAGASRIIGVDLNPNRFEEAKKFGCTEFVNPKDHNKPVQEVLAEMTNGGVDRSVE

SEQ ID NO: 10409 - protein, 504 aa, Magnaporthe grisea 70-15
MEKFPDLDVGITNHNANKLNGHANGIANGGSHSQPVGVRWTPASSTYSGSGRSGGHSRQKSISEAIRTIRSRHGSVSQNAHEIADALKAPLSPRLIFAFVCGYCLLLSWLASISPGLRTAVPALKHGIRYPSRDVIQTTMPLAAFQIFGHLLSSTATSKIPVSLVHTIKGLSPLFTVLAYRIVFNIRYPAATYLSLVPLTLGVMLACSGKHKFGGEILGIVYALVATLIFVTQNIFSKRLFNEAARAEAEGMGHKSRKLDKLNLLCYSSGMAFILTVPIWFWSEGIGIIGDFLRDGSVDLTTAPGTFDHGRLFIEFVFNGTFHFGQNIMAFVLLSMVSPVTYSVASLIKRVFVIVIALVWFRSPTTKIQAVGIALTFVGLYLYDRTKEGNRADKRATYLGDKGAKDSLLPLSTKSNGVNGGLVFESPASAGPDGFDGGINAPRPYVNGYALPVRTEGDNKKSDDQTPGRGGRQRGASTTSWLPPGTRQEDTWRVGDRSSGGPVR

SEQ ID NO: 10410 - protein, 228 aa, Gossypium bickii
  unsure (1)..(228): unsure at all Xaa locations
FTSLCHTDVYFWEAKGQTPLFPRIFGHEAGGIVESVGEGVTHLKPGDHVLPVFTGECGNCRHCKSKESNMCDLLRINTDRGVMLSDGKTRFSINGKPIYHFVGTSTFSEYTVAHVGSVAKINPAAPLDKVCILSCGISTGLGATLNVAKPTKGSTVAIFGLGAVGLAAAEGARXXGASRIIGVDLNPNRFEEAKKFGCTEFVNPKDHNKPVQEVLAEMTNGGVDRSVE

SEQ ID NO: 10411 - protein, 497 aa, Nostoc punctiforme
MTEPQNLTTADGIPVSDNQNSLTAGARGPVLIQDFHLIEKLAHFNRERIPERVVHAKGAAAHGTLTITNDITRYSKAKLFSEIGKKTELILRFSTVGGEKGSADAERDPRGFSLKFYTEEGNWDLVGNNTPIFFIRDPLKFPDFIHTQKRNPQTNCKDQNAKWDFWSLSPESLHQVTILFSDRGIPKTHRHMDGFGSHTFSLINAEGDRVWCKFHFKTLQGHQTLTEEESAKIKGEDPDHATHDLFEAIAKKDYPKWRMCIQVMTEEQAEKHPDNPFDLTKVWKQGEYPLIEVGILELNRNPENYFAEVEQAAFSPSAVVPGVSFSPDKMLQARIFSYPDAQRYRLGGNYQQLPVNQPKCPVMHYQRDGFMASGNNGGSVPNYEPNSAEGTPKENPAYAEPPSHLGDVTVDRYSHREGNDDYTQAGNLYRLLTPEQQERLAKNIVGSLSQAREDIQMRQLCHFFRADVSYGRRVAEGLGIAIDPSMFSHDAQPVGNW

SEQ ID NO: 10412 - protein, 272 aa, Burkholderia sp. RP007
MGWLNNTVTIITGGGSGLGKALVERFINEGGRVGVLERSGERARELAREFGDAVEVVVGDVTLYEDNVLVVQKTVARFGRLDNFVGNAGVFDFFQTLPQMDAGSISRAFDELFAVNVKAALLGAKAALAELVKSQGSLIFTVSNAGFYPGGGGPLYTASKHALVGLIRELAHELAPKVRVNGVAPGGMRTNLGGLSATGTSAQTLDQVDNLEAMLVENTPLRMAPVPADYCGPYVLLASRENSGPMTGVVINTDGGFGVRGIMKVCGGDDLH

SEQ ID NO: 10413 - protein, 403 aa, Lactobacillus delbrueckii
MAKLIVSDVDVKDKKVLVRVDFNVPIKDGVIGDDNRIVAALPTIKYIIENGGKAILLSHLGRIKSDEDKKSLSLAPVAKRLGELLEKPVTFVPSNEGKEVEDAINNMKDGDVVVLENTRFQDIDNDFGKRESKNDPKLGEYWASLGDVFVNDAFGTAHRSHASNVGIATAMKAAGKPAAAGFLLEKEIKFLGNAVANPVHPFVTILGGAKVSDKIGVITNLIPKADHIIIGGGMAYTFLKAQGHNIGKSLVEDDKVEFAKELLEKAGDKLVLPIDNVAATEFNNDAASEVVGQDIPDNEMGLDIGPKTIELFKKTLEGAKTVVWNGPMGVFEMPNFAKGTLEVGRALADLPDATTIVGGGDSTAAAKQLGIAPKLTHISTGGGASLEYLEGKELPGIACVSDK

SEQ ID NO: 10414 - protein, 227 aa, Gossypium bickii
FTSLCHTDVYFWEAKGQTPLFPRIFGHEAGGIVESVGEGVTHLKPGDHVLPVFTGECGNCRHCKSKESNMCDLLRINTDRGVMLSDGKTRFSINGKPIYHFVGTSTFSEYTVAHVGSVAKINPAAPLDKVCILSCGISTGLGATLNVAKPTKGSTVAIFGLGAVGLAAAEGARIAGASRIIGVDLNPNRFEEAKKFGCTEFVNPKDHNKPVQEVLAEMTNGGVDRSV

SEQ ID NO: 10415 - protein, 87 aa, Gordonia sputi
HNMQWDFWTLRPETAHQVTWLMGDRGIPKSWRHMDGFGSHTYQWVNADGERFWVKYHFKTDQGIEFLTQAEADTLAGSDPDYHRKDL

SEQ ID NO: 10416 - protein, 436 aa, Magnetococcus sp. MC-1
MMRFSSHLLKGGALFALLLITPTWAWAAEQGLDKADTAWILTTTALVLFMTLPGLALFYGGLVRSKNILSILMQCFAIACLVSVLWLAGGYSLAFEHGGPLNGVIGSLQKAFFAGVAHNTVKGSLPEGVFAAFQMTFAIITPALVIGGFAERIRFAVILPFTALWLLLVYIPVCHWVWGGGWMQAAGVMDFAGGVVVHITAGVAALVAALVLGPRNGFQKTVMFPHNLTMTYAGAAMLWVGWFGFNGGSALTADGSAGWAILATHMGAAAGSLAWMGMEWMRHGKPSVLGIVTGMVAGLGTVTPASGYISPFGGFAIGLIAGVVCYLATMMVKQRWKIDDSLDVFPVHGVGGMIGTLMTALFAAPLFGGHGLASNAQILPQLATQGVAVGVTALYTAVVTWLIFKGLAQVMQLRVSRDQETEGLDLVDHDERGYNL

SEQ ID NO: 10417 - protein, 254 aa, Oceanobacillus iheyensis HTE831
MEGKVVLITGGAGGIGQATAKLLLDYGAKVALVDINEDSLVKAKESLHVEDDRVFTITGNVTVEEDVENYVKQTVDRFGKIDVFFNNAGVNGPVSPITELDQATFEKIMSINVTGVFLGLKHVMKQMKKQGYGSIVNTASNAAYIGSAGMVSYIASKHAVAGITKTAALEVASDGIRVNAVAPAAIDTQMLADIQNNLTPGEPEKSGEALKQGIPAGRFGAPEEVAQVVKFLASDDASFVNGSLYNVDGGMQAD

SEQ ID NO: 10418 - protein, 291 aa, Vibrio cholerae O1 biovar eltor str. N16961
MMIKKCLFPAAGYGTRFLPATKSMPKEMMPVVNKPLIEYGVDEAIQAGITGMCIVTGRGKHSIMDHFDMNYELEHQIRGTNKEELLGDIRKIIESANFTFIRQREMKGLGHAILTGKELVGDEPFAVVLADDLCVNEEQGVLAQMVALYKQFRCSIVAVQEVPENETHKYGVIAGEMIKDDLFRVDNMVEKPEPGTAPSNLAIIGRYILTPDIFDLIEQTEPGKGGEIQITDALLKQAKAGCVLAYKFKGKRFDCGSVEGYIEATNFCYENMYKKNDQKVELAKKSTHKGQ

SEQ ID NO: 10419 - protein, 431 aa, Erwinia carotovora subsp. atroseptica SCRI1043
MSKIVKVIGREIIDSRGNPTVEAEVHLEGGFVGLAAAPSGASTGSREALELRDGDKSRFLGKGVTKAVAAVNGPIAQAVLGKDAKDQANIDKIMIDLDGTENKSQFGANAILAVSLAAAKAAAASKGLPLYAHIAELNGTPGKYSMPLPMMNIINGGEHADNNVDIQEFMIQPVGAKTLKEAIRMGSEVFHTLAKVLKSKGMGTAVGDEGGYAPNLGSNAEALAVIAEAVKAAGYELGKDITLAMDCAASEFYKDGKYVLAGEGNKSFTSEEFTHFLEDLTKQYPIVSIEDGLDESDWAGFAYQTKVLGDKIQLVGDDLFVTNTKILKEGIDKGIANSILIKFNQIGSLTETLAAIKMAKDAGYTAVISHRSGETEDATIADLAVGTAAGQIKTGSMSRSDRVAKYNQLIRIEEALGDSAPFNGLKEVKGQ

SEQ ID NO: 10420 - protein, 334 aa, Saccharomyces cerevisiae [sequence omitted]

SEQ ID NO: 10421 - protein, 159 aa, Streptococcus mutans
YNETGNWLPNETLEIIKTHLLAIKGPLETPVGGGIRSLNVALRQELDLFACVRPVRYFKGVPSPLKHPEKTAITIFRENTEDIYAGIEWNAGTAEVQKVINFLQDDMQVKKIRFPKSSSIGIKPISIEGSQRLIRAAIEYALANNLTKVTLVHKGNIQK

SEQ ID NO: 10422 - protein, 432 aa, Streptococcus mutans UA159
MSIITDVYAREVLDSRGNPTLEVEVYTESGAFGRGMVPSGASTGEHEAVELRDGDKSRYGGLGTQKAVDNVNNIIAEALIGYDVRDQQAIDKAMIALDGTPNKGKLGANAILGVSIAVARAAADFLEIPLYSYLGGFNTKVLPTPMMNIINGGSHSDAPIAFQEFMIVPAGAPTFKEALRWGAEIFHALKKILKERGLETAVGDEGGFAPKFDGTEDAVETIIKAIETAGYKPGEEVFLGFDCASSEFYDNGVYDYTKFEGEKGAKRSAAEQIDYIEELVNKYPIITIEDAMDENDWDGWKALTARLGDRVQLVGDDFFVTNTDYLARGIKEGAANSILIKVNQIGTLTETFEAIEMAKEAGYTAVVSHRSGETEDSTIADISVATNAGQIKTGSLSRTDRIAKYNQLLRIEDQLGEVAEYRGLKSFYNLKK

SEQ ID NO: 10423 - protein, 474 aa, Haemophilus somnus 2336
MNKEIKTQVVVLGAGPAGYSAAFRCADLGLETVIVERFSTLGGVCLNVGCIPSKALLHVAKVIEEARSLSAHGIVFGEPTTDIDKIRGWKEKVINQLTSGLAGMAKQRKVQVVNGYGKFSGPNAIIVAGDEGETKITFDNAIIAAGSRPIQLPFIPHEDPRIWDSTDALKLKEVPENLLIMGGGIIGLEMGTVYHALGSKIDVVEMFDQVIPAADKDMVQIYTKRIEKKFNLLLETKVTAVEAKEDGIYVSMEGKAASETRRYDAVLVAIGRVPNGKLIDAGIAGVEVDDRGFIRTDKQMRTNVPHIFAIGDVVGQPMLAHKGVHEGHVAAEVIAGQKHYFDPKVIPSIAYTEPEVAWVGKTEKECKAEGINYEVAKFPWAASGRAIASDCADGMTKLIFDKDTHRVIGGAIVGTNGGELLGEIGLAIEMGCDAEDLALTIHAHPTLHESVGLAAEVFEGSITDLPNPKAKKKK

SEQ ID NO: 10424 - protein, 628 aa, Haemophilus somnus 2336
MAKEIQIPDIGGDEVTVTEVMVKAGDTIIVDQSVINVEGDKASMEVPSPEAGVIKEVLVKVGDKVSTGTPMFVLENAELASTETASESMQTEKTQSAVASIIEIYVPDIGGDEVNVTDIMVSVGETVAEEQSILNVEGDKASMEVPAPTAGIVKEILIKVGDKVSTGSLVMKFEVAGVVSVAETAQVSSSAQVTGESAVQDVHVPDIGGDEVNVTEIMVAVGDSVTEEQSLITVEGDKASMEVPAPFAGVVKEILVKSGDKVSTGSLIMRFEVQGKAPTPKASSAVTEAKVAPSPAAQENQMTPVSQADVTASAVFAHATPVVRRLAREFGVNLDKVKGTGRKGRILKEDVQAYVKAAIKAVESGNVSPTSAGNGAVNGAGLGLLPWPKVDFSKFGDIEQVELGRIQKISGANLHRNWVMIPHVTQWDKADITELEKFRKEQNVLAEKQKLDVKITPLVFIMKAVAKALENYPRFNSSLSEDAQSLILKKYINIGVAVDTPNGLVVPVFKDVNKKGIIELSRELAEISKKARAGKLTASDMQGGCFTISSLGGIGGTHFTPIVNAPEVAILGVSKSEMTPVWNGKDFTPRLMLPLSLSYDHRVIDGADGARFITFINSVLSDLRRLVM

SEQ ID NO: 10425 - protein, 636 aa, Bordetella parapertussis 12822
MCGIFGALWHQGKSVSAIEQQLQVGIARQQHRGPDGHGTWIDPQGRLGLAHVRLSIIDLVSGAQPMRGNSGNVITYNGEIYNYIELRRELGEDSFETTSDTEVILRAYEKWGERCVDRLEGMFAFAIWDAKRGEMFVARDRFGIKPFYYACVQGGFYFGSEVKALTPFLNRVETDANALHDYFAFQFCLGEKTLFAGVRQLKPAHCGYVGRDLELKQRQYWEVQYDLDWDHTEKYFVEQVREKLQHSVDMHMRSDVEVGAYISGGVDSSLVAAMARHGRRSSRFQGFTGKFALGDAFDESRYAQALADEHDILLHQVDITEDDFVNDIAKVIYHLDQPVAGPGSFPQYAVSRLAKDHVKVVLGGQGSDEMFGGYARYLIAYWEQCIKGALDGTMHDGNYIVTYESIIPNLRTLRNYKPLIQEFMAEGIFDSRDKRYYRLINRSNTFGNVVNWGMFEGIASSFDDFKQIFWGKNVGKESYFDSITHFDFKTLLPALLQVEDRMSMAHGIESRVPFLDHKLIELVATVPANVKFQNGELKRLLRVAFQDMLPQAIRERKDKMGFPVPLQVWMRKGGKAREFILDTFRSQNARSRAYLAPGFDIEKMMEQEGLFSRNIWAFLSLELWQQQFHDVHRQTI

SEQ ID NO: 10426 - protein, 228 aa, Gossypium nelsonii
FTSLCHTDVYFWEAKGQTPLFPRIFGHEAGGIVESVGEGVTHLKPGDHVLPVFTGECGNCRHCKSKESNMCDLLRINTDRGVMLSDGKTRFSINGKPIYHFVGTSTFSEYTVAHVGSVAEINPAAPLDKVCILSCGISTGLGAALNVAKPTKGSTVAIFGLGAVGLAAAEGARIAGASRIIGVDLNPNRFEEAKKFGCTEFVNPNDHNKPVQEVLAEMTNGGVDRSVE

SEQ ID NO: 10427 - protein, 228 aa, Gossypium australe
  unsure (1)..(228): unsure at all Xaa locations
FTSLCHTDVYFWEAKGQTPLFPRIFGHEAGGIVESVGEGVTHLKPGDHVLPVFTGECGNCRHCKSKESNMCDLLRINTDRGVMLSDGKTRFSINGKPIYHFVGTSTFSEYTVAHVGSVAKINPAASLDKVCILSCGISTGLGAALNVAKPTKGSTVAIFGLGAVGLAAAEGARIAGAXXXXXXXXXXXXXXXXKKFGCTEFVNPNDHNKPVQEVLAEMTNGGVDRSVE

SEQ ID NO: 10428 - protein, 475 aa, Arabidopsis thaliana
MAATTRRLLYYVSKRFSTAGVRRSYGGLPQSNSKSPPSSSQRLMELESEFSAHNYHPVPVVFSRANGSTIWDPEGKRYIDFLAAYSAVNQGHCHPKIMKALQEQVEKLTLSSRAFYNDKFPVFAERLTNMFGYDMVLPMNTGAEGVETALKLARKWGHEKKNIPKDEAIIVSCCGCFHGRTLAIVSMSCDNDATRGFGPLLPGNLKVDFGDADSLEKIFKEKGDRIAGFLFEPIQGEAGVIIPPDGYLKAVRELCTKYNVLMIADEVQSGLARSGKMLACDWEEIRPDMVILGKALGGGVIPVSAVLADKDVMLHIKPGQHGSTFGGNPLASAVAMASLDVIVEEKLVERSASLGEELRIQLNEIKKQFPKYIKEVRGRGLFNAIEFNSESLSPVSAYDICLSLKERGVLAKPTHNTIVRLTPPLSISSDELRDGSEALHDVLELDLPNLLKINSGKTPVSHITECDRCGRNLYA

SEQ ID NO: 10429 - protein, 391 aa, Archaeoglobus fulgidus DSM 4304
MSDGNVAWILASTALVMLMVPGVGFFYAGMVRRKNAVNMIALSFISLIITVLLWIFYGYSVSFGNDISGIIGGLNYALLSGVKGEDLLFMMYQMMFAAVTIAILTSAIAERAKVSSFILLSALWLTFVYAPFAHWLWGGGWLAKLGALDFAGGMVVHISSGFAALAVAMTIGKRAGFEEYSIEPHSIPLTLIGAALLWFGWFGFNGGSALAANDVAINAVVVTNTSAAVAGFVWMVIGWIKGKPGSLGIVSGAIAGLAAITPAAGFVDVKGAIVIGLVAGIVCYLAMDFRIKKKIDESLDAWAIHGIGGLWGSVAVGILANPEVNGYAGLLFGNPQLLVSQLIAVASTTAYAFLVTLILAKAVDAAVGLRVSSQEEYVGLDLSQHEEVAYT

SEQ ID NO: 10430 - protein, 228 aa, Gossypium australe
FTSLCHTDVYFWEAKGQTPLFPRIFGHEAGGIVESVGEGVTHLKPGDHVLPVFTGECGNCRHCKSKESNMCDLLRINTDRGVMLSDGKTRFSINGKPIYHFVGTSTFSEYTVAHVGSVAKINPAAPLDKVCILSCGISTGLGAALNVAKPTKGSTVAIFGLGAVGLAAAEGARIAGASRIIGVDLNPNRFEEAKKFGCTEFVNPNDHNKPVQEVLAEMTNGGVDRSVE

SEQ ID NO: 10431 - protein, 290 aa, Desulfovibrio desulfuricans G20
MLIRKVVIPVAGWGTRSLPATKNIPKEMLPVYNKPVVQYVVEEAMRSGLTDVVFVTNRDKTIIEDHFDYNLQLESVLERAGKTEMLRQVREVAEMVNIHSVRQKRQLGLGHAVLCAREVVHNEPFAVMVGDDLQFGMEPGIQQLINVAVAERLPVVGVMEVPADKVSRYGIISGEEISPGIFRVHDLVEKPAVSEAPSRLAIVGRYILTPDIFKVLENLSPGHGGEIQLTDGLKVLAQGRGLLAVKLRGMRFDAGDWAEYLTANIYFALQEEDLRDELVERLRPLLPFKC

SEQ ID NO: 10432 - protein, 228 aa, Gossypium australe
FTSLCHTDVYFWEAKGQTPLFPRIFGHEAGGIVESVGEGVTHLKPGDHVLPVFTGECGNCRHCKSKESNMCDLLRINTDRGVMLSDGKTRFSINGKPIYHFVGTSTFSEYTVAHVGSVAKINPAASLDKVCILSCGISTGLGAALNVAKPTKGSTVAIFGLGAVGLAAAEGTRIAGASRIIGVDLNPNRFEEAKKFGCTEFVNPNDHNKPVQEVLAEMTNGGVDRSVE

SEQ ID NO: 10433 - protein, 546 aa, Escherichia coli O157:H7 EDL933
  unsure (1)..(546): unsure at all Xaa locations
MAIHNRAGQPAQQSDLINVAQLTAQYYVLKPEAGNAEHAVKFGTSGHRGSAARHSFNEPHILAIAQAIAEERAKNGITGPCYVGKDTHALSEPAFISVLEVLAANGVDVIVQENNGFTPTPAVSNAILVHNKKGGPLADGIVITPSHNPPEDGGIKYNPPNGGPADTNVTKVVEDRANALMADGLKGVKRISLDEAMASGHVKEQDLVQPFVEGLADIVDMAAIQKAGLTLGVDPLGGSGIEYWKRIGEYYNLNLTIVNDQVDQTFRFMHLDKDGAIRMDCSSECAMAGLLALRDKFDLAFANDPDYDRHGIVTPAGLMNPNHYLAVAINYLFQHRPQWGKAVAVGKTLVSSAMIDRVVNDLGRKLVEVPVGFKWFVDGLFDGSFGFGGEESAGASFLRXDGTPWSTDKDGIIMCLLAAEITAVTGKNPQEHYNELAKRFGAPSYNRLQAAATSAQKAALSKLSPEMVSASTLAGDPITARLTAAPGNGASIGGLKVMTDNGWFAARPSGTEDAYKIYCESFLGEEHRKQIEKEAVEIVSEVLKNA

SEQ ID NO: 10434 - protein, 524 aa, Oryza sativa
MEGGRLGGAAASASAAAAADARGGMSGFAAPQHAIVKHGPGSVTHCGGKWTFAELCQSEQIWVLDCYCMQWACKFATNATECHTNLNNVQPTQVTDFGALAQSAGFRIEDLANLSTNGLFNLKSNAHTIINDPLQFENYVKSISPSNITTTATVTVVDPQTLVPQKGAQLNLVTIRTGNVENWGESTIADTSPRTDTSTDPDTDERNQMFEQGQLAAPTASDSSDRSKDKLDHKTLRRLAQNREAARKSRLRKKAYIQNLESSRLKLTQIEQELQRARQQGIFISTSSDQSHSASGNGALAFDMEYARWLEEHNKHINELRAAVNAHAGDNDLKSTVDSIMAHYNEIFKLKGVAAKADVFHVLSGMWKTPAERCFMWLGGFRSSELLKLLAGQLEPLTEQQLAGIANLQQSSQQAEDALSQGMEALQQSLAETLASGSLGPAGSSGNVANYMGQMAMAMGKLGTLENFLRQADNLRLQTLQQMQRILTTRQSARALLAISADLGRPRAEGSLWLAPSKGINKLN

SEQ ID NO: 10435 - protein, 489 aa, Xanthomonas axonopodis pv. citri str. 306
MEALSETLRGIAARGPLGLFIDGQWRASTGDRTVDVIAPHTEERLLRYTEPSPSDTEAAIAAARSAFDNGPWPQLSPQERSVVLKRVADHLRARMPELAEAWTGQVGATLGFSKRASQQAPDLFDYYADLIATHAFVQPRVRPSGGRVHVVQEPVGVVAAITPWNAPLVLLCYKVAAALAAGCTVVAKPSPETPIDAYILAECISAAGVPDGVFNLLPAGREVGEQLIRHPHVDKISFTGSTQAGRSIGIACAERLARVGLELGGKSAAIVLEDADLAKMLPTLVPYSMPIAGQVCFSLTRVLVPTQRREEILQAYCTALSAVKLGDPFAADTGMGPLALGRQLERVQSYIAKGKAEGARLVMGGSRPAHLSRGFFVEPTVFAEVMPDMAIAREEIFGPVVSFIDYHDEADLIAKANASDYGLHGTIYSEDAERAYRIARRVRSGSHAINGMWVDISMPFGGFKHSGIGREGGIEGLHAFLETRTLYLS

SEQ ID NO: 10436 - protein, 420 aa, Bifidobacterium longum DJO10A
MPTAKPASLSAEALNIPRSGIRDVFDRVERVPDAISLTVGEPSATAAPHIVAAACEAAQAGRTRYTNVLGVPEYRKAVADYSARVKGLTYDPETEIQAVDGATIGLFLALKAVVGTGDEVIIPSPFFTSYDAEVMLCGGRPVTVALRPEHGMRVNAADIEAAITPRTRAVIINSPGNPTGAVTSAAELARIAEVCKQHNIWAISDEVYHPFVFGETFGETLGGEAAVAPSIAAVPGMKDRTIVVESLSKTYAMTGWRIGYLLAPEAVIEQTGKIAELMHSSVNSLAQYAGVAALAGPQDHVAAMREEYRAKRQIVLDGLAGCPVLRLIEPQGAFYAFVDVRLTGLDSGEFADRLLDEEHVAVVPGEAFGEEGRGFVRLSYAGDAGELREGVARLRAFAERVWNPITGHHTATYHPMEVLA

SEQ ID NO: 10437 - protein, 423 aa, Buchnera aphidicola str. APS (Acyrthosiphon pisum)
MNKEIKSIRGMYDYFPKDLKIWNYIEIIFKEVLNSYCYLEIRLPILEKTEIFKRAIGNVTDVVEKEMYSFNDRKGNNLTLRPEGTVGCVRAIIQNNLLQKSNKFWYLGPMFRYERPQKGRYRQFYQLGAEVFGLDTEDIDLEIIILTNRLWKRIGIDSFITLEVNSIGSKIDRVQYKKELVNFLKKREYLLDEDCKRRLYTNPLRILDSKNQDIQNLLKEAPLLSEYISFSENNHFKNLCNMMNHHGIKYKCNPHLVRGLDYYNSTVFEWKSNKLGAQNTICAGGRYDSLVQEMGGRKTPAIGFAIGIERLVLLVKSLKIFSEVIEESNVYIIFIGDNNKCHAINLSEEIRDLYPKLRIFINFLHQNLTKKIKNAISSLARIIILIGDNEIKKGFFLVKDLKEKKEYHLLKKELILKIQEIFK

SEQ ID NO: 10438 - protein, 513 aa, Zea mays
  unsure (1)..(513): unsure at all Xaa locations
MATCATDLAPLLGPAAANATGYLCSQFADTASAVDATYLLFSAYLVFAMQLGFAMLCAGSVRAKNTMNIMLTNVLDAAAGALFYYLFGFAFAFGTPSNGFIGRHFFGLQRLPRTGFDYDFFLYQWAFAIAAAGITSGSIAERTQFVAYLIYSAFLTGFVYPVVSHWFWSADGWAGASRTSGPLLFGSGVIDFAGSGVVHMVGGIAGFWGALVEGPRIGRFDHAGRSVALRGHSASLVVLGTFLLWFGWYGFNPGSFTTILKSYGPAGTVHGQWSAVGRTAVTTTLAGSVAALTTLFGKRLQAGHWNVVDVCNGLLGGFAAITAGCSVVEPWAAVVCGFVSAWVLIGANALAARLRFDDPLEAAQLHGGCGAWGVLFTGLFARQEYVEEIYGAGRPYGLLMGGGXGKLLAAQIVQIVVIAGWXVSCTMGPLFYALKRLDLLRISADDEMSGMDLTRHGGFAYEDPGDNAGVGEFTLKSAQNRVEPPAEQQPGVKFRNEFKNRDEVTCLPKKKKK

SEQ ID NO: 10439 - protein, 482 aa, Pseudomonas fluorescens PfO-1
MNFPTTLDGLYINGQWSAGREHLRVINPATEALLTTVNGGDESAVHQAVTAATEAFKAWSKTTGAERASILRNIANGVRNGREHLMNLQSSNNGKPQFEAGIDVDDVIATFEYYAELAEGLDAKLDSNVPLPSDDFSARLRREPCGVVGLIVPWNFPMVTTAWKLAPALAAGCCVVLKPSEVTPLPELELATIIAESGLPKGVFNLVCGTGLAVGAPLSADPRIAKVSFTGSNAVGVQVMQRAAETVKGVSLELGGKSSLLILEDADLDLAVELACGGGFFNAGQMCSATSRVLVADELADEFLIRLKAHAEKIRVADPFDPEVEMGALVNQAQYQRVLGHIDRGLSAGAKLICGGNRPADLPRGYFLQPTIFTEVPLDSALWCEEIFGPVICVRSFATEAEAIALANDSQFGLVASVVTRNAETADRVANALQAGLVWLNAPQVIFPQTAWGGYKQSSIGRELGPWGLAAFQEIKHVIRAL

SEQ ID NO: 10440 - protein, 274 aa, Glycine max
MEIFPIPAESYTLGFIGAGKMAESIARGAVRSGVLPPSRIRTAVHFNLARRGAFESFGVTVLPSNDDVVRESDVVVLSVKPQLVKDVVSKLTPLLTKHKLLVSVAAGTKLKDLQEWAGNDRFIRVMPNTPAAVGQAASVMSLGGSATEEDGNIIAQLFGSIGKIWKAEEKYFDAITGLSGSGPAYVYLAIEALADGGVAAGLPRDLSLSLASQTVLGAASMVSQTGKHPGQLKDDVTSPGGTTITGIHELENGGFRGTLMNAVVAAAKRSRELS

SEQ ID NO: 10441 - protein, 393 aa, Oryza sativa
  unsure (1)..(393): unsure at all Xaa locations
RPPRPGRACRRGPAFEEYVKEWKAKKAALGVPAGRCELPFLTGTPKAVECRLCSKIIHPGEEIKCSVSRCGELFHLTCAAEDTTNFIAESFKCPQHVSSDLMNWSNQGCMVCKQKMFFWRCGRCTVAAHTKCAPWPVIHLKDDQGSAICWRHPSDWLLQNEVYPFTLKIDHFMLLDAPQKKIXYNMICSQDSRKKWVFIRGLYMSCSKNCHCSDMCTNKPFRKDKKIKAVKTKRCGWGAISLEPLEKGDFIIEYVGEVINDATCEQRLWDMKRRGDKNFYMCEISKDFTIDATFKGNTSRFLNHSCDPNCKLEKWQVDGETRVGVFASRSIQVGEHLTYDYRFVHFGEKVKCYCGAQNCQGYLGNQIKNPTQRALAIAALENEWLESLKIQQD

SEQ ID NO: 10442 - protein, 454 aa, Cytophaga hutchinsonii
MLNKKHIKETLVLAGPVAFSQLGHISVGVVDTLMAGQIDKEALAAATIALSVFFPLFMLYIGFSYGFTPLISQADGEGDELKIARILKHALVLNLVIGFFLTGLLYLCIYAIPFMHQPAHIVQPATEFFAIIALSMIPVIIFQVFKQFIEGLGNTKQAMVVSILGNVVNIVLIVILVYGWYGLPKLGLNGIAYATLIARIFMAVTMVLFFLFTKNYAHYRSAYKRTKLEWHYFVDVFNKSYPVGLQMSFESGAFSLAAIFVGTFGTAQISAHQIALNLASVTYMVATGIAAAATVRVGYEYGRKEKTELQIAGRTAIILVVALMSTTALMFTLLHQVLPSFYTEDIEVIGIAGSLLWMVAFFQLSDGIQVVSMGSLRGMGDVVVPSSVAFMAYWVLGLPLGAFLAFVLKWEVYGIWVGLTVGLVFASIVLLVRFLKKSKRVVFEEDAKSVMLKA

SEQ ID NO: 10443 - protein, 131 aa, Oryza sativa (japonica cultivar-group)
MDVVKAAQLSGRTLEKVVVHPLVLLSIVDHYNRVARDTRKRVVGVLLGTSSRGSVDVTNSYAVPFEEDDKDPRIWFLDHNYHESMFSMFKRINAKEHVVGWYSTGPKLRENDLDIHALFNNYVPQPCPGDY

SEQ ID NO: 10444 - protein, 628 aa, Bordetella parapertussis 12822
MCGVLGAWWRHHDEHEDARFAAGLRKLAHRGPDDRGSEHFAAPHGRLSLGHTRLAVIDLSAAGHQPMHADADRLAVVFNGEIYNYRELRSELRQIDAIFRGDSDTEVLLAAWQHWGVAALRRFKGMFAFALYDRRQQTLTLARDAFGIKPMYYHAAPERLLFGSELPAVQALLPHPPRLNWQRAYDYLAYGQYDQPPDTFIAGIRQLPAGHLLTLDLRTGRAGEPMAWDDPASQECRPIGFQEAAEELRARFLDNVRLHLRSDVPIGAALSGGIDSSAIVCAMRWLEPDLPIQTFSFISDDAHRSEERWVDLVNQHCGATGHKIHIAPHELLDDLDDLIRVQGEPVGSTSIYAQYRVFKLAREHGVVVTLDGQGADELLGGYGGYPTERLASLLETSRLGAAARLLRQQGRGAPARLLQAAALAAGGRHLANLRHATGRQHAPAWLDAQVLRDQGVTMREPAHAWAAATPLRGRRLVNELAHALYHRGLGALLRHGDRNSMRFSVESRVPFLTQDLAEFALSLPERYLVSDSGQTKHIFRKAMRGIVPDLILDRDDKIGFATPEQQWMQATAPQMRQWLVDAADIPFLRNAEVTAQFDAMIAGATPFSWQAWRWVNFQRWMQHATVLP

SEQ ID NO: 10445 - protein, 224 aa, Lycopersicon esculentum
MGRGRVELKRIEGKINRQVTFAKRRNGLLKKAYELSVLCDAEVALIIFSNRGKLYEFCSSSSMLKTLERYQKCNYGAPEPNISTREALEISSQQEYLKLKGRYEALQRSQRNLLGEDLGPLNSKELESLERQLDMSLKQIRSTRTQLMLDQLTDYQRKEHALNEANRTLKQRLMEGSQLNLQCSQMHKLWAMAGKQLKLRAMASFILWIVNLLCKLGIRMIQLQ

SEQ ID NO: 10446 - protein, 229 aa, Zea mays
MEVAAASAAGYGFKADDDVDSLRATELRLGLPGTEEEEAEESQNKAPPPPPSTPRGKKRDVVASSGPEDAPKKRDCETDTDAAPPPAAKAQLVGWPPVRSYRKSCFQQQAAAKNKPAAALAEEAPAAGGLFVKVSMDGAPYLRKVDLKMYKGYRELREALEAMFLCFSGAGAADAPAVNPSDFAVTYEDKDGDLMLVGDVPFGMFISTCKRLRIMKGSEARGLGSAKNN

SEQ ID NO: 10447 - protein, 380 aa, Pichia methanolica
MSTAGKTITCKAAVAWEAGKDLSIETIEVAPPKAHEVRVKIAYTGVCHTDAFTLSGKDAEGEFPVIFGHEGAGIVESIGEGVTSVKVGDHVVCLYTPECKECKFCKSGKTNLCGKIRATQGKGLMPDGTSRFTCKGKKLLHYMGCSTFSQYTVLADISVVAVDPKAPMDRTCLLGCGITTGYGAATNTAKISPGDNIAIFGAGCIGLSVIQGAVERKAGKIIVVDINDDKKEWADKFGATDFVNPTKLPAGVTIVDKLVEMTDGGCDFTFDCTGNVGVMRNALEACHKGWGESIVIGVAPAGAEISTRPFQLVTGRVWKGCAFGGVKGRSQMPGLVQDYLQGKIKVDEFITHRHPLEDINDAFHDMHAGDCIRAVITMDE

SEQ ID NO: 10448 - protein, 466 aa, Zymomonas mobilis
MADHFDLIVLGGGPGGYVAAIRAAQLNLKVALVERVHLGGICLNWGCIPTKSLLRSAEVYHEMQNAEAYGLTSFKPDFDLDKIIARSREVAARLASGVKTLLRKNKVEVISGVGQLTGNQQMRVETTEVEEKILEAKDIIIATGARARQLPNVHSDGKHIWTYHHALKPPAMPKKLLVIGSGAIGIEFASLYADFGAEVSIVEHAPQILPMEDAEVSAYVAKAFKKRGIRILTQSALQNLTPDDEGVTAEIAGADGKVTKERFSHAIVAIGVVANVENIGLDKLGIKLDRGFIAVDGFGRTNVDHVWAIGDVAGAPCLAHKASHQGVIAAEDIAGCDHVHPLNTQNIPACTYARPQVASVGLTEEKARQQGYNVKIGNFPFIANGKAIAQGATDGFVKTVFDADSGALLGAHMVGAEVTEMIHGYTVARTLETTEAEIMETIFPHPTLSEAMHESVLAAYGRALHF

SEQ ID NO: 10449 - protein, 198 aa, Chloroflexus aurantiacus
MEHALQHLRNVDPTLGHWIEQIGPYTLQRQPHGFATLAYAIISQQLSLVAARTIRDRLNERLGSLAPETIIAADETVLRAAGLSAQKSSYLRDLAERVMSGQLDLNLLPTLDDETAITHLMTVKGIGRWTAEIYLMFALERLDVLPAADLGLRDAVRLIYDQPRLPKPQELRTFGERWRPYRSIACWYLWQARRIMIS

SEQ ID NO: 10450 - protein, 228 aa, Gossypium anapoides
  unsure (1)..(228): unsure at all Xaa locations
FTSLCHTDVYFWEAKGQTPLFPRIFGHEAGGIVESVGEGVTHLKPGDHVLPVFTGECGNCRHCKSKESNMCDLLRINTDRGVMLSDGKTRFSINGKPIYHFVGTSTFSEYTVAHVGSVAKINPAAPLDKVCIXSCGISTGLGATLNVAKPAKGSTVAIFGLGAVGLAAAEGARIAGASRIIGVDLNPNRFEEAKKFGCTEFVNPKDHNKPVQEVLAEMTNGGVDRSVE

SEQ ID NO: 10451 - protein, 744 aa, Pseudomonas syringae
MSQLDKDAFEVLLANCADEPIQFPGAIQPHGLLFTLKEPELTILQVSANVQSVLGKVPDQLAGQTLDCVLGAGWAEVIRSTSANDSLVDVPRLLMSVEGVEFEALLHRSQEALVLELEIQDKAAQAISYSERTGNMGRMLRQLHAAADLQTLYEVSVREIQRMTGYDRVLIYRFEEEGHGQVIAEASAPAMELFNGLFFPASDIPEQARELYRRNWLRIIPDANYTPVPLVPQLRPDTQQQLDLSFSTLRSVSPIHCQYMKNMGVLSSMSVSLIQGGKLWGLISCGHRTPLYVSHELRSACQAIGQVLSLQISAMEALEVSRQRETKIQTLQQLHQMMATSDTDVFDGLAQQPQLLMDLVGATGVAIIEDRQTHCYGNCPEPSDIRALHTWMMAGGEPVYASHHLSSVYPPGEAYQTLASGVLAMSLPKPVDNGVIWFRPEVKQSVQWSGDPNKPLNLDASDNTLRLQPRTSFEIWKVEMTGIATKWSHGDVFAANDLRRSALENDLARQVSKEQQAVRARDELVAVVSHDLRNPMTVISMLCGMMQKSFSSDGPHTSRRISRQSTHAASCQPHERVARDLLDTSKIEAGRTPSRRSRWKSARYSKRPIRCSPRWRMDKSIEISFNAEPDIKVNADPERLFQVLSNLIGNAIKFTPKLGRIGVAAMSNGDEVVFTVRDSGEGIPPEQLPHIFERYWTVKEGNPTGTGLGLYISQGIIKAHGGELAAQSQVGHGSEFRFTVPIAH

SEQ ID NO: 10452 - protein, 228 aa, Gossypium costulatum
FTSLCHTDVYFWEAKGQTPLFPRIFGHEAGGIVESVGEGVTHLKPGDHVLPVFTGECGNCRHCKSKESNMCDLLRINTDRGVMLSDGKTRFSINGKPIYHFVGTSTFSEYTVAHAGSVAKINPAAPLDKVCILSCGISTGLGATLNVAKPAKGSTVAIFGLGAVGLAAAEGARIAGAFRIIGVDLNPNRFEEAKKFGCTEFVNPKDHNKPVQEVLAEMTNGGVDRSVE

SEQ ID NO: 10453 - protein, 228 aa, Gossypium costulatum
  unsure (1)..(228): unsure at all Xaa locations
FTSLCHTDVYFWEAKGQTPLFPRIFGHEAGGIVESVGEGVTHLKPGDHVLPVFTGECGNCRHCKSKESNMCDLLRINTDRGVMLSDGKTRFSINGKPIYHFVGTSTFSEYTVAHVGSVAKINPAAPLDXVCILSCGISTGLGATLNVAKPAKGSTVAIFGLGAVGLAAAEGARIAGASRIIGVDLNPNRFEEAKKFGCTEFVNPKDHNKPVQEVLAEMTNGGVDRSVE

SEQ ID NO: 10454 - protein, 352 aa, Archaeoglobus fulgidus DSM 4304
MKGVLLHGGAGTRLRPLTFTGPKQLIPVANKPVSQYCLEDMIGAGIKEVAIILGETYPEMVEEHYGDGSRFGCKITYIHQGKPLGIAHAVYLAKDFVGDEKFVVYLGDNLIQDGIKEYVKRFDEEDFDAFILLKEVEDPRAFGVAKFEGERLVGLIEKPKEPPSNYAVIGVYMFKPVVFDIIKDLKPSWRGELEITDTLQKMIENGYNVGYAKLKGWWFDTGKAEDILKVNATILDERAKRSVKGEVLASQIEGRVEVGEGAKITNSIVRGPAVIGEDCIIENSFIGPYTSVGERTVIKNSSLEYCIVLSESIIEGVERIEESLIGRKVRIRKNDRKRFLRFTIGDYSEILL

SEQ ID NO: 10455 - protein, 443 aa, Enterococcus faecium
MMEKYQNIVIGFGKGGKTLAKALASKGESVLVVEKSTRMYGGTCINIGCIPSKSLIFNGERGIDFTEAVARKEKLTGMLRAKNYHMISDEATGTVMDGTARFLSNHQIEVTNNGEKVIVEGERIFINTGSEPIILPIKGLNTSRYLIDSTQAMDQEQLPEKLVIIGAGYIGLEFASMFNEYGSKVVVLDAHSEFLPREDEDIAQMILEDMTNAGIEFHLGVSVDQVADQESTAAVTFTEDGQEVTIQASKVLAATGRKPSTASLGLENTDVKLTDRGAIAVDEYLRTDADNIWAIGDVKGGLQFTYISLDDYRIIMDQLKGENKRTTNNRKAVPYSVFITPTLSNVGLTEKQAKAQGVNYKLFKYMTSGVPKAQVLEDPKGVFKVLVDPETDLILGASIYAEDSHEVINLISLAMNGKLPYTLLRDQIYSHPTMSEALNDVLK

SEQ ID NO: 10456 - protein, 695 aa, Zea mays
MMMMPDGGVVSCSPPLPPRALLAASSVLCCVVWVAGPAVLCHHPSIIILYLKKKKKKKKKKKKKKKKKKKIARLRNFTVDNLWLQTMDMALASKASPPPWNATAAEQPIAKRDKAAANDSTYLYTFLEAGPPDGTSDAKAKRQTGSSETPRAGRGTPLRSVSHCPPITPPALSRPLPRARSDPPPMATAMGAMAATCMASIPAAATFPGDLGVGRRRAVVPGWRAGGRRLRATPPARRPFLFSPKGVSDSRSSQTCLDPDASTSVLGIILGGGAGTRLYPLTKKRAKPAVPLGANYRLIDIPVSNCLNSNVSKIYVLTQFNSASLNRHLSRAYGNNIAGYKNEGFVEVLAAQQSPENPNWFQGTADAVRQYMWLFEEHNIMEFLILAGDHLYRMDYQKFIQAHRETDADITVAALPMDEQRATAFGLMKIDDEGRIIEFAEKPKGEKLKAMMVDTTILGLDPERAKELPYIASMGIYVFSKDVMLRLLRENFPAANDFGSEVIPGATEIGLRVQAYLYDGYWEDIGTIEAFYNANLGITKKPVPDFSFYDRSAPIYTQPRYLPPSKVLDADVTDSVIGEGCVIKHCTINHSVVGLRSCISEGAVIEDSLLMGADYYETENDKNVLSETGGIPIGIGKNSHIRKAIIDKNARIGENVKIINFDNVQEAVRETEGYFIKSGIVTVIKDALIPSGTII

SEQ ID NO: 10457 - protein, 388 aa, Desulfovibrio vulgaris subsp. vulgaris (strain Hildenborough)
MAAFKLADRLATLPPYLFAGIDKVKAEVAARGVDIISLGIGDPDMATPGFIIEAMKEAIARPANHQYPSYVGMLAFRQEVANWYDRRFGVSLDPATEVIGLIGSKEGIAHFPFAFINPGDLVLVCTPNYPVYHIATGFAGGEVQFVPLLEENDFLPDLDAIPEDTWKRAKMIFVNYPNNPTAATAPLGFYEKLVDICRRFDVIIAHDTAYTEIYYDEDNRPPSILSVPGAKDVAIEFHSLSKTYNMTGWRVGMAVGNPTLVAGLGKIKENMDSGIFQAVQEASIVALRDGDDFCRELRGIYRQRRDTVINALHKAGIQCRVPQATFYVWARVPQGHTSADFVTRVLQETGVVVTPGNGFGTPGEGFFRISLTVDNARLEEAVSRIAKL

SEQ ID NO: 10458 - protein, 422 aa, Xenorhabdus nematophila
MRPSDIEFDLRHIWHPYTSMIRPFPAYPVVSATGVELVLSDGRKLIDGMSSWWAAIHGYNHPVLNEAAKSQIDKMSHVMFGGITHPPAVELCKQLVALTPDSLECVFLADSGSVAVEVALKMALQYWQARGEKRQRFLTLRHGYHGDTFGAMSVCDPDNSMHSLYNGYLPNHLFADAPTCQFDDEWQPEDIDSFKRLLRQYHAEITAVVLEPIVQGAGGMRIYHPEYLRQVRQLCDEHQILLIADEIATGFGRTGKLFACEHAQIEPDILCLGKALTGGYMTLSATLTTRHVAEIISQGEAGCFMHGPTFMGNPLACAVASASLKLLSESSWQQHIQSIETQLKTELLPLKIHHSVKDVRVLGAIGVVEMKQPVDVASLQRHFVQQGVWIRPFGRLIYLMPPYIIQSEQLSQLTTAIVDAIN

SEQ ID NO: 10459 - protein, 180 aa, Glycine max
MGNYVSCTLAPPLMKNSKATRVIIPTGEVKQFKEIVKAAELMLEHPNYFLVNSRSLHIGRRFSALGADEELEFGNVYIFFPMRRVNSLVTAPDMAVLFLAANSAAKRLSGSKARVLPDNCGGKAWQQREEEEESSKDESLSVIPRLSLEGVESGFQYRLNYCRSRKPVLETINEEPVRLR

SEQ ID NO: 10460 - protein, 449 aa, Bradyrhizobium japonicum
GVEMSSSFAKDSQLPFSAETAVLHAGYRRDPVTKAVAVPIYQNTAYELDGDLNHIADVYTSRADGFTYTRIINPTTRALEKRYAAVDMGSDSLAVASGQAATFLAILNLSSGEVGDNIVASPYLYGNTWNLLHNTLKRLGISVRTADPRRPETFERAIDDRTICLFGEVISNPCLIPLPVKQLAEIGRKHGVPLVVDNTTTPLVCRPSDLGAAITTYSATKYICGHGTTLGGLIVDNGKFSYRGASRFPLFNSPDEAHGGIIWRNALQDVDDLGKSEVLLKARMTWLRDTGAAIAPFASFQLIQGLETLPLRMKQHCANARIVADVLKEHPKVRRVFYPGLFEGADRETVDQTLNPAYGHGAMVMFEVEDEQAGRKFIQNVDLMYHVSNVGDARTLVTHPVSTTHTTVPREKREPPAYLAARSDFAWASKMSTTSCAIWTGRFPQSDNL

SEQ ID NO: 10461 - protein, 213 aa, Triticum aestivum
  unsure (1)..(213): unsure at all Xaa locations
PRVRQLSFLHSFILSYPRPLSGMGNFASCTLARIPGAAKGARVVLPDGGLRLVRPPATAAELMLEAPGHFLADARALQAGRRIEALAADDDLELRGVYAAFPMKRLGSKAAPTDLARLARRFREGSSWAETASAKVAAIVVAPPEVASVAAEADSPRWRXRLDEMALTTKQLPRSLGTKQRITGXRXPSGNDLENIHXESTRISKAKVKWQLT

SEQ ID NO: 10462 - protein, 117 aa, Glycine max
GEKGGNFFILLSLPFFALLSFQIFALKPAVHQAFLNFVPRKMNEVDFWNKYFKAEYLHSTKNAVAAAAEAAEDEDLAVFLKDDEILEIEARKKVRRVDPTLDMEADQGDDYTHLPVW

SEQ ID NO: 10463 - protein, 485 aa, Microbulbifer degradans 2-40
MSLTLTNSKLQRQGSVIDGAWLQSSDEFVVENPATGQVVATVANAGAAEAEAAVLAAERAGVQWREFSAKKRSTLLKAWYELVVSNANDLAVLLTTEQGKPLAEAKAEILYGASYIEWFAEQAKRIEGAVIPAPASNQRIVTVKQPVGVVAAITPWNFPMAMLARKIAPALAAGCTVVAKPAKETPLSALAMAYLAQEAGIPPGVINLVTGQDSSAIGGVFTQHPSVKKLTFTGSTAVGKTLLEQSAATIKKCSMELGGNAPFIVFDDADIDAAVAGCIAAKFRNAGQTCVCVNRIFVHDKVKAAFTKKLVEAVAKLKVGDGIEEGVAIGPLINAAAFKKVSELVIDACNKGAKAIVAEGHTHLNGALFYPPTVVTEATTQMDVFNEEIFGPVAVVYSFSSEEEAIALANNTPFGLAGYFYSRDIGRVWRVASALEVGMVGVNDTAISNEMAPFGGVKESGFGREGSQMGLDDYLETKYMLMGGL

SEQ ID NO: 10464 - protein, 346 aa, Pseudomonas aeruginosa UCBPP-PA14
MRSQDLHQRLADLGAKPLHCGRIVRAWLQGRALDACTARQPAEDFLPLGVRHGLPQVAAELEGIARLHSEHPASDGSSRLLVELADRQMVESVLLPRGGLCVSTQVGCAVGCVFCMTGRSGLLRQVGSLEMVAQVVLARRRRAVKKVVFMGMGEPAHNLDNVLEAIDLLGTDGGIGHKNLVFSTVGDPRVFERLPLQRVKPALALSLHSTRAELRRQLLPKAPPLSPEELVEAGEAYARRVDYPIQYQWTLLEGINDSLEEMDGILRLLKGRFAVMNLIPYNSMDGDAYRRPSGERIVELVRYLHSRGVLTKVRNSAGQDIDGGCGQLRARATQGTAERRIPARQA

SEQ ID NO: 10465 - protein, 540 aa, uncultured bacterium 581
MSSIMNIDPELQSLANQIATRRVTECFEDDANRASDFRCTSNGLVLDYSKHHIDAPSRQRLLEIAQQSALAADFEALTRGDAINITEERAALHTLLRGTRKEESPELYAEVHATNSKLAQLVAKIHSGAWSGFGANRFTDVVNIGIGGSDFGPKMVCRALRTETDLMKSHFVANVDPQDLDETLASLDPQSTLFIICSKSFTTEETLTNALRARAWLLAAGAKDTDVNKHMVAVTTNLEGASRFGISPENCFPMWDWVGGRYSLWSAVGLSIALQSGWETFLRLLTGAHEMDIHTLGSHDKNNLPLMMALLEFWNTVYLKTDTHVVLPYAQALEKLPDFLQQLSMESNGKRVDLSGSALTLPSAPVLWGSAGTIGQHSYYQLLHQGNRRFTADIILPLSHKEKDLDAQRKLAANALAQSRALLVGRDKSAAQRLAAERGQPESFAPHYEMPGNHSHSLIYFESLTPEILGALIAAYEHKTFFLSRLLGINAFDQWGVELGKVIGRQILTMLEHGEGLEVIDPATAIAVEAWRSANAKNTS

SEQ ID NO: 10466 - protein, 416 aa, Salmonella typhimurium LT2
MESKVVVPVEGKKITLQNGKLNVPENPIIPFIEGDGIGVDVTPAMLKVVDAAVEKAYKGERKISWMEIYTGEKSTQVYGQDVWLPAETLDLIRDYRVAIKGPLTTPVGGGIRSLNVALRQELDLYVCLRPVRYYQGTPSPVKHPELTDMVIFRENSEDIYAGIEWKADSADAEKVIKFLREEMGVKKIRFPEHCGIGIKPCSEEGTKRLVRAAIEYAITNDRDSVTLVHKGNIMKFTEGAFKDWGYQLARDEFGGELIDGGPWLKIKNPNTGKEIVVKDVIADAFLQQILLRPAEYDVIACMNLNGDYISDALAAQVGGIGIAPGANIGDECALFEATHGTAPKYAGQDKVNPGSIILSAEMMLRHMQWFEAADLIVKGMEGAIAAKTVTYDFERLMEGAKLLKCSEFGDAIIANM

SEQ ID NO: 10467 - protein, 501 aa, Lotus japonicus
MALPECSAANLAQLIGPNATDAAAVAGFICDQFTAVGQRFSDTAFAVDSTYLLFSAYLVFSMQLGFAMLCAGSVRAKNTMNIMLTNVLDAAAGGLFYYLFGFAFAFGAPSNGFIGRHFFGLKDVPTVAFDYSYFLYQWAFAIAAAGITSGSIAERTQFVAYLIYSSFLTGFVYPVVSHWFWSGDGWASATNTGNLLFGTGVIDFAGSGVVHMVGGVAGLWGALIEGPRIGRFDHAGRAVSLRGHSASLVVLGTFMLWFGWYGFNPGSFTKILSAYDSGNYYGQWSAIGRTAVTTTLAGCTAALTTLFGKRIISGHWNVTDVCNGLLGGFAAITAGCSVVEPWAAIVCGFVAAVVLIACNMLAEKVRYDDPLEAAQLHGGCGAWGIIFTALFAKEEYVNQVYPGKPGRPYGLFMGGGGKLLGAHVIQILVIIGWVSATMGPLFFILNKMKLLRISTEDELAGMDLTRHGGFAYAYEDDESHKPGIQLRKIEPNSSSTPSAES

SEQ ID NO: 10468 - protein, 228 aa, Gossypium costulatum
FTSLCHTDVYFWEAKGQTPLFPRIFGHEAGGIVESVGEGVTHLKPGDHVLPVFTGECGNCRHCKSKESNMCDLLRINTDRGVMLSDGKTRFSINGKPIYHFVGTSTFSEYTVAHVGSVAKINPVAPLDKVCILSCGISTGLGATLNVAKPAKGSTVAIFGLGAVGLAAAEGARIAGASRIIGVDLNPNRFEEAKKFGCTEFVNPKDHNKPVQEVLAEMTNGGVDRSVE

SEQ ID NO: 10469 - protein, 349 aa, Streptococcus mutans UA159
MKTAVFVKAGQMAIETIEKPSVIEVDDAIIRVVRACVCGSDLWSYRGDDDKATHSANSGHEIIGIVDEVGSAINTVKKGDFVIAPFTHGCGHCAACRAGFEGGCQGHDRSTNFSSGYQAEYVRYAHADWSLVKIPGQPSDYSEGMIASLLALADVMPTGYHAARVANVQKGDTVAVVGDGAVGLCAVIAAKMRGAKRIIIMSRHKDRQELALEFGATDIVEERGEEGVAKVLELTNGDGVDAALECVGTQLSTETALAIARPGASIGRVGVPHTKDINLSDYFFQNAIIAGGPASVTTYDKSVLLKAVLDGEINPGKVFTQSYSLDDIDQAYKDMQERKTIKSMVVVSK

SEQ ID NO: 10470 - protein, 360 aa, Synechococcus elongatus PCC 7942
MAVRKLGVLTSGGDCPGLNAVIRAIARHAVGNYGWELWGIAYATQGLLKRQAIALSPHHFDRQSLDPLLCSGGTILGSINRGDTLAHQAEILAGYQELGLDALIGIGGDGSLAILRQLAEAGRWQFIGIPKTIDNDVALTERAIGFDTAIHTVAEALLSLGSTAASHDRIMIAEVMGRQSGHLALQGGIAGGADVILLPEIPYRLLELCHYLQQLRDRWQRRYAVIAIAEGTHHPPEVTQGPGSLGEQLVQAITAQDPTLDARVTVLGHVQRGGNPVASDRLLATQMGYAAVERLAAGASGEMMAWQGGRVVSVPLEAVCLQSPTLVDPHSPLVDTAAGLGIFLGDRSLTPWRGSACPTH

SEQ ID NO: 10471 - protein, 604 aa, Magnaporthe grisea 70-15
MSGAEAPLIANIDATGEVEPENASSEGIHEDGANLPRLPDAPPGLFIWLLVLSAGISGLLFGYDTGVISSTLVSIGDSLSGRQLTSLDKSVITSCTSLFALLISPFSSSIADSLGRKRVILVADFLFAVGAILQACSDTVAEMVAGRSIVGAGVGAASFVVPLYIAETAPADHRGKLITINVLFITLGQVIAYVIGWLFAEYGDKSSGWRWMVGLGAVPAVVQAVLLLGMPETPRWLVKSGREEEALEIIRRVSGGKHRSTSDRVAQRVLEEIQVEIREESEARRRLLASRDGMQSSRPEWMERWSELVKVRRNRRALTVACLLQGLQQLCGFNSLMYFSASIFTMVGFATPTLTSLTVAVTNFVFTVLALLLVDRIGRRRILLYSLPFMIAGLLLAAFAFSFISISSAPTSSPIPSAAKTGDAQLSPRAAAVMILISIMIYVASYAIGLGNVPWMQSELFSLSVRSVGSGVATGTNWLANFVVGLTFLPLMDAFGPAATFTMYGAVCGIGLVLIWRIYPETTGLSLEEAASLLEGSAWGVRDNQASFGCKISGANWDRARNHLRATIGTLKGGATGGPERIGKTDTEAPAWDLLGEGIRYYLV

SEQ ID NO: 10472 - protein, 313 aa, Zea mays
METMAKYNRSNPAVKRILQEVKEMQCNPSPDFMALPLEEDIFEWQFAILGPRDSEFEGGIYHGRIQLPSDYPFKPPSFMLLTPSGRFEIQKKICLSISNYHPEHWQPSWSVRTALVALIAFMPTNPGGALGSLDYKKEDRRALGIKSREAPPKFGSPERQKLIDEIHEQMLSKAPPVPQTLPNVPNEESNELPASDPSGEHADKVDEGDNTSGSVSDSSSGLPVPESESGVTENTGETSAVEVANHHVPEASHRENIPRVSSSHQNPAVAIQKPKHDRLLTLAAFGLTLAIMALVIKKFLKINGLGGFIEGKF

SEQ ID NO: 10473 - protein, 323 aa, Methanosarcina mazei Goe1
MGEKYFNSEEYNLTEFLFIGELTLTIKKALIPAAGLGTRFLPATKSMPKEMLPIIDTPVIQYVVEEAIASGIEDIIIITGRGKRAIEDYFDDSPELEMHLAKKHQTDMLKLVRDISSLVDIHYIRQKEPNGLGDAVLRAENHIGDEPFAVLLGDDIIVNDKPCTAQLIENFEKYGRSTIAVEEVPYEKLSSYGIIKGKPLDDSLYVLEDIVEKPAPEDAPSNIGAIGRYVFTPEIFDCIKHAGTGVGSEIQLTDGIRLLNKSQMIYACRFKGKRFDTGDRLGYVKSIVDFALQNENLRDDVLEYLREILAVNKISPEIDKLKQ

SEQ ID NO: 10474 - protein, 449 aa, Bradyrhizobium japonicum USDA 110
MSTRTSRVLHRSLRETPPKAIGGEGIYLFAEDGRRVIDASGGAAVSCLGHQHPRVIAAMAKQASTLAYAHTAFFSSEPAEALAETLVGHEPGGLAYAYFVSGGSEAIEASIKLARQYFIERGEPQRQHFIARRQSYHGNTLGALAAGGNAWRRAPYAPLLSAAFSHVTPAFAYHEKHDGESDAQFVARLAAELEAEFQRLGPNSVAAFLAEPVVGATAGAVTAPDGYFRAVREICDRHGALLILDEVMCGMGRTGTTHAWEQEGVAPDIQAIAKGLGGGYQPIGAMLASGRIIDTIRSGSGAFQHGHTYLAHPLACAAALAVQDVIREDGLLDRVKERGKQLEQRLTERFGNHRHVGDIRGRGLFWAIELVADRASRTSFDPALKLNQKIKAEAFANGLGCYPGGGTVDGVRGDHVLLAPPYIASVAEIDLIVDKLGTAVDNVLRSVNH

SEQ ID NO: 10475 - protein, 192 aa, Glycine max
MGLLDLEKHFAFYGAYHSNPMNVAIHTLFVWPILFTGQMILYFTPPLLTTVGFLPTVLVLNWGFFSTLFYALFYVALDYKAGSLAAFLTFFCWLTSSFIANSLAWTLSWKVVLAAQLFCWTGQFIGHGVFEKRAPALLDNLAQAFLMAPFFVLLEVLQFVGYEPYPGFNTRVKARIDADIKQWQAKKQKKHS

SEQ ID NO: 10476 - protein, 322 aa, Xanthomonas axonopodis pv. citri str. 306
MTASPSKLAQLRELSVVVADTGDYDAIKRLKPVDCTTNPTLVKKALDLPVYADLIERELAWGREHGGDDRTATVNEVADRLTIGVGVKLAELVPGRVSTEVDADLAHDTQATIAKARKFIAMYAERGVSKDKILIKIAATWEGIEAARQLQKEGIDCNLTLIFNRSQALACAEAGVFLISPFVGRILDYYVAQGQTPASIDEDPGVVFVRTVYNEFKQRGSSTVVMGASFRSTAQIEALAGCDRLTISPDLLEKLDAEHGELPRKLSPAQADNAQFTPIDSDSFASGLAADPMATEKLAGGIDTFAKDLHALRKTIADKLAG

SEQ ID NO: 10477 - protein, 707 aa, Haloferax mediterranei
MPRNLRFLSVVNHVTKQVPTTCMRCAVGCGHVHLGSENAYGLETVRGDPSHPVNNGLACGRGIRESADPAGEWLTRPLVREDGELVQTSWSDAMARVGATIRTAVATDPDEVAVLGSGQQTNEAAYALGKLARAGIGTRNYDANTTLCMASAVTAYYRAFGSDAPPPTYDDIPNAETHLVWGANPAVAHPVMFRWIRQSRTDGRLVVVDPVETKTAAVADDHVSVAPGGDLALARAILRHIVDTDQIDESFVRSNTEGFDDVVSALPSVTDAAARAGVSLDTVEELAALLDAPTLIYWGMGVNQSVRGTATAGALVNLCLASGNLGPGTGPFSLTGQANSMGTRVCPRKNVSGHRPFEHPDHRRAVAEAWDVPVSRLPDDSGPGPVGILDSSPSVVWTVATNPLAGFPDATAAREVLRDSFLVVQDAFRSDTVELADVVLPAASWGESEGTPMNMERTVSRIRAATETPPGVRQDLDIIADVAARVAPGLLPRPPVSPSAIFDEFAALTEGTDADCSGISYTRLDGERAVRWPAPERNSDAGYRYYDPSTSRWRFPTPSGKARFSTLDGEPLPEPVDGDYPLTLTTGREADGYNTGVRSRSDTPEEPVARSTPRPSDTYHDAVADTDGELRTTVVSRRASVSVTLDRDDAVPPGLVWLSIHHPMTNQLTSPAVDPQSNEPNFKQCAVRFVHPDAPAKADFLAAEVSD

SEQ ID NO: 10478 - protein, 252 aa, Brassica oleracea var. botrytis
MGRGRVEMKRIENKINRQVTFSKRRNGLLKKAYELSVLCDAEVALIVFSSRGKLYEFGSVGVERTIERYHRCYNCSVTNNRPEESKQNWCQEVAKLKAKYESLVRTNRHLLGEDIGEMGVKQLQALERQLEAALTATRQRKTQVMMEEMEDLRKKERQLGDINKQLKIKFEAGGHAFKSFQDFWPNSAASMAGDPNNSKFPVQPSHPDSVDCNTEPFLQIGFQQHYYVQGEGSSVPKSNVACETNFVQDWFL

SEQ ID NO: 10479 - protein, 353 aa, Streptomyces violaceoruber
MKALILSGGMGTRLRPFTYSMPKQLVPVANKPILVHCLENVRAIGVEEVAVVVGDRADEVRAVVGDGSAFGLDVTYLQQEAPLGLAHCVSIAEEFLGDEDFVMYLGDNILAEGIAESARAFRDERSAARLLLTKVADPRAYGVAETDATGRVHALVEKPERPRSDLAVIGVYFFTAAVHDAVRAIEPSARGELEITDAIQYLVERGDRVVADEYTGYWKDTGSPDDLLDCNRVLLGRLRPGVHGEVDAASTVEGTVVVEAGRSWSDSRLVGPLVVGAGSVVRGSELGPYTALGRDCVLEDAGIRDSIVLDGVSIQGVRGLSGSLIGRSAAVRTGEAAGRRLIIGDHTQAEVAA

SEQ ID NO: 10480 - protein, 392 aa, Synechococcus elongatus PCC 7942
MKLSERVGRVSPSLTLAIAAQAKAMKAEGLDVCSFSAGEPDFETPLHIRNAAAQALAEGKTRYGPAAGEPDLREAIAQKLRADNGLDYQAANILVTNGGKQSLYNLMQVLLDPGDEVIIPAPYWLSYPEMVKLAGGVPVIVETFASDGFKLQPQQLAGAITPRTRLLVLNSPSNPTGMVYSRQELEAIAPIIEAHDFWVVSDEIYEKILYDGADHHSIGSLSPACFERTLISNGFAKAYSMTGWRVGYLAGPSELIAAAASLQSHSTSNVCTFAQYGAIAALQGPQDCVAEMLAAFTERRQLILNGLNQIAGLSCPIPEGAFYVFVDISKTGLDSMTYCRQLLDQHQVAAIPGIAFGDDRSIRLSYATDCQTIEKGLERLQLFQNSLLGVSV

SEQ ID NO: 10481 - protein, 207 aa, Glycine max
MALGRRSGLFALEKHFAFYGAYHSNKINIAIHVLFVWPIFFSALLILYFVPLPPLFNLQNLEFSMWENYVILVWNVGFLVALLYSVFYVSLDLKAGSLAALLCALCWIGSSFVASQLGLSLAWKVVLVVQIVCWTGQFIGHGVFEKRAPALLDNLIQAFVMGPFFVLLEVLQTLFGYEPYPGFNSTVKAKVEANINEWQESKQKLIS

SEQ ID NO: 10482 - protein, 416 aa, Bdellovibrio bacteriovorus
MSNKIQRVRGTRDLLPEDSILFRFVEESAYEKALLYGYGEIETPIFEFSDVFHRTLGETSDVVNKETYDFTDRGGESLTLRPEGTAGVARAFISEGMMQNLPLKFYYSGPMFRYERPQKGRYRQFYQLGAECLGYESPLADVETISLAWDLLKKIGISDDCTLEINTLGDAESRAAYRDTLVNYFTAHKDQLSEDSKMRLEKNPLRILDSKDEGDKKLNANAPKLEQSLNQTSQDFFKKVIAGIEKLGIPYKINDHLVRGLDYYCHTVFEFTTTKLGAQGTVLAGGRYDGLIETMGGPKTPGVGWAAGIDRLADLTPKELATKKEVIIAVVGADEQGEDESVKVAHEMRVRGFKTENFLSGKMGKKMQKANKLGAHYALILGGNEVTNKTVTVKNFTTGEQKEITRAELQTYPFSI

SEQ ID NO: 10483 - protein, 445 aa, Pseudomonas syringae pv. tomato str. DC3000
MTLRQFAGLGALLSLAIPGLALAADPVAEPVLNSGDTAWMLTATALVLFMTIPGLALFYGGMVRSKNILSVMMQCFAITGLISILWVVYGYSIAFDTTGMEAGVVNFNSFFGGMGKAFLAGITPASLTGPAALFPEAVFVTFQMTFAIITPALIVGAFAERMKFSAMLIFMGIWFTLVYAPIAHMVWGGVGGLMWDWGVLDFAGGTVVHINAGVAGLVACLVLGKRKGFPTTPMAPHNLGYTLIGAAMLWVGWFGFNAGSAAAANGTAGMAMLVTQIATAAAALGWMFAEWLTHGKPSALGIASGVVAGLVAITPAAGTVGPMGALIIGLAAGVICFFCATSLKRKLGYDDSLDAFGVHGIGGIVGAILTGVFAAPALGGFGTVTDIGAQVWIQFKGVAFTVVYTAIVTFIILKVLDAVMGLRVTDEEESVGLDLAQHNERGYNL

SEQ ID NO: 10484 - protein, 134 aa, Triticum aestivum
  unsure (1)..(134): unsure at all Xaa locations
MAPTVMASSATSVAPFQGLKSTAGLPVSRRSNGASLGSVXSNGGRIRCMQVWPIXEGIKNFETLSXWPTAQQRRASSKQVDYLXRLQXWVPCLEFKXRLGSTFRXEQQRHLPGYXRMGRYWDNVXKLXXXSGCN

SEQ ID NO: 10485 - protein, 441 aa, Salmonella typhimurium LT2
MTQYQALIIGFGKAGKTLAATLAKTGWRVAIIEQSASMFGGTCINIGCIPTKTLVHDAEREGDFSVAMQRKAAVVNFLRDKNFHNLADLDNVDVIEGRAEFIDNHTLRVFQADGERVLRGEKIFINTGAESVIPAITGLTTTAGVFDSTGLLSLSQRPARLGILGGGYIGLEFASMFANFGTKVTIFEAAPQFLPREDRDIAQAITRILQEKGVELILNANVQAVSSKEGAVQVETPEGAHLVDALLVASGRKPATAGLQLQNAGVAVNERGGIIVDDYLRTTADNIWAMGDVTGGLQFTYISLDDFRIVRDGLLGDGKRSTRDRQNVPYSVFMTPPLSRVGLTEEQARASGATVQVVTLPVAAIPRARVMNDTRGVLKAVVDVNTQRIVGVSLLCVDSHEMINIVKTVMDADLPYTVLRDQIFTHPTMSESLNDLFSLIK

SEQ ID NO: 10486 - protein, 320 aa, Streptococcus mutans UA159
MKKTSLPVGMHDKLFKRARVMYEIERDISNLLIKQGFNRIETPTLEHFEVFADDVSSEHYHLFDKKGNLLSLRPDITSQIGRVIASTRVETPIKFSYSGKVFKYNEELRGLANEHTQAGIEIVGYKTQDAIKDALLSAKDALKASGLKDYKFEFSHAHILQTIFANLDIPETAKKELTTFIQDKNITGLNEFTHRYPSEFNALIRQLPFLFGESHQVLKKARQLTNHQTILSALTDLEDLLQELAVSLAEITLDLAQIASMPYYTGLMFKVFGDKIPDAFVSGGRYDKLFERFGAKELTAIGWALDIDSVYQAIHDHIRF

SEQ ID NO: 10487 - protein, 399 aa, Vibrio vulnificus CMCP6
MKIMFEKVVAAPADPILGLTEEFKKDPRAEKINLGVGIYKTEQGETPVLATVKKAEAALVETEKTKSYLTIEGTAEYALAVQKLLFGADAELINAQRAKTAQAPGGTGALRVAGEFIKRQLGDVKIWISNPTWANHHGVFRAAGLETVEYAYYNPETKDKDFAAMLADLEKASAGDVVLLHGCCHNPTGIDPTAQEWEALAKLVADKGLLPLFDFAYQGFAKGVEEDAQGLRTFAKFNKEILVASSFSKNFGLYNERVGAFTLVAESQEIAETAFSQVKAIIRSIYSNPPAHGSAVVTHILNDAALRAEWEAEVAEMRDRIQEMRELFVTTLKEEGVAADFSFIQRQNGMFSFSGLNKDQVARLKEEFAIYIVGSGRISVAGMTKSNMGPLCKAIAAVL

SEQ ID NO: 10488 - protein, 589 aa, Helianthus annuus
MCGILALLGCSDDSQAKRFRVLELSRRLKHRGPDWSGLYQHGDNYLSHQRLAVIDPASGDQPLYNEDETVVVTVNGEIYNHMELREKLMGHKFKTGSDCDVIAHLYEEHGENFVDMLDGMFSFVLLGTRDNSYLVARDAIGITSLYIGWGLDGSVLISSGLKGLNDDCEHFEVFLAGHLYSSKIRGFRRWYNLPWFSESIPSTPYDPLVLRCAFENAVIKRLMTDVPFGVLLSGGLDSSLVASVTARHLAGSKAAKQWGAQLHSFCVGLEGSPDLKAAREVADYLGTLHHEFHFTVQDGIDAIEDVIYHIETYDVTTIRASTPMFLMSRKIKSLGVKMVISGEGSDEIFGGYLYFHKAPNKEEFHQETCRKIKALHQYDCLRANKSTSAWGLEARVPFLDKEFINVAMSIDPEAKMINMDQKRIEKWILRRAFDDEEKPYLPKHILYRQKEQFSDGVGYSWIDGLKSHAEQHVTNKMMLNAERIFPHNTPVTKEAYYYRMIFERFFPQNSAKLTVPGGASVACSTAKAIEWDASWSNNLDPSGRAALGVHNAAYKKNSGSISSANLAPSIADNVPRMMDITGPELVIRS

SEQ ID NO: 10489 - protein, 245 aa, Nicotiana tabacum
MGRGRVELKRIENKINRQVTFAKRRNGLLKKAYELSVLCDAEVALIIFSSRGKLSEFCSTSSMMQTLEKYQQCSYASLDPMQSASDHTQNNYHEYLRLKARVELLQRSQRNLLGEDLGTLNSGELEHLEHQLDSSLKQIRSRKTQNMLDQLADLQQKEQMLAEANKQLRRKLEESAARVPLRLSWDNGGQTMQHNRQLPPQTEGFFQPLGLNSSPQFGYSPMGGNEVNAAATANNMNGFIPGWML

SEQ ID NO: 10490 - protein, 333 aa, Zea mays
MDGGGGAGGAEGELTAQETALYDRQIRVWGVDAQKRLSKAHVLVCGMNGTTIEFCKNIVLAGVGSLSLMDDNVVTEEDLNANFLIPPDESIYGGRSRAQVCCESLIDFNPMVRVSVEKGDPSLIDGEFLDKFDIVVLSRASLKTKLLINENCRKRSKHIAFYTIDCKDSCGEIFVDLQKHSYVQKKPGGATEQQELTYSSLQEAISVPWNSLPKKTAKLYFAMRVLEDYELSEGRSPGETTLSDIDAVLARRKDMCDKMSLNESRIPTTLVERLLAAGKKEHPPVCAILGGILGQEVIKSISCKGDPVKNFFYFDVADGKGVIEDIPPPPPAK

SEQ ID NO: 10491 - protein, 156 aa, Haemophilus influenzae
NRANTPVLVDGKDVMPEVNAVLAKMKDFCQRIISGEWKGYTGKAITDVVNIGIGGSDLGPYMVTEALRPYKNHLNMHFVSNVDGTHIAETLKKVNPETTLFLVASKTFTTQETMTNAQSARDWLLKAAKDESAVAKHFAALSTNAKDVEKFGIDTN

SEQ ID NO: 10492 - protein, 228 aa, Gossypium cunninghamii
FTSLCHTDVYFWEAKGQTPLFPRIFGHEAGGIVESVGEGVTHLKPGDHALPVFTGECGNCRHCKSKESNMCGLLRINTDRGVMLSDGKTRFSINGKPIYHFVGTSTFSEYTVAHVGSVAKINPAAPLDKVCILSCGISTGLGATLNVAKPAKGSTVAIFGLGAVGLAAAEGARIAGASRIIGVDLNPNRFEEAKKFGCTEFVNPKDHNKPVQEVLAEMTNGGVDRSVE

SEQ ID NO: 10493 - protein, 323 aa, Mesoplasma florum L1
MKRIGVLTSGGDAPGMNNAIAGVVKAAEAQGIEVYGVRDGYKGLINGWFEKLDSKFALEIISKGGTVLGSARLPEFKEESVRQKAVDQLKAHDIEALVVIGGDGSYMGAQRLTEMGINCIGLPGTIDNDIVSSDYTIGFDTALNTVIESVEKVRDTMQSHNRAAVIEVMGNGCGDLVTYAAIATQAEIFSPSESKLTVEQICEQAKKFAEANHRSLIILISEKQLDANELAKKVEEASGYVTRATILGHVQRGGRPSGMDRYLAFTAAIYAVEKLIEGKGGLYIGLSENKLVARDIESTLNMPKPDKTEFIEKIRLLNAKISK

SEQ ID NO: 10494 - protein, 475 aa, Bordetella bronchiseptica RB50
MSTQYRSFVAGQWQDGGEPVALYNPSDLQEEAGVYMHAPVEMVNQAVRAAEEALDAWRGLHAMARSRLLDGIADGLVRRRDELAMAIAREQGKPLRDALAEATRAADIFRYFASETIRQKGYTYASIRPGVRVEVQRNPVGVVALVTPWNFPVVIPAWKAAAALAYGNTVVMKPSEIAPCGAWILADVMREAGLPAGVFNLVLGAGQAGAALVAHEAVAAVSFTGSVATGKRIAAAAAGKRIQLEMGGKNPLIVLDDADLDTAVACAIDGAFLYAGQRCTASSRIIVTEGIHAAFVKRLLAQTASLAVGHALDEATVIGPVVNAEQFEKNRRYADLARQEGGTVAGGRALSRPTRGHYFEPCLVTGLDNSATVCREEVFGPFACVLTARDYEHALAIANDTPFGLSSGLCTTSMKHAQHFKAHTKSGLASINTSTSGVDFHVPFGGNGASSYGPREQGEFAIEFFTTLRTVYIGD

SEQ ID NO: 10495 - protein, 175 aa, Aegilops tauschii
MAPTVMASSATSVAPFQGLKSTAGLPVSRRSNGASLGSVSNGGRIRCMQVWPIEGIKKFETLSYLPPLSTEGLLKQVDYLIRSKWVPCLEFRKVGFIFREHNVSPGYYDGRYWTMWKLPMFGCPAPTQVIPEVEEVRKEYPDPYCRIIGFDNMRQVQSVSFIASKPPGCEESGKA

SEQ ID NO: 10496 - protein, 586 aa, Haloferax mediterranei
MASKKEQWKSDLYGDAVRDELEAFAEEGFESIPEDERDKWFTRFKFWGVFQQRTGQESYFMMRLTNANGVLEPGQLRTIAEVARDYATGPVDNPEFGNGWVDLTTRQSIQLHWLELEDIPEIWEQLESVGVTSRSAGGDTMRNITGCPVAGKDTHELVESKPLLDRFQSELREDNALSNMPRKFNISVTGCREGCAQDSINDIGWNPPGKRSTERLFTGFNVRVGGGLGSRKPRVARSLDVFVADEERAYEVVRGFVELYHDHGNRDVRARARSRFFVDDWGTEKIRDRLESEYLDFELQSAGEDIRDEYTYNAGRPQSAGKSDHVGVHEQSDGRYYVGLSVAVGRLTAADALELADLADKYGSGQIRLTRRQNPIVMDVPAGALDDLLAEPLLSKHTPEPNPFQRGTVACTGTEFCSLALTETKARTARMLRWLRDNVEVPDDVHQLKIHYSGCTADCGQANTADIGLFGMRAQKDGEMVEAMDIGVGGGIGDEPSFVEWIHQRVPADEVPGAIASLVEAFAAHRTAGQTFRQWVEAEGPDAVAEYCEPIETDFEAPYMHDAKQSWYPFADEDEPPKTEQPMTSD

SEQ ID NO: 10497 - protein, 510 aa, Caulobacter crescentus CB15
MKLTFKPLAGLMLAATIAGAPLGATAFAQEAAPAPVAAAPAEAAPAPAAAPAEAAPAPAAAPTIEDKMDKGDNAWMLTSALLVLLMILPGLALFYGGLVRAKNMLSVMMQVSTVALIGFVAWMLWGYSFAFTDGGSWDKFVGGLGRVFLNGVTPASNVATFSTGVVIPELTFIAFQSTFAAITAALVVGSLVERMKFAAIVAFAILWPLLSYYPIAHMVWWWPGPNAIALAPEDTVKSGLLWGFGALDFAGGTVVHINAGIAALVGALILGKRQGYGKEPMPPHSLTLTLVGAGLLWVGWFGFNAGSNLESNGYASLAMVNTFIATAGAGLSWILVEWVTRKKPSALGLASGIVAGLVAVTPAAGFAGPMGALILGLVVSPICIIFCSVVKNALKYDDSLDAFGIHGIGGIVGAIGTGLVVNPAWGGAGVVDYTSCGKDGDLSTCDTAVYDMGVQLMAQLKAVGVTILWSAIATAIVFFIIKLVIGLRAAPEAEEDGLDISEHGERAYHS

SEQ ID NO: 10498 - protein, 580 aa, Magnetococcus sp. MC-1
MLEKMVEKLHQRGPDGGGIEIDGQLGLGHRRLKVIDLSENGHQPMQDDALGLTIVFNGCIYNYQALRQSLLELGYSFFSTSDTEVILKAYHAWGWQCVQRFNGMFAFAIYERQSGRVVLARDRLGIKPLYIHQDKSHLRFASSIPSLLAGGGITTTLDPIALHHFLSFHSVVPAPRTLLQQVQKLPPATVRIVEKNGSETNHTYWNLQMGPQAGDAERTEAEWQQLLDQALRAAVSRRLVADVPVGLLLSGGLDSSLMAGLLVESGQLSRGGLSTFSIGFEQAGGEEGDEFQYSDIVAAHFGTDHHKIFIETNNLPELLRETVRAMSEPMVSHDAVGFYLLSREVAKHVKVVQSGQGADEVFAGYHWYPKVDAGQDAFQDYRKAFFDRSHEECCEMVHRDIAAAWQQDYSSAFVESWFAHPHSGTAAVDKALHLDQNIMLVDDPVKRVDNMTMAWGLEARVPFLDHELVELAARIPGHLKLQQGGKGILKEVARPIIPHAVIDRAKGYFPVPALKHMDGPVLKLAKEVLTSPRATQRGLIQPSYINRLLDHPTQHITPLHGSKLWQLTLLELWLQTHDIH

SEQ ID NO: 10499 - protein, 244 aa, Zea mays
  unsure (1)..(244): unsure at all Xaa locations
LRSRWLALYVDVGTELRLGLPGGGAXAAKAAKRGFEDTIDLKLKLPTXSFMEEAAAAAAAKPEPAAEKAKRPAEAPAADAEKPPAPKAQAVGWPPXVRSYRRNVMTVQSVKSKKEEEPEKQQSAANAGGNGSAFVKVSMDGAPYLRKVDLKMYNSYTELSVALKKMFSTFTTSGNNMNEGKLVDPVSGADVVTTYEDKDGDWMLVGDVPWXEMFVESCRRLRIMKSSEAIGLAPRTKDKCKNRS

SEQ ID NO: 10500 - protein, 415 aa, Streptomyces hygroscopicus
MTPVAEGGLPHGSVPSLSHTRQWRPGVVQEVAPAGVLDLGPGYIEPALLPVRLLRGAYEQALAEYGAAALGYGHDPGAQPLRDRLAARAAAADGLPCDPDQVLLTSGTSQALYLLATSLAAPGDTVLTEELCYDLGQRIFRDCSLRLRQVAMDGSGMLPDALDRALTEGARAGAKTAFVYLTPTHHNPTGHTMPLARRRLLLEVAARHDVLIVEDDAYTELSLIPDRTPPPSLAALAGYRRVVRLCSFSKTLGPGLRLGWLLADRELAGRLATHGLFVSGGSLNHTTSLAVSTLLASGAYDRHLDAFRAQLRARRDALVGALRAMLDDGVELRTPEGGFFLWLRAGDGADERELLDGAARAGVRIAAGSRFGTTQGAGLRLAFSFNPPALLEQAAKRLTTAWSGSTPDLEIGVRS

SEQ ID NO: 10501 - protein, 392 aa, Gloeobacter violaceus PCC 7421
MKTAARLDRIPPYLFAEIDRRRDEAVARGVDIINMGIGDPDKPTPPVVLEAMHAAIDDPSTHNYPPYKGTKAYREAAAAWFERRFGVGGFHPDTEVISSIGSKEAIHNTFLAFVDPGDYTLIPDPAYPVYRTSTIFAGGEFFAMPLLPENQLLPDLEAVPETVARKAKLLWLNYPNNPTGAVASLEFFEKVVHFAKKHDILVCHDNAYSEMAYDGYKPPSILQVPGARDVAIEFLSCSKAYNMTGWRVGFVIGNRTGIAGLGQVKTNIDSGVFKAIQQAAIAAFGLDDERLHALMAVYQNRRNIIVEGLRSLGWPLEAPKATLYVWAPIPKSFGSSVEFVGALLDKCGIIVPPGNGYGEHGEGFFRIALTVPDERMREAIGRMEAAGIRFEG

SEQ ID NO: 10502 - protein, 353 aa, Vibrio cholerae O1 biovar eltor str. N16961
MRKVAKLTLIDCNQIVITIAFDGRIHLITLQTYKRLLSRRFTMKVAVIGAAGGIGQALALLLKNRLPAGSDLALYDIAPVTPGVAADLSHIPTPVTIKGYAGEDPTPALEGADVVLVSAGVARKPGMDRADLFNVNAGIVKALAEKIAVVCPKACVGIITNPVNTTVPIAAEVLKKAGVYDKRKLFGVTTLDVIRSETFVAALKDKDPGQVRVPVIGGHSGVTILPLLSQVEGVSFTDEEVAALTKRIQNAGTEVVEAKAGGGSATLSMGQAACRFGLALVKALQGESDVVEYAYVEGEGEYAPFFAQPIKLGKNGVEALLDIGKLSAYEQAALDGMLDTLKGDIQIGVEFVK

SEQ ID NO: 10503 - protein, 795 aa, ASPERGILLUS NIDULANS FGSC A4
MAPTVATQPPPPKRRRIGVLTSGGDAPGMNGAVRAVVRMAIHSDCEAYAVYEGYEGLVEGGDMIRQLHWEDVRGWLSQGGTLIGSARCMSFRERSGRLRAAKNMVLRGIDALVVCGGDGSLTGADVFRSEWPGLLDELVKNGELTAEQVEPYRVLNIVGLVGSIDNDMSGTDATIGCYSSLTRICDAVDDVFDTAFSHQRGFVIEVMGRHCGWLALMAAISTGADWLFIPEMPPKDGWEDIMCANITKNRRERGKRRTIVIVAEGAQDRNLNKITSDRVKDILTERLGLDTRTTILGHTQRGGAACAYDRSLSTLQGVEAVRAVLDMTPDSPSPVITIRENKIMRTPLMDAVKATQEVTAHIKNREFEKAMLLRDSEFKEYHFAYLKTATPDHPKLSLTQEKRMRIAIVHVGAPAGGMNQATRAAVTYCLTRGHTPIAIHNGFPGLIRHHADQPISSVREVKWQETDAWVNEGGSDIGTNRGLPSEDYDEVARCFKEHKFDALFVVGGFEAFTAVSQLRQARDKYDAFKIPMVVLPATISNNVPGTEYSLGSDTCLNALIDFCDAIRQSASSSRRRVFVIETQGGKSGYIATTAGLAVGAVAVYIPEEGIDIKMLARDIDFLRENFARDKGANRAGKIIMRNETASSTYTTQVIADMIKEEAKGRFESRAAVPGHFQQGGKPSPMDRIRALRMAIKCMMHLEGYAGKSKDEIANDEMSATVIGIKGSQVLFSVMGGEHGLEKVETDWARRRPKAEFWLQLQDTVNILSGRAGAKAMWTGYEDESRTRPSSPAHLS

SEQ ID NO: 10504 - protein, 470 aa, Candidatus Blochmannia floridanus
MSIQIETQVLVLGSGPGGYSAAFRCADLGINTILVERYPNLGGVCLNVGCIPSKALLHISKLIQTNSDLNEFNISKNITNIQLDINKIRLWKNDIIKKLSNNLNSIATAKRNIKIIYGFGTFINKHTLQVSCDKEIIKVIFDYAIIATGSHPTSLPFSPNDHRIWNSTDALELKFIPEKLLIIGSGAIGLEMSTVYHSLGSKVDLMEASDQIMPILDKDIINLFSKNLIKKSINCTVNTQVHAFNSKPNGIDVITTNKLDPNTKKTHRYDAVLIAIGRFPNSKELNLDGIGIQTNKNGFISVDKQMRTNISNIFAIGDIVGNPMLAHKSIHEGHIVSEVISGKKYYFDSTVIPGVIYSDPEIAWVGYTEKEAQTKNIKYASVTFPWNSLGKAITSNYTEGITKLIFDKNTHRIIGGSVIGLHASEIIGEIALAIEMGCDVEDITLTIHAHPTLYESIELAASIYNKSINT

SEQ ID NO: 10505 - protein, 425 aa, Candidatus Blochmannia floridanus
MVININVPNIGENELEVTEIFIKNGDNIDINQPLLIIEGDKSSTEIPSPYAGIITKIHVQVGDKVQTGTLIISLDIIKTHDLDQSIQTKQNTKNEPNINNNIIDNNTDIQKYHITSISNNNIPTHATPFIRHMARKFDINLSHIQGSGRKGRILKEDIQKYLSNTSTKTMDYNPINKNISSLHPDTNFSKFGHTETIQLNKIQKISASNLQKNWSIIPHVTQFDMVDITSLEIFRKQQNFEIKKNKLNYKITMLVFVIKAVSKALQELPQFNSSLSQDGHTLILKKYINIGIAVDTKRGLLVPVLQNTDKKNITTLSKELLEISQKARVGKHLTPLDIQGGTFTISNLGGIGGTLFTPIINAPEVAILGISQAIMKPVWTGKKFIPRLMLPLSLSYDHRVINGADGAKFINRINKIISDIRLLSI

SEQ ID NO: 10506 - protein, 212 aa, Glycine max
  unsure (1)..(212): unsure at all Xaa locations
ESASGIRQGVSIEGVPPTIEAGEIDFGENXTIGPHNFLHSTIXGPIIPCDFIGIVKNQQPVFLKXEVVSNHDELMSNYFAQSVPHAYGKAAEQLQKENVSPHLIPHKTFSGNRPSLSLLLPSLNAYNIGQLLAIYEHRIAVEGFIWGINSFDQWGVELGKSLATQVRKQLNASRTKGEPIQGFNFSTTTMLTRYLQASSDVPADLSTVLPKI

SEQ ID NO: 10507 - protein, 328 aa, Oryza sativa
MASDRRVCTVHHMSHAAIVLVSVLLLCSAHPSAGARRLMELYKPPPSEQLTYHNGTVLRGDIPVSVVWYGRFTPAQKAVVSDFLLLLTVASPAPTPSVSQWWNTINQLYLSKAAAQGKNGGGGGKITTQVRLAGQLTDDQCSLGKSLKLSQLPALAARAKPKKGGIALVLTAQDVSVEGFCMSRCGTHASNAKARTAYVWVGNSATQCPGQCAWPFHQPVYGPQTPALVPPSGDVGMDGMVMNIASMVAGVVTNPFGDGFYQGPKEAPLEAATACPGVYGSGAYPGYAGNLAVDPATGASYNANGAHGRKYLLPALFDPATSTCSTLV

SEQ ID NO: 10508 - protein, 380 aa, Desulfovibrio vulgaris subsp. vulgaris (strain Hildenborough)
MRKTVYWIEGDGIGPEVWKAARPVIDAAVEKSYGDSRSIEWKELLAGEKAHRETGEYLPQSTLDTLATAELAIKGPLGTPVGKGFRSLNVTMRQTLDLYACIRPIRYFDGIMSPVKRPDLVDMVVFRENTEDVYAGIEYRAGTPEAKRLIAFLRDELGAKVDIEAAVGIKPMTEKGSKRLVRRALRFAIDQKRPNLTLVHKGNIMKFTEGGFREWGYEVARDEFADLTTTETEGTAGRLVVKDRIADAMFQEVLIRPQQYSVIATSNLNGDYISDALAAQVGGLGLAPGVNMSDSLAFFEATHGTAPTIAGQDKANPGSLILCGALMLEHMGWNEAAERIYKAVNEAIASRRVTVDLATQMENATTVGTVAFGDIVTAGL

SEQ ID NO: 10509 - protein, 384 aa, Staphylococcus aureus subsp. aureus Mu50
MISNKLANIPDSYFGKTMGRKIEHGPLPLINMAVGIPDGPTPQGIIDHFQKALTIPENQKYGAFHGKEAFKQAIVDFYQRQYNVTLDKEDEVCILYGTKNGLVAVPTCVINPGDYVLLPDPGYTDYLAGVLLADGKPVPLNLEPPHYLPDWSTVDSQIIDKTKLIYLTYPNNPTGSTATKEVFDEAIAKFKGTDTKIVHDFAYGAFGFDAKNPSILASENGKDVAIEIYSLSKGYNMSGFRVGFAVGNKDMIQALKKYQTHTNAGMFGALQDAAIYALNHYDDFLEEQSNVFKTRRDRFEAMLAKADLPFVHAKGGIYVWLETPPGYDSEQFEQFLVQEKSILVAPGKPFGENGNRYVRISLALDDQKLDEAAIRLTELAYLYE

SEQ ID NO: 10510 - protein, 777 aa, Mesorhizobium sp. BNC1
MNKSHRTVLTSTHWGTYGIQLEGGRIAGVEPWQGDPDPSPIGQSLVGSVDGRLRVARPSVRREWLERTGTRACGRRGADPFVELEWDEALDLVAAELRRISLAHGNSAIFGGSYGWASAGRFHHAQSQLHRFLNSIGGYTASVHSYSYAAGQVILPHIIGSMDGLTGHHSTWDGIAAEGRLVVCFGGLPHRNAQVQSGGIGKHALRSALQEARKRNVRFVCISPARDDGPVDVDFEWQPLRPGTDTAVMLAMAHVLLTEGLEDRAFLERYCVGFERIKSYILGEKDGTAKTAEWAAEISGIAPDWIRDLALAMAANRTMLMVNWAIQRADDGEQPYWMAVTLAAMLGQIGLTGGGVGFGYSSTNGAGRAEMPFKWPSLPQGQNPVADFIPVARITDMLLNPGQSFNFDGRRLTYPDIRMVYWAGGNPFHHHQDLNRMVEAWQRPETIIVHEPYWTAAARHADIVLPVTTTLERDDIAFSNRDNLVVGMRKVIESVGKARNDFDILADLADRLGKRDVFTGGKTAWEWIETLYEEARERAAAHGSDMPAFPEFWEHAHFEIERTVQSSTLLSNFRNDPDKNALPTPSGRIELFSERIAGFGYEGYPGHPVWREPREWLGSPLASEFPLHLLSPQPADKLHSQYDQGSVSRAAKISGRTPLTIHRRDAEARGIRDGDVVKVFNRRGACLAGAVLTDNILPGVVQLPTGAWYDPEDPQVSGSLERHGNPNVLTPDRATSPLGQGPSCNSTLVQVALFEGAPPPVGIFEPPVILPRDGEVR

SEQ ID NO: 10511 - protein, 198 aa, Eremothecium gossypii
MPNLVFVTGNANKLREVRQLLGGAALPYPLVNEPLDLDEVQAASLDAIALHKCRSAAARLPPGTPVFVEDTALCFDALGGLPGAYIKWYVQAMPLCDIASMLDAFPAKTARAVTTVAYCDAAGAFHTFSGTTTGRIVPPRGPTDFGWDAIFEPAGEDKTYAEMDKDKKNAISHRGKAFAAFREHLCSPSQRPPPPATA

SEQ ID NO: 10512 - protein, 150 aa, Zea mays
  unsure (1)..(150): unsure at all Xaa locations
HLYHPQHILYRQKEQFSDGVGYNWIDGLKSFTEQQVTDEMMNNAAQMFPYNTPVNKEAYYYRMIFERLFPQDSARETVPWGPSIACSTPAAIEWVEQWKASNDPSGRFISSHDSAATDHTXAVSRRWPTAAATXANGTVNGKDVAVAIAV

SEQ ID NO: 10513 - protein, 339 aa, Gloeobacter violaceus PCC 7421
MTKMRAMIVPEAGAKFQMIERDLPVPGPREVRLSVSACGVCHSDSVTVEGTMRGIAYPRVPGHEVIGTIEALGPEVLGWEVSMRVGVGWFGGSCGYCAHCRRGSAFACETVSAVTGVTRDGGYATHMLADVSALAHVPTDLDVVESAPLLCAGITTFNALRNCGAGPGELVAIHGIGGLGHLGIQFAARQGFRTVAVNRGRDKEELARSLGAHEYIDSEEGDPAAALLAMGGAKAILATVTSEKAMQALVGGLGPNGTMMLIGAVPTLTVNPTELLLKRAAVKGWYSGTAADSEDTLLFSHRNGITSMNEIYPFENAQAAYDRMMSGKARFRVVLSMGV

SEQ ID NO: 10514 - protein, 238 aa, Enterococcus faecium
MNSDMTQIMGEFIGTLILVLLGDGVCAAVNLNKSKAQASGWIVIAFGWGLAVTMAVYISGFMGPAHLNPAVSLAMAMTGAISWNLVVPFIIAQVLGAFAGAILVWLSYLPHWNATKDESAILGTFATGPAIRNYPANVITELIGTFVLVLGLLAFGQNEFAPGTNVFAVGGLILAIGLSLGGPTGYAINPARDFGPRLAHAVLPIANKGTSDWAYSWVPIAGPMIGAIIAVGVYSLMV

SEQ ID NO: 10515 - protein, 928 aa, Wolinella succinogenes
MAFSRREFLKSAAAASAASAVGMSVPSQLLAQAQEGEKGWRWDKSVCRFCGTGCGIMVATKNDQIVAVKGDPAAPVNRGLNCIKGYFNAKIMYGADRLTDPLLRVNEKGEFDKQGKFKPVSWKKAFDVMEAQFKRAYNELGPTGIGVFGSGQYTIQEGYMAAKLIKGGFRSNNLDPNARHCMASAVAAFMETFGIDEPAGCYDDIELTDTIITWGANMAEMHPILWARVTDKKLSNPDKVKVINLSTYTNRTSDLADIEIIFTPQTDLAIWNYIAREIVYNHPESIDMEFVKNHCIFTTGFTDIGYGMRTDIKHAKYDPKELDIAAKERSKVLSEAEGVTLRYLGMKAGDVMEMKHNATAGNHWEITFEDFKKALEPYTLDFVAKLAKGNSEESLESFKEKLQKLANLYIEKERKVVSFWTMGMNQHTRGTWVNEQSYMVHFLLGKQAKPGSGAFSLTGQPSACGTAREVGTFSHRLPADMVVANPKHRAVSEKIWKLPEGTLNPKMGAHYMNIMRDLEDGKIKFAWIQVNNPWQNTANANHWIKAAREMDNFIVCSDAYPGISAKVADLILPTAMIYEKWGAYGNAERRTQHWRQQVVPVGNAMPDVWQMAEFSKRFKLKEVWGAKKIDDKLTLPDVLEKAKAMGYSPEDTLFEVLFANSEAKSFKAKDPIGEGFENTEVFGDRRNVAGSDGEVFKGYGFFIHKYLWEEYRRFGNGHGHDLADFDTYHKVRGLKWPVVDGKETQWRFNAKYDPYARKAGSGEFAFYGDAMKELPRGDLLSPKTEEKFKLTNKAKIFFRPYMDPPEMPSSEYPLWLCTGRVLEHWHSGTMTMRVPELYRAVPEALCYMHPEDAKKLGVKQNEAVWVESRRGKVKARVDTRGRNRTPLGLVYVPWFDEKVYINKVCLDATCPISKQTDFKKCAVKVYKA

SEQ ID NO: 10516 - protein, 246 aa, Zea mays
  unsure (1)..(246): unsure at all Xaa locations
MATKRSVGTLGEADLKGKKVFVRADLNVPLDDAQKITDDTRVRASVPTIKFLLEKGAKVILASHLGRPKGVTPKYSLKPLVPRLSELLGVEVVMANDCIGEEVEKLAAALPEGGVLLLENVRFYKEEEKNEPEFAKKLASVADLYVXDAFGTAHRAHASTEGVTKYLKPAVAGFLMQKELDYLVGAVANPKKPFAAIVGGSKVSSKIGVIESLLAKVDILILXGGGMIYTFYXAQGYSVGNLSWRG

SEQ ID NO: 10517 - protein, 447 aa, Candidatus Blochmannia floridanus
MPEIVNIISREIVDSRGNPTVESEVHTKSGFFGLASVPSGSSLGSQEALELRDNDHARFFGKGVKKSVNIINSTIRVSLLNIDVTKQSVIDEIMINLDGTNNKSQLGANSILSVSLAIAKAAASFMGMPLYQYIARLYGMSSNVYSMPVPMMNIMNGGKHADNNLDIQEFMIVPVGAKNIKQAIQMGSEISYSLKNVLNNLGISIALGDEGGYAPNLKSHSYALELINKSIEQSNYVLGKDVVLAIDCAASELFEVSTGKYVINSEKVSFTSEEFVDYLSSLARKYCIFSIEDGQSEHDWHGFSYLTKKLGDIMQLVGDDLFVTNPNLLKMGINKNVANSILVKPNQIGSLTETLNVIKLAKESGYSTIVSHRSGETEDTSIADIAVGTSAGQIKTGPVRCSERTSKYNRLIRIEEFLKDNSKFYGVNEIKNLSAQLWMYQNKNMNI

SEQ ID NO: 10518 - protein, 569 aa, Candidatus Blochmannia floridanus
MIMLKYNNKLLSDNERIKKNSNFLRGTIEKDLDNNLTGGFNVDNAQLIRFHGMYQQDDRDVRLERMNQKLEPLINMMLRCRLPGGVITSQQWLNIDNFSEEQTLYSSIRLTTRQTFQLHGILKPKLKGIHQLLNKLGLDSIATAGDVNRNVICTANPMESKVHYQIWELSKKISEHLLPKSKAYAEIWLNEKKIESIDSEPILSSVYLPRKFKIAIAVPPVNDVDVYANDLGLVAIKDNTGNLIGFNVLIGGGLAMTYGDKSTYPRMASEFGYINLQDILKIVESVITVQRDWGDRYNRRHAKTKYTLVKVGIDILKKEIENRSGLKFSPMYPYKFTERGDKFGWIRGINQDYWHLTLFIENGRVCNTSNILIKKGLSEIAKVHSGFFRITTNQNLIISEIHQDKKDIIEDLLKQYGLLGDFVTSQRKSSMACVAFPTCPLAMAEAERFLPAFVTKVEHVMSKYNLQRDAIILRVTGCPNGCARAMLAEIGLTGRGIGRYNLYLGGNKNGTRIPRLYKENITEDEILHVLDITIGDWAKNRKTQESYGDYVVRAGIVRAVINSEEDFYL

SEQ ID NO: 10519 - protein, 391 aa, Cytophaga hutchinsonii
MIIPAANRLNVVKEYYFVRKLEEIAKLNKEGKNVISFGIGSPDLAPSEATVDALVATSRLSNAHGYQPYRGIPELRDSIASFYKNTYGVELDSNTEVLPLMGSKEGILHVSMAFLNPGDEVLVPDPGYPTYTSLTTLIGGVVRKYALSEKNNWHPDLEELKKQDLSKVKLMWLNYPHMPTGAEADRAQIEKIIAFAKEYKILLCFDNPYSLVLNQNKPFSILSIPGATEVAVEFNSLSKSHNMAGWRIGMMVGSPIYLNPALTVKSNIDSGMYLGLQKAAIEAFKNTEAWHAERNKIYADRREKIFGILDKLGFEYSRKQVGLFVWCKPKDAAAIGDIPAYVDRLLNEAYVFFTPGAIFGEKGEGYLRASLCVPIEKITEAEARIDAWLKK

SEQ ID NO: 10520 - protein, 314 aa, Microbulbifer degradans 2-40
MGSRMTNKLEQLKQFSSVVADTGDIEAIKRYQPLDATTNPSLLFKAAQLPQYAPLLEKALAESSSIDDACDRLAVAIGCEILKIVPGRVSTEVDARLSFDKNASIDKAHRLIDMYEANGIGKERVLIKLASTWEGIRAAEQLQKEGIDCNLTLLFSFSQAAACADAGVFLISPFVGRILDWYKANTDKKEYLPHEDPGVISVSRIYNYYKQHDYKTVVMGASFRNTGELEELAGCDRLTISPDLLEALAQDTGKLERKLSPENSGEPIAKLIENESQYRFSNNEDAMATHKLAEGIRNFAKDQINLINLLKSKA

SEQ ID NO: 10521 - protein, 536 aa, Nostoc sp. PCC 7120
MTDTVTTPKASLNKFEKFKAEKDGLAIKSEIEKIASLGWEAMDATDRDHRLKWVGVFFRPVTPGKFMMRMRMPNGILTSDQMRVLAEVVQRYGDDGNADITTRQNIQLRGIRIEDLPHIFNKFHAVGLTSVQSGMDNIRNITGDPIAGLDADELYDTRELVQQIQDMLTNKGEGNREFSNLPRKFNIAIAGGRDNSVHAEINDLAFVPAFKEGIGDWVLGNGEESSTYQKVFGFNVLVGGFFSAKRCEAAIPLNAWVTPEEVLPLCRAILEVYRDNGLRANRLKSRLMWLIDEWGIDKFRAEVEQRLGKSLLPAAPKDEIDWEKRDHIGVYKQKQEGLNYVGLHIPVGRLYAEDMFELARIADVYGSGEIRMTVEQNIIIPNITDSRLRTLLTDPLLERFSLDPGALTRSLVSCTGAQFCNFALIETKNRALEMIKGLEAELTFTRPVRIHWTGCPNSCGQPQVADIGLMGTKARKNGKAVEGVDIYMGGKVGKDAHLGSCVQKGIPCEDLHLVLRDLLITNFGAKPRQEALVTSQ

SEQ ID NO: 10522 - protein, 122 aa, Zea mays
MGRPPCCDKMGVKKGPWTPEEDLMLVSYVQEHGPGNWRAVPTNTGLMRCSKSCRLRWTNYLRPGIKRGNFTEQEEKLIVHLQALLGNRWAAIASYLPKRTDNDIKNYWNTHLKKKLKNMQGG

SEQ ID NO: 10523 - protein, 746 aa, Nostoc sp. PCC 7120
MTESTKTLCPYCGVGCGLEVTPPAQLNKATNRDSQGNPTWRVRGDKAHPSSQGMVCVKGATIAESLDKNRLHYPMVRESLDQEFRRVSWDEAFDLITKRIQSVRFTQGAEAICMYGSGQFQTEDYYIAQKLMKGCLGSNNFDANSRLCMSSAVSGYIQSFGADGPPCCYEDLELTDCAFLIGTNTAECHPIVFNRLEKYHRKNHKVKMIVVDPRRTPTAEAADLHLAIKPGTDIDLLNGIAHLLMRWNMIDVGFIDDCTRNFSAYAEVIRHYSPEVVARQCGITIEDLETASRYWGESQRVLSLWSMGVNQSSEGTAKVRTIINLHLMTGQVGKPGAGPFSLTGQPNAMGGREAGGLAHLLPGYRLVKNPQHRAELEAFWGFQPGQISPHPGLTAWDMITGLEDGNVGLLWIAATNPAVSMPDLERTKKALLRSPFTIYQDAYHPTETTAYAHVLLPAAQWGEKTGIMTNSERRVTLCQAFRQPPREAKPDWEIFAEVGRRLGFEDKFAFTNSAQVYAEFTQLTKGRPCDMSGISHQQLQAQGPTQWPHSSINIETQKPTQHPTVNSQQSTVTSQQSKRLYTDLRFHTPDGRARFGAYYSKGLAEPPDPSYPFVLTTGRLYGHWHTQTRTGRIEKIRAMHPEPFIEIHPRDAAKLGITDNVVVEVRSRRGSAKFPAKVTKAISPGTVFVPMHWGKLWADDAEANALTHSESCPDSLQPELKACAVQLIPISVENTAQNYQLQSSQW

SEQ ID NO: 10524 - protein, 219 aa, Bordetella bronchiseptica RB50
MTAATLSPAAYAHAERFLAGLDADWRRHVAATGACLHRPLPAREPYEALVRAIAYQQLHARAGDAIVGRLLALFPGGAFPAPGQLLAADPAALRACGFSAAKTQTILGIAQAARDGVVPDRRAARRMSDQALVERLTTLRGVGRWTVEMLLIYTLARADILPADDFGVRDGYRRLKGGAATPTARQMRDIGQAWGPYRTLAAWYLWRVPPEARIRAQET

SEQ ID NO: 10525 - protein, 197 aa, Gossypium marchantii
IVESVGEGVTHLKPGDHVLPVFTGECGNCRHCKSKESNMCDLLRINTDRGVMLSDGKTRFSINGKPIYHFVGTSTFSEYTVAHVGSVAKINPAAPLDKVCILSCGISTGLGATLNVAKPAKGSTVAIFGLGAVGLAAAEGARIAGASRIIGVDLNPNRFEEAKKFGCTEFVNPKDHNKPVQEVLAEMTNGGVDRSVE

SEQ ID NO: 10526 - protein, 405 aa, Coxiella burnetii
MAIEIKVPTLPESVSDATVAKWYKKEGDSISRDENLVDLETDKVMLEVPAPKDGVVEKIVAKEGEVVKADQILALLKEGGSVAKEKAKKDEKETKKEKEKKEEKKDKEKKEKTEEKESDLSPAVRRMVSEKDVDVEEIEGSGKGGRITKKDVEDYLEKQKEKPSEGKEGPADERTEKRVPLSRIRQRVAERLVQVQQEAALLTTFNEINMQLVMELRKKYREEFEKKFKVRLGFMSFFTKAVVEALKRFPMVNASIDGSDIIYHNYYDIGIAIGTERGLIVPILRNAEKMNMADIEKQIREYASRAQEGRLNIEELTGGTFTITNGGTYGTLLSTPIINPPQTAILGMHKIMDRPTVENGEVVVRPIMQVALSYDHRVIDGREAVLFLVTIKELLEDPARMILEC

SEQ ID NO: 10527 - protein, 516 aa, Pisum sativum
MASMAAIGVLKVPPSSSSSSSSSSSSSKAIARNLSFTSSQLCGDKIFTVSGTRRSSGRNPFIVSPKAVSDSKNSQTCLDPDASRSVLGIILGGGAGTRLYPLTKKRAKPAVPLGANYRLIDIPVSNCLNSNISKIYVLTQFNSASLNRHLSRAYASNLGGYKNEGFVEVLAAQQSPENPNWFQGTADAVRQYLWLFEEHNVLEYLVLAGDHLYRMDYERFIQAHRESDADITVASLPMDEARATAFGLMKIDEEGRIVEFSEKPKGEQLKAMKVDTTILGLDDERAKEMPYIASMGIYVVSKHVMLDLLRDKFPGANDFGSEVIPGATELGLRVQAYLYDGYWEDIGTIEAFYNANLGITKKPVPDFSFYDRSSPIYTQPRYLPPSKMLDADITDSVIGEGCVIKNCKIHHSVVGLRSCISEGAIIEDTLLMGADYYETDADRRFLAAKGGVPIGIGKNSHIKRAIIDKNARIGDDVKIINSDNVQEAARETEGYFIKSGIVTVIKDALIPSGTVI

SEQ ID NO: 10528 - protein, 673 aa, Methanocaldococcus jannaschii DSM 2661
  unsure (1)..(673): unsure at all Xaa locations
MEFKIVNTICPYCGVGCGLGLVVKDGRVIGIHPNKRHPINEGKLCAKGNYCYQFIHSKDRLTKPLIKKESGFVETTWNKALEVIAENLKTYKDEIGFFSSARCTNEDNYILQKFARVALKTNNIDHCARLXHSATVTGMSACFGSGAMTNSIEDIELADCILIIGSNTFEQHPLIARRIMRAKDKGAKIIVIDPRRTITAKNSDIYLQIIPGTNVALINAMINVIIKENLIDKEFIKNRTEGFEKLKEIIKKYTPEYASKICGVDKELIIESAKIYGNAERASIIYCMGVTQFTHGVDAVKALCNLAMITGNIGKEGTGVNPLRGQNNVQGACDMGALPNVFPGYQKVEDGYKLFEEYWKTDLNPNSGLTIPEMIDESGKNIKFLYIMGENPIVSDPDVKHVEKALKSLDFLVVQDIFLTETAKLADVVLPAACWAEKDGTFTNTERRVQLIRKAVNPPGEALEDWIIIKKLAEKLGYGDKFNYNKVEDIFNEIRKVTPQYRGITYKRLKIDGIHWPCLDENHSGTKILHKDKFLTDNGRGKIFPVEYREVAELPDKDYPFILTTGRIIFHYHTGTMTRRCKNLVEEINEPFIEINPDDAKSLKIENGDLVKVISRRGEITAKARITEDIKKGVVFMPFHFVEANPNVLTNTALDELCKIPELKVCAVKIERI

SEQ ID NO: 10529 - protein, 394 aa, Geobacillus stearothermophilus
MNKKTIRDVDVRGKRVFCRVDFNVPMEQGAITDDTRIRAALPTIRYLIEHGAKVILASHLGRPKGKVVEELRLDAVAKRLGELLERPVAKTNEAVGDEVKAAVDRLNEGDVLLLENVRFYPGEEKNDPELAKAFAELADLYVNDAFGAAHRAHASTEGIAHYLPAVAGFLMEKELEVLGKALSNPDRPFTAIIGGAKVKDKIGVIDNLLEKVDNLIIGGGLAYTFVKALGHDVGKSLLEEDKIELAKSFMEKAKEKGVRFYMPVDVVVADRFANDANTKVVPIDAIPADWSALDIGPKTRELYRDVIRESKLVVWNGPMGVFEMDAFAHGTKAIAEALAEALDTYSVIGGGDSAAAVEKFGLADKMDHISTGGGASLEFMEGKQLPGVVALEDK

SEQ ID NO: 10530 - protein, 507 aa, Pisum sativum
MSSIVTSSVINVPRSSSSSKNLSFSSSQLSGDKILTVSGKGAPRGRCTRKHVIVTPKAVSDSQNSQTCLDPDASRSVLGIILGGGAGTRLYPLTKKRAKPAVPLGANYRLIDIPVSNCLNSNISKIYVLTQFNSASLNRHLSRAYASNLGGYKNEGFVEVLAAQQSPENPNWFQGTADAVRQYLWLFEEHNVLEYLILAGDHLYRMDYEKFIQAHRESDADITVAALPMDEKRATAFGLMKIDEEGRIIEFAEKPKGEQLKAMKVDTTILGLDDERAKEMPFIASMGIYVISKNVMLDLLRDKFPGANDFGSEVIPGATSVGMRVQAYLYDGYWEDIGTIEAFYNANLGITKKPVPDFSFYDRSSPIYTQPRYLPPSKMLDADITDSVIGEGCVIKNCKIFHSVVGLRSCISEGAIIEDTLLMGADYYETEADKRFLAAKGSVPIGIGKNSHIKRAIVDKNARIGENVKIINSDNVQEAARETEGYFIKSGIVTIIKDALIPSGTVI

SEQ ID NO: 10531 - protein, 324 aa, GIBBERELLA ZEAE PH-1
MVNVPNIKLNSGFDMPQIGFGLWKVDDNCAEVVYNAIKAGYRLLDGACDYGNEKACGEGVARAIKEGIVKREDLFIVSKLWQTYHDKKNVEPITRRQLADWQIDYFDLFLIHFPVALEYVDPEVRYPPGWHYDDAGTEIRWSKATNQETWEGMEDLVEKGLAKSIGISNFQAQGIYDMLKYAKIRPATLQVELHPYHQQSELVSLAKAEGIALTAYSSFGPTGFIELDMDIAKSASPLMQHEVFTTLASKYNKTSAQVLLRWATQQGLAVIPKSTTPQYMAQNFDCFEWSIDEEDMKRISKMNLNLKFNKPTNYFPTEKLWIFG

SEQ ID NO: 10532 - protein, 302 aa, Zea mays
VEAMDMPLLNAYLDSLGTPSFRTGVNFAQAGCSITPAKPTSVSPFSFGLQIKQFFAFKNKVTKLLSEGDMHSRYIPQQDYFSEGLYTFDIGQNDLAGEFYSRTEDQVIASIPTILLEFENGLKKLYDQGARKFWIHNTGPLGCLPQNIALFGKDPSQLDELHCVAKHNRAAKLFNLQLHALCTKLRAEFDGASITYVDIHTIKYSLIANYSRYGFEHATQACCGYGGPPLNYDGNVPCGHTVSLDGKMVTAKGCSDTTEFVNWDGIHYTEAANFHIASQILTGKYSDPPFVDKMPFVIKPRF

SEQ ID NO: 10533 - protein, 1131 aa, Pinus sylvestris
MASNSRHTQSQSTGSNNRRSSTNTNTTTNKATAMAQYNSDARLLQVFEQSGESGKSFDYTRSIQVHNRAVPEQQITAYLSRIQRGGRIQPFGCVLAVEETTFRIIAYSENEEMLDLGAQSVPSMEKPQQDVLTIGTDVRTLFTAASAHSLEKAAVAQEISLMNPIWVHCKNSRKPFYAIVHRIDVGMVIDLEPLRTGDAFMSAAGAVQSQKLAVRAISRLQSLPCGDVGLLCDTVVENVRELTGYDRVMVYKFHEDEHGEVVAEIRRSDLEPYLGLHYPATDIPQASRFLFMQNRVRMICDCMATPVKVIQSEELMQPLCLVGSTPSAPHGCHAQYMANMGSIRSLLMAVIINGNDDEGGGSGRNSMKLWGLVVCHHTSPRAVPFPLRYACEFLMQALGLQLNMELQLAAQLTEKHILRTQTLLCDMLLRDAPMGIVTQSPSIKDLVKCDGAALYYGGMCWMLGVTPTEAQIKDIADWLLEHHGDSTGLSTDSLADAGYPGAASLGDAVCGMASARITSKDFLFWFRSHTAKEMKWGGAKHHPDDKDDARRMHPRSSFKAFLEVVKRRSLPWDNVEIDAIHSLQLILRCSFRDIDDSGTKTMVHSRLNYLRLQGIDELSSVASEMVRLIETATAPILAVDYNGLVNGWNAKVAELTGLPVGEAMGMSLVQDLVFEQSVERVEKMLHNALRGEEEKNVEMMLKTFGPQKEKEAVILVVNACSSRDFTDNIVGVCFVGQDVTSQKVVMDKFIRIQGDYRSIVQSPNPLIPPIFASDEYACCSEWNAAMEKVTGWTHDEVIGKMLVGEIFGGCCRLKGQDAVTKFTIVLHQCNHGQEIEKFPFAFFDKQGKYVEALLTANKRTDADGRITGSFCFFRIASSELQHALEVQRQQEKKCFARLKELAYIRQEIKNPLYGMMFTRKLLEETDLSDDQKQFVETSAVCERQMQKVMDDMDLESLEDGYMELDTAEFILGTVIDAVVSQGMIVLREKGLQLIREIPGEVKTMRLYGDEVKIQQILADFLLNVLRFTPSPEGWVAIKVFPTLKQLGGGLHVVHLEFRITHPGLGLPAELVQDLFDRSQWATQEGVGLSMCRKLLKLMNGDVRYIRESGICYFLVNVEFPMAQREDAASIK

SEQ ID NO: 10534 - protein, 529 aa, Bacillus subtilis
MSDDQNKRVNEHSKDEQLEQYRTDNSGKKMTTNQGLRVSEDEHSLKAGVRGPTLMEDFHFREKMTHFDHERIPERVVHARGFGVHGFFQVYEPMTEYTRAKFLQDPSVKTPVFVRFSTVAGSKGSADTVRDARGFATKFYTEEGNYDLVGNNIPVFFIQDAIKFPDLVHAFKPEPHNEMPQAATAHDTFWDFVANNPESAHMVMWTMSDRGIPRSYRMMEGFGVHTFRFVNEQGKARFVKFHWKPVLGVHSLVWDEAQKIAGKDPDFHRRDLWETIENGGKVEYELGVQMIDEEDEFKFDFDILDPTKLWPEELVPVKIIGKMTLNRNQDNVFAETEQVAFHPGNVVPGIDFTNDPLLQGRLFSYTDTQLIRLGGPNFHEIPINRPVCPFHNNQYDGYHRMTINKGPVAYHKNSLQNNDPSPATAEEGGYVHYQEKVEGKKIRQRSDSFNDYYSQAKLFWNSMSPVEKQHIISAFCFEVGKVKSKDVQRQVVDVFSNVDADLAEEIAKGVGVAAPRSVKHLKKFLLRLR

SEQ ID NO: 10535 - protein, 510 aa, Pisum sativum
MASGCVSLKTNTHFPNSKKGSFFGERIKGSLKNSSWVTTQKKIKPASFSAILTSDDPKGSLNLQVPSFLRLRADPKNVISIVLGGGPGTHLYPLTKRAATPAVPVGGCYRLIDIPMSNCINSGINKIFVLTQFNSASLNRHIARTYFGNGVNFGDGFVEVLAATQTPGEAGKKWFQGTADAVRQFTWIFEDAKNINVENVLILAGDHLYRMDYMDLLQSHVDRNADITVSCAAVGDNRASDYGLVKVDDRGNIIQFSEKPKGADLKAMQVDTSRLGLSPQDALKSPYIASMGVYVFKKDVLLKLLKWRYPTSNDFGSEIIPSAIREHNVQAYFFGDYWEDIGTIKSFYDANLALTEESPKFEFYDPKTPIFTSPGFLPPTKIDNSRVVDAIISHGCFLRDCTIQHSIVGERSRLDYGVELQDTVMMGADYYQTESEIASLLAEGKVPIGIGRNTKIKNCIIDKNAKIGKEVVIANKEGVQEADRSEDGFYIRSGITIIMEKATIEDGTVI

SEQ ID NO: 10536 - protein, 207 aa, Bifidobacterium longum DJO10A
MRAGGTPVMLPLTDDTDILAQCAERFDAFLFTGGPDVGPMVGAAASATGRSEVLSPERDRMESILLPAVMAWDKPILGICRGIQFINAALRGTLWQDLPSQHPSDIEHHMNPPYDAFGHNVSLVPGTPLASLFAGQTEIAVNSYHHQAVREPAAGLEVMAVAPDGVIEALYRPASHFLWAVQWHPEFLYKVDPRSQAIFDAFVGSCR

SEQ ID NO: 10537 - protein, 189 aa, Triticum aestivum
  unsure (1)..(189): unsure at all Xaa locations
MAAAVARAIVCEAAPQRAAPPSQQKQQTRRDKILLQPRLSTLRSYGADGSGAVTRKRLPGEALEEGGVGGAPPFFASLADYIESSRKSQDFETISGRLAMVAFAAAVAVEATTGDSLFKKLDTVQIEEATGLFLALVDLAATFAWVSSARGRIGQMLTLGCNSFVDGLIDNVVDXLFSDDQMQDWSDDV

SEQ ID NO: 10538 - protein, 478 aa, Pseudomonas fluorescens
MSQKFDVVVIGAGPGGYVAAIRAAQLGLKTACIEKYIGKEGKVALGGTCLNVGCIPSKALLDSSYKYHEAKEAFKVHGIEAKGVTIDVPAMVARKANIVKNLTGGIATLFKANGVTSFEGHGKLLANKQVEVTGLDGKTQVLEAENVIIASGSRPVEIPPAPLSDDIIVDSTGALEFQAVPKKLGVIGAGVIGLELGSVWARLGAEVTVLEALDKFLPAADEQIAKEALKVLTKQGLNIRLGARVTASEVKKKQVTVTFTDANGEQKETFDKLIVAVGRRPVTTDLLAADSGVTLDERGFIYVDDHCKTSVPGVFAIGDVVRGAMLAHKASEEGVMVAERIAGHKAQMNYDLIPSVIYTHPEIAWVGKTEQTLKAEGVEVNVGTFPFAASGRAMAANDTTGLVKVIADAKTDRVLGVHVIGPSAAELVQQGAIGMEFGTSAEDLGMMVFSHPTLSEALHEAALAVNGHAIHIANRKKR

SEQ ID NO: 10539 - protein, 319 aa, Aspergillus niger
MASPTVKLNSGYDMPLVGFGLWKVNNDTCADQIYHAIKEGYRLFDGACDYGNEVEAGQGIARAIKDGLVKREELFIVSKLWNSFHDGDRVEPICRKQLADWGIDYFDLYIVHFPISLKYVDPAVRYPPGWKSEKDELEFGNATIQETWTAMESLVDKKLARSIGISNFSAQLVMDLLRYARIRPATLQIEHHPYLTQTRLVEYAQKEGLTVTAYSSFGPLSFLELSVQNAVDSPPLFEHQLVKSIAEKHGRTPAQVLLRWATQRGIAVIPKSNNPQRLKQNLDVTGWNLEEEEIKAISGLDRGLRFNDPLGYGLYAPIF

SEQ ID NO: 10540 - protein, 285 aa, Lactobacillus reuteri
MAYKFRLPEMGEGLTEGDIASFLVKEGDQVKDGDPLVEIQTDKSTTQLVSPVAGTIKKIEAKEDDHVEKGNDLVLIDDGKDGVSTNVDAEDADDSADDTAAEESSAPAESEAPAASSEPAPAPKQGGVAPLAEPNKLVMAMPSVRQYARDKGVDISLVQPSGNHGQVLKIDIDNFNGNAASAPAAAATAPAASAPAAGNAIKPYEGAGKDAETREPLSKMRQIIAKNMRDSVDISPMVTVFANAEVSKMMANRKKYKAIAADQGIHLTFLPYVVKALIAMMRRST

SEQ ID NO: 10541 - protein, 389 aa, Haemophilus somnus 129PT
MSVIKMTDLDLAGKRVFIRADLNVPVKEGKVTSDARIKATIPTLKLALEKGAKVMVTSHLGRPTEGEFKPEDSLQPVVDYLKGAGFNVRLAQDYLNGVEVNEGEIVVLENVRVNKGEKKNDPELSKKYAALCDVFIMDAFGTAHRAQASTYGVAEFAPVACAGPLLAAELEALGKALKEPQRPMLAIVGGSKVSTKLTVLDSLSKIADQLIVGGGIANTFIAAEGHNVGKSLYEADLIPEAQRLSKVTNIPVPVDVRVGTEFSETALSTEKSVADVSGEESIFDIGDKSAEQLADIIRNAKTILWNGPVGVFEFPNFRKGTEIVSNAIAEATANGAFSIAGGGDTLAAIDLFGIKDKISYISTGGGAFLEFVEGKVLPAVEILEKRANG

SEQ ID NO: 10542 - protein, 157 aa, Glycine max
MASTKKITLKSSDGEAFEVEEAVAVAVESQTIKHMIEDNCADSGIPLPNVTSKILAKVIEYCKKHVEANCADEKPSEDELKAWDADFVKVDQATLFDLILAANYLNIKSLLDLTCQTVADMIKGKTPEEIRKTFNIKNDFTPEEEEEVRRENQWAFE

SEQ ID NO: 10543 - protein, 473 aa, Zea mays
TARSWTAATSPSTRPSPAAAPLRRGGLAAARQPARSLAFAAGDARLAVHVASRCRQAFSGRGTRAMATMAKKSVGELTEADLEGKRVFVRADLNVPLDENQNITDDTRIRAAIPTIQYILSKGAKVILSSHLGRPKGFTPKFSLAPLVGRLSELLGIQVQKADDVIGPEVEKLVAALPNGGVLLLENVRFYKEEEKNDPEFAQKLASLADLYVNDAFGTAHRAHASTEGVTKFLQPSVAGFLLQKELDYLVGAVSSPKRPFAAIVGGSKVSSKIGVIESLLEKCDILLLGGGMIFTFYKAQGLPVGASLVEEDKLELATSLLAKAKEKGVSLMLPTDVVIADKFAPDANSQIVPASAIPDGWMGLDIGPDSVASFNAALDTTKTVIWNGPMGVFEFDKFAVGTEAVAKKLAELSGKGVTTIIGGGDSVAAVEKVGVADVMSHISTGGGASLELLEGKELPGVVALNEAATVTV

SEQ ID NO: 10544 - protein, 110 aa, Triticum aestivum
MPRRLLEGAMALAVTPDAANSSGSGAAPGSGPLWWVSGCHGAWYSLSVMLPSLAFVGFLAWQARRSFRRLSYGRSHVVVVAYYALLWAVALLNLLWCFLQAWQCMPDRAF

SEQ ID NO: 10545 - protein, 549 aa, Oryza sativa
MATTATLPFSCSSTLQTLTRTIPLRLRLHRRRFLHHLPSLAALPRLPLPRPPLLPHARRHVSASAAPNGASSEGEYDYDLFTIGAGSGGVRASRFASTLYGARAAVCEMPFATVASDDLGGVGGTCVLRGCVPKKLLVYGSKYSHEFEESHGFGWVYETDPKHDWNTLIANKNTELQRLVGIYKNILNNSGVTLIEGRGKIVDPHTVSVDGKLYTARNILIAVGGRPSMPNIPGIEHVIDSDAALDLPSKPEKIAIVGGGYIALEFAGIFNGLKSEVRDFIAEQMSLRGITFHTEQSPQAITKSNDGLLSLKTNKETIGGFSHVMFATGRKPNTKNLGLEEVGVKLDKNGAIMVDEYSRTSVDSIWAVGDVTDRVNLTPVALMEGGAFAKTVFGDEPTKPDYRAVPSAVFSQPPIGQVGLTEEQAIEEYGDVDIYTANFRPLRATLSGLPDRIFMKLIVCATTNKVVGVHMCGEDAPEIIQGVAIAVKAGLTKQDFDATIGIHPTSAEEFVTMRNATRKVRRSTTDEAFSEGLLYFRAADLHWADNFFL

SEQ ID NO: 10546 - protein, 156 aa, Haemophilus influenzae
NRTNTPVLVDGKDVMPEVNAVLAKMKDFCQRIISGEWKGYTGKAISDVVNIGIGGSDLGPYMVTEALRPYKNHLNMHFVSNVDGTHIAETLKKVNPQTTLFLVASKTFTTQETMTNAQSARDWLLKAAKNESAVAKHFAALSTNAKDVEKFGIDTN

SEQ ID NO: 10547 - protein, 228 aa, Gossypium nobile
  unsure (1)..(228): unsure at all Xaa locations
FTSLCHTDVYFWEAKGQTPLFPRIFGHEAGGIVESVGEGVTHLKPGDHVLPVFTGECGNCRHCKSKESNMCDLLRINTDRGVMLSDGKTRFSXNGKPIYHFVGTSTFSEYTVAHVGSVAKINPAAPLDKVCILSCGISTGLGATLNVAKPAKGSTVAIFGLGAVGLAAAEGARIAGASRIIGVDLNPNRFEEAKKFGCTEFVNPKDHNKPVQEVLAEMTNGGVDRSVE

SEQ ID NO: 10548 - protein, 357 aa, Zea mays
MVPGYDCAASVLLCAEDNAAILGLDDDGEESSSATPPRDTVAAAAAAATGVAVDGILTEFPLLSDDCVATLVEKEVEHMPAEGYLQKLQRRHGDLDLAAVRKDAIDWIWKVIEHYNFAPLTAVLSVNYLDRFLSTYEFPEGRAWMTQLLAVACLSLASKIEETFVPLPLDLQVAEAKFVFEGRTIKRMELLVLSTLKWRMHAVTACSFVEYFLHKLSDHGAPSLLARSRSSDLVLSTAKGAEFVVFRPSEIAASVALAAIGECRSSVIERAASSCKYLDKERVLRCHEMIQEKITAGSIVLKSAGSSISSVPQSPIGVLDAAACLSQQSDDATVGSPAVCYHSSSTSKRRRITRRLL

SEQ ID NO: 10549 - protein, 403 aa, Oryza sativa
  unsure (1)..(403): unsure at all Xaa locations
MASKRSVGTLTESDLKGKKVFLRADLNVPLDDSQKITDDTRIRASVPTIKFLMGKGAKVILASHLGRPKGVTPKYSLKPLVPRLSELLGVDVVMANDCIGEEVQKLAATLPDGGVLLLENVRFYKEEEKNDPEFANKLASVADLYVNDAFGTAHRAHASTEGVTKYLRPSVAGFLMQKELDYLVGXAVANPKKPFAAIVGGSKVSTKIGXVIESLLAKGDILILGGGMIYTFYKAQGYAVGKSLVEEDKLELATSLIEKAKSKGVSLLLPTDIVVADKFAADAESKTVPASAIPDGWMGLDIGPDSIKTFSETLDTTKTVIWNGPMGVFEFEKFAAGTDAIAKKLADITAKGVTTIIGGGDSVAAVEKAGLADKMSHISTGGGASLELLEGKTLPGVLALNDA

SEQ ID NO: 10550 - protein, 502 aa, Oryza sativa
  unsure (1)..(502): unsure at all Xaa locations
WAPRRRRSRRRPSGGRGEEEEAGRGPRGRGRGATPPTTXDSGESAAAVVPCSICLDAVVAGGGDRSTARLQCGHEFHLAPFGSLLQCNIIFCLLISRVMDDTICITVCMNFIISIFKSILGAFSLDCIGSAFNAKGVMQCPNCRQIERGNWLYANGSRPSQDVSNDDWGHDEDFYDANQPETSRSVFLPFRFQWCPIGRLAQLPSVFDEGESARAVTFHDFMGQNFTSEHLPVSAPGATPPGPYIAYFQPLQSSASSSSSHGGERTMDGTTYHDHWNPLPGPSDGRPLATVHPIDFHHNHWTHLPNSYSQPNSNNGVAEQMAIPVVPMRVGGLDSDSQQRGSLPSVYGNGSGSRSRIPSVPPMAPQFMRPHGNINEQYQQNSSSLYAAPQRRSAVQAVQDSLDFTLFPQAPTGPNSMETEDAGGNQFYAWERDRFAPYPLMPVDSEANWWGSTPQSHGVTDHSAAPGRRLFGQWIGAGRSPPPPPPPPADNSSYRQMHIPRM

SEQ ID NO: 10551 - protein, 142 aa, Zea mays
  unsure (1)..(142): unsure at all Xaa locations
MLFNSWFLFPGYSEEHCLSWIQGDAEALSFEDGSMDGYTIAFGIRNVTHIEKALSEAYRXGSKARVEVPMLGVESCGCPLFLNRXLVDGDRQIEDGQXLTRPVNLEPWQEKFAQMIQEAGFQRVEYENLLSGVVAIHSGLKL

SEQ ID NO: 10552 - protein, 255 aa, Pseudomonas syringae pv. syringae B728a
MSRTQLFDLDGKVAFVSGASRGIGEAIARLLAQQGAHVIVSSRRLEGCQAVADAIVSEGGKATAIACHIGELEQINSAFAQIRQQFGRLDVLVNNAATNPQFCNVLDTDPGAFQKTVDVNIRGYFFMSVEAGKLMRENGGGSIINVASINAVSPGAYQGVYSMTKAAVVNMTKVFAKECAEFGIRCNALLPGLTDTRFASALVKNDAILNVALSQIPLKRVAAPSEMAGAVLYLASEASSYTTGVALNVDGGFLS

SEQ ID NO: 10553 - protein, 228 aa, Gossypium pilosum
  unsure (1)..(228): unsure at all Xaa locations
FTSLCHTDVYFWEAKGQTPLFPRIFGHEAGGIVESVGEGVTHLKPGDHVLPVFTGECGNCRHCKSKESNMCDLLRINTDRGVMLSDGKTRFSINGKPIYHFVGTSTFSEYTVAHVGSVAKINPAAPLDKVCILSCGISTGLGATLNVAKPAKGSTVAIFGLGAVGLAAAEGARIAGASRIIGVDLNPNRFEEAKKFGCTXFVNPKDHNKPVQEVLAEMTNGGVDRSVE

SEQ ID NO: 10554 - protein, 343 aa, Saccharomyces cerevisiae
MVKVAILGASGGVGQPLSLLLKLSPYVSELALYDIRAAEGIGKDLSHINTNSSCVGYDKDSIENTLSNAQVVLIPAGVPRKPGLTRDDLFKMNAGIVKSLVTAVGKFAPNARILVISNPVNSLVPIAVETLKKMGKFKPGNVMGVTNLDLVRAETFLVDYLMLKNPKIGQEQDKTTMHRKVTVIGGHSGETIIPIITDKSLVFQLDKQYEHFIHRVQFGGDEIVKAKQGAGSATLSMAFAGAKFAEEVLRSFHNEKPETESLSAFVYLPGLKNGKKAQQLVGDNSIEYFSLPIVLRNGSVVSIDTSVLEKLSPREEQLVNTAVKELRKNIEKGKSFILDSSKL

SEQ ID NO: 10555 - protein, 140 aa, Glycine max
  unsure (1)..(140): unsure at all Xaa locations
MQIPFFVSHHFSLYLLKRFLGSTMAMATRAIRCQLPSLVTRCESSEPIKQIQIQQRPRGGDLAENGXIVLQXRLCTLRSYGSEMIVAKKDGGGGGDXGSEVELASPFFETLTDYIESSXKSQDFETISGRLAMIVFAATV

SEQ ID NO: 10556 - protein, 716 aa, GIBBERELLA ZEAE PH-1
MVSSKLLVVLGLASLTAAQCPYADPAKLAARDEGSSREHLKDYEVDDSKGHMSSDAGGPFEEQESLKAGERGPTLLEDFIFRQKITHFDHERVPERAVHARGAGAHGYFKSYSDWSNITAASFLSSKDKNTPVFVRFSTVAGSRGSADTVRDVHGFATRFYTDAGLFDIVGNNIPVFFIQDAIQFPDLIHAVKPSPDSEIPQAATAHDSAWDFFSQQTTTLHTLFWAMAGYGIPRSFRHVDGFGVHTFRLVTDEGDTKFVKWHWKSKQGKASLVWDEAQHLAGKNADYHRADLWNAIESGNGPEWELNAQIFDEDQALAFGFDVLDATKIIPEELAPLQPIGVMKLDTNPVNYFAETEQVMFQPGHIVRGIDFTEDPLLQGRIFSYLDTQLNRHGGPNFEQLPINRPLSPIHNNNRDGAGQNFIHKNTAASDSLDTPNTLNKGYPVQANQTQGKGFFTAPGRKVSGNLVRARASTFSDHWSQPRLFYNSLTKVEQQFLINAIRFETSQLMSETVQKNVLYQLNKISHDIAVRVGRALGLKAPEADDKYYHDNTTAGISIFGTKLPSIATLSVGVLVSINSNNSIQQAKALKKALGEDKVTVSIIGEVLGDDVEVTYSAATAAQFDSVVVTSGTESLFNGTGKSTLFPPGRPTQIIVDGYHWGKPVGFIGGAKAAAQAARVSKGKGVYFPKNVNSLVEDLKDGLATFKFTDRFPLDH

SEQ ID NO: 10557 - protein, 200 aa, Vibrio cholerae O1 biovar eltor str. N16961
MKKIVLATGNQGKVREMADLLSDFGFDVVAQSEFNVPEAAETGTTFIENAIIKARHAAQITGLPTIADDSGLEVDYLNGAPGIYSARYAGEHASDGDNLNKLLMAMQDVPDDQRSARFHCVLVLMRHADDPTPIVCHGKWEGKILTAPHGSNGFGYDPIFWVPEENCASAELEPVRKKQLSHRGKALQKLFKAIEEQRTC

SEQ ID NO: 10558 - protein, 308 aa, Streptococcus agalactiae NEM316
MNKVAFLFAGQGAQKLGMARDLYETFPIVKETFDKASHVLGYDLRELIDKDLDKLNQTKYTQPAILTTSTAIYRLILKEIELRPDMVAGLSLGEYSALVASGAIRFEDAVVLVARRGQLMEAAAPAGSGKMVAVLNADRQIIEDACKKASQFGIVSPANYNTPKQIVIGGESIAVNAAVEELKQQGVKRLIPLNVSGPFHTALLKPASQKLSDVLDKVHFSVSEIPVIGNTEAQIMKKDDIKSLLARQVMEPVRFDESIETMKKMGMTQVVEIGPGKVLSGFLKKIDSSLSVHSVEDKIGFNNLKELN

SEQ ID NO: 10559 - protein, 272 aa, Vibrio cholerae O1 biovar eltor str. N16961
MEQRSIAFIGAGNMARAIIAGLIASGYAADKIIATAPSLTRREPLEAQYGIRTTSDNLAAAQQADVVVLAVKPQLMAEVCKPLQAVDFSGKLVISIAAGVSVKRLNEMLATQLNLVRVMPNTPSLVNLGMSGLYAPDSVSEADKAFTTQLMQSVGEVCWVDNESGINSVIAAAGSAPAYFFLFMQAMQQEAMAQGFDEATARLLVQQSALGAAAMVKANPELSLATLREQVTSKGGTTAQAIQTFNDHQLSDIVAKAMQAAVTRAQEMEQLF

SEQ ID NO: 10560 - protein, 71 aa, Triticum aestivum
MNRRPELCRNYQRGSCKYGAQCRFVHSNSNQQQQQQAKPNPFGFGAGGRQQPQQQSFGAQSQQQQKPNPFG

SEQ ID NO: 10561 - protein, 434 aa, Pseudomonas syringae pv. tomato str. DC3000
MNSKVDETPHLLRQRDQFVPRGIVTAHPLVIDRAQGSELWDVDGKRYLDFVGGIGVLNIGHNHPNVVKAIQAQLSKVTHACFQVASYQPYLDLAKRLSLMIAGQSGIDHKAVFFTSGAEAVENAVKIARARTNRPAIISFRGGFHGRTLLGTTLTGMSQPYKQNFGPMAPEVFHTPYPNEYRGVTTEVALAALHELLATQVAPDRVAAILIEPIQGDGGFLTAPVEFLKALRALTEQHGIVLILDEIQTGFGRTGKWFGFEHAGIQPDLVTVAKSLAGGMPLSGVVGRAEIMDAPLPGGLGGTYGGNALSCAAALAVIDTYEQDNLLARGEQLGEHLRAGLLRLKDRYACIGDVRGTGFMLAMELTKNDAARSPDADLNQKVIDQARIGGLLVIKCGVYRNVLRFLAPLVTTEQQIDEALSILDAALARVLKSS

SEQ ID NO: 10562 - protein, 478 aa, Enterococcus faecalis V583
MKNQHLTTSQGSPVGDNQNSLTAGEFGPVLIQDVHLLEKLAHFNRERVPERVVHAKGAGAHGIFKVSQSMAQYTKADFLSEVGKETPLFARFSTVAGELGSSDTLRDPRGFALKFYTDEGNYDLVGNNTPIFFIRDAIKFPDFIHSQKRNPRTHLKSPEAVWDFWSHSPESLHQVTILMSDRGIPLSFRHMHGFGSHTFKWVNAAGEVFFVKYHFKTNQGIKNLESQLAEEIAGKNPDFHIEDLHNAIENQEFPSWTLSVQIIPYADALTMKETLFDVTKTVSQKEYPLIEVGTMTLNRNPENYFAEVEQVTFSPGNFVPGIEASPDKLLQGRLFAYGDAHRHRVGANSHQLPINQAKAPVNNYQKDGNMRFNNGNSEINYEPNSYTETPKEDPTAKISSFEVEGNVGNYSYNQDHFTQANALYNLLPSEEKENLINNIAASLGQVKNQEIIARQIDLFTRVNPEYGARVAQAIKQQA

SEQ ID NO: 10563 - protein, 386 aa, Salmonella typhimurium LT2
MRNNPLIPKSKLPNLGTTIFTQMSALAQKHQAINLSQGFPDFDGPRYLHERLAYHVAQGANQYAPMTGAQALREAIADKTAEIYGYRPDDVSDITVTAGATEALYAAITALVRAGDEVICFDPSYDSYAPAVALSGGVLKRIALTPPHFRVDWQAFSALLSERTRLVILNTPHNPTATVWRQADIEALWQAIGEREIYVLSDEVYEHICFAAEGHASVLAHPQLRERAVAVSSFGKTFHMTGWKIGYCVAPAAISAEIRKVHQYLTFCVNTPAQLALADMLRAAPEHYRALPDFYRKKRDVLVNALAQSRLKVLPCEGTYFLLIDYSAVSTLNDVEFCQWLTEEVGVAAIPLSVFCAAPFPHQLIRLCFAKQESTLLAAAERLCKL

SEQ ID NO: 10564 - protein, 248 aa, Helianthus annuus
MPGIAFGSFDDSFSLSSIKSYVAEFISTLLFVFAGVGSAIAFAKLTADADLDPAGLVAIAVCHGLALFVAVSIAANISGGHVNPAVTFGLAVGGQITILTGIFYWIAQCIGSIAACYLLSFVTGGLAVPTHAVAAGVGAIQGVVMEIIITFALVYNVYATAVDPKKGDLGTIAPLAIGLIVGANILAAGPFSGGSMNPARSFGPAVAAGDFSGHWIYWVGPLVGGGLAGAIYSNVFISNEHAPLSSEF

SEQ ID NO: 10565 - protein, 759 aa, Salmonella typhimurium LT2
MSNETGHLNRRSFLKGIVALGAVAALPGGLLTSRCALAQPPVPFNPKTYKIYRNACPRNCYDTCSLKTWVKDGVITFVEGAPESTFTHGTPCVKGLSYPRRVYSPDRIKYPMTQDVRGSGNWRRISWEEAMQRIAAKMLEIKKKDGSMLGLALTKYSGKFGVLNYAVEGMMSSLGYTTRFAGTPCWPAGIDAQNYDMGDMWCNDPEDMVKAKYIIIWGANPAWCSMHSMKYIYQAREKGAKVVVIDPLLSQTAAKADLYLRVRPGSDGALALGMARHLVDKGLVDQDFVNNDAHGYPEFEAYLRNHVTVEWAAEICGLSADVIRQLAEEFTAVKPATVWIGYGMQRHVNGGANVRAIDAFVAMSGNIGVEGGGARYGHLHTWGFNYNAMLQKPPVGAIGIPGAAGTTSEFGAAAGSDAVQYSDRSLNINQTAQGILEANDPPVRMLWVACKNPFAQDFDRSKMKKAFEKLEMVVCADQFFNETVQHADIVLPVTTAFEEWNVDASYWHYWLSINQPAIKPMYEAKCDLEIATMLSRTINKMAPGSCTFPQEFDHKRWLDQEFNDGMAKMFGISSWDDLLDGPKKAILPSSAAWYDRKFKTPSGKYEFKSELAEKNGHTALPEYKPEAESKLPFHLFTPHVQFGLHSQFINLDWMQVFYPEPFVYIHPSSAKKKGISENDLVKVFNGTGEVELRAKVTTNVPEDFLVMYEAWFPKRQYNVQNVVADTPADMGLMKTGAPGAAIHSQFADVVLIGKGESVA

SEQ ID NO: 10566 - protein, 554 aa, ASPERGILLUS NIDULANS FGSC A4
MEFPEASIFPLLKDKVAIVTGGAQGMGKATASVFLRAGAKVVIADIKAEQGEQVASELSSLGEVRFVKTDISKSEDVQNLVAQTVGFFGRLDVAINNAAMTPDKTVLIETDEEYWRRLVDVNLTGTALCCKYEMQQMRKQGSKGSIVNITSINAFMPQPNMPAYTSTKHALLGLTKHAATEGGPLGIRVNAVAPGAIFSEMSAKALEIMGTTHDEFAPKVSSLNRFGQPHEVAQASLWLASDSSSLSNGLPVPRTYEGKLALVTGSARSTSSLRTLVFAFLLNQWLTQPGIGACIVRNLASKGCNVIMNYATTSSDKAAEWLAQELTETQHIRALPIRADISKEEECERLISTAKEFFTGDGESRFHIDILVHNAAILFLGPLESVDPVEFHRIYEVNVLGSILLTAVCKPYLPTDRSGRIVMLSSINSKVGAENTTLYSGTKGTIEAMTRVWCRELADRTTVNAINPGLAMTDMYLSAPDEVKVDLAKWNPLTPLVPVRETDSEEVKKLGEKFGGRAAYAEEIAGFVATICNPEFGWCTGSIISAKEGLSFSI

SEQ ID NO: 10567 - protein, 477 aa, Streptomyces coelicolor A3(2)
MTQSDSLTYDVVVIGAGPVGENVADRTRAAGLSTAIVESELVGGECSYWACMPSKALLRPVLARADARRLPGLAQSLQEPLDATAVLARRDEFTSHWKDDGQVQWVEGIGADLYRGQGRLAGPRTVEVAGPDGTRRTLSARHAVAVCTGSAAALPPLPGLAEVRPWTSREATSAERAPGRLIVVGAGVVAVEMATAWQALGSRVTMLVRGDGGLLARMEPFAGELVAEALTEAGVDIRTGVSVESVTRENGTVVAVTDTGDRLEADEILFATGRTPRTGDIGLDTVGLKPGSWLPVDDSLRVEGSDWLYAVGDVNHRALLTHQGKYQARIAGAAIAARASGVPILESDPWGAHAATADHDAVPQVVFTDPEVASVGLTLAEAEQAGHRVRAVDVPIAVAGSSLYGDGYKGRARMVVDLEDEIVRGVTFVGPGVGEMIHSATIAVAGRVPISRLWHAVPSYPTISEVWLRLLETYRDN

SEQ ID NO: 10568 - protein, 980 aa, Methylobacterium extorquens
MLIKRKSGDAARTKHQAVAAGLAAGVLDRRAFLRKSGLTAGALAAAGTIQLGSVRKAQAAGSSAVGPDTVIKKNVCTHCSVGCTVTAEVVNGVWVGQEPSYASPINRGTHCAKGAAIRELVSSDRRLKYPMKLEGGQWKRISWDQAYEEIGDKLVQIREKNGADSVYWLGSAKFTNEASYLMRKFAALWGTNSIDHQARICHSTTVAGVANTWGYGAQTNSYNDIRNAKTMIILGGNPAEAHPISMQHVLSGKEINRANMIVIDPRFTRTAAHATEYVRIRSGTDIPVVWGILWHIFQNGWEDKEFIAQRVYAMDDVRKEVAKWTPDEVERVSGVPGEQLKRVAEKFAKEKPATLIWCMGATQHTVGTANVRALCILCLATGNVGKPGTGANIFRGHTNVQGATDLGLDVTSLPLYYGLVEGGWRHWARVWDVEYEWLQSRFDEVPAKGGRKARTRKENMEAPGITSTRWFDAVNLPPEQIDQRSPIKAFMVFGHGGNTVTRMPEAIDGMNKLELLVVADPHPTTFAALDARQDNTYLLPICTSLEMDGSRTASNRSIQWGEQIVKPAFESKSDYEVLYRLAQKLGFADKLCKNIKIVDGAPEAEDILREINRGGWSTGYCGQSPERLKAHMRNQHKFDLVTLRAPKDDPEVGGDYYGLPWPCWGKPELRHPGSAILYNTSLHVKDGGGGFRARFGTERNGQTLLAENSFSKGSDLTDGYPEFTFGVFKKLGWDKDLTPDELATILKIGGEKPDTVSWATDLSGGIQRVCLDHGVSPFGNGKARANAWNLPDPVPVHREPVYSPRPELVAKYPTRPDERQLRMPNIGFSVQKSVVDRGVAKDFPIILTSGRLVEYEGGGEETRSNPWLAELQQDMFVEINTGDAAARGIKDGQWVWVSGPENGAKTKVKALVTDRVGKGVAFMPFHFSGWYQGKDMRDFYPKGTDPVVLGESVNTVTTYGFDPVTGMQETKCTLCQIAAA

SEQ ID NO: 10569 - protein, 159 aa, Zea mays
  unsure (1)..(159): unsure at all Xaa locations
MGGILAVVGCSECSQAKRARILACSIRLKHRVPDWPGLYQXTRPTSLRQQRFYSSSPLSGEQPLLNEDRIGEVETHVQIYNHIKVRKQLTGTHKFSTSSDXEVIMPLYXKHCHNFVHMLDRLLTFELYDTRDRTYVTTRDTIEGNPLYIGCGNDGSDCI

SEQ ID NO: 10570 - protein, 228 aa, Gossypium pilosum
  unsure (1)..(228): unsure at all Xaa locations
FTSLCHTDVYFWEAKGQTPLFPRIFGHEAGGIVESVGEGVTHLKPGDHVLPVFTGECGNCRHCKSKESNMCDLLRINTDRGVMLSDGKTRFSINGKPIYHFVGTSTFSEYTVAHVGSVAKINPAAPLDKVCILSCGISTGLGATLNVAKPAXGSTVAIFGLGAVGLAAAEGARIAGASRIIGVDLNPNRFEEAKKFGCTEFVNPKDHNKPVQEVLAEMTNGGVDRSVE

SEQ ID NO: 10571 - protein, 1829 aa, Oryza sativa
MADPFVADDQTDADFFDKLVDDDDDLSPAPAPAPVPAQQSAEAALLPALSDLSLADDDTDPSPAPPPVEAPPEGASPESGKGAVHTTVKQVQWASFGGAADDGADPFSDLSGGAADDGFLGTMAGNQSFQTSVIGSVGASAHGIFGGSQSLTAEVTDQDFFGGTSDQNTDTQQQQLEQSGSSAFDSTDPKYLESIYPGWKYDEATQQWYQVDNSDTHGNATQVDTSTENIQQQQLAASYMHNPTQSSLETIAEEGTTTGSVSTWGQGGTSEYPPNMVFYAEYPGWYFDTNTQQWQSLESYQQAVTASAVQDGANNGVVASSAETNYSVKQTEDLPAHNQVAQHNSFSNNYSYQSQWQTNSFSNSMQPESATASLPDSFQSLGQHAISESFNSSTNSQVSFNTAETATSHYGNVNLDSSSTQGGYTASGGQQTGYKGFEPFTGHQAGYKGFEPSTGHQTSHKLFDPSAGNQNSYKPFEPSTGHHQHKGFEPSTNHQGDYKAFEPSTHNQGGYKGFSPSTVQQPGYKGFEASTGLQTNFKGFEPYSGQQAGYTGSLPSTGHQSSYMGFETSSNQGYGDANNVANSQGFVPMESMYGSHNQAHTNPQVPLSNSYLSVDNSKNFSQQQFLGPNASHLQFGQSPHEERSSAGRPPHALVAFGFGGKLILMKETNSMATNYDSGNQGNSSGTVSVLNLSEVVTDKADALSASNGSALSYFHALCRQPVPGPLVGGSAASKDVNKWLDDMIALYESSTSEFQRGDPRKLLISLLKILCHHYGKLRSPFASDPSHEDTDGPEMAVTKLFSSCKRSSFQMGDFGSHVRCMKNIPSENQMQAVAQEVQNLLVSGRRKEALQCAQEGQLWGPAIILALQLGDKFYVDTVKKMAHCHFLSGSPLRTLCLLIAGQPADVFNADNNISSNYGSQQPMEPSPNGMLDDWEENLAIITANRTKGDDLVITHLGDCLWKEKNEVAAAHSCYLVAELNIDPYSESARLCLLGADHLKCPRTFASPEAIQPYKLIYAYMLAEVGRVADSLRYCQASMKVLKASGRAPELEAWKQLFSTLEDRIRTHQQGAVSDRESYTAPGATKFANSQSVMTMSSLMPSASVQSMSEMSDSGRKIAHNRSVSEPDFGRTPKQGAGSDSTQSTAPGSGSSRFGWLGSTLQKTMGFVSKSHRQNGVVDYKLNGPMSASHTPNGFMEGKSSTSSEHGSGMPPIPPSQNQFSARGRMGVRSRYVDTFNKGGGGGAVPSYNKPAVASVTPPSGAKFFVPTAAVVAAEQMPNQTAETHGETFRPDERSSPAETSFSSPPPATQFSAPLMVPTIQRYPSMDNITTPNNGSGLSSGSNSSSFSRSRAASWSGTYSEQINAVAAFSHPNTERILFRSVVLMPFQLRTLRDALDYDRSALVRYFSAASASFPTKGGAAAGVEKRIGGARFPQCKQPGKELETFKVSLGGLNGRYACRRAPNNCIPTTITGLNGSLSCGQVSSARSFSSSADLPPHQEIGMPSLSPTMTEGNIARWLKKEGDKVSPGEVLCEVETDKATVEMECMEEGYLAKIIHGDGAKEIKVGEIIAVTVEEEGDLEKFKDYKPSTSAAPAAPSEPKAQPEPAEPKVTANRLLSSKQTIPHYYLTVDARVDNLIKLRGELNPLQESSGGKKISINDLVIKAAALALRKVPQCNSSWMSDFIRQYHNVNINVAVQTEHGLFVPVIRDADKKGLGTIAEEVKQVAQRARDNSLKPEDYEGGTFTISNLGGPFGIKQFCAIINPPQSAILAIGTAEKRVIPGSVDGQYEFGSFMSATMSCDHRVIDGAIGAEFLKAFKGYIENPNSMLL

SEQ ID NO: 10572 - protein, 282 aa, Solanum bulbocastanum
MDRMYSGGGDMGYGYENGVVMTRDPKPRLRWTADLHDRFVDAVTKLGGPDKATPKSVLRLMGLKGLTLYHLKSHLQKYRLGQQTKKQNAAEQNRENIGESFRQFSLHSSGPSITSSSMDGMQGEAPISEALRCQIEVQKRLHEQLEVQQKLQMRIEAQGKYLQAILDKAQKSLSTDMNSPSAVDETRAQLTDFNIALSNLMDYMHGHNGDETSAGERTQDDTNKDLQRSTYLTEGEQKKIMNIKLEETSVSFDLNSRSSYDFIGMSSAALEAKHFSNGRLEI

SEQ ID NO: 10573 - protein, 402 aa, Oryza sativa
  unsure (1)..(402): unsure at all Xaa locations
LRWCSCRPRCPGSRAGGASGSCLHPVCRSQAPGELSKFSAARAVVELPARPVPGSSAWSSMALSVTPLAAARAVLATCFFVRRHQIRRDRGRIPVTREFHGMSSQLVXAMPSLIFTKVQEDNSTSSSCAICLEDYSFGEKLRVLPCRHKFHATCVDMWLTSWKTFCPVCKRDASAGTSKPPASESTPLLSSVIHLPAESTALSSFRSTVAVSSPRPIRRHPSSQSTSRAYSISSAPRNYNLQRYYTNSPYISTSRSNVDLANMSSQWSHTPHQASMHSLRSGHLSLPINIRYTIPHVSRSDYGSASLGLSHDSCSHHGSPSYYHSSLGQQRSYLMHRTESGPSLSTMVLQSPQXVSSSTMANQEKSISCGLTRSLRQAYVQHCLDSDGSLSAVTSDQSLPRC

SEQ ID NO: 10574 - protein, 92 aa, Zea mays
MASLFKDPSKLSAYRDRRFKGTQEEYEAALLASTTLYIGNMSFYTTEEQAYELFSRAGEIKKIIMGLDKNSKTPCGFCFVLCGPLPFLDTSR

SEQ ID NO: 10575 - protein, 254 aa, Arabidopsis thaliana
MEDLDHEYKNYWETTMFFQNQELEFDSWPMEEAFSGSGESSSPDGAATSPASSKNVVSERNRRQKLNQRLFALRSVVPNISKLDKASVIKDSIDYMQELIDQEKTLEAEIRELESRSTLLENPVRDYDCNFAETHLQDFSDNNDMRSKKFKQMDYSTRVQHYPIEVLEMKVTWMGEKTVVVCITCSKKRETMVQLCKVLESLNLNILTTNFSSFTSRLSTTLFLQADEEESSAVEAKIQMAIAAYNDPNCLINF

SEQ ID NO: 10576 - protein, 638 aa, Saccharomyces cerevisiae
MSRTNMDTRHAHSALLAAPQSATANSRSSNSSSESSSNKNNINVGVGDDSGNVSAVSIDDGPHFRDIFHYGHEENYKLASSGITNLNSSSHAHQTLSPISISNASTPESFPEHPLGLERETEPALEAEMEAEELPPHQSKYLLSSIKATKRLKDARPFLKPVDPIALNIPHYFNYVQTPMDLSLIETKLQGNVYHSVEQVTSDFKTMVDNCLNFNGPESSISSMAKRIQKYFEKKLSAMPPRVLPASALKKTSRNRKKNEDMDSPLVIRRSVSTTNDNIGESGNREGVSGGRPKRTIHPPKSKDLFDIYENSKPKSKTLQKKFRTCLKILKVLMSKKNSDINFPFLQPVDPIALNLPNYFDVVKNPMDLGTISNNLMNWKYKTIDQFVDDLNLVFYNCFQFNPEGNEVHSMGKKLKELFNFHWLENQDILNEIETDSDLEEDNYSSSYSSDDEYDDEDINENDITNPAIQYLEQKLKKMEVELQQLKRQELSKLSKERKRKHLGKTLLRRKAMKHSVDDLKKSITDKINELSDLEMNGMIRIIKNSLPADEILTSNEDEIEIDLDILDEATIARIYERYFEKKNNNNSKRKLSGNYSTAPTNKKKKTLKFLEKDEIINNNNYSDSEEDSSDSSDSDSD

SEQ ID NO: 10577 - protein, 228 aa, Gossypium pilosum
  unsure (1)..(228): unsure at all Xaa locations
FTSLCHTDVYFWEAKGQTPLFPRIFGHEAGGIVESVGEGVTHLKPGDHVLPVFTGECGNCRHCKSKESNMCDLLRINTDRGVMLSDGKTRFSINXKPIYHFVGTSTFSEYTVAHVGSVAKINPAAPLDKVCILSCGISTGLGATLNVAKPAKGSTVAIFGLGAVGLAAAEGARIAGASRIIGVDLNPNRFEEAKKFGCTEFVNPKDHNKPVQEVLAEMTNGGVDRSVE

SEQ ID NO: 10578 - protein, 473 aa, Zymomonas mobilis
MSSESSQGLVTRLALIAAIGGLLFGYDSAVIAAIGTPVDIHFIAPRHLSATAAASLSGMVVVAVLVGCVTGSLLSGWIGIRFGRRGGLLMSSICFVAAGFGAALTEKLFGTGGSALQIFCFFRFLAGLGIGVVSTLTPTYIAEIRPPDKRGQMVSGQQMAIVTGALTGYIFTWLLAHFGSIDWVNASGWCWSPASEGLIGIAFLLLLLTAPDTPHWLVMKGRHSEASKILARLEPQADPNLTIQKIKAGFDKAMDKSSAGLFAFGITVVFAGVSVAAFQQLVGINAVLYYAPQMFQNLGFGADTALLQTISIGVVNFIFTMIASRVVDRFGRKPLLIWGALGMAAMMAVLGCCFWFKVGGVLPLASVLLYIAVFGMSWGPVCWVVLSEMFPSSIKGAAMPIAVTGQWLANILVNFLFKVADGSPALNQTFNHGFSYLVFAALSILGGLIVARFVPETKGRSLDEIEEMWRSQK

SEQ ID NO: 10579 - protein, 179 aa, Triticum aestivum
  unsure (1)..(179): unsure at all Xaa locations
MAPTVMASSATSVAPFQGLKSTAGLPVSRRSNGASLGSVSNGGRIRCMQVWPIEGIKKFETLSYLPPLSTXEALLKQVDYLIRSKWVXPCLEFSKVGFIFREHNASPGYYDGRYWTMWKLPMFGXCTDATQVINEVEEVKKEYPDAYVRIIGFDNMRQVQCVSFIAFKPPGXCEESGKA

SEQ ID NO: 10580 - protein, 416 aa, Agaricus bisporus
MSLSNKLSITDLALTGKRVLIRVDFNSPIQDGKITNPARINAALPTIKYALDNGASKVILMSHLGRPDGKAISKYSLKPVASELEKLLKKPVFFLHDCVGPDIEKAVLEAPEGAVVLLENLRFHIEEEGSAKNEEGKKIKADPSKVTQFREQLTRLGDVYVNDAFGTAHRAHSSMVGIKLPRRASGFLVKKELDYFAKALENPERPFLAILGGAKVSDKIQLIENMLDKVNCLVIGGGMAFTFKKTMQNVAIGNSLFDKPGSEKVAGIVEKAKKNNVEIVFPVDYVVGDKFDANANHKIVTDDEGVPDGWMGLDVGPKSNELFREAVLKAKTILWNGPPGVFEFPAFAKGSKVLLDATVEAVQKGATVIVGGGDTATVVANHDAEEKLSHVSTGGGASLELLEGKTLPGVAELSNK

SEQ ID NO: 10581 - protein, 294 aa, Mesorhizobium sp. BNC1
MKKIRKAVFPVAGLGTRFLPATKALPKEMLTVVDKPVIQYVVDEAREAGIEHFIFVTGRNKTAIEDHFDVAVELYETLSRRGKTEILERLKAMQPEPGQTGYTRQQVPLGLGHAVWCARELVGNEPFALLLPDMIMQSEPGCMKQMVELYMETGGNILAVEECDPAETQKYGIVGRGKETHGGFEITSMVEKPKPKDAPSNFYINGRYILQPEIFSLLEDQETGAGGEIQITDAMLRLHAKEPFYAHIFRGRTFDCGSPEGFIKANIALALQQETLKPQVLGFLKDFLEEEGLA

SEQ ID NO: 10582 - protein, 416 aa, Pichia pastoris
MSLSNKLSVKDLDVAGKRVFIRVDFNVPLDGDKITNNQRIVAALPTIQYVLDHKPKVVVLASHLGRPNGEVNPKFSLKPVAAELSSLLGKKVTFLNDSVGPEVEKAVNSASNGEVILLENLRFHIEEEGSQKKDGQKIKADKEAVARFRKQLTALADVYVNDAFGTAHRAHSSMVGFELEQRAAGFLMAKELTYFAKALENPVRPFLAILGGAKVSDKIQLIDNLLDKVDSIIIGGGMAFTFIKVLDNVAIGNSLFDEAGAKLVPGLVEKAKKNNVKLVLPVDFVTADAFSKDAKVGEATVESGIPDGLQGLDAGPKSRELFAATIAEAKTIVWNGPPGVFEFDKFAEGTKSMLAAAIKNAQNGGTVIVGGGDTATVAKKFGGADKLSHVSTGGGASLELLEGKELPGVVYLSKKA

SEQ ID NO: 10583 - protein, 488 aa, Pseudomonas aeruginosa UCBPP-PA14
MSSPSLVELKAILRLAGPLIAAQLAYVAMVFTDTVMMGKLGPDALAAGGLGAVSYAFVSTFCVGVVAAVGNLVAIRHGCDDAAGAAAAARSGLWVGAALALAAGLLLWNLRPLLLLFGQAPQTVDGAMQFLHSLTFALPGYMAFMVLRGFTSAIDRAGPVMAISVLGALANLALNYSFIEGLFGLPRLGLAGIGLVTALVMNCMPLLLALYIRRQPAYAAYSLLRGLGRPQRAMVEEILRLGLPIGGTYAVESGMFTVATLCMGIIGDHALAAHQIAIQAVYVAFMVPVGLSYATTYRIGQHFGAGRLLEARRAGRVGIGFGALCMLLFAGLFWWMPEAIIGLFLDRDAPANREVAAMAVSLLAIAAWFELFDGTQNVAMGAIRGLKDARTTFLVGLACYWLVGVPLACLLAFAAGWGAAGVWWGLAGGLACAAIGLTLAFEWKTARLLPKATASETSALNCRAAGRGAPSARRCPGNAPVPPAAAAD

SEQ ID NO: 10584 - protein, 284 aa, Oryza sativa
MAAAEGPVLLFPSTSSTSARVEAVVVFNICDSYVRRPDQAERVIGTLLGSVLPDGTVHVRNSYVVPHNESPDQVALDIEYHHNMYASHHKVNPKEVIVGWFSTGFGVSGGSTLIHDFYSREVQSPIHLTVDTGFTRGDASIKAYISSNLSLGDRHLAAQFQEIPLDLRMLEAGKVGFDILKSTIVEKLPNDLEGMESSMEKLYVLIDEIYKYVDDVVEGRVAPDNKIGRFISDAVASMPKLSPAAFDKLFNDRIQDNLALVYLSSITRTQISIAEKLNTAAQIL

SEQ ID NO: 10585 - protein, 248 aa, Oryza sativa
MELLRLLAVAAVAAMAAEVAAGGDSGWSSGSATFYGGSDASGTMGGACGYGNLYSAGYGTSTAALSTALFNNGQSCGACFEVRCGGGGSCLAGTVAVTATNLCPPNYALAGDAGGWCNPPRPHFDMAEPAFTRIAQARAGVVPVQYRRVACAKQGGIRFTITGHSYFNLVLVTNVGGAGDVTAVSVKGSRSGWQAMSHNWGANWQNGANLDGQPLSFRVTASDGRTVTSDNVAPSGWSFGQTFSGGQF

SEQ ID NO: 10586 - protein, 343 aa, Corynebacterium glutamicum ATCC 13032
MRIATLTSGGDCPGLNAVIRGIVRTASNEFGSTVVGYQDGWEGLLGDRRVQLYDDEDIDRILLRGGTILGTGRLHPDKFKAGIDQIKANLEDAGIDALIPIGGEGTLKGAKWLSDNGIPVVGVPKTIDNDVNGTDFTFGFDTAVAVATDAVDRLHTTAESHNRVMIVEVMGRHVGWIALHAGMAGGAHYTVIPEVPFDIAEICKAMERRFQMGEKYGIIVVAEGALPREGTMELREGHIDQFGHKTFTGIGQQIADEIHVRLGHDVRTTVLGHIQRGGTPTAFDRVLATRYGVRAARACHEGSFDKVVALKGESIEMITFEEAVGTLKEVPFERWVTAQAMFG

SEQ ID NO: 10587 - protein, 257 aa, Zea mays
  unsure (1)..(257): unsure at all Xaa locations
MATTNWTLPDHPTLPKGKTVAVVVLDGWGEASPDQYNCIHVAQTPVMDSLKNGAPEKWRLVKAHGTAVGLPSDDDMGNSEVGHNALGAGRIFAQGAKLVDAALASGKIWEDEGFNYIKESFDKGTLHLIGLLSDGGVHSRLDQVRLIVKGASERGAKRIRLHILTDGRDVLDGSSVGFVETIEKDLAQLREQGVDARIASGGGRMYVTMDRYENDWSVVKRGWDAQVLGETXTQIPNALEAVETLRAEPKPNDQYLP

SEQ ID NO: 10588 - protein, 412 aa, Salmonella typhimurium LT2
MKALTYHGPHHVKVENVPDPGIEQPDDIILRVTATAICGSDLHLYRGKIPQVKHGDIFGHEFMGEVVETGHDVKNIRKGDRVVIPFVIACGDCFFCRLQQYSACENTNDGHGAAMNKKQIPPPAALFGYSHLYGGVPGGQAEYVRVPKGNVGPFKVPPLLSDDKALFLSDILPTAWQAAKNAQIQQGFSVAVFGAGPVGLLTIACARLLGAEQIFVVDHHAWRLRFAEERYGAIPINFDDENDPAEKIIEQTAGHRGVDAVIDAVGFEAKGSLTETVLTNLKLEGSSGKALRQCIAAVRRGGVVSVPGVYAGFIHGFLFGDAFDKGLTFKMGQTHVHAWLGELLPLIEKGLLKPEEIVTHYMPFEEAARGYEIFEKREEECRKVILVPGATSAQAAQKQATGVVNPMPGGVV

SEQ ID NO: 10589 - protein, 248 aa, Helianthus annuus
MPGIAFGSFDDSFSSSSIKAYIAEFISTLLFVFAGVGSAIAYAKLTADAALDPPGLVAVAVCHGFALFVAVCIAANICGGHVNPAVTLGLAVGGQITFLTGLFYWIAQLLGSTVACFLLSFVTGGLAVPTHGVAEGVGTIQGVVFEIIITFAMVYTVYATACDPKKGALGTIAPIAIGFIVGANILAAGPFSGGSMNPARSFGPAVASFDFSGHWIYWVGPLVGGGLAGLIYPNVFISNEHIPLTNEY

SEQ ID NO: 10590 - protein, 496 aa, Triticum aestivum
  unsure (1)..(496): unsure at all Xaa locations
MDPYKYRPSSSFNAPMWSTNSGAPVWNNDNSLTVGXSRGPILLEDYHLVEKIADFDRERIPERVVHAXRGASAKGFFEVTHDVSHLTCADFLRAPGVQTPVIVRFSTVIHERGSPETLRDPRGFAIKFYTREGNWDLVGNNFPVFFIRDGMKFPDMVHALKPNPKTHIQENWRILDFFSHHPESLHMFTFLFDDIGVPADYRHMDGSGVNTYTLVNRAGKAHYVKFHWKPTCGVKSLLEDEAVTVGGTNHSHATKDLTDSIAAGNYPEWTFYIQTIDPDHEERFDFDPLDVTKTWPEDVVPLQPVGRLVLNRNIDNFFAENEQLAFCPGXSSSPGCTTRTTSCCRRGSSPTRTRSATGWGPNYLLLPANAPKCSHHNNHYDGLMNFMHRDEEVDYFPSRFDPAKHAPRYPIPSRTLNGRREKMVIEKENNFKQXPGERYRSMDPARQERFINRWIDALSDPRLTHEIKAIWLSYWSQADKSLGQKLASRLSSKPSM

SEQ ID NO: 10591 - protein, 631 aa, Enterococcus faecium
MCGIVGFVNDKDNKKTIINTMMDRIVHRGPNSSGEYIDKHVALGFRRLSIIDLEGGTQPIYNEDRTKIIIFNGEIYNYQPLREELIAAGHVFQTHADTEVLLHGYEEWGTELLQKIRGMFAFAIWDNEKNELFGARDHFGIKPYYYAEMNGTFMFGSEIKSFLPHPDFNKELNKEALKPYMTFQYSPLNGETFFKDVYRLPEGHYYTYKDGKIDIQQYWDADFETKETHSRQEWIEKIDETVQASIEAHTVSDVEVGSFLSSGVDSSYVTSVLKPDHSFSIGFDDKTYNEAIEARKLTELLDLDNTAAVIDGDMSFKAFPLIQYHLDEPDSNPSCVPLYFLANLASQSVRVVQSGEGADELFAGYQTYGFHTNSKFIRVIAQGLKKLPKGTRYNLGRKIGKMKNFHGRIHLYESLAPAKEYFIGHARVFEESEASEVLTPKYQTAPSVDEIMTVHYEKTEGIKDEVNKMQYVDLHQWMPKDILLKADKLSMASSLEVRVPLLDIEVMKLAQQIPSKFLLNQNNTKDIFRQAANKHLPEEWSNRVKLGFPVPIKAWLKEEHGYEQVKALFEADFAKEFFDQEKIMKLLDDHHEGRKEEQRKIWTIFSFLTWYKVYFVDETIPQAEAIDYVTV

SEQ ID NO: 10592 - protein, 255 aa, Xylella fastidiosa 9a5c
MNPTYDFKGQVALVTGAAAGMGLATARGFAQGGASVVLADRDGERAAQEAAAIVAEGGTAIGLACDVSDEAQVAALVEKTVAEYGRLDFAFNNAGVMAKIAPFAEATSEEFDRVIGINLRGVWLCMKYELQQMQRQGSGVIVNNASVGALTGNVGIGAYIASKHGVLGLTRAAALEYCKKGIRVNAVNPGTIDTQIARDVVGGSDEAFAKLGASAPIGRAGRPEEIASAVLWLCSPGGSYVIGEGLTVDGGYVVP

SEQ ID NO: 10593 - protein, 369 aa, Bdellovibrio bacteriovorus HD100
MKIKAAVAWKAGAPLSIEEVDLEGPKKGEVLIRVVATGVCHTDAFTLSGADPEGLFPVILGHEGGGIVEEVGEGVTTLKKGDHVIPLYTPECKECKFCLSGKTNLCVRIRATQGKGLMPDGTSRFSKDGKMIHHYMGCSTFAEYTVVPEIALAKVNPAAPLDKVCLLGCGVTTGIGAVLNTAKVEKGATVAVFGLGGIGLSVIQGAKMAGASRIIAIDINDAKWEMAQKFGATDFVNPKKHDKPIQQVIVEMTEWGVDYSFECVGNTQLMRAALECAHRGWGQSIVIGVAGAGQEISTRPFQLVTGRVWKGSAFGGVKGRTELPGYVEQYMSGEINIDDMVTFTMPLEDINKAFDYMHEGKSIRSVIKM

SEQ ID NO: 10594 - protein, 353 aa, Xylella fastidiosa 9a5c
MRGYVLEAKGTAKWKDVPMPVLGPNDALVRPTAVATCTTDVHMIATAALPKTVGKVIGHEAVGVVEKVGENVKAFRPGDRVVLPCGNSDWRHPRAQRGEAKYYQTNSPYYSDDPSIGGVFSEYVRTLDADLNLARIPDKVSDLQAVMLPDMAATGFTGVERLGIQFGETVLVMGLGPVGLMAVAGAALRGAGRIIGVDSRPNTVELARAYGVTDIVDFTGGQTLEKVMALTAGQPVDSVLIASGGTASEVFTTALKAVKFGGRVACVSGFLHDESVTIPLEVWNYGFMEKFLTGVHVQDGRDWIERLLAMLECGRFDTRPLVSHVLHGWDSLEQGIELMRSRDPAVIKPVIVI

SEQ ID NO: 10595 - protein, 261 aa, Haemophilus somnus 129PT
MSEPENLAQNQPHFFEETTHFGFQTVAKSEKQKLVANVFHSVAAKYDLMNDLLSFGIHRVWKRFTIDCSGVRKGHKVLDLAGGTGDFSAKFSRIVGETGKVILADINSSMLDVGREKLRNLGIVGNVDYVQANAEELPFADNTFDCVIISFGLRNVTDKDKALRSMFRVLKPGGRLLVLEFSKPILDPLSKIYHFYSFNVLPKIGEIVVNDSDSYRYLAESIRMHPKQDILKEMMINAGFEQVGYYNLTAGIVALHRGYKF

SEQ ID NO: 10596 - protein, 429 aa, Methylobacterium extorquens
MTAITNIAAREILDSRGNPTVEVDVLLEDGSFGRAAVPSGASTGAHEAVELRDGDKSRYNGKGVLKAVDAVQSEILDAIGGMDAEDQVAVDEAMIALDGTPNKARLGANAILGVSLAVAKAAAETAGLPLYRYVGGVQGRVLPVPMMNIVNGGAHADNPIDFQEFMVMPVGATSLSDAVRMGAEIFHTLKSALKKAGHNTNVGDEGGFAPNLPSAEAALDFVMESINAAGFKPGSDVVLALDCAATEFFKDGAYRYEGEGQTRSIEQQVDYLAKLTEAYPILSIEDGMSEDDWEGWKLLTDRIGSRVQLVGDDLFVTNVERLARGIETGTANSILVKVNQIGSLTETLAAVDMAQRAGYTAVMSHRSGETEDSTIADLAVATNCGQIKTGSLARSDRLAKYNQLIRIEEGLGAQALYAGRSAIRQLAGR

SEQ ID NO: 10597 - protein, 457 aa, Staphylococcus aureus subsp. aureus Mu50
MHINTVNGRGMYMSKAHQLIQEDEHYFAKSGRIKYYPLVIDHGYGATLVDIEGKTYIDLLSSASSQNVGHAPREVTEAIKAQVDKFIHYTPAYMYHEPLVRLAKKLCELAPGDFEKRVTFGLTGSDANDGIIKFARAYTGRPYIISFTNAYHGSTFGSLSMSAISLNMRKHYGPLLNGFYHIPFPDKYRGMYEQPQANSVEEYLAPLKEMFAKYVPADEVACIVIETIQGDGGLLEPVPGYFEALEKICREHGILIAVDDIQQGFGRTGTWSSVSHFNFTPDLITFGKSLAGGMPMSAIVGRKEIMNCLEAPAHLFTTGANPVSCEAALATIQMIEDQSLLQASAEKGEYVRKRMDQWVSKYNSVGDVRGKGLSIGIDIVSDKKLKTRDASAALKICNYCFEHGVVIIAVAGNVLRFQPPLVITYEQLDTALNTIEDALTALEAGNLDQYDISGQGW

SEQ ID NO: 10598 - protein, 483 aa, Oryza sativa
MNVLASKIFPSRSNVASEQQQSKREKATIDDAKNSSKNKNLDRSVDESVLGIILGGGAGTRLYPLTKKRAKPAVPLGANYRLIDIPVSNCLNSNISKIYVLTQFNSASLNRHLSRAYGNNIGGYKNEGFVEVLVAQQSPDNPNWFQGTADAVRQYLWLFEEHNVMEFLILAGDHLYRMDYEKFIQAHRETDSDITVAALPMDEKRATAFGLMKIDEEGRIVEFAEKPKGEQLKAMMVDTTILGLDDVRAKEMPYIASMGIYVISKNVMLQLLREQFPGANDFGSEVIPGATNIGMRVQAYLYDGYWEDIGTIEAFYNANLGITKKPVPDFSFYDRSAPIYTQPRHLPPSKVLDADVTDSVIGEGCVIKNCKIHHSVVGLRSCISEGAIIEDSLLMGADYYETEADKKLLGEKGGIPIGIGKNCHIRRAIIDKNARIGDNVKIINVDNVQEAARETDGYFIKSGIVTVIKDALLLAEQLYEVAA

SEQ ID NO: 10599 - protein, 922 aa, Bradyrhizobium japonicum USDA 110
MTKITFELDGKQVEASPGETIWQVAKRQGREIPHLCYSPAPDYRPDGNCRACMVEIEGERVLAASCKRTPSVGMKVKTESARAVSAQKMVMELLVADQPARETSHDPDSKFWHWAETTGVTESRFPAAERWATDASHPAMRVNLDACIQCGLCVRACREVQVNDVIGMAYRSHGSKIVFDFDDPMGESTCVACGECVQACPTGALMPAVMLDENQTRVTYADKKVDSLCPFCGVGCQVTYEVKDEKVIYAEGRDGPANHNRLCVKGRFGFDYIHHPHRLTKPLVRLPNAKKDANDQVDPANPFTHFREASWEEALDIAAKGLVKIHDTNGAKALAGFGSAKGSNEEAYLFQKLVRTGFGSNNVDHCTRLCHASSVAALFEGLSSGAVSAPFSAAMDAEVIIVIGANPTVNHPVAATFIKNAVKQNGAKLFVMDPRRQTLSRHATKHLQFKPGSDVAMLNAMINTIITEGLTDDQYIAGYTEGFEDLKEKIKEFTPEKMEAICGVPAQTLREVARTYARAKSSIIFWGMGISQHVHGTDNARCLIALALITGQVGRPGTGLHPLRGQNNVQGASDAGLIPMFLPDYQPVGRDDLRGAFEKLWQQDLDPVRGLTVVEIMNAIHAGEITGMYIEGENPAMSDPDLQHARHALAMLDHLVVQDLFVTETAFHADVILPASAFAEKEGSFTNTDRRVQLARQVIKPPGDARQDLWIIQEIGKRMGLPWNYAGAGDVYTEMAELMPSLKNISWERLVREGAVTYPADDPNKPGNEIIFTTGFPTASGRGKIVPAKVIPPDELPDAEYPMVLSTGRVLEHWHTGSMTRRAQVLDQIEPEAVAFMSPKDMHKKQLAPGDFIRLETRRGAVEVKVRSDRDVPENMVFMPFCYAEAAANLLTNPALDPFGKIPEFKFCAARAERVEMRDAAE

SEQ ID NO: 10600 - protein, 496 aa, GIBBERELLA ZEAE PH-1
MTSQHSPSIEPSYRILESFPDEETPLIPHSRNSSLEIKSSSRSPWLTETVVLVKASVPVILAYMLQNSLQTVSVLMVGRLSPEALATAAFSYMFTMATAWLIALGGTTALDTLGSSTFTSSKDKHDLGILLQRGLIVLTGFYGVVAIIWCFSGYIFRSLGQEEFICVQGPRFLQLLIPGGLGYVWFEAMKKFLQAQEIYRPGTYALLVISPLNAVLNWFFIYTLDFGLDGAPIATGISYWLCFLLLVGYTAFIKGSACWGGFNIRQALQHLGPFSKLAFLGVIHVGTEWWAFEIVALAAGRLGTIPLAAQSVVMTLDQIINTIPFGLGVAASSRLGNLLGLGDAVQARRCAHSAALLSIIFGTIILTVLLSTKNVIAKIFNDDEEVVTLVAHIMPYVALFQIADGLNGSCGGALRGMGRQWVGAVVNCISYYGGALPAGIWLAFHGWGLSGLWVGQCVALFLVGALEWVIIALCDWKKEVKRASDRIRVDDLDRNL

SEQ ID NO: 10601 - protein, 489 aa, Bacillus licheniformis
MKIKAQIGMVMNLDKCIGCHTCSVTCKNTWTNRSGAEYMYFNNVETKPGIGYPKQWEDQDKYRGGWELKKGKLQLKSGAKTARLMNLFYNPYQPTIDDYYEPWNYDYETLTNSPEKKHQPVARPKSSITGDFMNLEWGPNWEDDLAGGHITGLQDPNVKKMEESIKTEFEDVFMMYLPRICEHCINPSCVSSCPSGAMYKREEDGIVLVDQNACRSWRHCVSSCPYKKVYFNWQTNKAEKCTLCFPRLEAGLPTICSETCVGRIRYLGVMLYDADKVEEAASAENEKDLYHSQLEIFLDPNDPAVAEEAKAQGIPLEWIEAAQKSPIYKMIIDWKIALPLHPEYRTLPMVWYIPPLSPIMNMFEGKGTAQSAEDIFPAIDEMRIPIEYLANLLTAGDTHHIRTTLKKMSVMRMYMRATQTNKQIDLALIQDTGLTEEQIEDMYRLLAIAKYDDRFVIPQTHREEVADLYMEQGSCGLSFAGGPGSCQNI

SEQ ID NO: 10602 - protein, 642 aa, Arabidopsis thaliana
MSSTFRAPAGAATVFTADQKIRLGRLDALRSSHSVFLGRYGRGGVPVPPSASSSSSSPIQAVSTPAKPETATKRSKVEIIKEKSNFIRYPLNEELLTEAPNVNESAVQLIKFHGSYQQYNREERGGRSYSFMLRTKNPSGKVPNQLYLTMDDLADEFGIGTLRLTTRQTFQLHGVLKQNLKTVMSSIIKNMGSTLGACGDLNRNVLAPAAPYVKKDYLFAQETADNIAALLSPQSGFYYDMWVDGEQFMTAEPPEVVKARNDNSHGTNFVDSPEPIYGTQFLPRKFKVAVTVPTDNSVDLLTNDIGVVVVSDENGEPQGFNIYVGGGMGRTHRMESTFARLAEPIGYVPKEDILYAVKAIVVTQREHGRRDDRKYSRMKYLISSWGIEKFRDVVEQYYGKKFEPSRELPEWEFKSYLGWHEQGDGAWFCGLHVDSGRVGGIMKKTLREVIEKYKIDVRITPNQNIVLCDIKTEWKRPITTVLAQAGLLQPEFVDPLNQTAMACPAFPLCPLAITEAERGIPSILKRVRAMFEKVGLDYDESVVIRVTGCPNGCARPYMAELGLVGDGPNSYQVWLGGTPNLTQIARSFMDKVKVHDLEKVCEPLFYHWKLERQTKESFGEYTTRMGFEKLKELIDTYKGVSQ

SEQ ID NO: 10603 - protein, 370 aa, Rhodopseudomonas palustris CGA009
MDIRAAVFREVGAALRVERIVLDPPQPTEVLVRLAAIGLCRTDYHVMRGERRVAMQPMVLGHEAAGIVEAIGDQVQGVAPGDHVVLTFIPGCGHCRWCQRGLHHLCAEGPRITHGPQLDGSFRRRDAGGRDVGAFCMIGAFAEATVVDQASVLVIDKDIPLDHASLIACGVPAGVGAARHRARVKPGDTVLVVGCGGDGMNVVQGAKLCGASMIIAADIVAQKLEWARDFGATHGTTAQGDELISTVLALTDGIGVDHAFVCINPAETLLPAFRATTKAGNVVVTAITPDTVKQIDVPPLELFATQKAIMGAVYGFASPRLQIPELLGLYRRGDLKLGELISRTYRLDEINQGYADLDAGRNLRGVVLID

SEQ ID NO: 10604 - protein, 156 aa, Glycine max
  unsure (1)..(156): unsure at all Xaa locations
LHDFNYWKKEQHDTVVCALEDASLEDALSVPWRPVPERVSMLYSDKRVIEELEEDEGRSAGEASIADFSGLLDPKKERVXAQSLKKCLVSDLLXTRLVSSATGVPPAXGVIGGSLAPEVVRAISGRWRSLKDFLYXEASHGKGVIVDIWPKCVFND

SEQ ID NO: 10605 - protein, 156 aa, Picea abies
ILHRIDVALVIDFEPISPSDVSTSSMGALQSYKLAAKAISRLQSIPSGNIGLLCDMIVQEVRELLGYDRVMAYKFHHDEHGEVISEIRRSDLEPYLGLHYPATDIPQASRFLFLRNRVRMICDCCAPPVTVIQDKRLPRDLSFCGSTLRAPHGCHA

SEQ ID NO: 10606 - protein, 348 aa, Bdellovibrio bacteriovorus HD100
MIQAKGMAAPTSKAPLKPYTFERRDPKDHDVVIDIKYCGICHSDIHMVRDEWGPGHFPMVPGHEIAGVVRAVGPKVTKYKVGDHVGVGCLVDSCAECAHCKQDLEQYCMEGQTLTYGSMERDGSGITQGGYSNVIVVKESFVVRIPDSLPLDKAAPLLCAGITLYSPLAHWKAGPGKKVAIMGLGGLGHMGVKLAKAMGAEVTVLSHSESKRDDALKLGADRFVLTKNADAFKDNAMYFDLIINTVSSADLEMARYFSLLKLDGTLVSVGAPDKPLSVNVFPLILMRRNFAGSAIGGLKETQEMLDFCAKHNITPEIELITPDQVNVAYERVLKSDVRYRFVLDMGKI

SEQ ID NO: 10607 - protein, 156 aa, Picea abies
IVHRIDVGMVIDFEPLKTGDAFVSAAGAVQSQKLAVRAISRLQSLPCGDIELLCDTVVENVRELTGYDRVMVYKFHEDEHGEVVVEIRRSDLEPYLGLHYPATDIPQASRFLFMQNRVRMICDCMATPVQVIQSEELMQPLCLVGSTLRAPHGCHA

SEQ ID NO: 10608 - protein, 413 aa, Methanosarcina acetivorans C2A
MTVNRPRGTRDFLPADTARRRYVESVMRNVVRNWGYSEIITPTFEHLDLFTLKSGEGIVGELYNFTDKGGRDMTLRPELTAPVMRLYVNELQPFPKPLKLFYFENCFRYERPQKGRFREFWQFGVELIGSGKSDSDAEVIALADALLKAVGIQGDMKLGNLAVIRTLLKGLEPEIVSKVMRLVDKKEYAGLESLLEEIGAEEQLKSDLFHLIHLEGKYILPKVKEIVGNIPELVGFEKTLKLLDAYGVDYSLDFGIARGLDYYTGMVFEVYAEGLGAQKQVCGGGSYQLIQLFGGGDVPSTGFGIGFDRIMEICPLVPPASKNLVLVSKPATHIEAVKVASELRNYLPVQIDLMERNFKAQFSYANTINADYVVIVGEKELEAGKLTLRDMVSGEQELLTLEEIIEKITGQQD

SEQ ID NO: 10609 - protein, 366 aa, Ralstonia eutropha
MTAMMKAAVFVEPGRIELADKPIPDIGPNDALVRITTTTICGTDVHILKGEYPVAKGLTVGHEPVGIIEKLGSAVTGYREGQRVIAGAICPNFNSYAAQDGVASQDGSYLMASGQCGCHGYKATAGWRFGNMIDGTQAEYVLVPDAQANLTPIPDGLTDEQVLMCPDIMSTGFKGAENANIRIGHTVAVFAQGPIGLCATAGARLCGATTIIAIDGNDHRLEIARKMGADVVLNFRNCDVVDEVMKLTGGRGVDASIEALGTQATFEQSLRVLKPGGTLSSLGVYSSDLTIPLSAFAAGLGDHKINTALCPGGKERMRRLINVIESGRVDLGALVTHQYRLDDIVAAYDLFANQRDGVLKIAIKPH

SEQ ID NO: 10610 - protein, 156 aa, Picea abies
IINRIDAGLVIDFEPVMPSDVPVSAAGALQSYKLAAKAISRLQSLPGGDIRLLCDTVVQEVRELTGYDRVMAYRFHEDEHGEVVAEMRRPDLEPYLGLHYPATDIPQASRFLFMKNRVRMICDCCAPPVNVIQDKRLSQPLILCGSTLRAPHGCHA

SEQ ID NO: 10611 - protein, 1201 aa, Oryza sativa
MDDDGETPMPSLELHKLPTLAGAAIPNPIARHPLYHPSPSFFISPTDVVLRDILFDASPASAAGERRRRHVAAYHRAGPRREVAFDPATVRAAIFTCGGLCPGTNTVVRELVVGLSELYGVRGGVFGVRNGYHGFYSDEVVPLDPAGGEHWHKAGGAGLGTLRGGVYAVGGDGTMRGAARIHREVRRRGRLAVAVAGIPKTVDNDVGVVDRSFGFHTAVEAAQQAIAAGHVEAESAANGVGLVKLMGRSAGHIALHATLSSRDVDCCLIPEEDFYLRGAGGLFDFLYRRIKDNGHAVVVVAEGAGQRLIPRTTTTSASGACAGADESGNETFLDVGAWLKAEMRAWWEEEHAGEVFTVKYIDPTYMIRAVPANAGDNLYCTLLAHAAIHGAMAGYTGFVSGTINGNYAYIPMDEVAEAKNPVDTKDHKWAWSFVVYLGGHSHGRGGAALASSQERAKNSHHEFLGSFLGSKEKARDAIFYSYTKYINGFAATLEEEEAMEISKHPSVISVFPNRGHRLHTTRSWEFLGMEKDGRIRANSIWAKARFGEGVIIGNLDTGVWPEAGSFSDDGMGPAPVRWRGICQDQASDDAQVPCNRKLIGARYFNKGYLSTVGQAANPASTRDTDGHGTHTLSTAAGRFVPGANLFGYGNGTAKGGAPGAHVAAYKVCWRPVNGSECFDADIIAAFDAAIHDGVDVLSVSLGGAPAGYLRDGVAIGSFHAVRRGVTVVCSAGNSGPGAGTVSNTAPWLVTVGASTMDREFPAYLVLGNNKKIKGQSLSPVRLAGGKNYPLISSEQARAANATASQARLCMEGSLERGKVEGRIVVCMRGKNARVEKGEAVRRAGGAGLVLANDEATGNEMIADAHVLPATHVTYSDGVALLAYLNSTRSPSGFITVPDTALDTKPAPFMAAFSSQGPNTVTTQILKPDITAPGVSILAAFTGQAGPTGLAFDSRRVLFNAESGTSMSCPHVAGVAGLLKALHPDWSPAAIKSAIMTTARVKDNMRRPMSNSSFLRATPFSYGAGHVQPGRAADPGLVYDMNDTDYLGFLCALGYNSSVIATFMASGSGAQPPYACPPARRPEDLNYPSFALPHLSPSGAARTVTRRVRNVGAAPAAYVASVAEPRGVSVAVRPSRLEFTAAGEELEFAVTFRAKKGSFLAGEYEFGRLVWSDAAAGGRHRVRSPLVVRVVDKKGKNGLPIS

SEQ ID NO: 10612 - protein, 420 aa, Shewanella oneidensis MR-1
MSNVRYISNLTRETYALILAGGRGSRLHELTDWRAKPALYFGGKFRIIDFPLSNCINSGIRRVGVVTQYKSHSLIRHVMRGWGHFKKELGESVEILPASQRYSENWYQGTADAVFQNIDIIRHELPKYVMVLSGDHVYRMDYAGLLAAHAESGADMTVSCLEVPVAEAAGAFGVMEVDDDMRILGFEEKPQLPKHCPGNPEKCLASMGNYVFNTEFLFEQLKKDAQNAESDRDFGKDIIPSIIEKHKVFAYPFKSAFPNEQAYWRDVGTLDSFWLANMELLSPTPALNLYDAKWPIWTYQEQLPPAKFVFDDDDRRGMAVDSIISGGCIISGATVRRSVLFNEVRVCSYSVVEDSVVLPDVVVLRHCKIKNAIIDRGCIIPEGTVIGYNHDHDRAKGFRVSEKGITLVTRDMLGLPVGYE

SEQ ID NO: 10613 - protein, 348 aa, Xylella fastidiosa 9a5c
MNASGYAAYSPTEPLRPFSFERRAPRPDDVAIEILYCGVCHTDLHFARGHKGGTFPLVPGHEIVGRVTGVGSEVTRVQVGQVVGVGCMVDSCGHCAACDGGHEQHCLQGMTPTYNGTDRHDGSTTYGGYSDRIVVPEHFVLNVPDQLDLAGVAPLLCAGITTWSPLRRWKVGPGSRVAVVGLGGLGHMALKLAKAMGAEVTLFSRSPGKEADARRLGADHVVISTDAEQMAAIKGKYDLIVDTVPYDHDLNPYVPTLSFHGTLVLVGYMGPLDDKLNTLPVVFGGRAVAGSFIGGIPETQAMLDFCGEHGIVSDVELIRMQEIEDAYERMLRSDVKYRFVIDMASLKA

SEQ ID NO: 10614 - protein, 147 aa, Triticum aestivum
PIASIEDAFDQDDWENWAHLLETSEFQLVGDDLTVTNPLRIATAIEKKACNALLLKVNQIGTVTESIQAALDSQAAGWGVMVSHRSGETEDTTIADLVVGLRTGQIKTGAPCRSERLAKLNQLLRIEEELGSSAIYAGENFRKAHEL

SEQ ID NO: 10615 - protein, 198 aa, ASPERGILLUS NIDULANS FGSC A4
MSDYGGDHEAEETYDYEPDQTYDDIEPEDFLNPEDIEGEEGAEGYEEGYGGAVNGERVVVSGDPNAGYSGKVVEQARAKKIPNDQRTTTPYMTKYERARVLGTRALQISLNAPVLVDLEGETDPLQIAMKELAQKKIPLIVRRYLPDGTEAAYGRMLQSPQARAIDHGALMPYRPFSGRLSKYGILKETYRDLTGNRA

SEQ ID NO: 10616 - protein, 305 aa, Enterococcus faecium
MKTAFLFSGQGAQYQGMGKDLYEEAVVKQTFDEASEILGYDMAELCFTENERLDQTQYTQPAILTVSIAYYRLLKEHGIIPDAALGLSLGEYSALVASNALSFTEAVALVAKRGAYMTEAAPAGSGKMVAVMNAPIETIEESCHEASKYGIVSPANYNTPQQIVIGGEEKAVDEAVLLLKEKGFKRMIPLNVSGPFHTAILEPAAKKLAKDLSQIQFSEPSFPIISNTTTEIMKKETIAGLLEQQVMQPVRFYESIHKLKTIGIEQVIEVGPGKVLSGFMKKIDKTIPVLRVENKQTFDETIAIL

SEQ ID NO: 10617 - protein, 196 aa, Methanosarcina mazei Go1
MSSGVREGLGSGVGVGIGVGVGVGVGVGVGVGVGVGVGVGVGVGVGVGVGVGSGVGVGVGSGVGVGSGPGVGVGSGSGVGVGSGSGVGVGSGSGVGVGSGVGSGSGVGSGSGVGVGSGVGSGSGVGVGSGVGSGAGVGSGSGVGAGSGSGAGSCSGAGSGSGSRVGSGSVSGAGSEEGSGAGAVSSSETARGPLSA

SEQ ID NO: 10618 - protein, 301 aa, Ustilago maydis 521
MSLAGSSSSALHLDFPASTGSGVMHSRSVTGVHVHPVALFSILDHYLRRNDGQHRVIGTLLGTRTESEIEIKNCFAVPHLEDAEEGQVQVDMEYHRSMYELCQKVRPDEVIVGWYATSPELNTYSALIQDFYSRETAPHQAVHLTMDTTIDGSKPSGLGIKSYISSPLGATPKAENCVFLPLPTNLLHSTPEHSSLSLLASQNISSPLTDLDALAVSLKQVQSQLDRVLTYVRAVISGEKEGDKAVGRFLNDTISVVPAGLDDNKLETLFNAHLQDVLMVSYLANVVRAQAEVSSRLTLLT

SEQ ID NO: 10619 - protein, 74 aa, Zea mays
  unsure (1)..(74): unsure at all Xaa locations
MDPIMGEVTQMFSRFKAVYTRIDLDACVTLLLQLKVHLTKLPSLXPPXFEHTPNAVAELKLARDIYVHACCYDR

SEQ ID NO: 10620 - protein, 401 aa, Zea mays
FILAIDFVPSLTRIVAVAGSSSGIHIYAVFVSKASGEVLKKSSGHTDVEVWILPTFDNSAWSIMAISFISLLAMSAVLATCFFVRRHRIRRDHPRIPEAREFHGMSSQLVKAMPSLIFTKVQEDNCTSSMCAICLEDYSVGEKLRVLPCRHKFHAACVDLWLTSWRTFCPVCKRDATSGVSELPATEATPLLSSAVRLPSQPSSFRSSVAASPPRPISRHPSSHSVSRAYSVSSTPHSPNPFRSHTNLPGVIHASRSTADLANMSSPHPRISHLSSSTHSLVGSHLSPPISIRYPLPHSRHESPSPHVSSPYISNSGYGSSSYYYLGGSSQHGSYLRRCGESGPSLSTMVPRSSQQQFQSEANVAAGASSAQSSRQSYLRRCGDSDASLSDMASAQSLPGC

SEQ ID NO: 10621 - protein, 241 aa, Methanosarcina acetivorans C2A
MKGVILAGGTGSRLYPLTKVTNKHLLPIYDKPMIYYPMETLINAGIKDIMIVSGRGHAGHFLELLGSGVDFGVHFTYEIQEKAGGIAQALSLAEDFVDGDSVTVILGDNIFQDNIKEDVANFNSGAKIFLKEVTDAHRFGVAELKGKKVIGIEEKPKNPKSDFAVTGLYIYDSDVFNAIKTLKPSGRGELEITDVNNYYINKGMMEYGILDGFWSDAGTFESLLRAGMLVKQNREKKTFGI

SEQ ID NO: 10622 - protein, 138 aa, Zea mays
MASLFKDPSKLSVYRDRRFPGTQEEFEAALLASLTVYVGNMSFYTTEEQAYELFSRAGEIKKIIMGLDKNTKTPCGFCFVLYYSREDAEDAVKYISGTMLDDRPIRVDFDWGFEEGRQWGRGRSGGQVRDEYRTDYDP

SEQ ID NO: 10623 - protein, 156 aa, Picea abies
ILNRIDAGLVIDFEPVMPSDVPVSAAGALQSYKLAAKAISRLQPLPGGDIQFLCDTVVQEVRELTGYDRVMAYRFHKDEHGEVVAEMRRPDLEPYLGLHYPATDIPQASRFLFMKNRVRMICDCCAPPANVIQDKRLRQPLSLCGSTLRAPHGCHA

SEQ ID NO: 10624 - protein, 220 aa, Eustoma grandiflorum
AHATFYGGGDASGTMGGACGYGNLYSQGYGTNTAALSTALFNNGLSCGSCYTIRCDSSSAGKWCLNGMITVTATNFCPPNPSLPNDDGGWCNPPRQHFDLAEPAFLQIAQYRAGIVPVEFMRVPCRKKGGIRFVINGHSYFNLVLVTNVGGAGDVHSVSIKGSRTGWQPMSRNWGQNWQNNAYLNGQALSIQVTTSDGRTVTSNTVAPADWQFGQTIFGG

SEQ ID NO: 10625 - protein, 224 aa, Picea abies
RAPHGCHAQYMANMGSIASLVMAVIINGNDGEAGGNGRNSMKLWGLVVCHHTSLRAVPFPLRYACEFLMQAFGLQLSMELQLAEQLAEKRIFRIQALLSDMLLRDGSIGIVTQSPSIMDLVKCDGAALYYGGICWMLGVTPTEAQTKDIADWLCEYHGDSTGLTTDSLTDAGYPGAAYLGDAVCGMAAARITSKDFLFWFRSQTAKELKWGGAEHHSGDKDDGR

SEQ ID NO: 10626 - protein, 224 aa, Picea abies
RAPHGCHAQYMANMGSIASLVMAVIINGNDDEGVGSGRNSMKLWGLVVCHHTSPRAVPFPLRYACEFMMQAFGLQLNMELQLAAQLTEKHILRTQTLLCDMLLRDAPIGIVTQSPSIMDLVKCDGAALYYGGMCWMLGVTPTEAQIKDIADWLLEHHGDSTGLSTDSLADAGYPGAASLGDAVCGMRSARITSKDFLFWFRSHTAKEMKWGGAKHHPDDKDDGR

SEQ ID NO: 10627 - protein, 622 aa, Oryza sativa
MSSSATVVPLAYQGNTSASVADWLNKGDNAWQLVAATVVGLQSVPGLVVLYGGVVKKKWAVNSAFMALYAFAAVWICWVTWAYNMSFGEKLLPIWGKARPALDQGLLVGRAALPATVHYRADGSVETAAVEPLYPMATVVYFQCVFAAITLILVAGSLLGRMSFLAWMIFVPLWLTFSYTVGAFSLWGGGFLFHWGVIDYCGGYVIHVSAGIAGFTAAYWVGPRAQKDRERFPPNNILFTLTGAGLLWMGWAGFNGGGPYAANSVASMAVLNTNICTAMSLIVWTCLDVIFFKKPSVVGAVQGMITGLVCITPAAGVVQGWAALVMGVLAGSIPWYTMMILHKRSKILQRVDDTLGVFHTHGVAGLLGGLLTGLFAEPTLCNLFLPVADSRGAFYGGAGGAQFGKQIAGGLFVVAWNVAVTSLICLAINLLVPLRMPDDKLEVGDDAVHGEEAYALWGDGEMYDVTKHGSDAAVAPVVLNTDLSFAAHKQQSDRGEAPLRSFANLAMKPWTATVSLLLAAAVAMAAAVAAGEGGAANYLVFVDPPPSGVVCTAYQLSILAAALGSEEKAKGAIIYNYKNVVSGFSARLTPSELEAVKKQPQVNRVLPSATLSLMSSNFDGIS

SEQ ID NO: 10628 - protein, 367 aa, Caulobacter crescentus CB15
MPDDASKPAKPAAADKFGEGFVWDAWYVAALSPDLKPGTKSKREYLGEPVLLGRTRAGQVYAIRDICPHRAAALSAGRLHREADGTDSVECPYHGWRFGPDGACTAIPSLTADSDFDIAKVRVRRYPTVESQGLVWIWMSSDPRFDGQPPEPPPVIPGVVGGKPKLVDHLDYDIHIDHAVLGLIDPAHGPYVHQQWWWRTKTSQHEKNKRFAPSEAGFTMVRHEPSKNSKAYAILGGEPLTEITFRLPGLRWEHVTVGKKQVLALSAMTPINAHKTRMNQIMWSDHWAFTALYPIIRIAARAFLRQDGRIVENQTPGLKCNPPLMWVGDADQQARWYHQCKREWNASRREGRPFVNPVKDQTLRWRT

SEQ ID NO: 10629 - protein, 414 aa, Microbulbifer degradans 2-40
MNDLLPQDSPVWQYLESTVTTLFKRYGYQEIRFPILEQTELFKRSIGEVTDIVEKEMYTFKDRNDESLTLRPEGTASCVRACEQNQLLFNRGTLTQKLWYQGPMFRYEKPQKGRLRQFHQFGVEAFGLNGPDIDAELLIMSARLWKELGISSAVELQLNSLGSSDARAKFKADLVAFLEQHKERLDEDSQRRLGSNPLRILDSKEAKTQALLDEAPSLLDYLDDESLAHFEQLKALLDAAGVAYTINPRLVRGLDYYGKTVFEWVTTQLGSQGTVCAGGRYDGLVNQLGGQPTPAVGFGMGIERLVLLLQEMNVLPEEIFQTLDVYIMAVGDVAPAAFSLAEQIRDRFPAMRVQTHCGGGSFKNQMKKADRSGADVALILGENEVAAQEVTLKYLRKDQPQTTIKQTDLLDLLA

SEQ ID NO: 10630 - protein, 385 aa, Caulobacter crescentus CB15
MVHPVFDNLPTTIFERMSGLARQYGAINLGQGFPDDQGPLPVREAAARALIEGSNQYPPMRGLPELRAAVAGHYGRTQDLTLDPDTEIVVTSGATEALAAAFTSLISPGDEVVLFQPLYDAYLPLVRRAGGVPRLVKLSPPHWRFERAMLEAAFSNRTRMVVLNSPLNPAGVVAPDEDLALLAEVCVRHDVVAVCDEVWEAVVFDGRRHRPLMSFPGMRERTVKIGSAGKLFGMTGWKVGFLCAAPPLARALAAAHQFLTFTTPPNLQAGVAWGLDNHRAWFDDMPANLQRSRDRLTAGLRDAGYVVLESQGTYFLNVDLAASGIALDDVTFCERCVTEHGVAAIPVSAFFAEDPVTTVVRLCFAKADATLDEAVRRLAAAKAAL

SEQ ID NO: 10631 - protein, 349 aa, Xylella fastidiosa 9a5c
MTVKAYGAYAADKPLESLDITRRAPGAHDVQIDIAYCGVCHSDLHQVRAEWAGTQFPCVPGHEIVGRVSAVGAHVSGFQPGDLVGIGCIVDSCKHCDDCAEGLENYCDEMVGTYNGPTPDAPGHTLGGYSQQIVVHERYVLRIRHDESQLAAVAPLLCAGITTYSPLRHWNAGPGKKVGVVGIGGLGHMGIKLAHAMGAHVVAFTTSESKRDAAMALGADEVVVSRNPGEMAAHGQSFDFILNTVAAPHDLNAFMTLLKRDGTMTPVGAPASPHPSPEVFNFILKRRSLAGSAIGGIPETQEMLDFCAEHNIVADIELIRAEEINDAYERMLKGDVKYRFVIDNASLAA

SEQ ID NO: 10632 - protein, 572 aa, Ustilago maydis 521
MNAQLLNPFTIDIPDSVSSTLSTAECSTLLFNHGSSILSGQYLAVGRSDGYITIWDIETKSVLRLLAGHVRPVTGLAWSRYNRYLASCSGDWNVVVWDLAAKSQAASGLRKAAGREGDVVNTDETDPRLPFESERKTTIRFDCAVSSVQFAPASSGWLVVVLASQEAYLVDIRDKVRLGKTRGENGKVQVKDVECSPRRILLSSAAAAQVINSEATQAQDEAEEPTPAASSTPGITAARFTPDSRFIVAGTSKGSLLIFDAVTGDVLDELKVLSTTSGVKELAFDSTGKFLVVNCNDRALRILSVHTTSSTTSHHNDRPAKRLRTSLSLTLLHKIQDMIQRTAWNNIGFSPSSDYIFAGAAHKASHNVYIWDRTSSTLSKILEGPKDWSIGVDWHPSRPMLASASNTGAIYVWFTPTEEIWSAYAPGFEELEENMEYEEREDEFDFIDGKGESERLRQEEEEAAYVRICDADTAGRDNTRQTGASVAWGKVSAILAVNNDEQEGREWITLKKLFATRLDQVSTDFSWNPKADGEAGEETWIECTLLDDDDCDRFVIPPRLELDFSVFHDDHL

SEQ ID NO: 10633 - protein, 451 aa, Ustilago maydis 521
MVGNAEASSSGDGSKPTSGSFKHIGNKMKRTELYRKYKADKRKTKLAKRSAQAKEERGEDGAAKKAARLAANKTRTIENTRDFNPTIINGPNTHEGPAYMNKTGQDGAEGGSDDGEQKSEQQAEADEQEAAEEIDDDEDPSAPPAILITTSMPSSSTSPHLESLNARSHPSERTREFVDELLSVFPGAEYRPRSKAQGVGLGKICGWARERRFGAVLVVGESRKEPFALTVISLPHGPTAFFRLSSISTGDEIYGKARPTPHTPELILNNFTTVLGHRVGKVLQCLFPKIPQLEGRQVVTCHNQRDYIFFRRHRYMFKSDSKTALQEIGPRFTLKLHSLKESLPKGAGVWDGKYTEEYAELESDELEVLQRQDGQDGQGGQDEDGQMAASAAMDEQIVALGSESTKMRPNTGADASSSTGNKKRQRGEEETVGLDFQWKPKMSVSRRNFYL

SEQ ID NO: 10634 - protein, 91 aa, Triticum aestivum
MPSSMVRRETSKVPPPRSPDGWMGLDICPHSVKTFNGALDTTQTIIWNGPMGVLEFDKFAVGTESIAKKLAELSKKGVTTIIGGGDSVAAV

SEQ ID NO: 10635 - protein, 126 aa, Glycine max
MGNYISCTLAPPLMKNTRAKRVIFPTGEVKQYKEQVINAAELMLECPTHFLTNSKSLHIGRRFSPLGADEELECGNVYIFFPMRRLNSMVTAADVAVLFMAANMATKRISSREDLISRDHSIDVIG

SEQ ID NO: 10636 - protein, 180 aa, Arabidopsis thaliana
MASSMLSSATMVASPAQATMVAPFNGLKSSAAFPATRKANNDITSITSNGGRVNCMQVWPPIGKKKFETLSYLPDLTDSELAKEVDYLIRNKWIPCVEFELEHGFVYREHGNSPGYYDGRYWTMWKLPLFGCTDSAQVLKEVEECKKEYPNAFIRIIGFDNTRQVQCISFIAYKPPSFTG

SEQ ID NO: 10637 - protein, 247 aa, SYNECHOCOCCUS SP. WH 8102
MQSPPSESSSTVAPLIPSLAETIRGAWIGLPELKPLDADSDFSSIEGQLEGDDLLIRNELLCCRGVRKIHLELARLGRGLQILHCVWFPDPRFDLPIFGADIVAGPAGVSAAIVDLSPVSGTLPSGIETALAGTPSPAFRQVRDLPGWGTIFSPHVCFIRPDGAEEEVLFRSRVEEVLTILRTAVLQTACEPATAASTIRRYEGQLSYCLQQKRNDKTRRVLEKAFDASWADRYIEELLFDDPLPPG

SEQ ID NO: 10638 - protein, 493 aa, Ralstonia metallidurans CH34
MNKTLLASAIALAFGIGGQALANPTNNNEKTGTTNTQNATATSTQSGAGASANENSTALQANGNSSSSTTNKTKNTTNTNTNSKNHTDQDMHGYGNAAAANGSTATANFTNSFNSSKALAISKLEGYVTGNYIHNIGNVATNNGTANGGAGGKGGAGYGGDGKGGSGGSGGASGAGGGGGSGGSAINGSAKAGYASNGSATAGDGAAGGKAVGWAGDGGNAKSNGGGALTASLGVGGFGGSGKGSGGAAGAGALGGFGGDGGNAKGSGGGALGASGGLGGDSAAGSALGKVHGNAGNSSATSGAGGNGTGGTASGTGGAGSGTGGAGGAGGAATAAAAGGAGTGSGGAGGANTSTAGAATGGAATSTGGAGGAQNSVAGNGGAGGAATNGSASSMASNGSATAGNGAVGASSGAGGAGGVGMGGTGGTGNGAVGGAGGNGGTNYVDAGTFNMSNMMSSVGQSAAGIMMANQNSGMSSLVQQSVNVQANLAVGK

SEQ ID NO: 10639 - protein, 369 aa, Haemophilus somnus 2336
MTQQYALDTLLAQAGNRTDERTGAVSTPIFLSTAYAHHGIGESTGFDYTRTKNPTRTVLEETIAKLEGGDRGFACSSGMAAIQLLMNLFASPDEWIVSSDVYGGTYRLLDFAHKNIHGVKPVYVNTASSEEIEKAITENTKAIFVETPSNPLMEECDVAEIAKIAKKYNLLLIVDNTFLTPVLFRPMEHGADIVIHSGTKYIAGHNDTLVGLIVAKGQEICDRLYYIQNGAGPVLSPFDSWLTIRGMKTLALRMERHQKNAQELANFLREQPQVKDVLYPNKGGMLSFRLQNENWVNPFLKAMKLITFAESLGGTESFITYPATQTHMDIPEVERVARGVCNRLLRFSVGLENVEDIKADLLQAFSQLK

SEQ ID NO: 10640 - protein, 311 aa, Candidatus Tremblaya princeps
MVSSALQFLSQHSELSMDSARFLEALRFRPTHATTNPSLILSACQNNEYNSLVNETIRLHRNEGYRNIADHIRLRFCTELLDRIPGMVSVEIDACCAFNVDASIAHARRIVQLCRPTDARDRILVKIPATWQGVQAAAALRAEGVQCNMTLVFSMLQALVCARNGAYLISPFVGRLSDRMPAMQGSSATQDQGVALALRIYSRLRQEGHATRVMAASFRGEQQVIMASACGMVTVGEHIMRRLAAMRASAMPKPCQQFSEAMQHCPTPRDLHAFERALAQNRTAWLELKHGIEAFACNETQLELLIARRLP

SEQ ID NO: 10641 - protein, 497 aa, Camellia sinensis
MASLTCSADQLAQLFGSNTTNAAAATYICDHFTAVSQKFSDAASAIDSTYLLFSAYLVFSMQLGFAMLCAGSVRAKNTLNIMLTNVLDAAAGAIFYYLFGFAFAFGSPSNGFIGSHFFALKSIPTSSFDYSFFLFQWAFAIAAAGITSGSIAERTQFAAYLIYSAFLTGFVYPVVSHWFWSGDGWASASNTNHLLFGSGVIDFAGSGVVHMVGGIAGLYGAFIEGPRIGRFANPGQSVTIKGHSASLVVLGTFLLWFGWYGFNPGSFTKIANPYTSGSYYGQWSAVGRTAVTTTLAGSTAALTTLFLNRVVSGHWNVTDVCNGLLGGFAAITAGCSVVEPWAAVICGLVAALVLIGCNKVAERVKFDDPLEAAQLHGGCGAWGVIFTALFASEKYVNEVYPGKSDRPYGLLMGGGGRLLAAHVIQIVVIVGWVSVTMGPLFFVLHKLKLLRISAEDEIAGMDMTRHGGFAYVYQYHDEDESNKLGMQMRKIDPEDKS

SEQ ID NO: 10642 - protein, 422 aa, Vibrio vulnificus YJ016
MAKTIQAIRGMNDCLPTQSPLWQKLEGAVKNVISAYGYNEMRMPIVEMTHLFSRAIGEVTDVVEKEMYTFEDRNGDSLTLRPEGTAGCVRAGIENGLLYNQEQRVWYMGPMFRHERPQKGRYRQFHQCGVEVFGLNGPDVDAELIMMTARLWRELGIDKHVRLELNSIGSLEARANYRTALIAFLEQHIDVLDEDCKRRMHTNPLRVLDTKNPDVQAILGDAPRLSDYLDPESTQHFAGLCELLDAAGIEYTVNERLVRGLDYYNRTVFEWITESLGSQGTVCGGGRYDGLVEQLGGKATPAVGFAMGLERLVLMLETLELTDVRRSVDVYVVTAGEGTMMAGMKLAEQVREAIPGVRVMNHFGGGNFKKQFKRADKVGAVVALVLGENEVADNTVVLKDLAGGEQVTYSQQEIASKIAELI

SEQ ID NO: 10643 - protein, 195 aa, Triticum aestivum
PALFLRPYARAPHRGIPAPRAPAQPRRPTLRGAQRLCFLSLLLLLLLAAAASATADAAAAEEFTEELLLRPLPDRKALAHFHFRSSAPPASAAGRHHHLFPKAISQLVQKFHISELELSFTQGRWNYEQWGGYDPMSTNNAKPPGVELWAIFDLPLAEIDATWKNLTHTLSGLFCASINFLESSTAFSAPRWGFK

SEQ ID NO: 10644 - protein, 162 aa, Chlamydomonas reinhardtii
MANPEFYGLSTTTLSGQPFPFKDLEGKAVLIVNVASKCGFTPQYKGLEELYQQYKDRGLVILGFPCNQFGGQEPGDASAIGEFCQRNFGVTFPIMEKSDVNGNDANPVFKYLKSQKKQFMMEMIKWNFEKFLVDKSGQVVARFSSMATPASLAPEIEKVLNA

SEQ ID NO: 10645 - protein, 424 aa, Methylobacter marinus
MYVIVPTGRADQTKLSSRSYEAGRLATRLFRSVVMKALCWHGKYDVRVDTVPDPIIVDPTDAIVKITATAICGSDLHLYDGYMPTMESGDILGHEPMGEVVEVGSEVTSLKTGDRVVVPFTISCGHCFFCEKTLYSCCDTSNPNADMARKAMGHSPAGIFGYSHMLGGFAGGQAEYLRVPYADVGPIKITSDLPDDKVLFLSDIFPTGYMAAENAQIEPGDTVAVWGCGPVAQFVIQSCWMLGAGRVIAIDRVPERLTMAQEHGKAEIIDFEEEDVYDRLMAMTNGRGPDCCIDAVGCEAHGAGSFDAVLDKAKAALYLGTDRPHVLREAIMCCRKGGTVSIPGVYVGLLDQLPMGAAMNKGLTLKMGQTHVQRYLEPLLEKIEEDQIDPSFVITHSLGLDEGPQAYKTFRDKEDGCIKVVLKP

SEQ ID NO: 10646 - protein, 463 aa, Chlamydomonas reinhardtii
MTQSRVEQNLQRVNELKAEATTLERMRKASDLDIKERERIAISTVAAKGPASSSSSAAAVSAPATSATLTVERPAATTVTQEVPSTSYGTPVDRAPRRSKAAIRRSRGLESSMEIEEGLRNFWYPAEFSARLPKDTLVPFELFGEPWVMFRDEKGQPSYIRDECAHRGCPLSLGKVVEGQVMCPYHGWEFNGDGACTKMPSTPFCRNVGVAALPCAEKDGFIWVWPGDGLPAETLPDFAQPPEGFLIHAEIMVDVPVEHGLLIENLLDLAHAPFTHTSTFARGWPVPDFVKFHANKALSGFWDPYPIDMAFQPPCMTLSTIGLAQPGKIMRGVTASQCKNHLHQLHVCMPSKKGHTRLLYRMSLDFLPWMRHVPFIDRIWKQVAAQVLGEDLVLVLGQQDRMLRGGSNWSNPAPYDKLAVRYRRWRNGVNAEVARVRAGEPPSNPVAMSAGEMFSVDEDDMDN

SEQ ID NO: 10647 - protein, 359 aa, Bdellovibrio bacteriovorus HD100
MTEAFSGFKFFGIAKSTIFERNQLMKAPVRVAVTGAAGQIGYALLFRIASGAMLGADQPVILQLLEIPDEKAQKALKGVMMELEDCAFPLLHSMIATGDPAVAFKDADVALLVGARPRGPGMERKDLLTANGQIFTVQGEAIGKYANPNVKVLVVGNPANTNAYIAMKSAMKHGRVKAKNFTAMLRLDHNRALSQLATKTGKPVASFKKVAVWGNHSPTMYPDVRFATADGAKVPELLKLGTAEGDAWNKDTFIPTVGKRGAAIIEARGLSSAASAASAAVDHIRDWWLGTNGEWVTMGIPSDGSYDIPEGIMYGFPVTCKNGEYEIVKGLEIDAFSREKMNNTLKELNEEKDAVASML

SEQ ID NO: 10648 - protein, 826 aa, Shewanella oneidensis MR-1
MSISRREFLKANAAVAAATAVGVTLPVKMVEAAESDNIKWDKAPCRFCGVGCSVLVGTKAGKVVATKGDPESPVNRGLNCIKGYFLSKIMYGKDRLTTPLLRMKDGKYHKEGEFTPVSWDVAFDTMAAKWKHSIATKGPTSVGMFGSGQWTIWEGYAASKLHKAGFLTNNIDPNARHCMASAVVGFMRTFGIDEPMGCYDDLEAADHFVLWGANMAEMHPILWARLSDRRLSSKDCRVHVLSTFENRSFDLADNPMVFHPQSDLVILNYIANYIIQNKAVNTDFVTKHTKFALGVDDIGYGLRPDHPLEKKAKNPGNGKSTPISFDEYAKFVSTYTLEYAAKMSGVEPEKLETLAKAYADPKAKVMSLWTMGINQHVRGVWANNMLYNIHLLTGKIATPGNSPFSLTGQPSACGTAREVGTFAHRLPADMVVDNDKHRAITEKMWQVPEGTIPPKPGYHAVLQSRMLKDGKLNCYWTMCTNNMQAGPNINEEMYPGFRNPENFIVVSDPYPTVTAMAADLILPTAMWVEKEGAYGNAERRTHMWHQQVKAPEGAKSDLWQLVEFSKRFKVAEVWPAELIAKKPEYADKTLYEVLFANGVINKFPTTDCKGDLNDESEHFSFYVQKGIFEEYAAFGRGHGHDLAEFDRYHETRGLRWPVVNDKETLRRFVEGSDPYVKAGEGYNFYGKPDGKAVIFALPYEPAAEEPNSEYDLWMSTGRVLEHWHTGSMTARVPELYRAYPDAQIFMHPEDAKARGLQRGDEVLVASPRGEIKTRVETKGRNKPPRGVVFMPFFDARQLVNKLILDATDPLSKETDFKKCPVKVMKA

SEQ ID NO: 10649 - protein, 328 aa, Triticum aestivum
RHWFYCINNKERSCLETGEVLIRVAASGICGTDLHICKGETPQATKNVVVGHEFCGYVEEIHPETMAVVKVGDLVAIDPNMPCNQCTFCRNKKYHLCLNLFCIGVTVDGGMSQYVAVPARAAITVPAHVPPEVACLSEPLSCVVHAVDKGHVKSGDSVLVIGAGPIGLMTTALVNASGGKVTVIEPNEFRRKEALEIFGAAAAYGPGELGPVNGALGEGYDVVFECVGRPNTADDAVKFAKAGGTVVWVGVAKVEDRVSISPYDVYRRELTITSTFTNPYGIDRAVKILAEGRVNWRALVSHSFKLSEFDKAWEVFTAGTGLKVVVKP

SEQ ID NO: 10650 - protein, 1128 aa, Oryza sativa (japonica cultivar-group)
MSSSRPTQCSSSSSRTRQSSRARILAQTTLDAELNAEYEEYGDSFDYSKLVEAQRTTGPEQQARSEKVIAYLHHIQRAKLIQPFGCLLALDEKTFNVIALSENAPEMLTTVSHAVPSVDDPPKLRIGTNVWSLFTDPGATALQKALGFADVSLLNPILVQCKTSGKPFYAIVHRATGCLVVDFEPVKPTEFPATAAGALQSYKLAAKAISKIQSLPGGSMEVLCNTVVKELFDLTGYDRVMAYKFHEDDHGEVFAEITKPGLEPYLGLHYPATDIPQAARFLFMKNKVRMICDCRARSIKIIEDESLHLDISLCGSTLRAPHSCHLQYMENMNSIASLVMAVVVNENEDDDEVGADQPAQQQKRKKLWGLLVCHHESPRYVPFPLRYACEFLAQVFAVHVNKEFELERQVREKSILRMQTMLSDMLLRESSPLSIVSGTPNIMDLVKCDGAALLYGGKVWRLQNAPTESQIRDIAFWLSDVHRDSTGLSTDSLHDAGYPGAAALGDMICGMAVAKINSKDILFWFRSHTAAEIRWGGAKHDPSDKDDSRRMHPRLSFKAFLEVVKMKSLPWNDYEMDAIHSLQLILRGTLNDDIKPTRAASLDNQVGDLKLDGLAELQAVTSEMVRLMETATVPILAVDSNGLVNGWNQKVAELTGLRVDEAIGRHILTVVEESSVPVVQRMLYLALQGKEEKEVKFEVKTHGSKRDDGPVILVVNACASRDLHDHVVGVCFVAQDMTVHKLVMDKFTRVEGDYKAIIHNPSPLIPPIFGADEFGWCSEWNAAMTKLTGWHRDEVINKMLLGEVFDSTNASCLVKNKDAFVSLCILINSALAGDETEKAPFSFFDRNGKYIECLLSVNRKVNADGVITGVFCFIQVPSHELQHALHVQQASQQNALTKLKAYSYMRHAINNPLSGMLYSRKALKNTGLNEEQMKEVNVADSCHRQLNKILSDLDQDSVMNKSSCLDLEMVEFVLQDVFVAAVSQVLITCQGKGIRVSCNLPERYMKQTVYGDGVRLQQILSDFLFVSVKFSPVGGSVEISCSLTKNSIGENLHLIDLELRIKHQGKGVPADLLSQMYEDDNKEQSDEGMSLAVSRNLLRLMNGDVRHMREAGMSTFILSVELASAPAK

SEQ ID NO: 10651 - protein, 585 aa, SYNECHOCOCCUS SP. WH 8102
MGDGAAAAQQETATSLPKAEQRKLDSDYLREPLLSELANDLPNFSEDALQILKFHGSYQQDDRDKREKGKDKTWQMMLRLRSPGGRIPAQLFLALDELSDRLGDGTLRATTRQAFQMHGIPKADLKEVIGTIVRNLGSTLAACGDINRNVMAPAAPFEKGGYPAARRLADEIADLLSPEAAEGSYLDLWVDGDLSYRFSPPAAVRRARKRQLEPGVFSGSEAEPLYGDTYLPRKFKVAVTVPGDNSVDLLTQDIGLVAFTDPSGDLRGCNVYVGGGMGRTHNKEETFARIADPLGYVDAADVFDLLQAIVALQRDHGDRRIRRHARMKYLLEDRGIAWFRNELKANYFSRPLKGFRNEAKPKLLDYLGWHRQKAGLWFVGLPLLCGRLKGTMKQGLRAIVDTYQLEIRLTANQDLLLCNIGTAQRATIKAELAALGFDLPDAPPPLARHAIACPALPTCGLAITESERILPSVLERLDAQLRRLEIDKSVLIRMTGCPNGCARPYMAELALVGSGVNQYQLWLGGSANLQRLAQPFLQRMPLDELEQTIEPLLISWKQAGGRRSLGDHVEKLGDQAVSELLGAAA

SEQ ID NO: 10652 - protein, 422 aa, Deinococcus radiodurans [sequence omitted]

SEQ ID NO: 10653 - protein, 447 aa, Synechocystis sp. PCC 6803
MGAIQAIRGTRDILPPETNYWQWVEAIAKSILDRALYQEIRTPIFEQTSLFERGIGEATDVVGKEMYSFTDRGDRPITLRPEGTAGVVRAYIEQNLQAAGGVQRLWYTGPMFRYERPQAGRQRQFHQLGVEVLGSADPRADVEVIALGTDILKALGLSNLSLALNSVGNGGDRQRYREALIAYLTPFKAELDPDSQDRLERNPLRILDSKAKRTQEIVQDAPSILDHLGVDSQRHFDQVQQLLTNLGIAYQLTPTLVRGLDYYTHTAFEIQSSDLGAQATVCGGGRYDGLVAELGGPVTPAVGWAMGLERLIILLQQMATPPAPSPDLYLISKGEKAEPQALILAQKLRNQGLAVALDLSASAFGKQFKRADKSGAIACLVLGDGEIATGTVQLKWLADKAQETLQLQDLMGNITELKQRLAGHREKYPHLTSNFSVTCHDPMDNLV

SEQ ID NO: 10654 - protein, 271 aa, Enterococcus faecalis V583
MKISFIGAGNMASAIAKGALKKQFIAAENLYFYDIQVEKTAAFAQEIGAHAVASPQEAITVADLVILAVKPQFVQAALLEAKEAILDKQPLIVSIAAGTTIAELYQLFETTQPLRLVRVMPNMNALIGAGAAAVCGNAFASPEDIQTVLSLFRAVGQAWELEEQYFSIFTAIAGSTPAYAFLFIDSIARAAVKNGMNKELALEIATQAVLGSAQTLANSTENPWTLIDQVSSPGGTTVAGIVELENNAFISTVIKGIEATILRDQELAKQD

SEQ ID NO: 10655 - protein, 486 aa, Oryza sativa
MAVSSSSLLLRRGATGGAGRRWGPGEALRRLVSSSEAAPAEKVPARSPPVMPPFEHRPRPYAGWSGDEILAKRKQFLGSSVFYYYQKPLNIVEGKMQYLYDENGKRYLDCFGGIVTVSCGHCHPDIVNAVVEQTKLLQHTTTIYLNQPIVEFAEALASKMPGNLKVVYFVNSGTEANELAMLMARLYSGNLNMIALRNAYHGGSAGTIGLTGLQTWKYPIPQGEIHHVMNPDPYRGTFGSDAVAYAKEVEEQINYGTSGRVAGFIAETFQGVGGAVELAPGYLKLAYDTVRKAGGVCIADEVQSGFGRTGSHYWGFQTQDVIPDIVTMAKGIGNGLPLGAVVTTPEIANVLAQKIQFNTFGGNPVCSVGGLAVLKVLDKEKRQAHCADVGSHLVNRLKELQQKHEIIGDVRGRGLMLGVELVTDRKEKTPAKAETNLLFEKLKDLNILVGKGGLHGNVFRIKPPMCFTRDDADYLVDAMDYAMSGL

SEQ ID NO: 10656 - protein, 196 aa, Cichorium intybus x Cichorium endivia
GHNNLNAKFVLLGDMGAGKSSLVLRFVKGQFLEFQVSTIGAAFFSQTLAVNDATVKFEIWDTAGQERYHSLAPMYYRGAAAAIIVYDITSADSFTRAKKWVQELQKQGNPNMVMALAGNKADLEDKRKVTAEEARVYAEENGLFFMETSAKTAANVNDVFHEIAKRLPRAQPTQNPAGMVLVDRPAEGARAASCCS

SEQ ID NO: 10657 - protein, 490 aa, Clostridium saccharobutylicum
MGKPTGFLEYDREVGRNREPKERLKDYKEFHQRLPLEKQCIQGARCMDCGVPFCQAGVLFSGMVSGCPLHNLIPEWNDLVYRGKWELAYERLNKTNPFPEFTGRVCPAPCEAGCTAGLNGPAITIKENERSIIDNAFENGFVKANTPLKRTGKKVAVIGSGPSGLAVANTLNKCGHKVTVFERSDRPGGLLMYGIPNMKLDKEVILRRVHLMAEEGIKFVNNANVGDNYDAKEILDEFDAVVLATGASQPRDLQAEGRDNVNGIHFAVDFLKANTKSLLDSDHEDNNYISAKDKNVIIIGGGDTGTDCVATSLRHGCKSVVQFEIMGEPAHERTESNPMPEWPKVLKVDYGQEEFIELYGKDPREYLTTVTAVHSDKDGNLESVDTVKVEWKKGDNGRMFPAHVEGSEKNWPAELILLAMGFTGSEDYLKNAFGIESDERSNVKAGNVDFMTNVPKVFATGDARRGQSLVVTAISEGIAAGIAVDKFLRA

SEQ ID NO: 10658 - protein, 241 aa, Petunia x hybrida
MGRGRVELKRIENKINRQVTFAKRRNGLLKKAYELSVLCDAEVALIIFSNRGKLYEFCSSSSMLKTLERYQKCNYGAPETNISTREALEISSQQEYLKLKARYEALQRSQRNLLGEDLGPLNSKELESLERQLDMSLKQIRSTRTQLMLDQLQDLQRKEHALNEANRTLKQRLMEGSTLNLQWQQNAQDVGYGRQATQTQGDGFFHPLECEPTLQIGYQNDPITVGGAGPSVNNYMAGWLP

SEQ ID NO: 10659 - protein, 297 aa, Cytophaga hutchinsonii
MNKVYIILGFCFLSISVFAQKKQKTPSKASLFHEKDVAYTPSGLAYKYRLDVPGKTGAVGDVVKLHFVLRNSKDSILRSTIEEDRMVITTIQKPRYAASFEEGLGMLSKGDSCAFWISADSLFKKGIGAEMPPFIEKGSFLRFEVKMYDVLTMAEYVEEQEIMAKKVKADEDAALASYIKTNNIPAVLDTATGVYYQVVQAGTGAKPKKGNKVIVHYTGHLLNGEIFDSSLDRGDPFDFIIGQGRVIEGWDEGIPLMRKGEKGILYIPSYRGYGEQRAGSIPPNSTLIFEVELLDIK

SEQ ID NO: 10660 - protein, 204 aa, Triticum aestivum
  unsure (1)..(204): unsure at all Xaa locations
MPGGGEMPETKQTPKNKACLICIDGWGISPEEDHKGDAIYNAETPVMDKLEKEHPFTSIAAHGLAVGLPDGLMGNSEVGHLNIGAGRVVYQDIVRIDLTMKKKEFGQVENIKNAFERAKSTNGRLHFMGLVSDGGVHGHINHLVSLLEAARDAGVPKSFIHFFGDGRDTAPKSAAGYMKQLLESLDNLQYGKIADVXGRYYAMD

SEQ ID NO: 10661 - protein, 532 aa, Oryza sativa
MATCAADLAPLLGPVAANATDYLCNRFADTTSAVDATYLLFSAYLVFAMQLGFAMLCAGSVRAKNTMNIMLTNVLDAAAGALFYYLFGFAFAFGTPSNGFIGKQFFGLKHMPQTGFDYDFFLFQWAFAIAAAGITSGSIAERTQFVAYLIYSAFLTGFVYPVVSHWIWSADGWASASRTSGPLLFGSGVIDFAGSGVVHMVGGVAGLWGALIEGPRIGRFDHAGRSVALKGHSASLVVLGTFLLWFGWYGFNPGSFTTILKTYGPAGGINGQWSGVGRTAVTTTLAGSVAALTTLFGKRLQTGHWNVVDVCNGLLGGFAAITAGCSVVDPWAAIICGFVSAWVLIGLNALAARLKFDDPLEAAQLHGGCGAWGILFTALFARQKYVEEIYGAGRPYGLFMGGGGKLLAAHVIQILVIFGWVSCTMGPLFYGLKKLGLLRISAEDETSGMDLTRHGGFAYVYHDEDEHDKSGVGGFMLRSAQTRVEPAAAGCLQQQQPSVTNPERTTSQRRKKSRVSLPLRSRSSRHKFDPHI

SEQ ID NO: 10662 - protein, 545 aa, Candida albicans
MSSKIERIFSGPALKINTYLDKLPKIYNVFFIASISTIAGMMFGFDISSMSAFIGAEHYMRYFNSPGSDIQGFITSSMALGSFFGSIASSFVSEPFGRRLSLLTCAFFWMVGAAIQSSVQNRAQLIIGRIISGIGVGFGSAVAPVYGAELAPRKIRGLIGGMFQFFVTLGIMIMFYLSFGLGHINGVASFRIAWGLQIVPGLCLFLGCFFIPESPRWLAKQGQWEAAEEIVAKIQAHGDRENPDVLIEISEIKDQLLLEESSKQIGYATLFTKKYIQRTFTAIFAQIWQQLTGMNVMMYYIVYIFQMAGYSGNSNLVASSIQYVINTCVTVPALYFIDKVGRRPLLIGGATMMMAFQFGLAGILGQYSIPWPDSGNDSVNIRIPEDNKSASKGAIACCYLFVASFAFTWGVGIWVYCAEIWGDNRVAQRGNAISTSANWILNFAIAMYTPTGFKNISWKTYIIYGVFCFAMATHVYFGFPETKGKRLEEIGQMWEERVPAWRSRSWQPTVPIASDAELARKMEVEHEEDKLMNEDSNSESRENQA

SEQ ID NO: 10663 - protein, 154 aa, Synechocystis sp. WH 8501
MPLPTSLVTLEGTALPLSELENKVILFVNVASKCGLTPQYSGLVQLDKKYGERGFKVVAVPCNQFGEQEPGTPAEIKEFTSTKYDVEFTLLEKQDVNGSNRSPLYQFLVKDGEDIAWNFGKFLVGRDGEVVARFEPATAPDDAQLEAAIDKALG

SEQ ID NO: 10664 - protein, 127 aa, SYNECHOCOCCUS SP. WH 8102
MHALDTMRALASKSEVLTLNSGDVLFNSGDSGLTMYGILEGSVRLSWKDSLGNQGHEDIPSGHVFGAGALVMGDHQRLGTATAIEDCRLIEMTREKFLFAVQEAPMFAIELLASIDERLRDIKMGVN

SEQ ID NO: 10665 - protein, 390 aa, SYNECHOCOCCUS SP. WH 8102
MATLLDQLSAMTVVVADTGDLEAIRKFTPRDATTNPSLILAAAQIPAYQSLIDEALRSSRKLIGDAAPVEDVVHEALDEISVIFGKEILKIVPRRVSTEVDARLSYDTDATIEKGRKLIRLYNDAGISNDRVLIKIASTWEGIKAAEVLEKEGIHCNLTLLFGFGQAVACAEAGVTLVSPFVGRILDWYKADTGRDSYPGPEDPGVISVTRIFNYYKTYGYKTEVMGASFRNLDEITELAGCDLLTISPKLLDQLRESDASLSQKLDATNPSGGEEQIHVDRERFDAMMAADRMATDKLGEGIKGFSKAIETLEHQLAHRLAELEGGEAFRHAVQEIFMLNDMNGDGCITRDEWLGSDAVFDALDLDHDGRLTPEEVRKGFGAALTLTTA

SEQ ID NO: 10666 - protein, 484 aa, Triticum aestivum
  unsure (1)..(484): unsure at all Xaa locations
MMGRKALDYEELNENVKKVQYAVRGELYLRASELQKEGKRIIFTNVGNPHALGQKPLTFPRQVVALCQAPFLLDDPNVGLIFPADAIARAKHYLSLAPGGLGAYSDSRGIPGVRQEVAEFIQRRDGYPSDPELIYLTDGASKGVMQMLNAIIRNERDGILVPVPQYPLYSAAISLFGGSLVPYYLEEEANWGLDLVSTRQSVAEARSKGITLTKSLXRAMVIINPGNPTGQCLSEANIRELLNFCYQENLVLLADEVYQQNVYQDERPFISARKVMFDMGPPVSREVQLISFHTVSKGYWGECGQRGGYFEMTNIPPKTVDEIYKVASIALSPNVPGQIFMGLMVNPPKPGDISYLKYSAESKSILESLRRRAQIMTDGFNSCRNVVCNFTEGAMYSFPQIRLPQRAMDVAKSAGKAPDVYYCLKLLEATGISTVPGSGFGQKEGVFHLRTTILPAEEDMPAIMSSFKKFNDSFMEQYQDHSRL

SEQ ID NO: 10667 - protein, 152 aa, Glycine max
MQHRKLTSGRPSGTDGSDYSYRMVVDSRYQLVAKGKKYLSLHFITEAVLLLIGATLAYLPGIEADAPNTVAYSSVIVSVVSLIIGNIGRRRSRSGLLRFYAVVSSIVMLLLIASLATQHLLLKAIQDSKLWRKGSMMSMIYRIFKLVCCYTW

SEQ ID NO: 10668 - protein, 423 aa, GIBBERELLA ZEAE PH-1
MSCFSSLPPQPTDEIFDLLGAYRKDSNPDRVNLGVGVYCTDEGKSWPLDVVTRVEKDLFEEASLTRHDYLPIEGDQQFLKLARDLVFAHQDELSVASVQTVSGTGANHIGARFVADYLRPQNIWVSDPTWANHHMIWESVGLKPKLYPYYKKSDCSLDFEGMIKTLEEEAQPRDAVLLHACAHNPTGLDPTKEQWKIIAEVCQRKQLFPFFDAAYQGFASGSPAEDAWAIRYFYQQQPRPDMIVAQSFSKNFGLYGHRTGAIHLVLAEPSKEIRDNAYSTLSYLLRSEISMAPKYGSTIVKTVLDSEELTAAWMADLQVMSSRIKSMRQALYDELVRLETPGTWNHIIDQIGMFSYTGLTPFEVKVLRERFHIYLLKSGRISISGLNKRNVNYVAKAIHDVRVNGHELNGTNGTNGTNGVNGH

SEQ ID NO: 10669 - protein, 629 aa, Poa pratensis
MARLRPFAGGAGSVAAVVVVFTGWLLAAGGVSAGDPPLSPKGLNYEVAALMAVKSRMRDEKGVMAGRDINSVDPCTWSMVTCSADQFVVSLQVANNGLSGALSPSIGNLSYLQTMLLQNNRISGDIPPEVGKLAKLKALDLSGNQFVGEIPNSLGQLTQLNYLRLDRNNLSGQIPVNVASLPGLTFLDISFNNLSGPVPKIYAHDYSLVGNKFLCNSSILHGCTDVKGGTHDTTSRPSAKAKNHHQLALAISLSVTCAIIFVLLFVCWLSYCRWRLPFASADQDLEMELGHLKHFSFHELQSATDNFNSKNILGQGGFGVVYRGCLRNGTLVAVKRLKDPDVTGEVQFQTEVELIGLAVHRNLLRLYGFCMTSKERLLVYPYMPNGSVADRLREYRHGKPSLDWSKRMRIAIGAARGLLYLHEQCNPKIIHRDVKAANILLDESFEAVVGDFGLAKLLDRQDSHVTTAVRGTIGHIAPEYLSTGQSSEKTDVYGFGILLLELITGPKTLSNGHGQSQKGMILDWVRELKEEKKLDKLVDRDLKDLFDIAELECSVDVIIQCTLTNPILRPKMSEVLQALESNVTLAENGIDLNREALPYGGSCSFSVRHEDPHDSSSFIIEPIELSGPR

SEQ ID NO: 10670 - protein, 629 aa, Poa pratensis
MARLRPFAGGAGSVAAAVVVFTGWLLATGGVSAGDPPLSPKGLNYEVAALMAVKSRMRDEKGVMAGWDINSVDPCTWSMVTCSADQFVVSLQMANNGLAGALSPSIGNLSYLQTMLLQNNRISGDIPPEVGKLAKLKALDLSGNQFLGEIPNSLGQLTQLNYLRLDRNNLSGQIPINVASLPGLTFLDISFNNLSGPVPKIHAHDYSLVGNKFLCNSSVLHGCTDVKGGTHDTTSRPLAKAKNHHQLALAISLSVTCAIIFVLFFVFWLSYCRWRLPFASADQDLEMELGHLKHFSFHELQNATDNFNSKNILGQGGFGVVYRGCLRNGTLVAVKRLKDPDVTGEVQFQTEVELIGLAVHRNLLPLYGFCMTSKERLLVYPYMPNGSVADRLREYHHGKPSLDWSKRMRIAIGAARGLLYLHEQCNPKIIHRDVKAANILLDEGFEAVVGDFGLAKLLDRQDSHVTTAVRGTIGHIAPEYLSTGQSSEKTDVYGFGILLLELITGPKTLSNGHGQSQKGMILDWVRELKEEKKLDKLVDRDLKDLFDIAELECSVDVIIQCTLTSPILRPKMSEVLQALESNVMLAENGVDLNREALPYGGSCSFSVRHEDPHDSSSFIIEPIELSGPR

SEQ ID NO: 10671 - protein, 196 aa, Cichorium intybus x Cichorium endivia
GHNNLNAKFVLLGDMGAGKSSLVLRFVKGQFLEFQESTIGAAFFSQTLAVNDATVKFEIWDTAGQERYHSLAPMYYRGAAAAIIVYDITSADSFTRAKKWVQELQKQGNPNMVMALAGNKADLEDKREVTAEEARVYAEENGLFFMETSAKTAANVNDVFHEIAKRLPRAQPTQNPAGMVLVDRPAEGARAASCCS

SEQ ID NO: 10672 - protein, 189 aa, Deinococcus radiodurans R1
MSLSELAGKPAPQSLLTNIPRLVAQYYETRPDPGSAAQQVAFGTSGHRGTSLNGTFNEAHIQAIAQAVAEYRAGAGIDGPLFMGLDTHALSEPAWSTALRVLVANGVKVHVQPGFFTPTPLVSHAILEHNRAGQGGPLDGGTADGIVITPSHNPPQDGGFKYNPPSGGPADTDVTGQVQARANDLCAAA

SEQ ID NO: 10673 - protein, 200 aa, Cichorium intybus x Cichorium endivia
MATIGHNNLNAKFVLLGDMGAGKSSLVLRFVKGQFLEFQESTIGAAFFSQTLAVNDATVKFEIWDTAGQERYHSLAPMYYRGAAAAIIVYDITSADSFTRAKKWVQELQKQGNPNMVMALAGNKADLEDKRKVTAEEARVYAEENGLFFMETSAKTAANVNDVFHEIAKRLPRAQPTQNPAGMVLVDRPAEGARAASCCS

SEQ ID NO: 10674 - protein, 200 aa, Cichorium intybus x Cichorium endivia
MATIGHNNLNAKLVLLGDMGAGKSSLVLRFVKGQFLEFQESTIGAAFFSQTLAVNDATVKFEIWDTAGQERYHSLAPMYYRGAAAAIIVYDITSADSFTRAKKWVQELQKQGNPNMVMALAGNKADLEDKRKVTAEEARVYAEENGLFFMETSAKTAANVNDVFHEIAKRLPRAQPTQNPAGMVLVDRPAEGARAASCCS

SEQ ID NO: 10675 - protein, 504 aa, Vibrio parahaemolyticus
MQMSKSFLLITVGLASTSLQAQTLTRDNGAPVGDNQNSITAGENGSVLLQDVHLIQKLQRFARERIPERVVHARGTGAHGEFVASGDFSDLTVSAPFTEKGKVTPVFVRFSTVIHSKGSPETLRDPRGFATKFYTEQGNWDLVGNNLPVFFIRDSIKFPDMVHSLKPSPVTNVQDPNRFFDFFSHEPSATHMLTWVYSNLGTPASYRTMDGFGVHAYKWINQQGDVNYVKFQWKSQQGIKSLRPNKVTEMQGKDFNHLTNDLYAAIGRGNYPKWDLYVKVLSPEALSKLDYNGLDATKVWLNVPDRKVGTMTLNRLPENFFLETEQSAFAPSNLIPGIEPSEDRLLQGRLFAYADTQLYRLGANLFQLPVNRPLTSVNNHNQNGLSNNAQLSNGDVNYEPSRKLNLAEDNQFKAVETKLVGTVQQKAISKPRDFYQAGVLYRSMNEQDRSDLIANLAGDLNKVIDKDIKATMVSYFYRADKEYGSRLAEATDTNLSQVKNKAMM

SEQ ID NO: 10676 - protein, 360 aa, Amycolatopsis methanolica
PQTVRGVIARSKGAPVELTDIVIPDPGPSEVTALIATCAVCHTDLTYREGGINDEFPFLLGHEAAGTVESVGEGVDSVQPGDYVVLNWRAVCGQCRACKRGRPQYCFSTFNATQKMTLTDGTELTPALGIGAFADKTLVHAGQCTKVDPAADPAVAGLLGCGVMAGLGAAVNTGAVSRGDSVAVIGCGAVGDAVIAGARLAGANKIIAVDRDAKKLEWATELGATHTVNATETDVVEAVQALTGGFGADVVIDAVGRPETWKQAFYARDLAGTVVLVGVPTPDMRLEMPLLDFFSRGGALKSSWYGDCLPERDFPVLIDLHLQGRLPLDKFVTERISLDDVEKAFHTMHAGEVLRSVVVW

SEQ ID NO: 10677 - protein, 497 aa, Oryza sativa
MATCLDSLGPLLGGAANSTDAANYICNRFTDTSSAVDATYLLFSAYLVFAMQLGFAMLCAGSVRAKNSMNIMLTNVFDAAAGALFYYLFGFASRRTPSKGFIGKQFFGLKHMPQTGYDYDFFLFQWAFAIAAAGITSGSIAERTRFSAYLIYSAFLTGFVYPVVSHWFWSTDGWASAGRLTGPLLFKSGVIDFAGSGVVHLVGGIAGLWGAFIEGPRIGRFDAAGRTVAMKGHSASLVVLGTFLLWFGWFGFNPGSFTTISKIYGESGTIDGQWSAVGRTAVTTSLAGSVAALNHAVRQEMADGALERDRRLQRSPRRVRAITAGCSVVDPWASVICGFVSAWVLIGCNKLALMLKFDDPLEATQLHGGCGAWGIIFTALFARKEYVELIYGVPGRPYGLFMGGGGRLLAAHIVQILVIVGWVSATMGTLFYVLHRFGLLRVSTSTEMEGMDPSCHGGFGYVDEDEGQRRVRAKSAAETARVEPRKSPEQAAAGQLV

SEQ ID NO: 10678 - protein, 495 aa, Oryza sativa
MATCADTLGPLLGTAAANATDYLCNQFADTTSAVDSTYLLFSAYLVFAMQLGFAMLCAGSVRAKNTMNIMLTNVLDAAAGALFYYLFGFAFAFGAPSNGFIGKHFFGLKQVPQVGFDYSFFLFQWAFAIAAAGITSGSIAERTQFVAYLIYSAFLTGFVYPVVSHWIWSADGWASASRTSGSLLFGSGVIDFAGSGVVHMVAACRTLGRPHRGPPHWRFDHAGRSVALRGHSASLVVLGSFLLWFGWYGFNPGSFLTILKSYGPPGSIHGQWSAVGRTAVTTTLAGSTAALTTLFGKRLQTGHWNVIDVCNGLLGGFAAITAGCSVVDPWAAIICGFVSAWVLIGLNALAARLKFDDPLEAAQLHGGCGAWGVIFTALFARKEYVDQIFGQPGRPYGLFMGGGGRLLGAHIVVILVIAAWVSFTMAPLFLVLNKLGLLRISAEDEMAGMDQTRHGGFAYAYHDDDASGKPDRSFGGFMLKSAHGTQVAAEMGGHV

SEQ ID NO: 10679 - protein, 270 aa, Bdellovibrio bacteriovorus HD100
MDAAKPLLIGLSPRLLYKTPDGFEIKSKSIQYLEQNLAHLIAKHGGLVFMVPSLESSGLLEKDDLNVHQYAEILDGLVLQGGVDICPTLYGEEPIDVMVNHKTDPIRDRYELKLLKAFATRNKPVLGICRGFQLMNVFKGGTLFQDLPTQLPSNLAHFKSELYEKLTHRVEITPGGMLQKMYTEGGEIVSIHHQGVKKLGSGLRVEATSEDGLVEAFSSTQDGFFVGVQWHPEFHIDEEERFLSSEPLVKKFLEACKGPRVQPSEKILGL

SEQ ID NO: 10680 - protein, 594 aa, Neisseria meningitidis
MALVELKVPDIGGHENVDIIAVEVNVGDTIAVDDTLITLETDKATMDVPAEVAGVVKEVKVKVGDKISEGGLIVVVEAEGTAAAPKAEAAAAPAQEAPKAAAPAPQAAQFGGSADAEYDVVVLGGGPGGYSAAFAAADEGLKVAIVERYKTLGGVCLNVGCIPSKALLHNAAVIDEVRHLAANGIKYPEPELDIDMLRAYKDGVVSRLTGGLAGMAKSRKVDVIQGDGQFLDPHHLEVSLTAGDAYEQAAPTGEKKIVAFKNCIIAAGSRVTKLPFIPEDPRIIDSSGALALKEVPGKLLIIGGGIIGLEMGTVYSTLGSRLDVVEMMDGLMQGADRDLVKVWQKQNEYRFDNIMVNTKTVAVEPKEDGVYVTFEGANAPKEPQRYDAVLVAAGRAPNGKLISAEKAGVAVTDRGFIEVDKQMRTNVPHIYAIGDIVGQPMLAHKAVHEGHVAAENCAGHKAYFDARVIPGVAYTSPEVAWVGETELSAKASGRKITKANFPWAASGRAIANGCDKPFTKLIFDAETGRIIGGGIVGPNGGDMIGEVCLAIEMGCDAADIGKTIHPHPTLGESIGMAAEVALGTCTDLPPQKKK

SEQ ID NO: 10681 - protein, 516 aa, Zea mays
MQFALALDTNSGPHQIRSCEGDGIDRLEKLSIGGRKQEKALRNRCFGGRVAATTQCILTSDACPETLHSQTQSSRKNYADANRVSAIILGGGTGSQLFPLTSTRATPAVPVGGCYRLIDIPMSNCFNSGINKIFVMSQFNSTSLNRHIHRTYLEGGINFADGSVQVLAATQMPEEPAGWFQGTADSIRKFIWVLEDYYSHKSIDNIVILSGDQLYRMNYMELVQKHVEDDADITISCAPVDESRASKNGLVKIDHTGRVLQFFEKPKGADLNSMRVETNFLSYAIDDAQKYPYLASMGIYVFKKDALLDLLKSKYIQLHDFGSEILPRAVLDHSVQACIFTGYWEDVGTIKSFFDANLALTEQPSKFDFYDPKTPFFTAPRCLPPTQLDKCKMKDAFISDGCLLRECNIEHSVIGVCSRVSSGCELKDSVMMGADTYETEEEASKLLLAGKVPVGIGRNTKIRNCIIDMNARIGKNVVITNSKGIQEADHPEEGYYIRSGIVVILKNATINDGSVI

SEQ ID NO: 10682 - protein, 464 aa, GIBBERELLA ZEAE PH-1
MNLLLSDDYLLQDYPENITNTIRSGHATTLRFNRQGDYLASGRVDGTVVVWDLDTMGVAIKLRGHNKSITFLSWSRCGQYLLTTCQGWKAILWDLQDGKRLREVRFRAPVYMAELHPWNHLQFVAALFEEQPVLVDITDPVDVKHILPSAPKRPNTDDSALREKQAKEDAKQMTTCAVWSTTGDHILAGTNKGKLNIVDAKTYEIIYSDKICSGVITTMRMTVSGRELLVNSQDRIIRTLRVPNLLAENLDLDTLQVPLEHKFQDVVNRLSWNHVTFSATGEYVAASTYNNHELYVWERNHGSLVCMLKDPKEEQGVIEWHPTRALLAACGLETGRIYIWSVVSPQKWSALAPDFAEVEENVEYIEREDEFDIYAQEEIHRRRLDAEDEEVDVLTVDQSKTLDEDESFRMPILFNLGESDSEDEFIAVSTGTMRRRSPGEGQSDLEEKPPVVKKSAASRRGRKR

SEQ ID NO: 10683 - protein, 562 aa, Saccharomyces cerevisiae
MNVFGKKEEKQEKVYSLQNGFPYSHHPYASQYSRPDGPILLQDFHLLENIASFDRERVPERVVHAKGGGCRLEFELTDSLSDITYAAPYQNVGYKCPGLVRFSTVGGESGTPDTARDPRGVSFKFYTEWGNHDWVFNNTPVFFLRDAIKFPVFIHSQKRDPQSHLNQFQDTTIYWDYLTLNPESIHQITYMFGDRGTPASWASMNAYSGHSFIMVNKEGKDTYVQFHVLSDTGFETLTGDKAAELSGSHPDYNQAKLFTQLQNGEKPKFNCYVQTMTPEQATKFRYSVNDLTKIWPHKEFPLRKFGTITLTENVDNYFQEIEQVAFSPTNTCIPGIKPSNDSVLQARLFSYPDTQRHRLGANYQQLPVNRPRNLGCPYSKGDSQYTAEQCPFKAVNFQRDGPMSYYNFGPEPNYISSLPNQTLKFKNEVNDEVSDKFKGIVLDEVTEVSVRKQEQDQIRNEHIVDAKINQYYYVYGISPLDFEQPRALYEKVYNDEQKKLFVHNVVCHACKIKDPKVKKRVTQYFGLLNEDLGKVIAEGLGVPWEPVDLEGYAKTWSIASAN

SEQ ID NO: 10684 - protein, 181 aa, Enterococcus faecalis V583
MIEKDIEKVLISKEEILAKSAELGKQLTEEYQGKNPLVVGILKGAVPFMADLTREINTYLELDFMDVSSYGNATVSSGEVKIVKDLDTNVEGRHILIVEDIIDSGRTLAYLVDLFRYRKAASVKIVTLLDKPEGRVVDIKADYVGFDVPNEFVVGYGLDYAETYRNLPYIGVLKPEVYESN

SEQ ID NO: 10685 - protein, 585 aa, Thermus thermophilus HB27
MAGLADRVSGARLDPAAEAEIRYLEAMIARLEAGEEDPEDFRVFRLKNGIYGIRGRPEHHMIRIKLPVGRITPEGLRVLADVAERYAENRLAHVTTRQAVQLHHVHRRDVPKVLRAVNAVGLTTREACGHSIRAITCCPYAGVSPEEPFDVTPYAEAAYRYFLRHPVGQNLPRKFKIAFEGCATDHARTPIHDIGVVAALEGGKRGFRVYVGGGLGAAPMSAELLEAFTPEEDLLPTMLAIVRLFDRYGNRKVLTQARLKFLVKKWGIAAFREAVREERRLVKLTASGEDLEAWAPPPEPEPPRLPSPPKKPFSFAPGFDAWRRTNLFKQKQEGFYTVTVRLPLGDITPEGLRALAAIAETYAAEVRSAISQNLLLRFVPEEALGGLYEALLEAGLALPEAHTLLDITRCPGADTCNLAITRSRGLAQALEAHLSALPLAQDPGAKAIGVKISGCPNSCGQHHIADIGFYGSSRKVGEREVPHYVLLLGGRTREGEARFGQVVGRIPARRVPEAVERILKRYLEERQNGESFQAYLDRVGAASFKPLLQDLQEVPPYEEAPEFYQDLGAEGEAFSVQLGRGECAV

SEQ ID NO: 10686 - protein, 281 aa, Saccharomyces cerevisiae
MSNHSEILERPETPYDITYRVGVAENKNSKFRRTMEDVHTYVKNFASRLDWGYFAVFDGHAGIQASKWCGKHLHTIIEQNILADETRDVRDVLNDSFLAIDEEINTKLVGNSGCTAAVCVLRWELPDSVSDDSMDLAQHQRKLYTANVGDSRIVLFRNGNSIRLTYDHKASDTLEMQRVEQAGGLIMKSRVNGMLAVTRSLGDKFFDSLVVGSPFTTSVEITSEDKFLILACDGLWDVIDDQDACELIKDITEPNEAAKVLVRYALENGTTDNVTVMVVFL

SEQ ID NO: 10687 - protein, 252 aa, Lactococcus lactis subsp. lactis
LCYNKSMTKVNEERVQEIFNSISSDYDKMNAIISFKQHDLWRAKTMKRMGDLTGLSILDLCCGTGDWTFDLSESVGPSGKVIGLDFSENMLEIAKAKLKEEAKKNIEFLQGNAMALPFEKGSFDVVTIGYGLRNTPDYLTVLKEIFRVLKPGGRVVCIETSHPTLPIYKQAFELYFKNVMPFLGKVFAKSLKEYQWLQKSAEDFPDAKTLEELFRKAGFVAVEYQKHGGGAIASHFATKSQKPKSNIRIGKK

SEQ ID NO: 10688 - protein, 425 aa, Streptomyces coelicolor A3(2)
MTRPSVSTFKAPKGTYDLLPPDSAKFLAVREAIAAPLRNSGYGYIETPGFENVELFARGVGESTDIVTKEMYVFETKGGDRLALRPETTAPVLRAVLEANLHKAGNLPVKVWYSGSQYRYERPQKGRYRHFSQVGAEAIGAEDPALDAELIILADQSYRALGLQDFRILLNSLGDQECRPVYRAALQDFLRGLDLDEETLRRAEINPLRVLDDKRPDVQKQLTEAPLLRDYLCDACKAYHEEVRELITAAGVVFEDDPKLVRGLDYYTRTTFEFVHDGLGSQSAVGGGGRYDGLSEMIGGPSLPSVGWALGVDRTVLALEAEGIELDIPSATSVFAVPLGEEARRILFAKVTELRKNGVAADFSYGGKGLKAAMKAANRSGARYTLVLGERDLAEGVVQLKDMESGEQTAIGVNEIVAELESRLG

SEQ ID NO: 10689 - protein, 253 aa, Triticum aestivum
  unsure (1)..(253): unsure at all Xaa locations
MAADLGFEATELRLGLPGGGEGEARSSSGKRGFAETIDLKLKLEPAGEEAPAEEDRADVAVVAAAAAENQEETATDAGGGKMKRSPSQSSVVTTAALPDPAEKPRAPKAQVVGWPPVRSFRKNILAEKSSPAAAAAFVKVSMDGAXPYLRKVDLNMYKTYQDLSKALEKMFSSFTIGNCGTPGMNGMNESKLMDLLNGSXYVPTYEDKDGDWMLVGDVPWEMFVESCKRLRIMKGSEAIGLAPRAMEKCKNRS

SEQ ID NO: 10690 - protein, 175 aa, Synechocystis sp. PCC 6803
MKLIDSRGRIFGIVSLLDLGAALIILMVAVGIFVLPGSSGKSILAQANAASIELTTIVRGLNVLDPQVVLDEFKAEKTNIIIRNQPAGQVEVVNVQELPRNLAVPQPDGSVKSLPDPRPESNYSRDMLLTLKGRGDFTSTGMVLGGQKVKIGTVLELEGKNYNFNASVVGINQPK

SEQ ID NO: 10691 - protein, 99 aa, Glycine max
  unsure (1)..(99): unsure at all Xaa locations
MAPSTISNPGAGFVDRAVPSMIATITGLRIMAGFPTRKTNKDXTFIDCNGGRVHCMHVWPPVGKKKCENLSYLTDLEDAQWAKEAEYLVREGMDINARN

SEQ ID NO: 10692 - protein, 484 aa, Agrobacterium tumefaciens str. C58
MIKLKNAALLRDACLVNGRWLKAADGKTIAVENPANSMIIGHVPSLSADEVKAAVESAGKAFSEWSRRSAKDRAAILRRWFDLMVANADDLGALMTAEQGKPFAEAKGEALYAASFVEWFAEEAKRVYGDTIPSPTTDKRITILKQPIGVCAAITPWNFPAAMITRKAAPALAAGCAMIVKPAEQTPLTALALGVLAEEAGVPAGVFQVVTGAARDIGKVFTESDTVRKISFTGSTEVGRLLMAQSAPTIKKLSLELGGNAPFIVFDDADLDAAVEGAIVSKYRNAGQTCVCSNRIYVQDGVYDAFAEKLVKRVESLSVGEGTEPGVLIGPLIDQEAVAKVEDHVADALGKGAKIVIGGKRHALGGTFYEPTVLTGATQAMKVAREETFGPVAPLFRFGTEDEAVAMANDTEFGLAAYFYTENVRRTWRVAEALEYGMVGHNTGLISNEVAPFGGVKQSGLGREGSHYGIDEYLEIKYLCSAIG

SEQ ID NO: 10693 - protein, 175 aa, Candida albicans
KMEVLHQLTTNHTSSLSNLINNHPTSFSSILKEVDITNHSLTYIEKLWASYYIYMNNDILATGLLFFITHELMYFGRCLPWFIIDKTPWFNRYKIQPTKIPTNQEQWECFKTVLKQHFLVEALPIWLFHPVCAKLGITYDVPFPNWRIQAIQIAIFFICEDFWHFGFHSLFHQGW

SEQ ID NO: 10694 - protein, 172 aa, Zea mays
WVPRGRPGMDDLAVAADFAAAPAGGFFWAAPPSLQPQAPVQSVVAASAPSPCMEISSSVDCGQEKEQPTNKRPRSESTTESSTKASREKIRRDKLNERFLELGAILEPGKTPKMDKTAILSDAIRVVGELRSEAKKLKDSNENLQEKIKELKVYTISCGQVINGAVQMGGGT

SEQ ID NO: 10695 - protein, 483 aa, Hordeum vulgare subsp. vulgare
  unsure (1)..(483): unsure at all Xaa locations
MERYNIITEVGDGTFGSVWRAINKESGEVVAIKKMKKKYFSWEECINLREVKSLRRMNHPNIVKLKEVIRENDMLFFVFEYMECNLYQLMKSKGKPFSETEIRNWCFQVFQALSHMHQRGYFHRDLKPENLLVTKELIKVADFGLAREIISEPPYTEYVSTRWYRAPEVLLQSSVYSSAVDMWAMGAIIAELFSHRPLFPGSSEADEIYKICNILGTPNQHTWAGGLQLAASIHFQFPQSGSINLSEVVPTASEDALNLISWLCSWDPRKRPTAVEVLQHPFFQPCFYVPPSLRYRSTGYATPPPSVGAKGAMDQKNARRYPVGTLSNGRPAVNNSYLSTNAPARAAGVQRKLELDHQVKPEGNHKLTTKENAMNQPWSRLPPAPVRNNMNYLAAXEQIPRGGAPDIAEKLSQLSMSSTTNRAPIMPSDRFVDLKATTRAHGEPVRRPVPLGPRDTWHARNDPFRRTYEMPGERALLQRKLVS

SEQ ID NO: 10696 - protein, 1367 aa, Ustilago maydis 521
MAPVRRLARASSSASVSSSPANLPTPTLSGPQLQSTSNAEPRISVHQTPTAAPRVLQHPSTSPSKPHGSNSFDAPIILSDTETDNGTAGIVQHTGSSDDDMTAPHRTAGVDNGKAQRLSLLFPAITDNHQDESRSSTTLDRSYATSLNSEVNLISDGSLSSLSSIDSDSDVTDDSDNKSIAAAISSLRSTPRQTHNKTPALLSKRGTEATPEATASSSSSSSTPSRRSARIVSSGSSIQKALQRRDDLDAKLLASPLRRKPDSPEAPPPPRRAVGRPRKSVQPVPAQSSAARLSTSPAVLPSSVQNLASPSSTRRSARLSLPFPMAPNSEYPASKDASQSPRREAELGPRPELRPGKHSRKFAEASDKSKPVITLQPFSDSVTFSASVGSAISNGPVGNSPAVTSDAQSIPTLPVERSRGRPRKSQPGLPTFPQTPAALTAEREQPALVTRLRKRNLSTAGMTAKSESLAVDEQQEDSDFPPRKRGRPARSSTSATDRTAGEPLSTASGQTLHGRTPLRIDVIDLLDDDLSELSDASDMSLNSSQPHQSASQSIQSGESHRQRPPQASTLPSKKLKRASKQNKDGKIYHYTGLYAGEADAVASTSSLYPDASQSTLLPYPIHFGAKLLTEERDFCLPYPIHQTMDQLRDRVNAKRKPPRYQQINKNKYVTRAKLQGEVPLCNCKPGSGCGHDCINRMLMFICDPKTCPSASNCTNISLGRRPHVKTAVAYYGRRGFGLKTLEAIKRDDFIDEYRGEVINLSEAAKRVTEEYKATGNYYLLDYDSAAGELLDGGRKGNITRFANHSCDPNCRIEKFIICGTDEALSAEFQIGLFANRDIAAGEELTYNYGWAAFQPRDITGAPTAQVPTEQCLCGAANCSGILGGKKAPVSKSAADAVAANTRKKTGKGRGKRKSKGKVSKSTQSSRIHLTSMAPLLSASRLSAAAIPSSALSSVEAARNLRKREDAQTRRNAISKITIKRRERSGRSAGDASSSTSASVTDSSVEPVTETWTKQISVPGGKNGQQIPRSRAAKAVHATKSRQAPRDPISSFSQVIDLTGEHATPSPIEAISPKEASSTSTSVQFTGPTDADQAALGGDVLSSSASRVFPQLPLPKRINIKKPGGGFGAMAARGTKDRRWLTAEAPSSDNDDSSSIRCDSAEYPSDILKEDDEAQLQDSSGKVPGKKRRGRHKLQLSAEEMARRAVERRARNAFLARKRRASKRGIVVMDPSHHPLKKISIQCTAAPENTYIPDLPSSLVTLGMTIADARRARNAFLARVRRAIKRGFPKDAAIKMAAKPLPGDPERDTPVMKAQRAYMEQLEREAADEVTDSSQNGHGSSGSVSASNSSVAAEDDDWEDEPRWAAAL

SEQ ID NO: 10697 - protein, 231 aa, Arabidopsis thaliana
LQKELDYLVGAVSNPKRPFAAIVGGSKVSSKIGVIESLLEKCDILLLGGGMIFTFYKAQGLSVGSSLVEEDKLELATTLLAKAKARGVSLLLPTDVVIADKFAPDANSKIVPASAIPDGWMGLDIGPDSVKTFNEALDTTQTVIWNGPMGVFEFEKFAKGTEAVRNKLAELSKKGVTTIIGGGDSVAAVEKVGVAGVMSHISTGGGASLELLEGKVLPGVVALDEATPVTV

SEQ ID NO: 10698 - protein, 399 aa, Arabidopsis thaliana
GDLTSADLKGKKVFVRADLNVPLDDNQTITDDTRIRAAIPTIKYLIENGAKVILSTHLGRPKGVTPKFSLAPLVPRLSELLGIEVTKADDCIGPEVESLVASLPEGGVLLLENVRFYKEEEKNDPEFAKKLASLADLYVNDAFGTAHRAHASTEGVTKFLKPSVAGFLLQKELDYLVGAVSNPKRPFAAIVGGSKVSSKIGVIESLLEKCDILLLGGGMIFTFYKAQGLSVGSSLVEEDKLELATELLAKAKAKGVSLLLPTDVVVADKFAPDANSKIVPASGIEDGWMGLDIGPDSIKTFNEALDTTQTVIWNGPMGVFEMEKFAAGTEAIANKLAELSEKGVTTIIGGGDSVAAVEKVGVAGVMSHISTGGGASLELLEGKVLPGVIALDEAIPVTV

SEQ ID NO: 10699 - protein, 431 aa, SYNECHOCOCCUS SP. WH 8102
MKRVLAIILGGGAGTRLYPLTKMRAKPAVPLAGKYRLIDIPISNCINSNINKMYVMTQFNSASLNRHLSQTFNLSASFGQGFVEVLAAQQTPDSPSWFEGTADAVRKYQWLFQEWDVDEYLILSGDQLYRMDYSLFVEHHRSTGADLTVAALPVDPKQAEAFGLMRTDGDGDIKEFREKPKGDSLLEMAVDTSRFGLSANSAKERPYLASMGIYVFSRDTLFDLLDSNPGYKDFGKEVIPEALKRGDKLKSYVFDDYWEDIGTIGAFYEANLALTQQPTPPFSFYDEKFPIYTRPRYLPPSKLVDAQITNSIVGEGSILKSCSIHHCVLGVRSRIETDVVLQDTLVMGADFFESSDERAVLRERGGIPVGVGQGTTVKRAILDKNARIGSNVTIVNKDHVEEADRSDQGFYIRNGIVVVVKNATIQDGTVI

SEQ ID NO: 10700 - protein, 399 aa, Streptomyces coelicolor A3(2)
MLGIVLAGGEGKRLMPLTADRAKPAVTFGGTYRLVDFVLSNLVNGDILRICVLTQYKSHSLDRHITTTWRMSSLLGNYVTPVPAQQRLGPRWFLGSADAILQSLNLVHDEQPEYVAVFGADHVYRMDPRQMLAQHIESGAGVTVAGIRVPRAESPSFGVITPGSDGQTVTGFLEKPADPPGLADDPGCVFASMGNYVFTTKALVEALHRDAEDPDSVHDMGGSILPQLTDRGEAALYDFSANHVPGETTRDQGYWRDVGTLDAYYDAHMDLIAERPAFNLYNRDWPVYTHSTQLSPARFNAGGIASESIISAGCLIRGQVTRSVLSPGVVVDPGAVVQGSVLHDNVHIGRGAVVRGAVLDKNVQVPPGATIGVNPQRDGELYTVSKGGVIALGKGQRVP

SEQ ID NO: 10701 - protein, 334 aa, Eremothecium gossypii
MSDIPTEQKVVLIRETGGPEVLRYEEDYPVPEVRGSDILIKNRYAGVNFIETYFRTGLYPCEKPYVLGREAVGVVAAIGADVRRFKVGDRVACLSSGTFAQYTAVSEKSNVLKLPDDIQDGELQAVAGSLVNGLTALTLVDEAYKPQVGEIVLVYAAAGGVGQLLIQLLHARSVRVIAVASTDEKLQIAKSRGAEFLINSSREDIVAKVLEFTDGEGVGASYDSVGKDTFETTLQSVKRKGTIVSFGNASGAVPPFSIQRLTPKNLKILRPQLYGYLATREEWEYYSSKLLHLIRSKKLIINITNLSPLEEFKRLTQLLESRQTTGKLLLAIPD

SEQ ID NO: 10702 - protein, 330 aa, GIBBERELLA ZEAE PH-1
MVKAVVAGASGGIGQPLSLLLKTSPHIDELALYDVVNTPGVATDLSHISSRAKTTGYLPANDGAKAAFKDADIIVIPAGIPRKPGMTRDDLFNINAGIVKGLIEVAAEVAPKAFILVISNPVNSTVPISAEVLKAKGVFNPQRLFGVTTLDIVRAETFVAEITGKANPQELTIPVIGGHSGETIVPLFSKASPSVQIPDDKYDALVNRIQFGGDEVVKAKDGAGSATLSMAYAGFRFAEKVLRAVKGEKGLVEPSYVYLPGVPGGEAIAKETGCDFFSVPIELGPNGAEKATNPFEGITEKEKALLAKATEGLKGNITKGVSFVHNPPQK

SEQ ID NO: 10703 - protein, 291 aa, Vibrio parahaemolyticus RIMD 2210633
MKGIVLAGGSGTRLYPLTRGTSKQLLPIYDKPMIYYPISTLMLAGVRDILIITTPEDNESFKRLLGDGSDYGINLEYAIQPSPDGLAQAFTIGENFIGDDPVCLVLGDNIFYGQSFSLQLKRARELAENGQAAVFGYQVKDPERFGVVEFDADMKAVSIEEKPLEPKSNYAVTGLYFYDSRVIEMAKKVKPSSRGELEITTINEMYLSDGSLNVEILGRGFAWLDTGTHESLHEASSFVQSIEHVQGLKVACLEEIAWRNGWLSDTQLLEIGNSMSKNEYGKYLISLVDKL

SEQ ID NO: 10704 - protein, 409 aa, Porphyromonas gingivalis W83
MVLSEKAKYYVDLEHRYGAHNYHPLEVVLSRGQGAYVWDVDGKRYFDFLSAYSAVNQGHCHPKIIAALKEQAEKICLTSRAFYNDCLGEYEEFMHHYFGYDKMLPMNSGAEAVETALKLSRRWGYRVKGIPEEKAVIIVCDGNFHGRTISIVSMSSDPDSYTDYGPYTPGFVNIPYNNIEALEKALEEHKDHVAAFVVEPIQGEAGVFVPDDGYIRRAAELCRKYHALFVADEVQTGIARTGRMLCCDHDDVRPDIVVLGKAISGGVLPVSCVLADDEVMLTIKPGEHGSTFGGFPLACKVAMAALTVVKEERLPERAEELGQYFRGELLKIKSPLLKLVRGRGMLNAIVIEPHNRHEAWDVCEAMAERGLLAKPTHRHIIRLAPPLCITREELAQAVEIIKESIKVLE

SEQ ID NO: 10705 - protein, 508 aa, Vibrio vulnificus
MHMSKSFLLISMGLASISVHAQTLTRDNGAPVGDNQNSITAGENGSVLLQDVHLIQKLQRFARERIPERVVHARGTGAHGEFVVSGDFSDLTLSSPFAQSGKVTPVFVRFSTVIHSKGSPETLRDPRGFATKFYTDQGNWDLVGNNLPVFFIRDSIKFPDMVHSLKPSPVTNLQDPNRFFDFFSSQPSATNMLTWVYTNLGTPASYRTMDGFGVHAYKWINRKGEVNYVKFHWKSQQGVKSLRPAEVTKVQGEDFNHLTNDLYTQINAGNFPKWDLYVKVLSPKALSKLDYNGLDATKVWLDVPEKKVGTMTLNRVPDNFFLETEQSAFAPSNIIPGIEPSEDRLLQGRLFAYADTQLYRLGANLFQLPVNSPKSPVANHNQDGPSNNSTGLGNVDSLDVNYEPSRLVNLTVDKQARAVETPLSGHVQQQAIRNPRDFFQAGVLYRSLSEQDKADLIHNLSGDLNKVNDAEVKAIMVSYFYRADKEYGTRLAKATDVNLKQVTKLASM

SEQ ID NO: 10706 - protein, 576 aa, Saccharomyces cerevisiae
MSEEAAYQEDTAVQNTPADALSPVESDSNSALSTPSNKAERDDMKDFDENHEESNNYVEIPKKPASAYVTVSICCLMVAFGGFVFGWDTGTISGFVAQTDFIRRFGMKHHDGTYYLSKVRTGLIVSIFNIGCAIGGIILAKLGDMYGRKMGLIVVVVIYIIGIIIQIASINKWYQYFIGRIISGLGVGGIAVLSPMLISEVSPKHIRGTLVSCYQLMITLGIFLGYCTNYGTKTYTNSVQWRVPLGLGFAWALFMIGGMTFVPESPRYLVEVGKIEEAKRSIALSNKVSADDPAVMAEVEVVQATVEAEKLAGNASWGEIFSTKTKVFQRLIMGAMIQSLQQLTGDNYFFYYGTTVFTAVGLEDSFETSIVLGIVNFASTFVGIFLVERYGRRRCLLWGAASMTACMVVFASVGVTRLWPNGKKNGSSKGAGNCMIVFTCFYLFCFATTWAPIPFVVNSETFPLRVKSKCMAIAQACNWIWGFLIGFFTPFISGAIDFYYGYVFMGCLVFSYFYVFFFVPETKGLTLEEVNTLWEEGVLPWKSPSWVPPNKRGTDYNADDLMHDDQPFYKKMFGKK

SEQ ID NO: 10707 - protein, 220 aa, Gossypium barbadense
DVYYWECKGYTPLFPRILGHEASGIVESVGEGVNDLKPGDHVLPIFTGECKECRHCLSEESNNMCELLRINCDRGVMLADGKTRFSINGKPIYHFVGTSTFSQYTVVHVGQVAKISPTAPLDKVCPISCGICTGFGATVNVAKPKKGQTVAVFGLGAVGLAAAEGARVCGASRIIAVDVNPRRFEEAKRFGITEFVNPKDYDKPVQEVIVEMTGGGVDRS

SEQ ID NO: 10708 - protein, 568 aa, Clarkia franciscana
MASPALISETEAWKDLKAHLEGIKTTHLRELMGDTERCQSMMVEFDNIFLDYSRQQASPDTINKLYKLADAAHLKQKIDRMYNGDHINITENRSVLHVALRAPRNSAICSDGKNVVPDVWNVLDKIKDFSDRVRNGSWIGATGKELKDVIAVGIGGSFLGPLFVHTALQTDPEASKNARGRELRFLANVDPIDVARNISGLNPETTLVVVVSKTFTTAETMLNARTLREWISSALGPSAVAKHMVAVSTNLPLVEKFGIDPINTFAFWDWVGGRYSVCSAVGVLPLSLQYGFAVVEKFLQGAHSIDQHFSSAPFEKNIPVLLGLLSVWNVSFLGYPARAILPYSQALEKLAPHIQQVSMESNGKGVSIDGLPLPFESGEIDFGEPGTNGQHSFYQLIHQGRVIPCDFIGVVKSQQPVYLKGEVVNNHDELMSNFFAQPDALAYGKTPEQLKKENVSEHLIPHKTFTGNRPSLSILLPTLDAYRIGQLLAIYEHRVAVQGFVWGINSFDQWGVELGKSLATQVRKQLHASRVKGEPVEGFNFSTKTLLTRYLEATSDVPADPSTLLPNI

SEQ ID NO: 10709 - protein, 569 aa, Clarkia lewisii
MASPALISETEAWKDLKAHLEGIKMTHLRELMGDTERCQSMMVEFDNIFLDYSRQQASPDTISKLYKLADAAHLKQKIDRMYNGDHINTTENRSVLHVALRAPRNSAICSDGKNVVPDVWNVLDKIKDFSDSVRNGSWIGATGKELKDVIAVGIGGSFLGPLFVHTALQTDPEASKNARGRELRFLANVDPIDVARNISGLNPETTLVVVVSKTFTTAETMLNARTLREWISSALGPSAVAKHMVAVSTNLPLVEKFGIDPNNAFAFWDWVGGRYSVCSAVGVLPLSLQYGFAVVEKFLQGAHSIDQHFSSAPFEKNIPVLLGLLSVWNVSFLGYPARAILPYSQALEKLAPHIQQVSMESNGKGVSIDGLPLPFESGEIDFGEPGTNGQHSFYQLIHQGRVIPCDFIGVVKSQQPVYLKGEVVNNHDELMSNFFAQPDALAYGKTPEELKKENVSEHLIPHKTFTGNRPSISILLPTLDAYRIGQLLAIYEHRVAVQGFVWGINSFDQWGVELGKSLATQVRKQLHGSRVKGEPVEEGFNFSTKTLLTRYLQATSDVPADPSTLLPNI

SEQ ID NO: 10710 - protein, 169 aa, Zea mays
MAEESPQSIYDFTVKDIEGKDVSLSQFKGKTLLIVNVASKCGLTDANYKELNVLYDKYKDQGLEILAFPCNQFLGQEPGNNEEIQQTVCTKFKAEFPIFDKVDVNGKNTAPLYKYLKAEKGGLLIDAIKWNFTKFLVSPDGKVSQRYSPRTSPLQFEKDIQTLLGQASS

SEQ ID NO: 10711 - protein, 356 aa, Cucumis sativus
MQPIPDVNQRIARISAHLHPPKYQMEESSVLRRANCRAKGGAPGFKVAILGAAGGIGQPLAMLMKMNPLVSVLHLYDVVNAPGVTADISHMDTGAVVRGFLGQQQLERALTGMDLVVIPAGVPRKPGMTRDDLFKINAGIVKTLCEGIAKCCPTAIVNLISNPVNSTVPIAAEVFKKAGTYDPKRLLGVTMLDVVRANTFVAEVLGLDPRDVNVPVVGGHAGVTILPLLSQVKPPSSFTQEEINYLTDRIQNGGTEVVEAKAGAGSATLSMAYAAVKFADACLRGLRGDAGVVECAFVSSQVTELPFFATKVRLGRNGIDEVYSLGPLNEYERIGLEKAKKELAGSIEKGVSFIRG

SEQ ID NO: 10712 - protein, 644 aa, Antirrhinum majus
MATGIQNQKIVPENLRKQLAIAVRSIQWSYAIFWSNSVAQPGVLEWGDGFYNGDIKTRKTVQSVELNQDQLGLQRSDQLRELYESLSLGETNTQAKRPTAALSPEDLTDAEWFFLVCMSFIFNIGQGLPGRTLARNQAVWLCNAHRADTKVFSRSLLAKSASIQTVVCFPYSEGVVELGATELVPEDLNLIQHIKTSFLDSPATVPKIPNYVSNSITNNNDLICEALEHANIPENDLDQLLNCPDTNICSPDNSLDDFADNLLIDESNLAEGINGEVPQTQSWPFMDDAISNCLNSSMNSSDCISQTHENLESFAPLSDGKGPPETNNCMHSTQKCNQQIENTGVQGDEVHYQGVLSNLLKSSHQLVLGPYFRNGNRESSFVSWNKDGSSGTHVPRSGTSQRFLKKVLFEVARMHENSRLDAGKQKGNSDCLAKPTADEIDRNHVLSERKRREKINERFMILASLVPSGGKVDKVSILDHTIDYLRGLERKVDELESNKMVKGRGRESTTKTKLHDAIERTSDNYGATRTSNVKKPLTNKRKASDTDKIGAVNSRGRLKDSLTDNITVNITNKDVLIVVTCSSKEFVLLEVMEAVRRLSLDSETVQSSNRDGMISITIKAKCKGLKVASASVIKQALQKVTMKS

SEQ ID NO: 10713 - protein, 352 aa, Xylella fastidiosa 9a5c
MNVMGFAALSATGPLERFAFGRRAPRPDDVVIDILYCGVCHTDLHLARNHGGFTTYPIVPGHEIIGCVREIGKTVTRFKRGDLVGVGCMVDSCQHCQPCLKGWEQDCIEGSTFTYNSTDRRDGSITYGGYSDVIVVRDKFVLSLPDGLDPAGAAPLLCAGITTWSPLRRWNVGKDSKVAVVGLGGLGHMALKLAKALGADVTLFTRSSGKEGDAFRLGADRVVLSSDLEQMKAVYSRFDVIIDTVPYDHDVNPYMPTLVLEGVLVLVGYMGPLSMPVNAGGVVRGRRAISGSFIGGVPETQQMLDFCGQHGIVSDVEIIPIQKINEAYERMLKSDVKYRFVIDMTSLTSSGA

SEQ ID NO: 10714 - protein, 259 aa, Glycine max
RAGFMWGLNLYKRPKLSGAMLGAILPLAAVHTLGNLFTNMSLGKVAVSFTHTIKAMEPFFSVILSAMFLGEFPTPWVVGSLVPIVGGVALASVTEASFNWAGFWSAMASNVTNQSRNVLSKKAMVNKEDSMDNITLFSIITVMSFFLLAPVAIFMEGVKFTPAYLQSAGVNVRQLYIRSLLAALCFHAYQQVSYMILQRVSPVTHSVGNCVKRVVVIVSSVIFFQTPVSPVNAFGTAIALAGVFLYSRVKRIKAKPKTA

SEQ ID NO: 10715 - protein, 269 aa, Mesorhizobium sp. BNC1
MGKRVVLVGCGNMGYAMMKGWLAAGKLSAADISVVEPNDELRARAADCGVSVAAQPDALPWREADLVIFAVKPQMVHQVVPDYRFFAPGATFLSVAAGAGISLFEELLGHNAAVVRCMPNTPAAIGKGMLVIVSNGNVRPQTKEFVNELLATNGAVATIEDESLMDTVTAVSGSGPAYVFHFIECLTAAGEQAGLPSQTAKQLAMQTVYGAAVLAKESGEEPGMLREQVTSPNGTTAAALKVLMGEERLQRLLGEAVEAARQRSIELGK

SEQ ID NO: 10716 - protein, 393 aa, Ralstonia eutropha JMP134
MDPQRLATASRLANIDAFHVMELAKQANELERVGRHIIHMGIGEPDFTAAEPVVRAAEAAMRRGVTQYTGALGIHALREAIAGYYKTMYGLEIPARRVIVTAGASGALLLACAVLVEIGAEVLMPDPSYPCNRHFVAAFDGAARMIPSGPAERFQLTAAQVEAHWNERTRGVLLASPSNPTGTSILPDELGRILQAVRARQGFAILDEIYQGLSYDAPPVSALSLDDNVVTVNSFSKYFNMTGWRLGWLVVPDALVADFEKVAQNLFICASAVAQHAALACFSPEAMAIYDERKAEFRRRRDLIVPALESLGLHVPVMPDGAFYVYADCRQVNHPAAGDADKLTQAMLHDAGVVMVPGQDFGPHTAQDYIRISYATSRQNIEEAMARLQKLFR

SEQ ID NO: 10717 - protein, 128 aa, Triticum aestivum
GLVVPVIRDTEGMNFADIEKGINSLAKKATEGALSIDEMAGGTFTISNGGVYGSLISTPIINPPQSAILGMHSIVQRPVVVDGSILARPMMYLALTYDHRLIDGREAVLFLRRIKDVVEDPRRLLLDI

SEQ ID NO: 10718 - protein, 567 aa, Oryza sativa (japonica cultivar-group)
MASSALICDTEQWKGLQAHVGEIQKTHLRHLMHDVERCKAMTAEYEGIYLDYSRQRATGETMEKLFKLAEAAKLKEKIEKMFRGDKINSTENRSVLHVALRAPRDEVINSNGVNVVPEVWGVKDKIKQFSETFRSGSWVGATGKALTNVVSVGIGGSFLGPLFVHAALQTDPEAAESAKGRQLRFLANVDPVDVARSIKDLDPETTLVVVVSKTFTTAETMLNARTLKEWIVSSLGPDAVAKHMIAVSTNLELVEKFGIDPKNAFAFWDWVGGRYSVCSAVGVLPLSLQYGFPIVQKFLEGAASIDKHFRSSSFEKNIPVLLGLLSVWNVSFLGYPARAILPYSQALEKFAPHIQQLSMESNGKGVSIDGVQLPFESGEIDFGEPGTNGQHSFYQLIHQGRVIPCDFIGVVKSQQPVYLKGEIVSNHDELMSNFFAQPDALAYGKTPEQLHSEKVPEHLIPHKTFQGNRPSLSLLLPSLSAYEIGQLLAIYEHRIAVQGFLWGINSFDQWGVELGKSLASQVRKSLHASRVEGKPVLGFNSSTTSLLTRYLAVEPSTPYNTTTLPKV

SEQ ID NO: 10719 - protein, 78 aa, Triticum aestivum
MGLWSFLEGVLLIANALAILNEDRFLSPRGWSFADARGVQGANTFKGQMIGLIYAAQYMRFPLILLNGITILVKFVSF

SEQ ID NO: 10720 - protein, 1437 aa, Eremothecium gossypii
MLALKENLLSVGSAPDNWGDWTLAAALVRGAADGTVFYTARAKASRPLVAVAAEQQGVHAIRLLAANDPFCAVTAEAGDSVPATVFTDLATVITGAPHLATVKTPIVVHIETLAEEYAAIPGFKDLGSVILVSSSPSQLLRAASTATKLAQASQRPVLHFYTSDLNGFGEVDVGTADGTFDSTIEDAPERILDSLQSRLVSRGTPSTLILNLSAYGEQFAQYLPDDVALYDITVYKPFEFSQVLRELPVSVKNIAVVQGSTGGSKSNGFEPILLDVFSDFNLLVDRGIKNIVVSGIGRLQYFAHTLEKIVSNSRSLSPSTDLYISDVKHAVHSGIAEEFIKKAISLENAYLSVLQQVFEPNLQLLNQFNDSAINSLRPEYGFGKFLQQNRARRQLMKMVERSLDCSLYEYEGPSVVEGLAAWISYNKRALDSSLLKEANIFGRDVHELLQKNSNSEVAKSILASAPTLDSFSFSSSWLIGSDAWSYDLGNSGVHHAITSRENINILLIDSEPYGSLSKNSARKKDVGLYAMNFGTAYVASVAVYSSYTQLLTAVVEASRFPGPSIVLAYLPYNSEQDSPLTILKETKRAVESGYWPLYRYNPTASNEEDTFKLDSSVLRRQLQEFLDRENKLTLLAKRYPDLSSNIVQSQSDIITAKQQRKSKEAYDQLLQGLSGPPLSVYYASDGGNAASLAKILAKKATTRGLKSFALSMDDIVLEDLPREQNVVFITSTGGQGEFPQDGKAFWEELKSATDLDLASVKFSVFGLGDSQYWPRKEDERYYNKPGKDLYNKLLLFSGQTLIPLGLGDDQDPDGYRTGYEKWESELWAALGVSDIITGEEPKLITNEDIKLASNFLRGTIAEALVDDSTGSIPSTDQQLTKFHGIYMQDDRDIRDVRKAQGLEPYYIFMIRARLPGGIARPEQYLALDKIAASFGNNTIKLTTRATFQLHGVVKRNLKSSIRAMNSTLLDTLAACGDVNRNVMVSALPANARVHEQVANVAAEISEELLPNTTAYHEIWLEGPDRNDASPEWQAIWEGMKSGPKKKVLVGGNALQDIEPIYGPTYLPRKFKVNIAVPPYNDVDVWACDVGLIAIIDETTSNLVGFNVYVGGGMGTTHNNKKTYPRLGSSFGFAPKEDITSVVEKILLVQRDHGDRTNRKHARLKYTIDDMGIDIYRQKVEELWGDKFAPERSYKIESNIDYFGWVKDETGMNHFTAFIENGRIEDSSKLSHKTGLRKVAEYMKQSGSGHFRLTGNQHIVISAIPDQHLDAIKGILKAYKLDNYSFSGLRLASSACVAFPTCGLAMAESERYLPQLISRLEESLEEYGLRHDSVVMRMSGCPNGCSRPWVAEVACVGKAPGTYNLLLGGGYYGQRLNKLYRSSLKEAEILSILRPLFKRWSLEREESEHFGDFLIRVGVIKPTLEGRKFHDDLPDGAI

SEQ ID NO: 10721 - protein, 113 aa, Glycine max
  unsure (1)..(113): unsure at all Xaa locations
MASSMIWSAAVTTVNRAGAGMVAPFTGXLKSLLGFPTGRPTIAFTSMVGTVGGVHCLQVWPPIARKKFGTLSYLPDLDDAQLAKEVEYLLRKGWIPRLEFELEHGFVYREHNR

SEQ ID NO: 10722 - protein, 316 aa, Glycine max
  unsure (1)..(316): unsure at all Xaa locations
MALSHQFSYLLFLLLILLSSLPNISQATSRAPNRMLALVQKQPLVLKYHKGPLLKGNITLHLLWYGTFTPTQRSIVIDFLESLTSTSSPESPSVSTWWKTTESYRGGPCTLVVGNQILDENYSLGKSLKNDNLVALASNPKLNSAPGDRVVHVILTAADVAVEDFCMKVCGTHGRGKKRXSEKIAYAWVGNSVTQCPGPGAWPFHQPLYGPQTPPLVAPNGDVGVDGMVINLATVLAGAVTNPFEDGYYQGPASAPLEAVSACTGIFGKGAYPGYAGDVLAENATGVSYNAVGMRGRKFLLPAMWDPLTSTCKTLV

SEQ ID NO: 10723 - protein, 195 aa, Triticum aestivum
MPSYPPATAAASSSVQPLHAEAAASFKQPRHVSVGHGGSARSRRMRDSYHCFHPLMIEENNLGRSAAERFMMLDQLVIHESREALDPHWDMRLDIDDMSYEELLALEERIGNVNTGLADEKISGCVMELACRNSARTQNDQDKERCIICLEEYKHKDSLGKLKCGHDFHAGCIKKWLEVKNACPVCKADAANETT

SEQ ID NO: 10724 - protein, 568 aa, Clarkia mildrediae
MASPALISETEAWKDLKAHLEGIKRTHLRELMGDTERCQSMMVEFDNIFLDYSRQQAIPDTIKKLYKLADAAHLKQKIDRMYNGDHINSTENRSVLHVALRAPRDSAICSDGKNVVPDVWNVLDKIKDFSDRVRNGSWIGATGKELKDVIAVGIGGSFLGPLFVHTALQTDPEASKNARGRELRFLANVDPIDVARNISGLNPETTLVVVVSKTFTTAETMLNARTLREWISSALGPTAVAKHMVAVSTNIPLVEKFGIDPNNAFAFWDWVGGRYSVCSAVGVLPLSLQYGFAVVEKFLQGAHSIDQHFSSAPFEKNIPVLLGLLSVWNVSFLGYPARAILPYSQALEKLAPHIQQVSMESNGKGVSIDGLPLPFESGEIDFGEPGTNGQHSFYQLIHQGRVIPCDFIGVVKSQQPVYLKGEVVNNHDELMSNFFAQPDALAYGKTPEQLKNENVAEHLIPHKTFTGNRPSLSILLPTLDAYRIGQLLAIYEHRVAVQGFVWGINSFDQWGVELGKSLATQVRKQLHGSRVKGEPVEGFNFSTKTLLTKYLEATSDVPADPSTLLPNI

SEQ ID NO: 10725 - protein, 378 aa, Enterococcus faecalis V583
MKFNTKLIHGGISKDTTTGAVSVPIYQTSTFEQNGVGQPKEYEYSRSGNPTRHALETLIAELEGGSHGFAFSSGLAGIHAIISMFGPEDHILLGDDVYGGSFRLLDKVFVANGLSYTIVNASDLSTIEAAIQPNTKALFLETPSNPLLKITDIEAAAKLAKKHQLLTIVDNTFATPYFQRPLALGADIVVHSGTKYLGGHSDVVSGLVVTNHPESAEKIAFLQNAIGAVLGPHDSWLVQRSLKTLGVRMAAHAQNAQKIAEFLEAHPAVATVYYPGLASHPGHEIAQKQMSGFSGMISFELAKDEQVVPFVEALEIFTLAESLGGVESLIEVPAIMTHASIPKENREAVGIKDGLIRLSVGIEAVEDLLADLEKGLQA

SEQ ID NO: 10726 - protein, 570 aa, Clarkia rostrata
MASPALISETEAWKDLKAHLEGIKMTHLRELMGDTERCQSMMVEFDNIFLDYSRQQASPDTISKLYKLADEAHLKQKIDRMYNGDHINTTENRSVLHVALRAPRNSAICSDGKNVVPDVWSVLDKIKDFSDRVRNGSWIGATGKELKDVIAVGIGGSFLGPLFVHTALQTDPEASKNARGRELRFLANVDPIDVARNISGLNPETTLVVVVSKTFTTAETMLNARTLREWISSALGPSAVAKHMVAVSTNLPLVEKFGIDPNNAFAFWDWVGGRYSVCSAVGVLPLSLQYGFAVVEKFLQGAHSIDQHFSSAPFEKNIPVLLGLLSVWNVSFLGYPARAILPYSQALEKLAPHIQQVSMESNGKGVSVDGLPLPFESGEIDFGEPGTNGQHSFYQLIHQGRVIPCDFIGVVKSQQPVYLKGEVVNNHDELMSNFFAQPDALAYGKTPEELKKENVSEHLIPHKTFTGNRPSISILLPTLDAYRIGQVLAIYEHRVAVQGFVWGINSFDQWGVELGKSLATQVRKQLHGSRVKGEPVEEGFNFSTKTLLTRYLQATSDVPADPSTLLPNII

SEQ ID NO: 10727 - protein, 254 aa, Shigella boydii
IVAAGIKEILLVTHASKNAVENHFDTSYELESLLELRVKRQLLAEVQSICPPGVTIMNVRQGEPLGLGHSILCARPAIGDNPFVVVLPDVVIDDASADPLRYNLAAMIARFNETGRSQVLAKRMPGDLSEYSVIQTKEPLDREGKVSRIVEFIEKPDQPQTLDSDIMAVGRYVLSADIWPELERTQPGAWGRIQLTDAIAELAKKQSVDAMLMTGDSYDCGKKMGYMQAFVKYGLRNLKEGAKFRKGIEKLLLE

SEQ ID NO: 10728 - protein, 357 aa, Populus tomentosa
MGSLETERKIVGWAATDSTGHLAPYTYSLRDTGPEDVFIKVISCGICHTDIHQIKNDLGMSHYPMVPGHEVVGEVVEVGSDVTRFKVGDVVGVGVIVGSCKNCHPCKSELEQYCNKKIWSYNDVYTDGKPTQGGFAESMVVDQKFVVRIPDGMSPEQAAPLLCAGLTVYSPLKHFGLKQSGLRGGILGLGGVGHMGVKIAKAMGHHVTVISSSDKKREEAMEHLGADEYLVSSDVESMQKAADQLDYIIDTVPVVHPLEPYLSLLKLDGKLILMGVINTPLQFGTPMVMLGRKSITGSFIGSMKETEEMLEFCKEKGLASMIEVIKMDYINTAFERLEKNDVRYRFVVDVAGSKLIP

SEQ ID NO: 10729 - protein, 568 aa, Clarkia williamsonii
MASPALISETEAWKDLKAHLEGIKMTHLRELMGDTERCQSMMLEFDNIFLDYSRQQASPDTISKLYRLADAAHLKQKIDHMYNGDHINSTENRSVLHVALRAPRNLAICSDGKNVVPDVWNVLDKIKDFSDRVRNGSWIGATGKELKDVIAVGIGGSFLGPLFVHTALQTDPEASKNARGRELRFLANVDPIDVARNISGLSPETTLVVVVSKTFTTAETMLNARTLREWISSALGPSAVAKHMVAVSTNIPLVEKFGIDPNNAFAFWDWVGGRYSVCSAVGVLPLSLQYGFAVVEKFLQGAHSIDQHFSSAPFEKNIPVLLGLLSVWNVSFLGYPARAILPYSQALEKLAPHIQQVSMESNGKGVSIDGLPLPFESGEIDFGEPGTNGQHSFYQLIHQGRVIPCDFIGVVKSQQPVYLKGEVVNNHDELMSNFFAQPDALAYGKTPEQLKKENVSEHLIPHKTFTGNRPSISLLLPTLDAYRIGQLLAIYEHRVAVQGFVWGINSFDQWGVELGKSLATQVRKQLHGSRVKGEPVEGFNFSTKTLLTRYLEATSDVPADPSTLLPNI

SEQ ID NO: 10730 - protein, 210 aa, Triticum aestivum
  unsure (1)..(210): unsure at all Xaa locations
MAHRVDNEYDYLFKIVLIGDSGVGKSNILSRFTRNEFCLESKSTIGVEFATRTLXVEGKTIKAQIWDTAXGQERYRAITSAYYRGXAVGALLVYDITKKLSFENINRWLSELRNHADSNIVIMMVGNKSDLNHLRSVQEEEGQALAEKEGLSFLETSALEALNVEKAFQTILSDIHQIISKKALAAQEAAGSGPPTQGTHPSCWRFIPQQ

SEQ ID NO: 10731 - protein, 547 aa, Arabidopsis thaliana
MMKNLPEVGNGGGSGFPAVSVGNKKNKYQRMDSDAEESQNHREAEARNSRTRKYVMACAFFASLNNVLLGYGRFYLYNRILLLLLYFVDLQKDVGVMSGAVLFIQQDLKITEVQTEVLIGSLSIISLFGSLAGGRTSDSIGRKWTMALAALVFQTGAAVMAVAPSFEVLMIGRTLAGIGIGLGVMIAPVYIAEISPTVARGFFTSFPEIFINLGILLGYVSNYAFSGLSVHISWRIMLAVGILPSVFIGFALCVIPESPRWLVMKGRVDSAREVLMKTNERDDEAEERLAEIQLAAAHTEGSEDRPVWRELLSPSPVVRKMLIVGFGIQCFQQITGIDATVYYSPEILKEAGIQDETKLLAATVAVGVTKTVFILFATFLIDSVGRKPLLYVSTIGMTLCLFCLSFTLTFLGQGTLGITLALLFVCGNVAFFSIGMGPVCWVLTSEIFPLRLRAQASALGAVGNRVCSGLVAMSFLSVSRAITVGGTFFVFSLVSALSVIFVYVLVPETSGKSLEQIELMFQGGLERKDGEVELGDAERLVRKEQEF

SEQ ID NO: 10732 - protein, 1074 aa, Ustilago maydis 521
MLAKWIVAFLAVVSVGSEVGYASKVGGRTVEGNGKQRDLFDQMIHSLAGKYMPGLNGGETTGWQWTVHPLPRKRQLSLSPSLFGGNGGDGEDTGSGNALPASILAAVASPSAAASSGGSASASVTGSSDRSTSASPSATNSPTSSVVASTATTPTSSAIPLSRLITSNIPASSTVSTNTGTSTSSSSTTATPTNKDNVTSASLMSPKNKLFPLVVAGLAAAGLVALMLLIAIARCVAHDQLRRDNLRKTYSFDGDCEPKKPDRFTTAPALGAARSVRRALTKKKLGSFARRTQDGSVLIEVGDEVFAVPPHLADSYRERILSEKRSRSDLTSVSDESMGLFGVKPKYLNDGGPDGDEQEARAKYDRMLEEGVENGGVKRGLSQRLGDRLRSLRRAATAQVEEASGGVMERDAYSFATGDQQRGAVRQTDLASRNPVVTSGSTGWHISQRQSSAGIAGIGMANGAAEESAFGTVQVYSRGPAPPRPPVLTRAPPKTTSTSALKNPARRGAPKLELSVLTEKLADLEKQTLASSRLPAEASLTHSSGASAGTAGTFGSTASSTTSGHASESLPGAFPQRTKSLHRAKSVKPPILDSRLGSYRHRSPDAHPRSKSTHNRAQRHTNSVPLASPTRFTHEKQPRLVVHPQKPQPAQSPSSSSSSFRPLPVPPPFTLPKIQSHMLTARRTLTTLVAHVDYKPTYKDLRSHGAELCCDAADALNALGGGNWVLGVNVNEPQGGGGGGGGGAADRRGGVGAPEDGAGGGTRTVRDGGAPNPAAEAIAGGVGRGTADGPVGVCAAATVDAAALGLAVAGGGGGGGGGAVAFRRPAGGAGGGGGASGAPLVGLPAGGAGGAGGGGGAGGASVLGLLGGGGAGGAAQDVVLGRPGGGGGGGAMGTLLAGLTAGGGGGGGGGAPLGAAAAGLLGGGGTPLDGKEGAAADGGGGGPRGGAGRPVAGGGGGGGAAGDDAAGREGGAPPPGRTGGLPRLVLTLEPAPLGLSLGMPPANKPPRPGGPPSAGPPPPDDASPERMMPDAPPPPPPPPPLFGSIDGADRSFVTASVDRKETTTSSGLSQPRKS

SEQ ID NO: 10733 - protein, 446 aa, Methanosarcina acetivorans C2A
MEKDYDIIIIGTGTSGRTFADKVASSGLKTAIIDSREYGGVSPPIGCDPKKMFVDIAEITDWNNRLIGKGAGTQNPLKIDWPSLIEFRRTFTEKCSRKTENHFVELGIDTYHGKAYFENKNTVAVGEDKLKGEYIFLATGAKPRKLNIPGEEYIITSGEFMETEKLPERIIFIGGGHISMEFSHITLKAGSEAIILHRSEKLLKSFDSDMVNFLINESEAAGIKIFTNKPVIAVEKEGNSFLVRAGSESEIRSFRADMVVHGAGRVPYIEELHLEKAGVRVEGGAIEVDKHMRTSNPRIYAGGDCASEGMQLTPVAAYQGEVAAVNILTEDSVEADYKGIPSAVHTMPVLASVGISTVKDSDKYKIIFRDRSSEKTGRSEGADFVASKVIIDEANDRIMGAHILGPNAGEAINIFAAVMRLGLKASDMKKMIFSYPTVCSDIPYML

SEQ ID NO: 10734 - protein, 298 aa, Glycine max
MLKSIVGCCKVYISESRNRTALESIERASKLFPLAPIINKFEDVTYNRVGYTLVSELGHSGPCHLANSVLAMVKAAFDTIDFEVHSGTHPRLGVVDHICFHPLLDASLDQAANAARCLATDMGSTLQVPTYLYGAAHEEGRTLDSIRRIFGYFKPNSSENQWIGGLKSDTLPLNPDSGPSQVTPAKGVVVIGATNWVDNYNVPLLSSDISAVQRIAKRVSGRGGGLPSVQAMALAHGEGVIEVACNLLDPNKVGGERVQQEVENLAREEGISVEMGYYTDFSQDQIISSYLEFFEEKI

SEQ ID NO: 10735 - protein, 401 aa, Haloarcula vallismortis
MMTFQTLDDLDDGQRVLVRLDLNSPVEDGTVQDNRRFDRHAETVKELADRGFEVAVLAHQGRPGRDDFVSLDQHADILADHIDRDVDFVDETYGPQAIHDIADLDSGDVLVLENTRMCDDELPEEDPEVKAQTEFVKTLAGEFDAYINDAYSAAHRSHASLVGFPLVMDAYAGRVMETEYEANTAIAEKEFDGQVTMVVGGTKATDVIDVMTHLDEKVDDFLLGGIAGTVPAAAGHPVGYDIDDANLYDEQWEANSEKIESMLEDHRDQITLAVDLAYEDENDDRAEQAVDDIDEKRLSYLDVGSETLMEYSPIIRESEAVFGEGRAGMFEDERFSVGTAGVLEAIADTDCFSVVGGGDTSRAIEMYGMEEDEFGHVSIAGGAYIRALTRAQLVGVEVLQR

SEQ ID NO: 10736 - protein, 472 aa, Yersinia pestis KIM
MSQNVYQFIDLQRVDPPKKPLKIRKIEFVEIYEPFSETQAKAQADRCLSCGNPYCEWKCPVHNYIPNWLKLANEGRIMEAADLAHQTNSLPEVCGRVCPQDRLCEGSCTLNDEFGAVTIGNIERYISDKAIAMGWKPDMSHVHPTGKRVAVIGAGPAGLACADVLARNGVQAVVFDRHPEIGGLLTFGIPAFKLEKEVMIKRRKIFSEMGIEFQLNTEVGKDITMEALLKDYDPVFLGVGTYQSMRGGLENEEANGVYDALPFLIANTKQLMGYEATAHEPYINMQGKRVVVLGGGDTAMDCVRSSIRQGATDVVCAYRRDEVNMPGSKREVKNAREEGVEFKFNLQPLSIEVNSNGKVCGVRMVRTQLGAPDAQGRRMAEQIPGSEHVLPADAVVMAFGFRPHSMEWLAAHDVKLDKQGRVIAPESTDNAFQTSNPKIFAGGDIVRGSDLVVTAIAEGRKAADGIMNYLEV

SEQ ID NO: 10737 - protein, 213 aa, Glycine max
  unsure (1)..(213): unsure at all Xaa locations
MSRRYDSRTTIFSPEGRLYQVEYAMEAIGNAGSAIGILSKDGVVLIGEKKVTSKLLQTSTSSEKMYKIDDHVACAVAGIMSDANILINTARVQAQRYTFMYQEPMPVEQLVQSLCDTKQGYTQFGGLRPFGVSFLFAGWDKNHGFQLYMSDPSGNYGGWKAAAVGANNQGXQSILEQITRMVXTREEXXELXXKVLSKXLAGXXWXPKXLXXG

SEQ ID NO: 10738 - protein, 357 aa, Populus tremuloides
MGSLETERKIVGWAATDSTGHLAPYTYSLRDTGPEDVLIKVISCGICHTDIHQIKNDLGMSHYPMVPGHEVVGEVVEVGSDVTKFKAGDVVGVGVIVGSCKNCHPCKSELEQYCNKKIWSYNDVYTDGKPTQGGFAESMVVDQKFVVRIPDGMSPEQAAPLLCAGLTVYSPLKHFGLKQSGLRGGILGLGGVGHMGVKIAKAMGHHVTVISSSDKKREEAMEHLGADEYLVSSDVESMQKAADQLDYIIDTVPVVHPLEPYLSLLKLDGKLILMGVINTPLQFVSPMVMLGRKSITGSFIGSMKETEEMLEFCKEKGLASMIEVIKMDYINTAFERLEKNDVRYRFVVDVAGSKLIP

SEQ ID NO: 10739 - protein, 206 aa, Saccharomyces cerevisiae
MNSEYDYLFKLLLIGNSGVGKSCLLLRFSDDTYTNDYISTIGVDFKIKTVELDGKTVKLQIWDTAGQERFRTITSSYYRGSHGIIIVYDVTDQESFNGVKMWLQEIDRYATSTVLKLLVGNKCDLKDKRVVEYDVAKEFADANKMPFLETSALDSTNVEDAFLTMARQIKQSMSQQNLNETTQKKEDKGNVNLKGQSLTNTGGGCC

SEQ ID NO: 10740 - protein, 531 aa, Synechocystis sp. PCC 6803
MNNQQLWQRYQDWLYYHGGLDFYLDVSRMGFSDALVEDLQPKFAKAFQDMVALEKGAIANPDEQRMVGHYWLRNPALAPNDGIRAEITEPLRQIKAFVADVHQGNIKPPTAPKFTDLLAIGIGGSALGPQFVAQALAPNFPPLAIHFIDNSDPDGIDRVLNCLKAQDKLKSTLVVTTSKSGGTPEPRNGLAETKAVFEAQGLHFADYAVAVTMPGSKLSQQAQTEQWLQAFPMQDWVGGRTSELSAVGLLPAALQGIDIQAMLDGAKTMDEATRVRELRQNPAALLALAWYYAGDGQGKKDMVILPYKDRLLLFSRYLQQLVMESLGKERDLDGNVVHQGIAVYGNKGSTDQHAYVQQLRDGVPNFFATFIEVLHDRQGPSLELEPGVTSGDYLSGFLQGTRQALFENQRDSITVTIPEVDATSVGALIALYERAVSFYGSLVNVNAYHQPGVEAGKKAAASILELQKAILSTLQNESGPIALEALATKVQAPEQVETVYKIVRHLAANDRGVTLQGDRQFPQRLQIQWRS

SEQ ID NO: 10741 - protein, 485 aa, Mesorhizobium sp. BNC1
MLKKTSHFLREANFIAGEWVNADSGATIEVINPATRQTIGTVPKCGRAETRRAIEAAQEAFQSWKKTSANDRAKLLRKLHDAIMDNQDALAELLVMEQGKPLAEAKGEVGTSAAYILWFAEEGRRIYGDIVPAPWTDRRILVTKEPVGVIGAITPWNFPSSMLARKLGPALAAGCTTVAKPASQTPYSGLAWGVLAEEAGFPKGVVNIVTGSASEIGDELTENPLVRKITFTGSTEIGKLLMEKAAGTVKKVSMELGGNAPFLVFDDADLDRAVKGAMIAKYRNAGQTCVCTNRFFVQDGIYDRFLEKFVEASRKLKVGSGLDEGVEQGPLIDGGAVEKVEELIADAVSKGGKVVTGGKRHALGGSYFEPTVIAEATPQMRFMEEEIFGPVAPVFRFKDEADGIRMANDTSFGLACYFYTSDLGRAFRVMEGLKYGLVGVNEGLITTVEAPFGGLKESGLGKEGGRQGIEDYLDTKYVCIGGLGL

SEQ ID NO: 10742 - protein, 180 aa, Zea mays
LSCANFGKCKCRRLEGKVAVITAATLGIGYAVAERLGHEGAHVVISSRYLSQVDAAVAELTKQGIAVTGLTCHVGNEPDRQKLFKLVEEKFGGFDILVSNAAVNPFFGNILDTSEDSWQKIFDVNVKSTFLLIKEAIPLLEKKGGGSIVIVSSQGGYEVNPVIAAYSISKTALLGLVKGL

SEQ ID NO: 10743 - protein, 453 aa, Emericella nidulans
MTSNGTNGSATAYHASSTQEAIQAENDFAAHNYHPLPVVFARAQGTSVWDPEGRHYLDFLSAYSAVNQGHCHPKLVAALVDQASRLTLSSRAFYNDVFPKFAEMVTKYFGFDMVLPMNTGAEAVETGIKIARKWGYKVKGIPENEAIILSAENNFHGRTMAAISLSSDPESRENYGPYVPNIGCTIPGTEKPITYNDKAVREAFEKAGSNLAAFLVEPIQGEAGIIVPDDDYLQLARSLCDQHNVLLICDEIQTGIARTGKLLCHEWSGIKPDMVLLGKAISGGMYPVSCVLGRKDVMLTVEPGTHGSTYGGNPLACAVAIRALEVVQEENMVERAEKLGQAFRSGLEAIQNPIIQTVRGKGLLNAIVIDESKTNGHTAWDLCMLMKEKGLLAKPTHQNIIRLAPPLVITEEEIAKALEIIKAAVAELPNLKGAAEDKVVPPPEKKVKITLEN

SEQ ID NO: 10744 - protein, 373 aa, Chloroflexus aurantiacus
MARHSQHLKPESWLVAAGRTIEAGAPLNVPPIPASNFLIGQGRSYARNDATPTWEAVEEIVGGLEGGRAVAFASGMAAIAAVFDQLPAGAQVVLPDDCYQGVTGLAMAGEARGRWSVRRLALTDTEGWQQACAVADLVWLESPSNPLLVVADLPAICAAPRKPGTIVAVDNTFATSLNQQPLEFGATLSIQSATKFIGGHSDLLAGVVTTRDEQLWHDLRRSRELTGATPGAFEAFLAARGARTLALRLERAQHNAMELAQRLSHHPLVSCVRYPGLPTHPTHAIACRVLKGFGTIISFDLRGDATFADAVCRNVSLIRHATSLGAVESTMERRAAIAGQEHLPPTLLRLSVGIEDVDDLWADLDGAIRRAAQ

SEQ ID NO: 10745 - protein, 611 aa, Arabidopsis thaliana
MASLSGLYSSSPSLKPAKNHSFKALPAQSRDSFSFPHTSKPTNLPLTLSSARSVARDISHADSKKELLKDPDALWKRYLDWFYQQKELGLYLDISRVGFTDEFVAEMEPRFQAAFKAMEDLEKGSIANPDEGRMVGHYWLRNSKLAPKPTLKTLIENTLDSICAFSDDIISGKPPSSPEGRFTQILSVGIGGSALGPQFVAEALAPDNPPLKIRFIDNTDPAGIDHQIAQLGPELASTLVVVISKSGGTPETRNGLLEVQKAFREAGLNFAKQGVAITQENSLLDNTARIEGWLARFPMYDWVGGRTSIMSAVGLLPAALQGINVREMLTGAALMDEATRTTSIKNNPAALLAMCWYWASNGVGSKDMVVLPYKDSLLLFSRYLQQLVMESLGKEFDLDGNTVNQGLTVYGNKGSTDQHAYIQQLRDGVHNFFATFIEVLRDRPPGHDWELEPGVTCGDYLFGMLQGTRSALYANGRESISVTIQEVTPTSVGAIIALYERAVGLYASIVNINAYHQPGVEAGKKAAAEVLALQKRVLSVLNEATCKDPVEPLTLEEIADRCHAPEEIEMIYKIIAHMSANDRVLIAEGNCGSPRSIKVYLGECNVDDLYA

SEQ ID NO: 10746 - protein, 140 aa, Triticum aestivum
  unsure (1)..(140): unsure at all Xaa locations
MAPTVMASSATSVAPFQGLKSTAGLPVSRRSNGASLGSVSNGGRIRCMQVWPIEGIKXFETLSYLPPLXTEALLKQVDYLIRSKWVPCLXSTSWVHLPVEHNASPGYYDXRYWTMXELLCFGCTDAXQVXNEVEEVKKDT

SEQ ID NO: 10747 - protein, 175 aa, Glycine max
  unsure (1)..(175): unsure at all Xaa locations
ASSMISSPAVTTVNRAGARMVAPFSALKNMDGFPTTNTNNDITSIGINGGTPQCMQEWPTLGYKKYDTLSYLPDLDDALLTKEXKYLLKNGWIPCLEFQLEHGFAYRDHDRSPRYYDGRYWTMRNLPMFGCTDAYHVIKDLQEVNTVYPNGFIRIIEFNNFLQEQRISFIAYKTP

SEQ ID NO: 10748 - protein, 312 aa, Moritella sp. 2D2
MKVAVLGAAGGIGQALALLLKTQLPAGSELSLYDIAPVTPGVAVDLSHIPTDVTITGFSGIDPTAALVGADVVLISAGVARKPGMDRSDLFNINAGIIKNLASKCAEVCPTACIGIITNPVNTTVPIAAEVLKQAGVYDKRKLFGITTLDVIRSETFVSALKGISLADVAVPVIGGHSGATILPLLSQVKGVEFTAEEIATLTTRIQNAGTEVVEAKAGGGSATLSMGHAAARFGLSLVRALQGEKGIVECTYVDGGSEHATFFAQPVLLGKNGVEEVLAYGDLSDFETNARDAMLEELKANITLGEEFVAG

SEQ ID NO: 10749 - protein, 480 aa, Triticum aestivum
MASTAAPPAALVARRAASASVAAPLRGAGLAAGCQPARSLAFAAGADPRLAVHVASRCRAASAARGTRAVATMAKKSVGDLTAADLEGKRVLVRADLNVPLDDNQNITDDTRIRAAIPTIKYLLSNGAKVILTSHLGRPKGVTPKFSLAPLVPRLSELLGIEVKKAEDVIGPEVEKLVADLANGAVLLLENVRFYKEEEKNDPEFAKKLASLADLFVNDAFGTAHRAHASTEGVTKFLKPSVAGFLLQKELDYLDGAVSNPKRPFAAIVGGSKVSSKIGVIESLLEKCDILLLGGGMIFTFYKAQGLSVGSSLVEEDKLELATSLLAKAKAKGVSLLLPSDVIIADKFAPDANSQTVPASAIPDGWMGLDIGPDSVKTFNDALDTTQTIIWNGPMGVFEFDKFAVGTESIAKKLAELSKKGVTTIIGGGDSVAAVEKVGVADVMSHISTGGGASLELLEGKELPGVVALDEGVMTRSVTV

SEQ ID NO: 10750 - protein, 440 aa, Mesorhizobium sp. BNC1
MTYILHRQIHGQLPVAAGGRGVKLFDSAGKEYIDASGGAAVSCLGHNHPDVVAALKRQAEKLAYAHTSFFTNEPAEALAERLVKAAPEGISHAYLVSGGSEANEAALKMARQFFVEKGEAQRRHIIARRQSYHGNTLGALAAGGNEWRRAQFRPLLIETHHIDPCYAYRYRQQGESDEEYGLRAAQQLEDKILELGPDTVMAFIAEPVVGATAGAVPAVSGYFKRIRDICDRYGVLLILDEVMCGMGRTGTLFACEEDGVSPDLVSIAKGLGGGYQPVGAVLLSRQIFDAFAQGSGLFQHGHTYICHPMACAAALAVQEVIERDNLLANVREMGSYLRARLEARFGNHAHVGDIRGRGLFLGLELVADRATKEPFDPARKIHAGVKKEAMARGLMVYPAGGTIDGARGDHVLLAPPFILDKETADTIVDRLGEAIDAALG

SEQ ID NO: 10751 - protein, 335 aa, Mesorhizobium sp. BNC1
MMLNSSFPGCIFWGPDFISIYNDAFKPILGEKPKALGRPLREVWSEIWPTVGPIAQKAYRGEATFSEDFPVVINRHGYPEEAWFTFCYSPVRDEKGHIAGILATVSETTNKVRAEQKLHLLNAELSHRMKNLLAMVSGLAGQTLQFAASKEEAHRTLVQRLSVLAEAHSVFMEGRRSRAPMRAVIERALSPFRSGRGRISIDGAPLDLSDKQALSLALAIHELATNSIKYGALSAPAGEVAICWKAGDVGTEDEFKLVWIEKGGPPAKEPLRAGFGTRLIGEVLAADFRGKVSLTYPPEGFRCELATRMRELDSPDSPESDPRLLAPAPSVPATH

SEQ ID NO: 10752 - protein, 298 aa, Mesorhizobium loti MAFF303099
MKKIRKAVIPVAGLGTRFLPATKSMPKEMLPVVDRPVVQYAVDEAFEAGIEHIVFVTGRNKAVIEDYFDLHPELIGTLEQTGKKTQLEALESMLPVAGATSFIRQQSPQGLGHAVWCAREVIGNEPFALLLPDMVSFGGRGCLAETVDLYERTGGNVIAVERCDPSETNKYGIVGRGADIGGGFEVTAMVEKPAPANAPSNFYINGRYILQPEIFALLGNQQRGAGNEIQLTDAMVRLSKDQPFFAQPFLGRMFDCGSKEGFIQANIAFALARNDMKGPVFEMLQEFVRSHERQEEAA

SEQ ID NO: 10753 - protein, 488 aa, Zea mays
  unsure (1)..(488): unsure at all Xaa locations
MMAASGAYAAQLPAVPEWLNKGDNAWQLTAATLVGIQSMPGLVVLYGSIVKKKWAVNSAFMALYAYASSLLVWVLAGFRMAFGERLLPFWGKAGVALSQGYLVRRASLSATAHGATPRTEPLYPEATLVLFQFEFAAITLVLLAGSVLGRMNIKXAWMAFTPLWLLFSYTVGAFSIWGGGFLYHWGVIDYSGGYVIHLSSGIAGFTAAYWVGPRLKSDRERFSPNNILLMIAGGGLLWMGWAGFNGGAPYAANIAASVAVLNTNVSAATSLLTWTCLDVIFFGKPSVIGAVQGMMTGLVCITPGAGLVQTWAAVIMGVFAGSVPWFTMMILHKKVALLTRVDDTLGVFHTHAVAGLVGGVLTGLLATPELLEIESPVPGLRGAFYGGGIRQLGKQLAGAAFVVAWNVVATSLILLAIGLLVPLRMPEDQLMIGDDAAHGEEAYALWGDGEKFDATRHDAVRVAGGMDREGSAEQRLSGMGARGVTIQL

SEQ ID NO: 10754 - protein, 355 aa, GIBBERELLA ZEAE PH-1
MSTQQKFEGWVAEKSTKEQDLVWKEYEMKPFEDTDIEIRITHCGVCGTDDHISKNGWGSTKYPIIVGHEIVGVATRIGSKAEGDIKEGDIVGVGAQSDACFERDGPCEECANGLYNYCSKNTPTYGGVHWCGTPSTGGYARYHRCPSRFVVKIPQGLAPELAAPMLCAGATMYAPLNYFGATGRKVAIIGIGGLGHFGIMFAKALDAAEVVAISRGSDKKGDALTLGADEHIATSEEGWAEKNKRRFDLIINTADGSNMPWNEYLGLLRVDGTMVSVGAPEKPIPINIFSLLPIRGRFTSTSVATPNEVRDMLQLAADKSLKPWVEERPMREANEALKDLQAGKPRFRYVLVNED

SEQ ID NO: 10755 - protein, 201 aa, Zea mays
  unsure (1)..(201): unsure at all Xaa locations
MEISSSVDCGQEKEQPTNKRPRSESTTESSTKASREKIRRDKLTERYVXLILGNWGAILEPGKTPKMDKQLXLSDAIRGXXVRLRXEAKKLKDFNENLQEKIKELKXAEKNELRDEKQKXLKAPERRAWEHQIQXLNGPAKPRTTPPPVIPSPLRSLAPPGAQQPPPGHKADDGLVIGYPXIPRGWQFMPPXSDVDTSDDP

SEQ ID NO: 10756 - protein, 321 aa, Glycine max
MDGDGEELTAQETALYDRQIRVWGADAQRRLSKSHVLVYGMKGTVAEFCKNIVLAGVGSLTLVDDRAATEEMLSSNFLIPPDENVYSGKTLAELCCNSLKDFNPMVHVSVEKGDLSSFDVEFLSKFDVVVVSCCTLSAKKLANDKCRKLSKRVAFYAVDCRDSCGEIFVDLQDYKYSKKKQDETVKCDLKYPSFEDALSVPWRALHRRMSKLYYAMRVIEKFEEAEGRSAGEVSIADLSGVLKLKKEICTAQSLNESHVPDTLLERLVTNAIEFPPVCAIIGGILGQEVIKAISGKGDPLKNFFFFDAFDGKGIIEDLSPK

SEQ ID NO: 10757 - protein, 540 aa, Bordetella parapertussis 12822
MSNIVEIKVPDIGDFKEVEVIEVLVSAGDTIKAEQSLITVESDKASMEIPASAAGVVKSVKVKVGDKIAEGTVILEVEAAGEAAAAPKAEQAPEAAEAPKADAAKAEAPAAAGPIEVKVPDIGDFKEVEVIEVLVAEGDTIKAEQSLITVESDKASMEIPASAGGVVQSLKVKVGDKVAMGTVIAVVQGQGAAAPAAKAEAPAAAEPAASASASAPAPAQRPAPAAALQDEDLKPGQLPHASPSVRKFARELGVNLSRVTGSAAKGRITADDVRAYVKQALSAGAPAGASGGGDGAALGLLPWPKIDFTKFGPIEAKPLSRIKKISGANLHRNWVMIPHVTNNDEADITDLEALRVALNKENEKSGVKVTMLAFLIKAVVAALKKFPEFNASLDGDNLVLKQYYHIGFAADTPNGLVVPVVRDADKKGILELARETSELARKAREGKVSPAEMQGGCFSISSLGGIGGTHFTPIINAPEVAILGVSRSAHKPVWDGKQFVPRLTLPLSLSYDHRVIDGASAARFNAYLGQLLADFRRIAL

SEQ ID NO: 10758 - protein, 77 aa, Zea mays
  unsure (1)..(77): unsure at all Xaa locations
MGIGTVSDELMGTFVPIAVYWLYSGLXVALDGVGMDDYRLHPKGEEEAKNIVSRSTVVRGVLVQQAFQIAVSLLLFT

SEQ ID NO: 10759 - protein, 392 aa, Deinococcus radiodurans R1
MKAIVWQGVNKVGVETVPDPTLLLPTDAIVKITSTAICGSDLHLLDGYIPSMETGDILGHEFMGEVVEVGSEVRKLKVGDRVVVPFNIACGVCDPCKRGFFSACDNSNPNHRMAEALYGATSGGALFGYSHMYGGYAGGQAQYVRVPFADVGPFKIESGLKDEQVLFLTDIFPTGYQAAEQCNIVPGRDVVAVFGAGPVGQFAARSAQMLGAAHVIVIDRVPERLAMAEAAGCQTINYEKEDVLLSLREATGGRGPDHVIDAVGMEAHGHGPGSTMDKVQQNLKLTFDRITALRWAILSCAKGGTVSMPGVYGGLVDKMPIGAAFAKGLIFRMGQTHTHRHIPSLLGRIEAGQIDPSFVITHRASLDQAPELYKTFRDKQDCCIKVVLNPWA

SEQ ID NO: 10760 - protein, 591 aa, Bordetella parapertussis 12822
MSNIVEIKVPDIGDFKEVEVIEVLVAAGDTIKAEQSLITVESDKASMEIPASSAGVVKSVKVKVGDKVAEGTVILDVEAAGEAAAAPKAEAPKAEAPKADAPKAPAAKASAPAAAAYSGSADLECDMLVLGAGPGGYSAAFRAADLGMDTVMVERYATLGGVCLNVGCIPSKALLHNAAVIDEARALAAHGISFGEPKVDLDKLRGYKDGVVAKLTGGLAGMARACKVRVATGTGEFADPHHLTVTDGEGKKQTIRFKQAIIAAGSQSVKLPFLPDDERIVDSTGALQLRAIPKKMLIIGGGIIGLEMGTVYSTLGARLDVVEMLDGLMQGADRDLVKVWQKMNAPRFDNIMLKTKTVGAEARKDGIYVSFEGEGAPKEPQRYDLVLQAVGRSPNGKKIGAERAGVAVTERGFIEVDRQMRTNVPHIYAIGDVVGQPMLAHKAVHEGHVAAEAAHGEKSFFDARVIPSVAYTDPEVAWVGLTEDEAKKQGVKVEKGLFPWAASGRAIANGRDEGFTKLLFDAETHRIVGGGIVGTHAGDLISEIALAIEMGADMVDIGKTIHPHPTLGESVGMAAEVAEGVCTDLPPMRKK

SEQ ID NO: 10761 - protein, 385 aa, Arabidopsis thaliana
MFIEKLKKKGTNASLRNRDEETADKQIQFNDQSFGGNDYAPKVRKPYTITKERERWTDEEHKKFVEALKLYGRAWRRIEEHVGSKTAVQIRSHAQKFFSKVAREATGGDGSSVEPIVIPPPRPKRKPAHPYPRKFGNEADQTSRSVSPSERDTQSPTSVLSTVGSEALCSLDSSSPNRSLSPVSSASPPAALTTTANAPEELETLKLELFPSERLLNRESSIKEPTKQSLKLFGKTVLVSDSGMSSSLTTSTYCKSPIQPLPRKLSSSKTLPIIRNSQEELLSCWIQVPLKQEDVENRCLDSGKAVQNEGSSTGSNTGSVDDTGHTEKTTEPETMLCQWEFKPSERSAFSELRRTNSESNSRGFGPYKKRKMVTEEEEHEIHLHL

SEQ ID NO: 10762 - protein, 162 aa, Cichorium intybus
VQQLESSRMKLSQLEQELQRARQQGIFISSSGEQSQSTSGNGASSFHVEYSRWLEEQNRRISELREAVSSHAADGELRLIVDGVITHYEDIFRIKNDAAKADVFHILSGMWKTPAERCFLWLGGFRSSELLKLLITQLEPLTEQQLLAINNLQQTSQQAEDA

SEQ ID NO: 10763 - protein, 180 aa, Cichorium intybus
NREAARKSRLRKKAYVQQLEASRLKLLHLEQELEQTKAQAALLSGGVNASHLGLPGTTNSGIAAFEMEYEHWVEEQNKKTNALKTALHAPLPDTELDVLVKDTLNHYANLFTIKATAAKVDVCYLISGMWKTSTERLFLWIGRFRPSELLKVLVPQLKLLDQQSHDLCNLIQACQQAEDA

SEQ ID NO: 10764 - protein, 452 aa, Coxiella burnetii RSA 493
MNTSTPQIIKNVVNLALPMAGSRLIQMLSGFIGMLMLARLGHSILAASMLMTSTQVTIIVIFISLLFSMSVVVGQAYGAKKYDEVGVILQQGCILALILSIPLIILFLVADRILLALGQLPELVIYVKHYFRALIWGTPGFVLLAALQQALYGMSRQRIVILANLFCLGVFVLSAYVLVFGHLGISAQGVTGVPYAFAIQAYLNIIILLFCFYYQKQFKPMGIFKWRSHQRWRYLKQLFQIGWPMCMQFGGELMAFFVISIMIGWLGKNELAAAQVTQQCLFLFVVPMFAVAEATGIMVSHAVGGKQYQSVKRIGEISLIIAMILVSVAALIFLAFPEFLASLYIDVKAPQYTHMIHLIKILFILVAFSITFDTLRNVASGALRGFYDTRFAMWAGLGAMWIISVPGGYLLGVVFHYGVIGFRIASAFAFLIGALLVLWRWRERVKEYSQLP

SEQ ID NO: 10765 - protein, 510 aa, Zea mays
MMIARRLLRSNNAPAQASSLLKHVTGTASLQGYADSLLGATVRHFGSAPSAQPEENGFKGHGMLAPFTAGWQSNDLHPLIIERSEGSYVYDINGNKYLDSLAGLWCTALGGSEPRLVKAATEQLNKLPFYHSFWNRTTKPSLDLAQEILSMFTAREMGKVFFTNSGSEANDSQVKLVWYYNNALGRPNKKKFIARSKAYHGSTLISASLTGLPALHQKFDLPAPFVLHTDCPHYWRYHLPGETEEDFATRLATNLENLILKEGPETIAAFIAEPVMGAGGVIPPPKTYFDKVQAIVKKYDILFIADEVITAFGRLGTMFGCDYYNIKPDLVSLAKALSNAYVPIGATLVSPEISDVIHSQSNKLGSFAHGFTYSGHPVACAVAIEALKLYRERDIPGHVKQIAPKFQDGIRALADSPIIGEIRGLGMIMGTEFTNNKSPTDLFPAEWGVGAIFGEECQKRGMLVRVAGDAIMMSPTLIMTPGEVDELVRIYGEALKATEERVAALQSKKN

SEQ ID NO: 10766 - protein, 406 aa, Oryza sativa
  unsure (1)..(406): unsure at all Xaa locations
QRNGVMECSVCHSKVVAPSPRSVSRAYDKHRSKISSKYRALNFLLVSGDCILVGLQPILVFMSKVDGKFQFSPISVNFLTEVTKVIFAIVMLIIQSRKQKVGEKPLLSLSTFVQAARNNALLAVPALLYAINNYLKFIMQLYFSPATVKMLSNLKVLVIAILLKFIMRRKFSIIQALALLLIGISVNQLSSIPDGTKSFGLAVTTIAYIYTLIFVTVPSLASVYNEYALKSQFDTSIYLQDAYXNLFLYGYGAIFNFLGILGTVIFQGPESFDILRGHSRATMFLICNNAAQGILSSFFFKYADTILKKYSSTVATIFTGLASAAFLGHTLTVNFLLGISIVFISMHQFFSPLAKVKDDKPAGALEPEDAQNHRSSDSSFVNMTAGAADDASHLTATDERKPLLPI

SEQ ID NO: 10767 - protein, 492 aa, Mycobacterium bovis AF2122/97
MSFVIAVPEFLSAAATDLANLGSTISAANAAASIPTTGVLAAGADDVSAAIAALFGAHAQAYQTISAQAATFHAQFVQTLSAGAGAYANAEAANVQQSLLNAINAPTQALLGRPLIGDGADGTAPGQNGGAGGLLYGNGGNGAAGVNAGIAGGSGGAAGLIGNGGSGGAGGAGAAGGSGGQGGLLYGNGGAGGNGGAATIPGGNGGAGGAGGNAWLFGNGGAGGLGAAGAAGAAGVNPLTVPAGQGSMGNNGEPGGPASQAPSSGKPVAPVALAVLACPLAGPAGPAETVAPARPAAPGGPAGPAALAVGVGSWSATAAQVASGAQGAKAASAPGAAPAVRAEWAAPGNQALGVTLVTGVTAGSAVTAAPAETAARAARAARAACSASPVAPGWAVPPVAGVMAGAVVSPVWPAPRALGLRAVAATATSASSALKVHPASPASRASPVDIVAAGPSAPRRLLEQLPSVTGPVEALARVEFCGQGVDLIAELG

SEQ ID NO: 10768 - protein, 60 aa, Glycine max
GVCLGAVTWAPLFAWFSSAETEVGRIFTVSCNAFIDSVIDQIVNGLFYEGDDPTDWPDEP

SEQ ID NO: 10769 - protein, 219 aa, Brassica napus
MSSDEEGGEEYLFKIVIIGDSAVGKSNLLSRYARNEFNAHSKATIGVEFQTQSMEIEGKDVKAQIWDTAGQERFRAVTSAYYRGAVGALVVYDISRRSTFESVARWLDELKTHSDTTVARMLVGNKCDLDNMRAVSVEEGKALAETQGLFFMETSALNSTNVKTAFEMVIRDIYANFSRKQLNSDMHKTELKWNSRVSLVKDDNKGSKQGSGFSCCSSS

SEQ ID NO: 10770 - protein, 425 aa, Helicobacter hepaticus ATCC 51449
MVYIEAIDAQEVMDSRGNPTVRAAVRLSDGTRAAAIVPSGASTGKREALELRDGDKERYLGKGVLKACANIKTEIAAQLDGVSPYDQSKIDLILKKIDGTENYSELGANATLGVSMAIARASAQSLRLPLYRYLGGSNALTLPTPMLNIINGGSHADNTVDFQEYMIMPLGFDTFAESLRASAEIYHHLKAILKGSGHITSIGDEGGFAPNLKNNEEPIEIILKAIEQAGYKPLDEIAIALDVASSELVDENGMYHLAGEGKVLDSAGMIAYYENLVAKYPIVSIEDGLSEDDWEGWKLLTQKLGNKIQLVGDDLFVTNKKILQEGIEKNIANAILIKPNQIGSVSETMQSVRLAQRNNYKCIMSHRSGESEDTFIADFAVALNTGEIKTGSTARSERIAKYNRLLEIEREISDAEYIGKTLFKR

SEQ ID NO: 10771 - protein, 129 aa, Zea mays
  unsure (1)..(129): unsure at all Xaa locations
MSSLQEAISVPWNSIPMNTARSYSAMRVLEDHELSEGRNPGXTALSDIDAVLARRMDMRDKMSLNESRMTTTLEERLLXSGKTEHAPVCAILGGIVGHEAIKSISCKGDPCMNLFYIDVADGKSVIDDI

SEQ ID NO: 10772 - protein, 467 aa, Mesorhizobium sp. BNC1
MVMTALATGASAPPVNLWLSEARATLSLAWPMILTNLAQTAMTMTDVMMLGRLSPEALAAGTLGHNLYFMLVIFGLGLLAAASPMMASAIGRKLRYVRDVRRTARQGLWLALVISVPIWLILWNTESILLAMGQDPALSRGAASYMNALQWAALPFFGYIVLRSFISALERPGWALLVAFICVGFNVLANWCLIYGNLGFPALGLQGAGLATTLSSIFMFLGLVAVVTLVRQFRRFSLFGRLWRSDWPRFKAMLRLGLPIAGILTFEVSIFNIAALLMGLIDAVSLAAHAIAIQIASASFMVPMGLGQAVTVRVGRAYGARDAEAITRAGWTAFVMGVSFMGMMALLMYFAPRLLIAGFLDLNAPENQPVISTAVTFLAFAALFQIADGAQAVGSGMLRGLHDTTVPMIYAALGYWGIGLPLSIVLGFPLGYRGVGIWTGLCAGLAVVAVMLLWRWLRREKLMPFSA

SEQ ID NO: 10773 - protein, 430 aa, Helicobacter hepaticus ATCC 51449
MANLSHHNLSQDTLALHAGYTYDTQRTISVPIYQNTAYSFESLEQAAARFGLQEIGNIYTRLSNPTTDVLGARLAAVEGGIFGVPTASGSAAIFYAIVNCAQSGDNIVFSNKIYGGTQTLFVHTLKRFGIQTKVFDIDNIESSLESVIDDKTKAIFFESISNPQISIADTEKITAIAKKHKIISICDNTIPTAFLHKPFDYGVDISIYSLSKYINGQGSALGGAIIERYGLNELIKDNPRYEVFNTPDASYHGLIYANLPLPCFSIRLITEWLRNIGATLSPQASWIILQGLETLELRIKKHSQNALKVAEFLQSHPKVQSVAYAGLTSNPYNRLLQKYYKDSQASGLISFEAQSFEEAQKICNATEIFAVVVNIGDSKSLIIHPASTTHSQLNADELSSAGITPCTIRLSIGLESADDLIQDLKKALEK

SEQ ID NO: 10774 - protein, 563 aa, Deinococcus radiodurans R1
MFCPQWKFTFLINQRPCAAGQLSRRGFAPSFAAFSGAAMSDIEALKKELPPFQIFDLIPQYAAAGQIDPEKIDLLKWAGVYPQRPQEDGFLMMRVKVPTAELHTDALRVVAGISEDFGRGLLDVTDRQAFQFHWLRIQDIPEILDRLETVGLHTKGACGDTVRAVIASPLAGLDAREKIDVRPLAAAMEGTLSGNHDFEDLPRKFKISITATPELEGIHLINDIGFLAHEVDGEIGFDVWVGGGLGAVPHLAERLGVFIRPDEVVEVGRAIVGAYRDHGYRVNRKKSRLKYLIKDLGPAKFREIVETEYLGRPLRDGPSAPVARFGGSDVLGVNPQKDGLNYVVLTTTVGRITPEKARRLADLAEQYGNGYLRTTAFQNMMIPNVPDEHVGALVAELQELELAPKATLRGTTIACTGTQFCRLAQTETKARVAGMIDVLEPRHNDLDVPFVINLTGCSNACTRYQVADLGFMGALRANKETGGEDEVYNVHLAGSIGQAQRTGTKLRGIVPAERLTEYTDRVISDFKANKTPGESFVEYADRVGADRFVPDTVLDGGKELVNA

SEQ ID NO: 10775 - protein, 740 aa, Pleurotus ostreatus
MSSVTAAAKQAVSSITDNAKMASLTQFRVECGPSQRMTTDQGLHVADTDNCNSNVGPALLEDHIAREKIMRFDHERIPERVVHARGAGAHGYFKAYDSSAEQWTKAKVLMDPSRTTPVFVRFSTVQGSRGSADTVRDVRGFAVKFYTEEGNWDIVGNNIPVFFIQDAIKFPDIIHAVKPEPHNEVPTGQSAHNNFWDFVGLQPESAHMIMWVMSDRAIPRSYRMMQGFGVNTYTLLNATGEKHFVKFHWIPELGVHSLVWDEALKIAGQDPDFHRKDLNEAIESGAYPKWRLALQVISEKDEHNFDFDILDATKIWPEELVPLHFVGEMVLNKVVDEYFAEVEQVAFCTSNIVPGIGFSDDPLLQGRNFSYLDTQLSRLGINWQQIPINRPVCPVMNFQRDGQMQMKIHKGTVNYWPNRQEAVQPVAVSEGGYDDHVRKISGIAQRMRGPKFNEHYSQAQLFYNSLSPTEQTHLQSALAFELSHCEDPAVYRNYINILNNIDYQLAKYVAVAVGGDVPDASAKPNEGNKSARLSQVYYAPKEPTIKGRRIAILLADGFDKAEVVAIKALITSASANAFVIGPRRGKVYAAGEKIGVEGGGIDADHHFEGQRSTMFDALVIPSGEHVALLMKSGRAVHWLREAFGHCKAIGAVGEAILFVQQAINLPEVQYADPTDSSMEVVASYSVVTTAHYGVSTAIGDATKMTLNIGEKGFMERFAYEVSKHRCFKREEDGLTARIAY

SEQ ID NO: 10776 - protein, 417 aa, Oryza sativa (japonica cultivar-group)
MAPTTTCQRILLLLLLLLLLAIARPASSQLFTPAPPPPVQAADGGGSAGFNVATSLLFVGVVIALFLLGFFSAYLRRCSEAATAAHRLRGGGGGGAVHASAAVAAAAAAAFAGSAGRRRGRAGLDVAAMEALPVLTYATARAVKAGRGALECAVCLAEFADGGEKLRLLPGCCHVFHAACIDVWLAAHVTCPVCRADLADPAVAAAGHVLAADLAAQAEAPNHTVVNVDTPESTIGKDSPSDQQPPESLTAEERVDRYTLRLPERLKREIEEAKLLRRSVSAVTAPAAASSGRWASAASRTMSAARPSRRWSALLRALSGPRYSDMDGGGGGGRRVAPLQTHGATGTSHGEGEDVEVVVVHGDAGTDVEKYYAHSLTFAGFVIDGDVAAGDWNPEVFQVSTAVPAAAGATAMKCNSY

SEQ ID NO: 10777 - protein, 550 aa, Schizosaccharomyces pombe
MSFCLASTLPAWEVVQTHYESVGKHLVLKELFAKDSSRFEKFSFTFNGLKEEDGPILFDFSKNLITEETVELLVKLAKEANVEGLRDALFAGEHINFTEDRAVFHPALRNVSEKPMKVNGQDVMPGVRKVLRHMKEFSDAVRSGAWKGYTGKPIKSIVNVGIGGSDLAPVMVTEALKPYGQENLELHFVSNIDGTHLSEALKKCDPETTLFLIASKTFTTAETCTNAKSAKDWFLASAKDPSHVAKHFVALSTNEKEVTAFGISAQNMFEFSDWVGGRYSVWSAIGLSVALYIGYENFEAFLSGAHAMDEYFCSTPLEKNIPALAALISIWYSDFFGAQTHLVAPYDQYLHRFPAYLQQLSMESNGKAITRSGDMVNYTTGKILWGEPGTNSQHSFFQLIHQGTKLIPADFLIPIESHNPIDNNKHHRMLFSNFAAQTEALMLGKTPAEVKAEGTPDEIVPHKTFVGNRPSNSIIAKKITPASLGALIAFYEWVTFTEGAVWNINSFDQFGVELGKKLVKNVLAQLETKGDVENHYSSTNGLINLFKNGF

SEQ ID NO: 10778 - protein, 305 aa, Chlorobium tepidum TLS
MKAFVFPGQGSQYCGMGRDLYERFPEAQELMDKADSILGFSITNIMFNGSEDELKQTRYTQLAIFLHSFAAATLLGREGVKMAAGHSLGEYTALCFSGAISFEDAVRLVAKRGELMQNAGQQNPGTMAAIIGMADDALDALLEEASASGIVQAANFNSPGQIVISGDVDAVRKAVELASSKGARMAKELVVSGAFHSPLMKPAEKEFAETLDTIAIRDAEIPVCMNVVAKPVTAATEIRANLISQLTSSVLWSQSVQAMVDAGITEFVEVGPQKVLQGLIKRISKSTMCSGVDTADQVDAMRTPA

SEQ ID NO: 10779 - protein, 239 aa, Kineococcus radiotolerans SRS30216
MYGSRAGENLLRSGAAELLGTFVLVLAGGAVAVGAGTTDPPVYDLLAIVLAFGLALTALVAALGHVSGCHLNPAVTLGLAVTRKFPWRAVPVYVVAQLVGAVLASLATWAVHTGRGREVANLSTTLPAPGVSDGRAFFVEALITFVLVLVVISVATDDRVPAAAAPLAVGAALAVCIFIAAPVTGGAVNPARAFGPAVVSGNLDALWLYLLAPVVGGVLAAVVYDRLLAPAQAPTPEDD

SEQ ID NO: 10780 - protein, 632 aa, Coxiella burnetii RSA 493
MCGIAGIFNLNGKPVAFDQIKAMTDSIAHRGPDGEGQFTDKYIGLGHRRLAIIDLSPAGHQPMQTKDGRYLITYNGEVYNFKILRKELETLGYSFFSNTDTEVVLNAYVQWGEKCLEKFNGMFAFAVWDRKEKTLFLARDRYGIKPLYYYQTNDCFVFASEIKAIIASGLYGAEINKEALVEYLTFQNFFTDRTLFKDVRIMPAGHFMMVKRENSSLHQYWDFNFTNDSALSEKMLLEKINDLFQQAVNRQLVSDVPVNSYLSGGVDSGSITMIAAKQLPHIRTFTVGFDLSSASGLELAFDERQAAEHLSYLAGTEHYEMVLKAGDMERCMQDLVWHLEEPRIGQSYPNFYAAKLASKFGKVVLAGTGGDELYAGYPWRYLCGQSSENFEDYIDKYYQYWQRLMSNKNLFKVLAPIAEEVKSIWTRDIFANVFRIKDTPIKTEDYINYSLYFEAKTFLHGLLVVEDKLSMAHGLETRVPCLDNDFVDFALQVPVKYKLSDFAFERVNENDTFSKREKRMNGKKILRKMMSRYVPDNVAHAPKQGFSAPDASWFKGESIEFVRSLLGDRNAKIFELLDYSVVNHLVNDHIQNHHNHRLLIWSLIYLEIFMQVHLSKGHKSNYHLFTPETVEL

SEQ ID NO: 10781 - protein, 86 aa, Glycine max
  unsure (1)..(86): unsure at all Xaa locations
GKYERVGTTQKRARAGKVAPFTGLKYMAVVPTRKTNQELTFIDRNGGGVLCLQVWPRAGKXMRVTLFYVPDIDDAHVGDEVQYLLM

SEQ ID NO: 10782 - protein, 203 aa, Yarrowia lipolytica
MSHSQRTYDLLIKLLLIGDSGVGKSCLLLRFCEDQFTPSFITTIGIDFKIRTIDIGNQRVKLQVWDTAGQERFRTITTAYYRGAMGILLVYDVTDEKSFNNIENWYQNVQTYANEGVELILVGNKCDLDEKRVVSTEQGQALADKFGIPFLEASSKTNINVEECFYSVATRIRDTVAKTKGNESGSGGINIAEGEENSASKCC

SEQ ID NO: 10783 - protein, 247 aa, Oryza sativa (japonica cultivar-group)
MNCQFCFTGRMGLRKHLSTAEIVEQAVFARRLFSDEFGSITNVVFMGMGEPLHNIDNVLKASAIMVDEQGLQFSPRKVTVSTSGLVPQIKRFLQESNCALAVSLNATTDEVRNWIMPINRKYNLSLLLGTLREEIRLKKKYKVFFEYVMLAGVNDSVDDAKRLVDLVRGIPCKINLISFNPHSGSQFKPTPDEKIIEFRNILIQDGLVVFVRLSRGDDQMAACGQLGEPGDYQLPLLRVPEKFQVAL

SEQ ID NO: 10784 - protein, 443 aa, Eremothecium gossypii
MTQTNQVRASTKGVLGMTRNVVGAFTANWRCRRQHQALGRVPEAMPDQILGLTERFNQDRNPHKVNLTVGIYKDDNGEVTSFPSVARAQLMVEGQRGGRLAYLPIAGCPSYGARVSDFLYSECAPQGREFLASGCVSFMQTLSGTGALSLASLFLSNFISKTIWVPQPSWANHMNIFKLNGFEEVRRYRYYEDGAVDVDSWLAQLERAAADRPYPQCILLHACCHNPTGVDPTREQWSRILSVINGLGMVPIVDMAYQGLESGDLRADAYLLRMCLEHRWDNGLYVCHSFAKNMGLYGERVGSLSVVHPLGQFQAKAATDSQLKCIIRASYSSPPSYGSRVATTVLSVPEIKQQWHEDVHGMCNRLWSVRCMLHEKLRWPKLIDSTSQHGMFYYTGIGPDAVDTLREKYSVYLTKDGRLSLAGINTGNVDYVARALRNVSTYP

SEQ ID NO: 10785 - protein, 156 aa, Haemophilus influenzae
NRSNTPVLVDGKDVMPEVNAVLAKMKDFCQRIISGEWKGYTGKAITDVVNIGIGGSDLGPYMVTEALRPYKNHLNMHFVSNVDGTHIAETLKKVNPETTLFLVASKTFTTQETMTNAQSARDWLLKAAKDENEVAKHFAALSTNAKDVEKFGIDTN

SEQ ID NO: 10786 - protein, 169 aa, Oryza sativa (japonica cultivar-group)
MAATADNGEKMILLISSDGERFELSEAAASQSKTLSHMIEDDCTDNGVPLPNVTAVVLVKVVEYFKKHAAVTPKPATEAVVADKAKREEELKSFDAEFVDVDRTMLFELILAANFLNAQDLLDLTCQHAADLIKDMSVEEVREVFNITNDFTPEEEAEVRKENAWAFDN

SEQ ID NO: 10787 - protein, 373 aa, Eremothecium gossypii
MLRLLNPRSTQTVSRATRLVIRLSSTAIPTTQKAVVFYEHGGELKYTDIPVPKPKPNEILVNIKYSGVCHTDLHAWKGDWAIKPKLPLVGGHEGAGVVVAKGANVTNFEIGDYAGVKWLGKTCMECEFCQKGFEPNCETPTLSGYTHDGTFQQYATADAIHAAHIPPGTDLAKVAPILCAGITVYKALKTAALIPGQWVAISGAGGGLGSLAVQYAVAMGYRVVGIDGGNEKEALFRSLGGETFVDFHKNKDIVSAVREATGGGPHGVVNVSVSTNAILQSVEYVRPTGTVVLVGLPPDATVKSDVLTHVLKSINIKGSYVGNRADTKEAIEFFTRGLVQSPIKIIGLSQLEEAYKAMEEGTSIGRYVVDTSR

SEQ ID NO: 10788 - protein, 454 aa, Deinococcus radiodurans R1
MTATQAKPRQPDLKTSLPGPKTAEIMARDQATLSTSYMRPYPFVPDFGKGVWLTDVDGNTMLDFFAGIAVSTTGHAHPHVVQAVQRQIEKFTHVCLTDYPQEITTSLAERLVKHVERPGEKWRVFFSNSGAEAVEAAVKLARNHTGRQHIISTMGSFHGRTYGAITLTGSKTKYKRGFGPLLPAVSHVPYPNPFRPPLGSTPENCGQAVIDHIESLFVGILPADEVAAIIVEPMQGEGGYIVPPADFLPGLRALCDKHGIMLIFDEVQAGMGRTGKMFSFQHFDVQPDIITSAKGIASGMPLGALLAKESVMTWPVGSHGSTYGGNPVAAAASHATLDLLEGQVKHEGCGDSLMDNAAQVGDFILGELKGMQDEFPFIGDVRGRGLFIGIEFVKPDGSPDGALRDQASMMMFEKGLLNLDCGEAVIRISPPLILTREEAATGLDIMRGVFQELK

SEQ ID NO: 10789 - protein, 170 aa, Zea mays
MAPTVMMASSATAVAPFQGLKSAASLPVARRSTRSLGNVSNGGRIRCMQVWPAYGNKKFETLSYLPPLSTDDLLKQVDYLLRNGWIPCLEFSKLGFVYRENSTSPCYYDGRYWTMWKLPMFGCTDATQVYKELQEAIAAYPDAFHRVIGFDNVRQTQCVSFIAYKPPGSE

SEQ ID NO: 10790 - protein, 252 aa, Vibrio cholerae O1 biovar eltor str. N16961
MRGLTHKVALVTGAANGIGLAIAERLYQEGATLALADWNEEQLAIVIEQFDSARVYAQKVDVSDPEQVQALVRKTVERFGRLDILVNNAGIHIPGTVLECSVQDWRRIASVNIDGVVYCAMHALPELIKTRGCMVNTASVSGLGGDWGAAFYCATKGAVVNFTRALALDHGAQGVRINAVCPSLVKTNMTNGWPQAIRDQFNERIALGRAAEPKEIAAVVAFLASDDASFVHGVNLPVDGGATASDGQPKIV

SEQ ID NO: 10791 - protein, 358 aa, Oryza sativa (japonica cultivar-group)
MGFLCRRRSSAAPAESFSLLCEEDSESVFGSDDDGVEETATMAPELGKMMSLGFSASHHLGDGGGGGEELVGSFMEKEVEQMVETARGEYLTKLSNGGIELSCRIAAIDWICKVQAYYSFGPLCAYLAVNYLDRFLSSVEFSNDMPWMQQLLIVACLSLAAKMEETAAPGTLDLQVCNPEYVFDAETIHRMEIIVLTTLKWRMQAVTPFTYIGHFLDKINEGNRITSELISRCTEIILSTMKATVFLRFRPSEIATAVALSVVADGGRVLDFGGVLESSKLPVDKDNVGRCHQAMQEMALVMQNSTASPSGVLDTSCFTSKSDDDYSIPGTSPQVDNNNNQACTPASKRARVEEAPMS

SEQ ID NO: 10792 - protein, 356 aa, Eucalyptus globulus
MGSLEKERTTTGWAARDPSGVLSPYTYSLRNTGPEDLYIKVLSCGICHSDIHQIKNDLGMSHYPMVPGHEVVGEVLEVGSEVTKYRVGDRVGTGIVVGCCRSCSPCNSDQEQYCNKKIWNYNDVYTDGKPTQGGFAGEIVVGERFVVKIPDGLESEQAAPLMCAGVTVYSPLVRFGLKQSGLRGGILGLGGVGHMGVKIAKAMGHHVTVISSSDKKRTEALEHLGADAYLVSSDENGMKEATDSLDYIFDTIPVVHPLEPYLALLKLDGKLILTGVINAPLQFISPMVMLGRKSITGSFIGSMKETEEMLEFCKEKGLTSQIEVIKMDYVNTALERLEKNDVRYRFVVDVVGSKLD

SEQ ID NO: 10793 - protein, 159 aa, Shewanella oneidensis MR-1
MRTLTKIIGGLVLLLSMVTTVMATPVDTYEFKSPENQKRALELAHSLRCPQCQNQNLIDSNSPVASDLRLEVFKMVDEGKGDDEIIEFMTSRYGEFVLYKPKMETKTYILWLGPVGLLLLGLIVGFIFIRKQRITGAAGLEISAEDQKALDALLKRDSK

SEQ ID NO: 10794 - protein, 808 aa, Kineococcus radiotolerans SRS30216
MPVRSDLGSGLGGSLVAGDGGLGGVAGLRSRLGGLTLGGLGLRGLGGGGALDGRHGLGAAGLHALVAGEQVLLPGRERLGRVGLAAVADLQTLGHGVGDDAGQQRDGADRVVVAGDAVVHVVRVAVGVEDRDDGDVQLLGLVDGEVLLVGVDDPHRGGDLRHLADAAEGLGQLVVLATQHEQFLLRETGAGHVVEVDLLELAHAGDALVDGLEVGQHPAEPALVHEGHAHAAGLLGDGLLGLLLRADEHDGTAVGDGLLHEVVGAVDERQRLLQVDDVDAVALGEEEALHLGVPAAGLVPEVHTGLEQLAHRHDGHGWSSSCRPRAGPIGCSAADRSVRRAWSPGRTRPPGDRVDREGAPPALTRGAGTRCHPGQAPEPGEGSRTRTGCPRSLRRVSTGLDRGASAPPPGAPPPPPDPRVVARMRRFGPTVFAEMSALAARTGAVNLGQGFPDADGPASLLEDAVAAIRSGRNQYPPGTGVPALLEAVAEHQHRFYGLTLDPGTEVLVTAGATEAIAASLLALCGPGDEVVVLEPAYDSYAAVIALSGAVQRSVPLVPGPDGSTLDAQDLRAAFSARTRVVLLNTPHNPTGTVLSPAQVAAVAALAVEHDAVVLTDEVYEHLVFDEHRHVPVATLPGMAERTLTVSSAGKTFSVTGWKVGWVSGPAPLVAAVRMVKQFLTYVNAGPFQPAVAGALALPDDFYLGLAADLQRRRDLLVEGLLSAGFGVSVPAGTYFVVADPRPLGHDDGTALCRELPGLAGVVGVPVSAFCEPGSPAAAAVRPLVRFTFCKSDAVLEEACRRLQALRPR

SEQ ID NO: 10795 - protein, 402 aa, Zea mays
MATKRSVGTLGEADLKGKKVFVRADLNVPLDDAQKITDDTRIRASVPTIKFLLEKGAKVILASHLGRPKGVTPKYSLKPLVPRLSELLGVEVVMANDCIGEEVEKLAAALPEGGVLLLENVRFYKEEEKNEPEFAKKLASVADLYVNDAFGTAHRAHASTEGVTKYLKPAVAGFLMQKELDYLVGAVANPKKPFAAIVGGSKVSTKIGVIESLLAKVDILILGGGMIYTFYKAQGYSVGKSLVEEDKLELATSLIEKAKAKGVSLLLPTDIVVADKFAADAESKIVPATAIPDDWMGLDVGPDATKTFDEALDTTKTVIWNGPMGVFEFQKFAAGTEAIAKKLAELTTTKGVTTIIGGGDSVAAVEKAGLADKMSHISTGGGASLELLEGKTLPGVLALDDA

SEQ ID NO: 10796 - protein, 604 aa, Oryza sativa (japonica cultivar-group)
MGSMTIGAKYKTTLKDPGTTGVLRMNEDKFTFTPHDPRSAMKLNVDFRSIKGHKFNKVDGSKPAPPLLNLSKDSDKGGGYMFEFDNVTNRDLSRDFVAKVLGKQQGTIPPKPNVPPENSVTSTGEEQLSAAEMQRRMKLLQEDSELQKLHMKFVLGNILQESEFWATRKNLLEDEANKGSKQRPGFKSAMLADVRPSADGRTNKVTFSLTTEIIHQIFAEKPAVHRAFLDFVPKKMSEKDFWTKYFRAEYLLRTKNTVAATAEAAEDEELAIFLKNDDILAKEARLKIKRVDPTLDMEADAGDDYIHLPDHGIIRDGSKETIDNDGELARRTLSQDLNRHAAVVLEGRSSDVELTDTKTVAEAIARSKKEPPSSSISDDTNHERLVKVARMTEIEDLQAPRSLPYAPLCIKDPREYFDSQQANALRSLGGNNDGRHARNCRLSTDDAFDHLLGQISSIKVNGLNYPVIQSDVALKVLNELNEGISRSRRLNLKNPQDSLLGQIPRRTRDELMDHWAAIQELLQHFWSSYPITTSVLYNKVQRIKDAMTQIYQKLQDIKESAQPDVRHEISQLVKPMTQALDAAFNHDLEQQQKSSKSGNKPNGF

SEQ ID NO: 10797 - protein, 413 aa, Fagus sylvatica
MAGICCGVVGEGETTAPIELSSRPSRRRRIDLVPLKLMADVAAPQPLETDKKRQKLCLNTTSSLPSQVVENCKCVEEENEEKKKTNKNEALHTNQAANSCESSKPVEGRNNEEAVQECPKFGVTSVCGRRREMEDAVSVHPSVSNNFHFFGVFDGHGCSHVAMRCRDRLHDIVKEEVESVTEGMEWKDTMEKSFDRMDKEVQEWRVPIKTTNCRCDVQTPQCDAVGSTAVVAIVTPEKIIVSNCGDSRAVLCRNGVAFPLSSDHKPDRPDELVRIQDAGGRVIYWDGARVLGVLAMSRAIGDNYLKPYVISEPEVTITDRTAEDECLILASDGLWDVVSNETACGVARMCLRAQKPSSPPRSPGNDMAVGAASESSDKACSDASILLTKLALARHSTDNVSVVVVDLRRNHQQ

SEQ ID NO: 10798 - protein, 397 aa, Fagus sylvatica
MFSELMNFLRACFRAKSDRHVHTGSNARGRQDGLLWYKDSGQHFNGEFSYGCGQANNLLEDQSQIESGSLSLNETGPYGTFIGVYDGHGGPETSRYVNNHLFQHLKRFTSEQHSMSVEVIRKAYQATEEGFLSQVTKQWPLKPQIAAVGSCCLVGVICGGTLYIANLGDSRAVLGRVMKATGEVLSIQLSAEHNVAIESVRQELHSLHPEDPQIVVLKHNVWRVKGLIQISRSIGDVYLKKAEFNREPLYAKFRLREPFKKPILSADPAISVHQLQPHDQFVIFASDGLWEHLSNQEAVDIVQNHPRSGSVRRLIKVALQEAAKKREMRYSDLKKIDRGVRRHFHDDITVIVVFLDSNLVSRASSVKCPSISVRGGGINLPHNTLAPYTTQMEVGST

SEQ ID NO: 10799 - protein, 1320 aa, Emericella nidulans
MGKTSAKDVAELKDYQLGDCLGRGAFGSVYRALNWNTGETVAVKQIKLADLPKSELRVIMLEIDLLKNLDHPNIVKYQGFVKSAETLNIILEYCENGSLHSIAKNFGRFPETLVGVYMSQVLHGLLYLHDQGVIHRDIKGANILTTKEGLVKLADFGVASRTTGLSESSVVGTPYWMAPEVIELSGATTASDIWSLGCTVIELLEGKPPYYNLQPMPALFRIVNDDHPPLPQGASPAVKDFLMQCFQKDPNLRVSARKLLKHPWIVNARRSDSVVPKKSTEYEEAVKSVQEWNEALRSPESNALRRGTRNENQNPPSLRLDTRHTPTKVTLPSPVSRIVADKFSSPSSGEEDNWDDDFATAISPSALQLPHLRPHDNFGGMLSSEKLKAFASLDGTVLKSDESFEESDDPFKGSLLAGEHDPLKTIRPPPSQQANSGTSQSQNGPYGAHMRRGPPLNTAITPVYGGQMLQNSSSPIRQQRPPLFYKENSVEDYSDLISANEDVLDRKISAFQVGPTLRTPEGSDHAADVHQESDEHKDLADTGRSREVIRYQSSYEQEDTPRIGRQISVKRYRGTVEIQQFAENEHDEDFSDILGVDGVTLDKAESDDGSNKSTLMLNTKLSNNSWLGDLDDEDDPFALLEEGLDETDLEANIARDKHARLRSQVEGLVGSLKTSQDEEVLGDISEQLLAVFCDFPETKNIIISAHGMLPILEILDLCRRRDITLCLLKIVNAIIYDDYEIQENLCFVGGIPIINEFAAKKYPREIRLEAAAFVQQMYQTSTLTLQMFVSAGGLNVLVEFLEDDYEDERDLVLVGVNGIWSVFELQGSTPKNDFCRILSRSSVLDPLSLVLSRVLDEEGELAEVVEGRIANIFFIFSQAENHVKEMVSERTVLHRVLKELKRMTPAHQITMLKFIKNLSMLSTTLDSLQNSNAIDVLTDLLRSTIKRPHFREVSNQILNTIYNMCRLNKSRQEDAALNGIVPLLQKIVKTERPLKEFALPILCDMAHSGKVGRRELWRNKGLAFYISLLSDPYWQVTALDAIFIWLQEETAKVEEHLLENRYDQPSFTDAIVRCLTLSKANAFENILEPLQKLLRLSPPIASTLARPDLFSRLGQKLHHSKAAVRLNLLRIISSICDSSEQQGGLLASYGLLDSIRELEHDPAILVRDMAGKLIQSSERNDSYGLCKLKPNVRRGSTSATSPGLLANQSAPVTPQLSRQNQSKGYYDSRETQRRPRSAISGSALALRPGSRDGPTPGIVGGANGSAGASRNRIARGVSNRLSHIELLPNDDDRIPSSITRRSSVLPRRRRLTQFEAERGS

SEQ ID NO: 10800 - protein, 144 aa, Geobacillus stearothermophilus
MIPTPFPCPNCSQKGARTMNKKTIRDVDVRGKRVFCRVDFNVPMEQGAITDDTRIRAALPTIRYLIEHGAKVILASHLGRPKGKVVEELRLDAVAKRLGELLERPVAKTNEAVGDEVKAAVDRLNEGDVLLLENVRFYPGEEKN

SEQ ID NO: 10801 - protein, 823 aa, Yersinia pestis biovar Medievalis str. 91001
MQLSGNLMKETNESRLLTTGVTRRKLVQTTLVGGLAMATGAFSLPFSRTARAVQSALNPTSANDGKVIWSACTVNCGSRCPLRMHVADGEIKYVETDNTGDDDFEGLHQVRACLRGRSMRRRVYNPDRLKYPMKRIGARGEGKFKRISWEEAFETIAGSMQNIIKEYGNEAIYLNYGTGTIGGTMTRSWPPGATLLARLMNCCGGYLNQYGDYSTAQIAAGLNYTYGGWADGNSPSDIENSKLVVLFGNNPAETRMSGGGVTYYLEQAREKSNAKMIVIDPRYTDTAAGREDEWIPLRPGTDAALASALAYVMITENLVDQPFLDQYCVGYDEKTLPEGAPENSHYKAYILGQGADKTAKTPQWAAAITGIPAAKIITLGREIGSVKPAYISQGWGPQRHSNGENTSRAIAMLAILTGNVGINGGNSGAREGSYSLPFVRMPTFENPVKTSISMFLWTDAIERGPEMTATRDGVQGKDKLDVPIKFIWNYASNCLVNQHSEINRTHDILQDDKKCEMIVVIDNHMTSSAEYADIILPDCTASEQMDFCLDASSGNMAYVIFADQVIKPRFECKNIYDITSGLARHMGVEQKFTEGRTQEEWMRHLYQQSQAAIPELPSFEDFRAQGMFKKRDPAGHHVAYHDFRTDPVANPLSTPSGKIEIYSAALAEIAATWELQKDDVIDPLPVYAAGFESHVDPLIEQYPLQLTGFHYKARTHSTYGNVDVLKASCLQEMWINPMDAERRGISNGDMVRIFNGRGEVQINAKVTPRMMPGVVALGEGAWYSPDAKRIDRAGSINVLTTQRPSPLAKGNPSHTNLVQVAKA

SEQ ID NO: 10802 - protein, 503 aa, Vibrio cholerae
  unsure (1)..(503): unsure at all Xaa locations
MHMSKSFLIISMGFVAVSVQAQTLTRDNGAPVGDNQNSITAGEHGSVLLQDVHLIQKLQRFARERIPERVVHARGTGAHGEFVASGDFSDLTLSAPFTSKGKITPVFVRFSTVIHSKGSPETLRDPRGFATKFYTEQGNWDLVGNNLPVFFIRDSIKFPDMVHSLKPSPVTNLQDPNRFFDFFSHEPGSTHMLTWVYTNLGTPASYRTMDGFGVHAYKWINQKGDVNYVKFHWKSLQGIESLRPDEVVKVQGQDFNHLTNDLYTQINAGNHPKWDLYVQVLTPEQLSKLDYNGLDATKVWLDVPEKKVGTMTLNKVPDNFFLETEQSAFAPSNLIPGIEPSEDRLLQGRLFAYADTQLYRLGANLFQLPINRPLVEVNSHNQEGASNSAQTASDINYQPSRKLELKEDPQFKAVQTQLVGSVQQKAISNPRNFYQAGVLYRSLNEQDKQDLITNLXGBLNKVTDKEIKATMVSHFYRADKDYGTRLARATNTDLKQVAKLAAM

SEQ ID NO: 10803 - protein, 478 aa, Zea mays
MAAHRPNAAAPLLAKLDATATPPAKRNKYPFFCAVLASMTSVLMGYNVAVTSGAQIFMAEDLGMSDAQIEVLSGVINIYSLVGALLAGWTSDRLGRRLTIVLANAFFLVGPLAMALAGGYTLLMVGRFIAGVGVGYALVIAPVYAAEIAPASSRGLLSSLPEIFINTGVMLSYVSNLAFSGLPVHLSWRVMFAAGVVPTVFMAAGVFTMPESPRWLVMKGRVAEAKAVLDKTSDTPAEAEQRLLEIEDVVMDSSGDSGAWKEVATKAGVQRVLATVVTLQFFQQASGIDSVVLYGPRVLAMAGVTSNSLLLSLNILFGVAKVGSILIAMALADRVGRRPLLLVSTSGMTVALLVLGSLFAVFAGAKDNAAVAAVSVVAVMAFVMAFSVGLGPLAWVYSSEILPLRLRGQGAGLGTAMNRIMSGVITMTFISLYQGITMAGAFYLYAAIAAASFVFVYACLPETRGRSLEDMEELFHTK

SEQ ID NO: 10804 - protein, 72 aa, Glycine max
MGKQIVPVKSPIYALSPFQQKIMPGLWKDLPTKIHHTVSENWISATLLRGPLGGTYTYVQNYLANEKLSHRC

SEQ ID NO: 10805 - protein, 186 aa, Zea mays
MGLHEGYSELVLPKQLLHLLLLLGYVRRFLLWAFDAVGLGDLLDLGDDHQAPPPPQQPQPQHRRAEFRAAMPAMVIEEALPVARFDELEARVVVGGDCAVCLGGIGGGDEVRRLGNCRHAFHRACLDRWMEHDQRTCPLCRAPLVPGALWPADASDLDFSYLGAPVPSPTLLRPHELLLLAGLGGY

SEQ ID NO: 10806 - protein, 1131 aa, Zea mays
MSSLRPAQSSSSSSRTRQSSQARILAQTTLDAELNAEYEESGDSFDYSKLVEAQRSTPPEQQGRSGKVIAYLQHIQRGKLIQPFGCLLALDEKSFRVIAFSENAPEMLTTVSHAVPNVDDPPKLGIGTNVRSLFTDPGATALQKALGFADVSLLNPILVQCKTSGKPFYAIVHRATGCLVVDFEPVKPTEFPATAAGALQSYKLAAKAISKIQSLPGGSMQALCNTVVKEVFDLTGYDRVMAYKFHEDEHGEVFAEITKPGIEPYLGLHYPATDIPQAARFLFMKNKVRMICDCRARSVKIIEDEALSIDISLCGSTLRAPHSCHLQYMENMNSIASLVMAVVVNENEDDDEPESEQPPQQQKRKKLWGLIVCHHESPRYVPFPLRYACEFLAQVFAVHVNKEFELEKQIREKSILRMQTMLSDMLFKESSPLSIVSGSPNIMDLVKCDGAALLYGDKVWRLQTAPTESQIRDIAFWLSEVHGDSTGLSTDSLQDAGYPGAASLGDMICGMAVAKITSKDILFWFRSHTAAEIKWGGAKHDPSDEDDSRRMHPRLSFKAFLEVVKMKSLPWSDYEMDAIHSLQLILRGTLNDALKPAQSSGLDNQIGDLKLDGLAELQAVTSEMVRLMETATVPILAVDGNGLVNGWNQKVADLSGLRVDEAIGRHILTLVEDSSVPIVQRMLYLALQGREEKEVRFELKTHGSKRDDGPVILVVNACASRDMHDHVVGVCFVAQDMTVHKLVMDKFTRVEGDYRAIIHNPNPLIPPIFGADQFGWCSEWNAAMTKLTGWHRDEVIDRMLLGEVFDSSNASCLLKSKDAFVRLCIIINSALAGEEAEKAPIGFFDRDGKYIECLLSVNRKVNADGVVTGVFCFIHVPSDDLQHALHVQQASEQTALRRLKAFSYMRHAIDKPLSGMLYSRETLKGTDLDEEQMRQVRVADNCHRQLNKILADLDQDNITDKSSCLDLDMAEFVLQDVVVSAVSQVLIGCQGKGIRVACNLPERSMKQKVYGDGIRLQQILSDFLFVSVKFSPAGGSVDISSKLTKNSIGENLHLIDFELRIKHQGAGVPAEILSQMYGEDNREQSEEGLSLLVSRNLLRLMNGDIRHLREAGMSTFILTAELAAAPSAAGH

SEQ ID NO: 10807 - protein, 547 aa, Coxiella burnetii RSA 493
MSLVESPPWQALKSKYQELSSLHMRDFFAQDKKRGTRLSLEAAGLYFDYSKNRVDEKTIDLLCESANACNLPLRIEQLFSGKLTNESGEMVGFHTALRQVNNFSFKTNNNAIQEIHASWEKIKKLSIRIREGDYKGFTNKSITDIVNIGIGGSSLGPQMAYNALKPYVKAPLRCHFISNLDDTDFYETVRTLNPETTLFIITSKTFTTKETLENARRATEWLMQAAKKENLIQTHFMAVTAAPEKAHEFGIQKDNIFMLWPWVGGRFSVWSAAGLSLAIAIGWEEFFEFLRGAHAMDTHFRQAEFNKNMPILLALLSIWYINFFHAKTQAIIPYSQRLVYLPDYLTQLHMESLGKSVQLDGSAVHWQTGAVVWGDLGTNSQHSFHQLFLQGTMVIPVDFIAVLKNSRESHWQLPLIANCLGQSQTLMEGYDKEGVMRDLINQGIEHEKAEKLATYRLIRGNNPSNTIILEELNPYSLGSLLALYEHKVYVQSVIWNINPFDQWGVERGKHLAKDILQALQAETDQSSFDSSTERLINYVLKIKGNRP

SEQ ID NO: 10808 - protein, 295 aa, Coxiella burnetii RSA 493
MKKVTTAVFPVAGLGTRFLPVTKAGPKEMLPIVDKPIIQYVVEEAIAAGITHLVFVTSSSKRAIEDYFDSNYELETRLRSSRKLDALKLIQNLLPKEVRISYVRQAHPLGLGDAVLSAKHVVGDQPFAVLLPDDIIDCGEKSCLQLMMEAFEKHQRNIIAVEQVPLNQTDKYGIVSVVDEHQVKRITGMVEKPPLGSALSDWAVTGRYILSPRVFDHLDAISCGVGGEIQLTDAIVALLQEEQVLAFPFKGHRYDCGSRLGFLQATIAYALKRPEFKEPLREYLFKLLGSECVGG

SEQ ID NO: 10809 - protein, 355 aa, Rhodococcus equi
  unsure (1)..(355): unsure at all Xaa locations
MTTNQGVKVSEDEHSLKAGSRGPTLMEDFHFREKMTHFDHERIPERVVHARGFGAHGYFQVYEPMAEYTRAKFLQDPSVKTPVFVRFSTVAGSRGSADSVRDARGFATKFYTEEGNYDLVGNNIPVFFIQDAIKFPDLVHSFKPEPHNEMPXASTAHDTFWDFVANILKQAHMIMWTMSDRAIPRSFRMMEGFGVHTFRFVNEQGKARFVKFHWKPVLGTHSLVFDEAQKLAGKDPDFHRRDLWEAIEMGNYPEFELGVQMIEEEDEFSFDFDILDATKLWPEEMVPVKIIGKMTLNRNQDNVFAETEQAAFHPGHVVPGIDFSNDPLLQGRLFSYTDTQLIRLGGPNFHEIPIK

SEQ ID NO: 10810 - protein, 312 aa, Streptococcus pyogenes MGAS8232
MTKTAFLFAGQGAQKLGMARDFYDNFAIVRKTFDQASQVLGYDLRRLIDSDELKLNQTSYTQPAILTSSIAIYRVLGLHHVKPDMVAGLSLGEYSALVASGALSFEDTLSLVAKRGRLMEEAAPQRSGKMVAVMNTDVQVIEEVCQIAAKHGVVAPANYNAPSQIVIGGQTDAVNVAVELLKERGVKRLIPLNVSGPFHTALLEPASRLLAKELERYNFSDFKIPLVGNTEANIMEKDRIPELLARQVMEPVRFYDSVATLVESGITQFIEVGPGKVLTGFVKKIDKNLLCTSVENMVSLRLFLDREDIHGN

SEQ ID NO: 10811 - protein, 270 aa, Sinorhizobium meliloti 1021
MVPAKFVEVEFRMADERVSARGGMETSFGFREVGTGEKQPLVNDVFHKVAKRYDIMNDVMSAGLHRVWKDAMIAALNPPGREDYRVLDVAGGTGDIAFRIVERSGRKAHATVLDINGSMLSVGAERARKKGIEANLDFVEANAEDLPFAANSFDAYTIAFGIRNVPRIEVALKEAYRVLKRGGRLLVLEFSEVEMPLLDRFYDAWSFNAIPKFGKLITGDDAPYQYLVESIRKFPNQRDFAAMIRDAGFARVSFTNYTGGIAALHSGWKI

SEQ ID NO: 10812 - protein, 118 aa, Glycine max
MAISMISSRADTTVNRAGAGMVATFTGLKFMAGLPTRKTNNDITSIASNGGRVQCMQVWPPIVKNKFETLSYLPDLDDSQLAKEVEYLIMKRWIPCLEFELEHGFEYREHNRSPGYYD

SEQ ID NO: 10813 - protein, 347 aa, Streptomyces avermitilis MA-4680
MARSINLAVIPGDGIGQEVVAQGLKVLSAALPSDVKLETKEFDFGARRYHATGETLTDADLDALKQHDAILLGAIGDPSVPSGVLERGFLLKLRFAFDHHVNLRPSKLLPGVETPLAGQPEIDFVVVREGTEGPYTGNGGTIRTGTPHAVATEVSLNTAFGIERVVRDAYARAQARPRKKLALVHKNNVLVHAGHLWTDIFNKVGEEFPDVTTEYMHVDAATIYLVTQPERFDVIVTDNLFGDIITDLAAAISGGIGVAASGNINPSGAYPSMFEPVHGSAPDIAGQGKADPSATILSVALLLRHLGYEAEAARIEEAVSADLAERVGKPARSTDEIGDALTVRVAG

SEQ ID NO: 10814 - protein, 228 aa, Schizosaccharomyces pombe
MTLDIEEKEEIVTSLTKAEIHLSGLDENWKRLVKLVGNYRPNRSMEKKEPYEELIRAVASQQLHSKAANAIFNRFKSISNNGQFPTPEEIRDMDFEIMRACGFSARKIDSLKSIAEATISGLIPTKEEAERLSNEELIERLTQIKGIGRWTVEMLLIFSLNRDDVMPADDLSIRNGYRYLHRLPKIPTKMYVLKHSEICAPFRTAAAWYLWKTSKLADYTKPVRPKKH

SEQ ID NO: 10815 - protein, 458 aa, ASPERGILLUS NIDULANS FGSC A4
MPFHADIPQFQPTNDDIERTQAEKKHKETPTMAVDEQKAESVPYRQDVFGDEEHAEVKYKVLKWWQCGLLMVAETISLGILSIPAAIAGLGLVPAIVILLVMGLIASYTGYVIGQFKWRYPHVVSMADAGEVLMGRFGREVLFGGQMLFLIFLMASHILTFTVAMNRLTNHGTCSLVFGVIGLLVSLVFSLPRTMKNMSWLSLASFISIFTAVMIAMVAIGVEHPGGPVKATAETNLVTGFTAALNIILSYASHNAFFNVIAELKEPRDFPKALTLLQCIDITLYLVSGVVIYYFAGDDVKSPALGSINPLVSKVAYGVALPTIIIAGVINGHIACKSIYTRVFAGTSHMHKQDFRAVGSWIGIAVGLWVIAWVVATAIPVFSNLLSLMTALFASWFSFSLPAAFWLFMNRGLWFSSPRKTGITIFNCLVFGMGVVMSLGTILLACICVSSGNGKSSS

SEQ ID NO: 10816 - protein, 495 aa, Escherichia coli CFT073
MDNGRHKKNVRPAGDKYIEVMMSTEIKTQVVVLGAGPAGYSAAFRCADLGLETVIVERYNTLGGVCLNVGCIPSKALLHVAKVIEEAKALAEHGIVFGEPKTDIDKIRTWKEKVINQLTGGLAGMAKGRKVKVVNGLGKFTGANTLEVEGENGKTVINFDNAIIAAGSRPIQLPFIPHEDPRIWDSTDALELKEVPERLLVMGGGIIGLEMGTVYHALGSQIDVVEMFDQVIPAADKDIVKVFTKRISKKFNLMLETKVTAVEAKEDGIYVTMEGKKAPAEPQRYDAVLVAIGRVPNGKNLDAGKAGVEVDDRGFIRVDKQLRTNVPHIFAIGDIVGQPMLAHKGVHEGHVAAEVIAGKKHYFDPKVIPSIAYTEPEVAWVGLTEKEAKEKGISYETATFPWAASGRAIASDCADGMTKLIFDKESHRVIGGAIVGTNGGELLGEIGLAIEMGCDAEDIALTIHAHPTLHESVGLAAEVFEGSITDLPNPKAKKK

SEQ ID NO: 10817 - protein, 361 aa, Schizosaccharomyces pombe
MTAPKGGARTRRQAAMYSNSSSGIRETMYDLKPHRRKDAAEMKFCQSVLKELLKKQHEAYAYPFYKPVNPTACGCPDYFKVIKHPMDLGTMQNKLNHNEYASMKAFEADMVLMFKNCYKFNSAGTPVHLMGKKLESIFQKLWANKPDFDSETYMGMSSVNTDYYYGDNEVFDSGDEFLEDDGEEFEAVNRQIHKLQSTLQAMKSRARSSSVSRRSRSRSLSVDIYPPITYEMQNELAEQCNYLSADQLSHVAEILRAALPHLRNTDEIEIDVSAMPPDVFYKVYYYVCKGDEIGAEALATASHTHQEKKKGRALSETEQAEKIRQLRAQLDRFSGIAQNKNTVTGNIAAYNTKSLGSDDSS

SEQ ID NO: 10818 - protein, 154 aa, Triticum aestivum
  unsure (1)..(154): unsure at all Xaa locations
MAPTVMASSATSVAPFQGLKSTAGLPVSRRSNGASLGSVSNGGRIRCMQVWPIEGIKKFETLSYLPPLSTEALLKQVDYLIRSKWVPCLEFSKVGFIFREHNASPGYYDGRYWTMWKLPMFGCTDAXQVINEVEESRRSXPDAYVRSSDHNVGW

SEQ ID NO: 10819 - protein, 296 aa, Pennisetum glaucum
IIESVGEGVTDVAPGDHVLPVFTGECKECPHCKSAESNMCDLLRINTDRGVMIGDGKSRFSINGKPIYHFVGTSTFSEYTVMHVGCVAKINPEAPLDKVCVLSCGISTGLGASINVAKPPKGSTVAIFGLGAVGLAAAEGARIAGASRIIGVDLNPSRFEEAKKFGCTEFVNPKDHNKPVQEVLADMTNGGVDRSVECTGNINAMIQAFECVHDVWLGCRCAGGCATQGCRVQDSPNELPEREDPEGNLLWQLQATHWPAQCGGAVYEEVEKFITHSVPFSEINKAFDLMAKGGGH

SEQ ID NO: 10820 - protein, 293 aa, Escherichia coli
MKMRKGIILAGGSGTRLYPVTMAVSKQLLPIYDKPMIYYPLSTLMLAGIRDILIISTPQDTPRFQQLLGDGSQWGLNLQYKVQPSPDGLAQAFIIGEEFIGGDDCALVLGDNIFYGHDLPKLMEAAVNKESGATVFAYHVNDPERYGVVEFDKNGTAISLEEKPLEPKSNYAVTGLYFYDNDVVQMAKNLKPSARGELEITDINRIYLEQGRLSVALMGRGYAWLDTGTHQSLIEASNFIATIEERQGLKVSCPEEIAFRKGFIDVEQVRKLAVPLIKNNYGQYLYKQTKDSN

SEQ ID NO: 10821 - protein, 247 aa, Arabidopsis thaliana
MEDIVDQELSNYWEPSSFLQNEDFEYDSWPLEEAISGSYDSSSPDGAASSPASKNIVSERNRRQKLNQRLFALRSVVPNITKMDKASIIKDAISYIEGLQYEEKKLEAEIRELESTPKSSLSFSKDFDRDLLVPVTSKKMKQLDSGSSTSLIEVLELKVTFMGERTMVVSVTCNKRTDTMVKLCEVFESLNLKILTSNLTSFSGMIFHTVFIEADEEEQEVLRLKIETGIGAYNETQSPTLSIDSLY

SEQ ID NO: 10822 - protein, 160 aa, Glycine max
AMSIDPKWKMIRPDLGRIEKWVLRNAFDDDKNPYLPKHILYRQKEQFSDGVGYSWIDGLKDHANKQVTDATMMAANFIYPENTPTTKEGYLYRTIFEKFFPKNSAKATVPGGPSVACSTAKAVEWDASWSKNLDPSGRAALGVHAAAYDGAVDTTKNGPL

SEQ ID NO: 10823 - protein, 214 aa, Sinorhizobium meliloti 1021
MRRLIDKTLVVASHNAGKIREIRDLIGPLGFEAKSAADLNFVEPDETGTTFEENATIKALASAKASGLPALSDDSGLAVDALGGAPGVYTANWAEREDGSRDFQMAMEKVEEALRAKGAVKPESRTARFVSVLCLAWPDGHVELFRGEVEGYVVWPPRGTSGFGYDPVFQPKGYDTTFGEMSAEEKHGWKPGDSEALSHRARAFKLFAETCLGA

SEQ ID NO: 10824 - protein, 161 aa, Bacillus cereus ATCC 10987
MTVYDFSAKTITGEEKSLKDYEGKALLIVNVASKCGFTPQYKGLQEVYDKYKEQGLEILGFPCNQFGGQEPGTEADITSFCELNYGVNFPMFAKIDVKGDKAHPLYTYMTEQAPGLLGMKAVKWNFTKFLIGKDGKVVGRFAPQTKPVDLEVEIEKVLGNN

SEQ ID NO: 10825 - protein, 1009 aa, ASPERGILLUS NIDULANS FGSC A4
MPEYTESRDSIKNIWGERTPYKHQWPTRCDSHLVDTPDTWVQSACVLCSNGCGLDIGVKEGKVVGVRGRTVDRVNKGRLGPKGLNGWVSINHPDRLTHPLIRRNGKLERASWDEAMSLIVERAKDIQTRLTNHGIAFYTSGQLLLEEYYVLAMVGKAGLNTLHMCATLNLSPSYRSQDAKPMNRDGNTRLCTATAAASMRESFGSDGQPGSYADIDYTDCLFLVGHNMAATQTVLWTRVLDRLEGPNPPKLIVVDPRTSDTAKKATVHVRPRLGTNVALLNGLQHLIIKNGWVNDQYVASHVCGLEELKKVVEKYTPEYVEKITGVPVAQLHETAEALALSGSLLSTALQGVYQSNQATAAACQINNINLLLGHIGKPGSGILQMNGQPTAQNNRETGCDGEFPGFRNHQNPNHIRDIARVWNINYEQVPHWSEPTHIMNMLNYIESGSIEMFWVSGTNPLVSLPHLYRVRQLLTKPDLFVVVQDLFLTETAAIADVVLPAAQWAEKTGCFTNVDRTMHLSRKAVDPPGEAKADLDIFLDFAQRMDFRNRDGGPLIPFTNPEEVFEEWKKMSYGRPLDCSDLTYEKLSGGSGIQWPCTKEYPFGKERLFDDGKFFTDTDYCESYGHDLETGTPLTKGQYEAMNPAGRAILKAAHYRKPWESPDEEFPFYLSTGRNVFHFHTRTKTGRSKRLQNADKDACLVICQADADELGVTNGEMVIVRSRRGQVELPVKTEGISKGHVFIPFHFGYWDSKDQRARAANELTIEQWDPVSKQPMFKSGAVRIEKCVQKENEPPISRERQSEAIQNVEANKANATETRKDGQDSRVRWLEMWLGATHESLEMLRQIYDKLIPQLVHDLEIQAGLGVMRRITADIIAKLEPIVHRYHESRVYGRRVCERLRKALFPMEDDKDNSYETLIVLQSLEMFLTYIDGHLTALSPASQALWDQEFVDAVSFAAQHIQRQKAWVNTHIKVKSPQTLLVPQRPPMEVDADRDEEAAENVLVREFYY

SEQ ID NO: 10826 - protein, 465 aa, Chloroflexus aurantiacus
MPTEVVMPKWGLSMQEGKINLWLKREGESVQQGEPIAEVETEKITNVVEAPVSGTLARLCYPEGSVVAVTKVIAYITAPGERLVEVAGNGAVETVPAPVAVQDTPAVSLPPAPARTAAPRAMPAARKLAQEHGIDLSTLVGSGPGGAIIREDVERAIAARATPVQPLQRVGFYSDGHRLDGLLYTPRDLAPGERRPGVVLLVGYTYLKTMVMPDIAKVLNAAGYVALVFDYRGFGESEGERGRLMPLEQVADARAALTFLSNQPTVDPERMAVIGISLGGAHAVTTAALDRRVRAAVALEPPGNGARWLRSLRRQWEWSQFLAHLAEDRRQRVLTGKSSLVDPLEIVLPDPESQAFLDQVAAEFPQMKVTLSLASAEALIEYAPEDIAGNIAPRPLLVIHGDADQLVPLAEAQAIVERAGATARLEVIPGMSHFNWVLPGSAGFIRVTNSIVEFLQQALPVVRSS

SEQ ID NO: 10827 - protein, 453 aa, Zea mays
  unsure (1)..(453): unsure at all Xaa locations
MWNGYVNNDDRALLKVIKYSSPTSAGAECVDLDCSWVEQWVHRAGPRKEIYYEPEEVKAAIVTCGGLCPGLNDVIRQIVFTLETYGVKNIVGIPFGYRGFFEKGLKEMPLSRGLVENINLNGGSFLGVSRGGAKTSEIVDSIQARRIDMLFVLGGNGTHARDHYLEHPNRKSIYIPHNXCRKRKLKVSVVAVPKTIDNDILLMDKTFGFDTXVEEAQRAINSAYIEARSAYHGIGLVKLMGRSSGFIAMHASLSSGQVDVCLIPELLLCLKLPYVFLSHVSTNRSLQVTIXMKVPFTLDGEFGVLRQLEHLLKSKGFCVVCVAEAAGQDLLQESGATDASGNVILSDIGVHMQQKIKMHFKDIXVPADVKYIDPTYMVRACRANASDAILCTVLGQNAVHGAFAGFSGITSCICNTHYVYLPITEVITAPKRVNPNSRMWHRCLTSTGQPDFH

SEQ ID NO: 10828 - protein, 191 aa, Escherichia coli CFT073
MRSDLFLNHMVIDMKHTVEVMIPEAEIKARIAELGRQITERYKDSGSDMVLVGLLRGSFMFMADLCREVQVSHEVDFMTASSYGSGMSTTRDVKILKDLDEDIRGKDVLIVEDIIDSGNTLSKVREILSLREPKSLAICTLLDKPSRREVNVPVEFIGFSIPDEFVVGYGIDYAQRYRHLPYIGKVILLDE

SEQ ID NO: 10829 - protein, 545 aa, Glycine max
MATSLSVSPSLSLNTLFFAKALPLSRPSLLSLPLPKSLLSLSTRRRTFAVRAESQNGRDAAPAHYDFDRFTIGAGSGGVRARRFAANYGASVAICELPFSTISSETTGGVGGTCVIRGCVPKKLLVYASKFSHEFEESNGFGWRYDSEPKHDWSSLIANKNAELQRLTGIYKNILNNAGVKLIEGHGKIIDPHTVDVNGKLYSAKHILVTVGGRPFIPDIPGNEYAIDSDAALDLPTKPEKIAIVGGGYIALEFAGIFNGLKSEVHVFIRQKKVLRGFDEEIRDFVSEQMSVRGIEFHTEESPQAITKSADGSFSLKTNKGTVDGFSHIMFATGRRPNTQNLGLESVGVKIAKDGAIEVDEYSQTSVPSIWAVGDVTNRINLTPVALMEGGALVKTLFQDNPTKPDYRAVPSAVFSQPPIGQVGLTEEQAVQQYGDIDIFTANFRPLKATLSGLPDRVFMKLVVCAKTNEVLGLHMCGDDAPEIVQGFAVALKARLTKADFDATVGIHPSAAEEFVTMRTPTRKIRKSESSEGKSGSEAKTAAGV

SEQ ID NO: 10830 - protein, 409 aa, Archaeoglobus fulgidus DSM 4304
MKIERPRGTRDFLPDEMERRREIEKRMRKIAESFGYREVATPTFEYLELFTRKSGEGIIEEMYVFKDKSGRDLALRPELTAPVMRMFVNECSVMPKPLRFYYFANCFRYERPQKGRYREFWQFGVELIGSESYLADAEVIILADKILKDVGVNFSLEIGHVGIMRHLLKPIGEDRASKVMRLIDKGDREGLESYLAEIRVNEDLRDKIFSLLELKGDESVIEEAKEIIDYDFGHLESLSALLRDVGVDFTLNLGIARGLDYYTGVVFECYAEGLGAQKQVCGGGSYELSSLFGGPVTPSTGFAIGFDRVCEACSVEAGEKSVVAVVSFKGLESQAFRVASMLRERGFTAVVDVMGRNLKKQMSFASEMGVKYAVILGPDEVKSGRVAIKNLETQEQVVVAEEELFSILQ

SEQ ID NO: 10831 - protein, 185 aa, Xanthomonas axonopodis pv. citri str. 306
MLLNRLLALVLTGFFATPAFAAGTPVLDVEYRPLAGKTPINLNRTYGGKVVMVVNTASKCGFTPQYEGLEALNHRFGSRGFTVLGFPSNDFQGQEPGSEKQIQEFCTLTYGVKFPMFEKVHVLGAEATPLYQRLTQATGVAPGWNFHKYLIGRDGRVVAQFPSKIKPDDPSVLAAIERELKAPAR

SEQ ID NO: 10832 - protein, 284 aa, Acetobacter pasteurianus
MIKPLKKAVLPVAGLGTRFLPATKCVPKEMLTVVDRPLIQYAIDEAREAGIEEFCLVSSRGKDSLIDYFDISYELEDTLKARKKTSALKALEATRVIPGTMLSVPPAGTAGPWHAIWCAREFIGNDPFAILLPDDVVQSKKSCIGQLVEVYNKTGGNVLAVTEVPREQTGSYGILDVGKDDGKTVEVKGLVEKPDPKDAPSTLSVIGRYVLTADVLKHLAKLEKGAGGEVQLTDAMAKTIGHVPFHGYRYEGKRFDCGSKIASWKPRSPLRWSVRNWLPACVNS

SEQ ID NO: 10833 - protein, 161 aa, Lactobacillus plantarum WCFS1
MAESVYDFTETEMSGAPLDLSQYRGQVLLIVNTASNCGLAPQFKGLEELYQKYQQEGLVVLGLPSNQFHQEKADDDETHDYCQRHYGVTFPMTKRVMVNGDDADPLFTYLKQAAGHGRIKWNFTKFLIGRDGRVLERYAPTTRPATFEAAIRDALADRSED

SEQ ID NO: 10834 - protein, 747 aa, Aspergillus oryzae
MANIVAGGLHKVQEAVQGAASKDKKLVDLAPDTHNVQSSKEPLTTDHGVRISDTDHWLKEVNDNHTGPMMLEDQIAREKIHRFDHERIPERVVHARGTAAFGNFKLHESAEDVSYAGILTDTSRNTPVFLRFSTVQGSKGSADTVRDVRGFAVKFYTDEGNWDLVGNNIPVFFIQDAIKFPDFVHAVKPEPHNEVPQAQTAHNNFWDFVYLHPEATHMFMWAMSDRAIPRSYRMMQGFGVNTFSLINKEGKRHFVKFHFIPHLGVHSLVWDEALKLAGQDPDFHRKDLMEAIDNGAYPKWDFAIQVIPEEKQDDFEFDIFDATKIWPEELVPLRVIGELELNRNVDEFFPQTEQVAFCTSHIVPGIDFSDDPLLQGRNFSYFDTQISRLGINWEEIPINRPVCPVLNHNRDGAKRHRIAQGTVTTWSNRSEAGPPAPVEHGGFASYPAKLNGIKKRGLSPKFREHHNQAQLFYNSLSEHEKVHVKKAFGFELDHCDDPIVYERLAGHRLAEIDLTLAQEVAELVGAPIPDKALRPNHGKRSKHLSQTEFPGKQPTIASRRIAIIIGDGYDPVAFNGLKGAITAVGALPFVIGTKRSPIYADGEDKSSSKGVIADHQYDGQRSTMFDATFIPGGPHVESLKANGQIRYWIIETFGHLKALGATGEAAAFIKEALGSALDVKVATSDNPQPVEWYGVVTAGKIHKPESFKEGIQIVKDAKDFISTFFYQISQHRNYKRELDGLASTVAF

SEQ ID NO: 10835 - protein, 1161 aa, Zea mays
MASGSRATPTRSPSSARPEAPRHAHHHHHSQSSGGSTSRAGGGAAATESVSKAVAQYTLDARLHAVFEQSGASGRSFDYSQSLRAPPTPSSEQQIAAYLSRIQRGGHIQPFGCTLAVADDSSFRLLAFSENSPDLLDLSPHHSVPSLDSSAPPHVSLGADARLLFSPSSAVLLERAFAAREISLLNPIWIHSRVSSKPFYAILHRIDVGVVIDLEPARTEDPALSIAGAVQSQKLAVRAISRLQALPGGDVKLLCDTVVEHVRELTGYDRVMVYRFHEDEHGEVVAESRRDNLEPYLGLHYPATDIPQASRFLFRQNRVRMIADCHATPVRVIQDPGLSQPLCLVGSTLRAPHGCHAQYMANMGSIASLVMAVIISSGGDDEQTGRGGISSAMKLWGLVVCHHTSPRCIPFPLRYACEFLMQAFGLQLNMELQLAHQLSEKHILRTQTLLCDMLLRDSPTGIVTQSPSIMDLVKCDGAALYYHGKYYPLGVTPTESQIKDIIEWLTVFHGDSTGLSTDSLADAGYLGAAALGEAVCGMAVAYITPSDYLFWFRSHTAKEIKWGGAKHHPEDKDDGQRMHPRSSFKAFLEVVKSRSLPWENAEMDAIHSLQLILRDSFRDAAEGTNNSKAIVNGQVQLRELELRGINELSSVAREMVRLIETATVPIFAVDTDGCINGWNAKIAELTGLSVEEAMGKSLVNDLIFKESEATVEKLLSRALRGEEDKNVEIKLKTFGSEQSKGPIFVVVNACSSRDYTQNIVGVCFVGQDVTGQKVVMDKFVNIQGDYKAIVHNPNPLIPPIFASDENTSCSEWNTAMEKLTGWSRGEVVGKFLIGEVFGNCCRLKGPDALTKFMVIIHNAIGGQDYEKFPFSFFDKNGKYVQALLTANTRSKMDGKSIGAFCFLQIASTEIQQAFEIQRQQEKKCYARMKELAYICQEIKNPLSGIRFTNSLLQMTDLNDDQRQFLETSSACEKQMSKIVKDASLQSIEDGSLVLEQSEFSLGDVMNAVVSQAMLLLRERDLQLIRDIPDEIKDASAYGDQCRIQQVLADFLLSMVRSAPSENGWVEIQVRPNVKQNSDGTNTELFIFRFACPGEGLPADVVQDMFSNSQWSTQEGVGLSTCRKILKLMGGEVQYIRESERSFFLIVLEQPQPRPAAGREIV

SEQ ID NO: 10836 - protein, 433 aa, Brucella suis 1330
MLITGRNKQTALVASLPALFALAGTAMAQDTAPAPTLDTGDTAWMLTSTALVLMMTIPGLALFYGGMVRKKNVLSTVMQSFAITCLMSILWMIAGYSLAFTDGGSLHSYIGGFSKVFFSGVTMESLTGTIPEYLFITFQMTFAIITPALITGSFAERMKFSSMLVFLTLWLFIVYVPVAHWVWGGGFMASDGVLDFAGGTVVHINAGVAGLVAALVIGKRDGYGHTNMAPHNLVLSVIGAALLWVGWFGFNAGSAAGANALAGVAMLNTQVATAGAALAWMFVEWAISGKPSVLGIISGAVAGLVAVTPAAGFVNPTGALIIGIVAGAVCYVAAVKIKHVLGYDDSLDAFGVHGVGGFVGAVLTGFFADATINPASEGATIGKQFFGAAITIIYTAIATVIILYVVKAIMGLRPGKQAEIEGLDIALHGEAVQ

SEQ ID NO: 10837 - protein, 400 aa, Fusobacterium nucleatum subsp. vincentii ATCC 49256
MEEKMKISDRVKNMKYSAVRKLAPLAAEAEKKGIKVYRLNIGQPNIETPKLFFEGLKNIPDQVIKYADSRGISVLLEQVIEVYARDGHILKKEDIIVTEGGSEALTFAMLAICNPDDEVLIPEPFYSNYKSFLDISGAKIIPIPTDIKNNFALPKKEEIQKLITSKTKAILYSNPCNPTGKVYTEVEVKLLADLAIENDLFIIADEPYREFIYDDKDKHHSLLDIEKAKENVIIIDSVSKHYSACGARVGFLISKNKDFMTYIMKLCQARLAAPTVEQYAVANLMKAPKEYFKEIKEIYRRRRDIIVDSLNKIEGVTCSTPKGAIYAFAKLPVESSEDFCKWLLTEFVYDNSTVMLAPGEGFYETEGLGKNEVRFSFCVGEDDIEKAMKVLEEALKVYKK

SEQ ID NO: 10838 - protein, 479 aa, Zea mays
  unsure (1)..(479): unsure at all Xaa locations
MQRLASSRRLLQAALAPARANSSLSAAAVAAPAPANGAFPKMPAFDYTPPPYDGPRAEEIFRKRAQFLSPSLFHFYDRPLNIVEGKMQYLFDEDGRRYLDAFGGIATVCCGHCHPDVVEAIVNQAKRIQHSTVLYLNHAIADFAEALASKMPGDLKVVFFTNSGTEANELALMIARLYTGCNDIISLRNGYHGNAAGTMXGATAQSNWKFNVVQTGVHHALNPDPFRGAFGSDGEKYARDVQEIIEFGTTGRVGGFISEAIQGVGGIVELAPGYLPVAYSMVRKAGGLCIADEVQAGVARTGSHFWGFEGHGVIPDIVTMAXKGIGNGIPIGAVVTTPEIAQVLTRRSYFNTFGGNPVSTAGGHAVLKVLEKEKLQENAFVVGSYLKEQLNNLKDKHEIIGDVRGKGFLLGVELVTDHEKKTPAKAEISRVMNHMKDMGVLVGKGGFYGNVFRITPPLCFTKEDSDFFIEVMDIALSKL

SEQ ID NO: 10839 - protein, 404 aa, Streptococcus pyogenes MGAS8232
MKIIEKSSKLEHVAYDIRGPVLDEANRMIASGEKILRLNTGNPAAFGFEAPDEVIRDLIVNARLSEGYSDSKGIFSARKAIMQYCQLKGFPDVDIEDIYLGNGVSELISMSLQALLDNGDEVLVPMPDYPLWTACVSLGGGKAVHYLCDEEAGWYPDIADIKSKITSRTKAIVVINPNNPTGALYLKEILEDIVALAREHQLIIFADEIYDRLVMDGKEHIAIASLAPDVFCVSMNGLSKSHRIAGFRVGWMVLSGPKDHVKGYIEGLNMLANMRLCSNVLAQQVVQTSLGGHQSVDALLLPGGRIFEQRNFIYEAINAIPGLSAVKPEAGLYLFPKIDRQMYRIDDDEEFVLQLLKQEKVMLVHGRGFNWKDPDHFRIVYLPSVEELEDVQEKITRVLYQYRR

SEQ ID NO: 10840 - protein, 76 aa, Neisseria gonorrhoeae
DQFAGGTKALAEAIAQSKAFSIAGGGDTLAAIAKFGVTDQIGYISTGGGAFLEFLEGKELPAVAALEKTRRVNGLI

SEQ ID NO: 10841 - protein, 160 aa, Neurospora crassa
MLTGEMLTLDFLLLTCLLISYTTNAFPGEYIPTVFDNYSASVMVDGKPVSLGLWDTAGQEDYDRLRPLSYPQTDVFLICFSLWHPEIQHHAPGIPIILVGTKLDLREDPDTIQSLSQKRMAPITFEMGVNCAKEIGARKYLECSALTQRNLKSVFDEAIR

SEQ ID NO: 10842 - protein, 468 aa, Bacillus cereus ATCC 10987
MKQKRNSLYIFSITLVAAIGGLLFGYDTAVISGAEESLKVYFIDSLGLGSLAHGVTVSSALIGCIIGGVISGYCASKFGRKRSLIIAAILFIVSALGASYPEFLFFTKGEPTIVLLLAFNLYRIIGGIGVGLASAICPIYIGEIAPADIRGRLVSFNQFMIIFGMLVVYFVNWGIANGETLEWINDVGWRYMFASGVIPAIIFAILLLFVPETPRYLAIQHQDKKALAILTKINGPLEAKAILDDIKQTMAINVSSEKLFSYGKLVIIVGVLLSVFQQFVGINVALYYAPRIFESMGAAKDSSMMQTIIMGLVNVIFTVIAILTVDRWGRKPLLIVGSIGMAIGMFGVASMAFANIIGIGTLIFIIVYTASFMMSWGPICWVLISEIFPNKIRGQAVAIAVAAQWAANYFISSTYPMMMEYSGGLTYSFYGLMSVLSALFVWKLVPETKGKTLEQMENTWKKQTEYIS

SEQ ID NO: 10843 - protein, 226 aa, Gossypium raimondii
MRKPCCDKQGTNKGAWSKQEDQKLIDYIRIHGEGCWRSLPKAAGLHRCGKSCRLRWINYLRPDIKRGNFAQDEEDLIIKLHALLGNRWSLIAGRLPGRTDNEVKNYWNSHIKRKLMKMGIDPNNHKLNQYPHHVGPLNPTTTNSMDVACKLRVFSTENDDGVSDAASYLEDETPPTGISNLDLDLTIAFPSSPIKNIIEESQKKTASIVTNNKEEQYTVPTLLLFR

SEQ ID NO: 10844 - protein, 583 aa, Nicotiana tabacum
SIKFLAPSLPNPARFSKNAVKLHATPPSVAAPPPGAPEVAAERLEPRVEEKDGYWILKEQFRKGINPQEKVKIEKQPMKLFMENGIEELAKIPIEEIDQSKLTKDDIDVRLKWLGLFHRRKNQYGRFMMRLKLPNGVTTSAQTRYLASVIRKYGKEGCADITTRQNWQIRGVVLPDVPEILKGLAEVGLTSLQSGMDNVRNPVGNPLAGIDPEEIVDTGPYTNLLSQFITGNSRGNPAVSNLPRKWNPCVVASHDLYEHPHINDLAYMPATKDGRFGFNLLVGGFFSAKRCDEAIPLDAWVPADDVVPVCKAILEAFRDLGFRGNRQKCRMMWLIDELGVEGFRAEVEKRMPQQELERASPEDLVQKQWERRDYLGVHPQKQEGYSFIGLHIPVGRVQADDMDELARLADEYGSGEIRLTVEQNIIIPNIENSKIEALLKEPVLSTFSPDPPILMKGLVACTGNQFCGQAIIETKARSLMITEEVQRQVSLTRPVRMHWTGCPNTCAQVQVADIGFMGCLTRDKNGKTVEGADVFLGGRIGSDSHLGEVYKKAVPCDDLVPLVVDLLVNNFGAVPREREETED

SEQ ID NO: 10845 - protein, 209 aa, Gossypium herbaceum
KQEDQKLIDYIRIHGEGCWRSLPKAAGLHRCGKSCRLRWINYLRPDIKRGNFAQDEEDLIIKLHALLGNRWSLIAGRLPGRTDNEVKNYWNSHIKRKLMKMGIDPNNHKLNQYPHHVGPLNPTTTNSMDVARKLRVCSTDNDDGVSDAASYLEDATPPTGISNLDLDLTIAFPSSPIKNIIEESQQKIASIVTNDEEEEYTVPTLLLFR

SEQ ID NO: 10846 - protein, 218 aa, Gossypioides kirkii
QGTNKGAWSKQEDQKLIDYIRIHGEGCWRSLPKAAGLHRCGKSCRLRWINYLRPDIKRGNFAQDEEDLIIKLHALLGNRWSLIAGRLPGRTDNEVKNYWNSHIKRKLMKMGIDPNNHKLNQYPHHVVPLNPTTTNSMDVACKLRGCSTDNDDGVSDAASYLEDETPPTGISNLDLDLTIAFPSSPIKNIIKESQQKIASIVTNDEEEQYTAPTLLLFR

SEQ ID NO: 10847 - protein, 292 aa, Sphingomonas paucimobilis
MKGIILAGGSGTRLYPATLSISKQLLPVYDKPMIFYPLSVLMLTGIRDVLIISTPRDLPMFQALLGDGSAFGMNLSYAEQPSPNGLAEAFIIGADFVGNNPSALILGDNIYHGEKMGERCKAAAEQASQGGANVFAYHVDDPERYGVVAFDPETGVATSVEEKPAVPKSNWAITGLYFYDKDVVDIAKSIQPSARGELEITDVNRTYLERGDLHITRLGRGYAWLDTGTHDSLHDAGSFVRTLEHRTGVKIACPEEIAFENGWLGAEDLLKRAAGLGKTGYAAYLRKLVAAA

SEQ ID NO: 10848 - protein, 426 aa, Glycine max
  unsure (1)..(426): unsure at all Xaa locations
MSTDLSVILPRVLIVSRRSVRKNKFVDFVGEYHLDLIVGYGAVPVIVPRVSGVHMLLDSFEPIHGVLLCEGEDIDPSCYEQDTAGLSEEEVEEIRRLHASDTAIDKEKDSIELSLAKLCLERNIPYLGICRGSQILNVACGGTLYQDIGKELSIKCPEGQRAMHINYDDYDGHRHDVEVVENTPLHHWFKDSLEEXKMDISWVNSYHHQGVKRLAHRFVPMAFAPDGLIEGFYDPDAYNPEEGKFIMGLQFHPERMRKPDSDEFDYPGCPFAYKEFVKAVVAYQKKLNNLASVQKPIKLNKEMEIKRKIIVRSFSLAKNLYNTGRGTNSSKQTELEAGAEFLESNTALSVQQENRLKQMGATVRNAGSYIERLKLNEEREKMARNLMGKMTVEQLSDLLSFYHTMGQICSEVLDIKIHGLVNDLAS

SEQ ID NO: 10849 - protein, 540 aa, Bacillus cereus ATCC 10987
MSYEKVWANNEKLNQTEKNKLKKDGLEIFNDIPYYAENGFESIPKEEWDAFKWAGLYLQRPKEAGYFMMRVNIPSGIITNAQAEVLASIAEDYGRDVIDITTRQAIQFHWLEIHQIPDIFERLAKVGLSSAGACGDITRNITGNPLAGIDANELFDTTGIVKEVYDYFQHNEEFSNLPRKFKMSISSNIYNSANAEINCVAFTPATKEIDGEKKVGFHIKVGGGLSARPYLADELDVFVLPEEVKAVAIAIATIFRDFGYREKRHLARLKFLVADWGAEKFKEKLIEYTGPLQSKGESALKGWNAGYFYGVQDQKQDGLKYVGFNVPVGRLHAEEMFEIARIAKQYGNGQIRTCNSQNFIIPNVLPENVTGLLNEPLFEAISANPKSFIGHAVSCTGIEYCNLALVETKERLRKIAEYLDTQIALDVPVRIHMVGCPNSCGQRQIADIGLQGVKMKTKEKGIVEAFEIYVGGTLLDGGAYNQKLKGKIDGEDLPDVLASFISYFKENKLPAETFYDFVGRVGVETLQTALNNVLEEVIAS

SEQ ID NO: 10850 - protein, 523 aa, Ipomoea batatas
MAAAIGAPKLAPYTCTAERNDGSARRAARFKSLSFASSNLSGDKLGSLVSRRCSRSGGKSSERRNAPIIVSPKAVSDSQNSQTCLDPDASRSVLGIILGGGAGTRLYPLTKKRAKPAVPLGANYRLIDIPVSNCLNSNVSKIYVLTQFNSASLIRHLSRAYASNMGGYKNEGFVEVLAAQQSPENPNWFQGTADAVRQYLWLFEEHNVLEFLVLAGDHLYRMDYERFIQAHRETDADITVAALPMDEKRATAFGLMKIDEEGRIIEFAEKPKGEQLKAMKVDTTIFGLDDQRAKELPFIASMGIYVISKNVMLNLLREKFPGANDFGSEVIPGATSIGMRVQAYLFDGYWEDIGTIEAFYNANLGITKKPVPDFSLYDRSAPIYTQPRYLPPSKMLDADVTDSVIGEGCVIKNCKIHHSVVGVRSCISEGAIIEDSLLMGADYYETDADRRLLAAKGSIPIGIGRNSHIKRAIIDKNARIGDNVKIINSDDVQEAARETDGYFIKSGIVTVIKDALIPSGTVI

SEQ ID NO: 10851 - protein, 466 aa, Triticum aestivum
  unsure (1)..(466): unsure at all Xaa locations
SSHQTAPPRLPPRALRRRRRRSRSLGLEASTRPPRGAEAPEAPPVRPLQDAPAPAQIAAAIGILRPWPALPLLNIPSPSAAVLLSSCAADLLPSAAPRAGLVAAAVRGRAWIVPASAYHEQKRECFLVAAASAGGQWAGDGQAGKGERLSSVMLSQIVVFRGCCLPSIIFSPLPYWWVQVVLPYPKNTTTFWVGFLRVMVSLCCPWNRGMTSARHLXVLGGIPVPRDPTLDYLINIMSLVNVEMFFTNTIKAMDPFFSVLLSAMFLGELPTPWVXVLSLLPIVGXGVALASISEASFNWAGFXRAMGSNVTFQXRKFPSAKKLMLIKEEPLDNINLFSIIINLLSFITVMSFFLLAPVTLLTEGVKVTPTYLQSAGLNLQQVYTRSLIAAFCFHAYQQVSYMILARVSPVTHSVGNCVKRVVVIVTSVLFFKTPVSPINSIGTAIALAGVFLYSQLKRLQPKPKAA

SEQ ID NO: 10852 - protein, 522 aa, Ipomoea batatas
MAAATIGALSSPYTGGVGERIDGDVSKASFRRLSFASSHLSGDKLMPLPPRRLRSGGKSSEVRTAPFIVSPKAVSDSQNSQTCLDPDASRSVLGIILGGGAGTRLYPLTKKRAKPAVPLGANYRLIDIPVSNCLNSNISKIYVLTQFNSASLIRHLSRAYASNMGGYKNEGFVEVLAAQQSPENPNWFQGTADAVRQYLWLFEEHNVLEFLVLAGDHLYRMDYERFIQAHRETDADITVAALPMDEKRATAFGLMKIDEEGRIIEFAEKPKGEQLKAMKVDTTLFGLDDQRAKEMPYIASMGIYVVSKDVMVNLLRQKFPGANDFGSEVIPGATSIGLRVQAYLFDGYWEDIGTIEAFYNANLGITKKPVPDFSFYDRSAPIYTQPRYLPPSKMLDADVTDSVIGEGCVIKNCKIHHSVVGLRSCISEGAIIEDTLLMGADYYETDADRRLLAAKGSVPIGIGRNSHIKRAIIDKNARIGNDVKIINNDNVQEAARETEGYFIKSGIVTIIKDALIPSGTII

SEQ ID NO: 10853 - protein, 458 aa, Rhizobium sp. NGR234
MYSNSLIELDRAHLIHPVASYRGHEKLGVRVLASAKGATVTDASGRQLIDGFAGLWCVNAGYGHESIVEAATRQMRELPYATGYFGLGSEPAIRLASELAERAPGNLDHVFFTLGGSDAVDSTIRFIRYYWIGRGEPQRDQFISVEQGYHGSSTVGAGLTALPAFHAGFGIPFDWQHKIPSHYAYRNPVGDDPQAIIDASLAALRQKVEEIGPERVAAFYAEPIQGSGGVLVPPKGWMKAMRQLCQELGILFVADEVITGFGRTGPLFACHEDEIVPDFMTVAKGLTSGYVPMGAVFMGDHIYQTIADSAGAGAVGHGYTYSAHPVSAAVGLEVLKLYENELLDNGRKAGARLMAGLESLKDHPLVGDVRGRGMLAAVELVVDKEKKTPLPAKAEPARRIFDRAWENGLVIRAFANGVLGYAPPLCCTEAEIDGIVERTRKVLDETLEDPAVRSGLSD

SEQ ID NO: 10854 - protein, 225 aa, Bacillus subtilis
HGGYAVGGISGAHLNPALTIALAFVGDFPWKEVPVYIAAQMIGAIIGAVIIYLHYLPHWKSTDDPAAKLGVFSTGPSIPHTFANVLSEVIGTFVLVLGILAIGANQFTEGLNPLIVGFLIVAIGISLGGTTGYAINPARDLGPRIAHAFLPIPGKGSSNWKYAWVPVVGPILGGSFGGVFYNAAFKGHITSSFWIVSVILVVVLLGLYVYTKSHSAKTLSNSKYI

SEQ ID NO: 10855 - protein, 487 aa, Ralstonia metallidurans CH34
MGKATGFLEFARQNEGYEPVVKRVKHYKEFVFALSDSEAKIQGARCMDCGIPFCNNGCPVNNIIPDFNDLVYRQDWKSAIEVLHQTNNFPEFTGRICPAPCEAACTLGINELPVGIKSIEHAIIDKAWEEGWVQPQVPAHKTGKTVAVVGSGPAGMAAAQQLARAGHAVTVFEKNDRIGGLLRYGIPDFKMEKTLIDRRIEQMQAEGVTFRAGVMVTDGALPAGIKNYARETISAQALMEQFDAVVLAGGAEVPRDLPVPGRDLAGVHYALEFLIPQNKEVAGDGVNEIRAEGKHVIVIGGGDTGSDCVGTSNRHGATSVTQFELLPQPPEEENKPLVWPYWPIKLRTSSSHDEGCSRDWSVATKELVGENGKVKALKACRVEWKDGKMQEVPGSEFVLQADLVLLAMGFTNPVGSMLEAFGVDTDARKNAKASTEGDRAYYTNVPKVFAAGDVRRGQSLVVWAIREGRQAARSVDAFLMGHSTLPR

SEQ ID NO: 10856 - protein, 1166 aa, Zea mays
MASDSRPPKRSPSARRVAPRHAHHHHSQSSGGSTSRAGAGGGGGGAAATESVSKAVAQYNLDARLHAVFEQSGASGRSFDYSQSLRAPPTPSSEQQIAAYLSRIQRGGHIQPLGCTLAVADDSSFRLLAFSENAADLLDLSPHHSVPSLDSVALPPVSLGADARLYFSPSSAVLLERAFAAREISLLNPLWIHSRASSKPFYAILHRIDVGVVIDLEPARTEDPALSIAGAVQSQKLAVRAISRLQALPGGDVKLLCDTVVEHVRELTGYDRVMVYKFHEDEHGEVVAESRRDNLEPYLGLHYPATDIPQASRFLFQQNRVRMIADCHAIPVRVIQDPGLSQQLCLVGSTLRAPHGCHAQYMANMGSIASLVMAVIISSGGDDERTGRGAISSSMKLWGLVVCHHTSPRCIPFPLRYACEFLMQAFGLQLNMELQLAHQLSEKHILRTQTLLCDMLLRDSPAGIITQSPSVMDLVKCDGAALYYRGKYYPLGVTPTESQIKDIIEWLTVCHGDSTGLSTDSLADAGYLGAVALGDAVCGMAVAYITPSDYLFWFRSHTAKEIKWGGAKHHPEDKDDGQRMHPRSSFKAFLEVVKSRSLSWENAEMDAIHSLQLILRDSFRDAAEGTSNSKAIVNGQRQLGELELRGINELSSVAREMVRLIETATVPIFAVDTDGCINGWNAKIAELTGLSVEEAMGKSLVNDLIFKECDDIVEKLLSRALRGEEDKNVEIKLKTFGSEQSKGAIFVIVNACSSRDYTQNIVGVCFVGQDVTGQKVVMDKFINIQGDYKAIVHNPNPLLPPIFASDENTSCSEWNTAMEKLTGWSREEVVGKFLIGEVFGNCCRLKGPDALTKFMVVIHNAIEGHDSEKFPFSFFDKNGKYVQALLTANTRSKMDGKSIGAFCFLQIASAEIQQAFEIQRQQEKKCYARMKELAYICQEIKNPLSGIRFTNSLLQMTDLNDDQRQFLETSSACEKQMSKIVKDASLKSIEDGSLVLEKSEFSLGDVMNAVVSQTMSLLRERDLQLIRDIPDEIKDASAYGDQFRIQQVLADFLLSMAQSAPSENGWVEIQVRPNVKQNYDGTDTELFIFRFACPGEGLPADIVQDMFSNSQWSTQEGVGLSTCRKILKLMGGEVQYIRESERSFFLIVLELPQPRLAAGRENQLIC

SEQ ID NO: 10857 - protein, 308 aa, Zea mays
MCIYAADCSEIGLVQVRGYDKMRTLKRFYIKRVQDLHKEVQVFEEKDLMKSLSKSTCVPEVLSTCADQSYLGILLNCCLCCSLASILHTPLNETSARFFAASVVVALEELHQKSIIYRGVSADILMLDRSGHLQLVDFRFAKKLEGQRTYTICGIADSLAPEIVLGRGHGFPADWWALGVLIYFMLQSDMPFGSWRESELEPITKIAKGHLVMPVSFSAEVVDLITKLLVVDENARLGTSGAEAVKKHPWFDGTDWERIASGTCAAPEEITERINYCIETLNEDLSASPSVPIEDPDDLTAPEWIQDW

SEQ ID NO: 10858 - protein, 217 aa, Zea mays
MGRPPCCDKMGVKKGPWTPEEDLMLVSYVQEHGPGNWRAVPTNTGLMRCSKSCRLRWTNYLRPGIKRGNFTEQEEKLIVHLQALLGNRWAAIASYLPKRTDNDIKNYWNTHLKKKLKNMQGGEGGAGGKRPAVPKGQWERRLQTDIHTARQALRDALSLEPSATPLAKVEPLPTAPGCATYASSADNIARLLEGWLRPGSGKGPEASGSTSTTATTR

SEQ ID NO: 10859 - protein, 370 aa, Pseudomonas fluorescens PfO-1
MALECFMVDRSSSPGGPQRPPLSAASLVLRLGGIAVVVAALAGAFAYVHGSFDPQRLTPKALVDVLEKNNGVHPGFRRNHAKGVCVIGHFESSGEARAYSVAQVFNEPRTRVVGRFALPAGSPYAPDSAVPIRSLALRFTQANGQQWRTGMNSMPVFPVGTPEAFYQLQQAQSPDPATGKPDPTKVPAFFAAHPEAVPFLTWIKTAKPSASYATETYNSVNAFYLVDASGKKQAVRWSMTPLAQDAAGATAPEGSDFLEKDLVQRLAEGPLRFQLNITLANADDPVNDASKTWPAGRKVLNAGTLVLEKTQPQLSGECRDINYDPLVLPAGIQGSDDPLLAARSAGYADSYLRRTSEVSQLPTGKKEARP

SEQ ID NO: 10860 - protein, 444 aa, Lupinus luteus
MATIATIKARQIFDSRGNPTVEVDLTLSDGTFARAAVPSGASTGIYEALELRDGGSDYLGKGVSKAVDNVNTIIAPALIGKDPTEQTAIDNFIVQELDGTVNEWGWGKQKLGANAILAVSLAVCKAGASALKIPLYKHIANLAGNKNLVLPVPAFNVINGGSHAGNKLAMQEFMILPVGASTFKEALKIGVEVYHNLKSVIKKKYGQDAVNVGDEGGFAPNIQENKEGLELLKSAIAKAGYTDKVVIGMDVAASEFYTSDKKYVLNFKEDNNDGSQKISGEELKELYKSFVAEYPIASIEDPFDQDDWEHYGKITTEIGTEVQIVGDDLLVTNPKRVQKAIDSKSCNALLLKVNQIGSVTESIEAVKMSKKAGWGVMTSHRSGETEDTFIADLAVGLSTGQIKTGAPCRSERLAKYNQLLRIEEELGDEAVYAGVNYRNPVEPY

SEQ ID NO: 10861 - protein, 467 aa, Brucella suis 1330
MSYDVVVIGTGPGGYVAAIKAAQLGLKVAVVEKRKTFGGTCLNIGCIPSKALLHASEVFAEAGHSFDTLGVEVTPKLNLTKMLAHKDTTVKANVSGVEFLFKKNKITPYIGTGKIVGKGKVSVTSEDGKVEEIEAKNIIIATGSDVAGIPGVKVDIDEKVIVSSTGALSFDKVPGSLIVVGGGVIGLELGSVWARLGAKVTVVEYLDKVLGPMDGEVSKQFQRLLEKQGIAFKLGAKVTGVEKVGKGAKVTFEPVKGGDAETLEADAVLIATGRRPYTDGLGLQEAGVAVDERGRVAIDDHWRTNVEGIYAIGDVVQGPMLAHKAEDEGIAVAEIIAGQAGHVNFDVIPSVVYTQPEVASVGKTEEELKAAGIDYKVGKFPFTANGRARAMLHTDGFVKILADKATDRVLGAHILGYNAGEMIHELAVLMEFGGSSEDLARTCHAHPTMSETVRESALATFAKPIHM

SEQ ID NO: 10862 - protein, 468 aa, Erwinia carotovora subsp. atroseptica SCRI1043
MTLEHQFDYDAIIIGSGPGGEGAAMGLAKHGAKIAVIERHYNVGGGCTHWGTIPSKALRHAVSRIIEFNQNPLYSDNSRIIRSSFSDILRHADSVIGQQTRMRQGFYERNQCELFSGEASFIDAHTIAVHYPDNTHETLTAANIIIATGSRPYHPAEVDFNHPRIYDSDSILQLDHEPQHVIIYGAGVIGCEYASIFRGLSVKVDLINTRDRLLAFLDQEMSDALSYHFWNNGVVIRHNEEFDSIEGLSDGVIVNLKSGKKMKADCLLYANGRTGNTETLGLENIGLSTDSRGQLKVNSMYQTALAHIYAIGDVIGYPSLASAAYDQGRLAAQAIIKGDASAHLIEDIPTGIYTIPEISSVGKTEQELTAMKVPYEVGRAQFKHLARAQIVGMNVGSLKILFHRETKQILGIHCFGERAAEIIHIGQAIMEQKGEGNTIEYFVNTTFNYPTMAEAYRVAALNGLNRLF

SEQ ID NO: 10863 - protein, 208 aa, Fusobacterium nucleatum subsp. vincentii ATCC 49256
MDKVSHISNMANIYYVRQNMPLGLGHAILKAKSFIGDEPFVIALGDDIIYNPEKPVTKQMIEKYELYGKSMIGCQEVAKEDVSKYGIAKLGDKLDEATFQMLDFLEKPSVDNAPSRIACLGRYLLSGKVFKYLEETKPGKNGEIQLTDGILAMMKDEEEVLAYNFIGKRYDIGSKFGLLKANIEFGLRNDETKEDIKEYLKNLDIEKV

SEQ ID NO: 10864 - protein, 154 aa, Triticum aestivum
  unsure (1)..(154): unsure at all Xaa locations
MAPTVMASSATSVAPFQGLKSTAGLPVSRRSNGASLGSVSNGGRIRCMQVWPIEGIKXFETLSYLPPLSTEASSSRSDYXIRSKWVPCLRFNKVGSSPVEHNHLLGYXNGRIGHXELPIFXXNDXQSDNEVEEVKKDTLPYFRSGTNASRHQTL

SEQ ID NO: 10865 - protein, 478 aa, Helicobacter hepaticus ATCC 51449
MSKKFTTATGTPLGDNQNSITAGKKGPTLLQDTWLLEKLAHFDRERIPERVVHAKGSAAYGELTITNDITQYTKAELFNKVGKKTKAFLRFSVVAGERGAADAERDVRGFALKLYTNEGNWDIVGNNTPVFFIKDAIKFPDFIHTQKRDPKTNMKSPTAMWDFWSLHPESLHQVTILMSDRGIPRSYREMHGFGSHTYSFINAKNERFWVKFHFVCLQGIHNLTNKESEAVIAKDRESHQKDLFENIEKGNFPKWRFCIQVMSEKEAENYRFNPFDLTKVWSHKDYPLIEVGILELNKNPENYFAEVEQAAFNPANIVPGVGYSPDKVLQGRLFSYGDTQRYRLGINHTQLPVNAPIVPVNNTHRDGFMQQGQFGDRRNYEPSYFNDYVEDKNALEPPLFVQEGDVMYKYDHREYEDDYFVQAGDLYRLMTAEQKEALCQNIKESMEGVPDEIKKRQLEHFKKADKAYGKRVAELLGL

SEQ ID NO: 10866 - protein, 411 aa, Xylella fastidiosa Ann-1
MSAVSESVLSLSRYYLPVYRPCQVVLVRGQGSRVWDEQGRDYLDLAAGIAVCCLGHCDPDLVAALVEQAGRLWHTSNVFYSEPSLRLAQELVDVSRFAERVFLCSSGTEANEAAIKLVRKWAAAQGRLPEHRTIVTFRGSFHGRTLGAVTATAQPKYQEGYEPLPGGFRYVDFNHIEALEAAMVGGDVAAVMLEPIQGEGGVMPVVSGYLAQVRALCDRYGALLVLDEIQCGMGRTGALFAYWQEKVVPDIVTLAKGLGGGFPIGAMLAGPKVAEVMQFGAHGTTFGGNPMAAAVARVALRKLASVEIAANVQRQSVALRAGLEEISEAFGGVFTQVRGRGLMLGAVLAPLYAGQASAILEVAAEHGVLLLQAGPDVLRFVPALNVSDEELADGLVRLRAALGDYVSRFGG

SEQ ID NO: 10867 - protein, 274 aa, Oryza sativa
MDPKLVEVTQLFSRFKAAFARNDFDTCVDLLSQLKVRLTKFPSLPPSFQQTPNAVEELKIARDIYEHAVVLSVKIEDQDAFERDFCQLKPYYMDTCGIIPPSPQEYPILGLNLLRLLVQNRIAEFHTELELLPVTALENPCIKHAVELEQSFMEGAYNRVLSARQAVPHETYVYFMDLLAKTVRDELAGCSEKGYDYMSIAEARQVLMFSSDKELHQYIAEEHPEWEVKDGSVFFQKAKETQPCKEIPSLQVINQTLSYARELERIVEMRMLQL

SEQ ID NO: 10868 - protein, 503 aa, Avicennia marina
MSTMAIRMPTRQLFIDGEWREPVQRKRILIINPANEQTIGDIPAATAEDVDIAVEAARKAFFRNSGKDWSSTTGAHRAKYLRAIAAKIKDRKAELVKLEAIDSGKPLVEASLDMDDVIGCFEYFAGIAERLDSEQRTPVSLPMETFKCHLLKEPIGVVGLISPWNYPLLMAIWKVAPALASGCTAILKPSELASVTCLELAEVCMEVGLPPGVLNILTGLGPEAGAPLVTHPHVAKISFTGSDTTGVKIMTAAAQLVKPVTLELGGKSPIVVFEDVDLDTAAEWTLFGCFWTNGQICSATSRLLVHESIAATFLEKLVKWCEKIKISDPLEEGCRLGPIVSRRQYEKVMKYISTAKEEGATILCGGARPEHLEKGYFVQPTIITDVKTSMQIWIEEVFGPVLCVKTFATEDEAIDLANDTHYGLAAAVISKDLDRCERMAKAFQVGAVWVNCSQPCFYQAPWGGKKRSGFGRELGERGLDIYLNVKQVTQYVSSEPWDWYKSP

SEQ ID NO: 10869 - protein, 504 aa, Zea mays
  unsure (1)..(504): unsure at all Xaa locations
MDPYKHRPSSGSNSSFWTTNSGAPVWNNNSALTVGQRGPILLEDYHLIEKLAQFDRERIPERVVHARGASAKGFFEVTHDVSHLTCADFLRAPGVQTPVIVRFSTVVHERGSPETLXRDPRGFXAVKFYTREGNXFDLVGNNMAXFFIRDGMKXFPDMVHAFQAXPKTNLQENWRIVDFFSHHXGSLHMFTFLXFDDVGIPLNYRHMGGALGVNTYTLXINRDGKASTLVKFHWEALLVGVKCLLDNEAVDWVEAPGHSHGXTRDLYDSIAAGNYPEWKLYIQTIDLDHEDKFDFDPLDVTKTWPEDIIPLQPVGRMVLNKNVDNFFAENEQIAFCPAIIVPGIHYSDDKLLQTRIFSYADTQRHRLGPNYLMLPVNAPKCAXHNNHHDGFMNFMHRDEEVNYFPXSRFDPARHAEKVPIPPRVLTGCREKCIIQKENNFKQAGERYRSFDPARQDRFIQRWVDALTDPRVTHEHRTIWISYWSQCDXXLAQKLASRLNLKPSM

SEQ ID NO: 10870 - protein, 296 aa, Zea mays
  unsure (1)..(296): unsure at all Xaa locations
MMRETYMDVLPPVDHIAARSNWFPAAARLWTAAENKQFERALAGLDLCRPDWEEVARAIXPGRTVREVVSHFKHLEVDVQQIESGQVPLPAYGGGASSFTLQWDGYGPGPGDFRHGYRFAGGCGRRHHGRTPEQERKKGVPWTEEEHRLFLLGLKKYGKGDWRNISRNFVQTRTPTQVASHAQKYFIRLNSGGKDKRRSSIHDITTVNLTDDQPPSPSQSSLITSQSNAPATAPAAGICQVPLAADAKRHGAGTLPFSSPNRTSAAPAYRMEFHDQQGLQCGPLHDQLLASQSVLF

SEQ ID NO: 10871 - protein, 352 aa, ASPERGILLUS NIDULANS FGSC A4
MSVPEVQWAQVVEKAGTPPVYKQVPVPKPGPDEILVKMRYSGVCHTDLHAMKGDWPLPSKMPLIGGHEGAGVVVAKGELVKDEDFKIGDRAGIKWLNGSCLSCEMCMQADEPLCPHASLSGYTVDGTFQQYTIGKAALASKIPDNVPLDAAAPILCAGITVYKGLKESGARPGQTVAIVGAGGGLGSLAQQYAKAMGLRTIAIDSGDEKKAMCEQLGAEVFIDFSKSADVVADVKAATPGGLGAHAVILLAVAEKPFQQATEYVRSHGSVVAIGLPANAFLKAPVFTTVVRMINIKGSYVGNRQDGVEALDFFARGLIKAPFKKAPLQDLPQIFELMGQGKIAGRYVLEIPE

SEQ ID NO: 10872 - protein, 484 aa, Rhizobium sp. NGR234
MKLKDKELFRQAGVIGGEWIGAASGDVVEVFDPASQAVLGTVPDMGTAETRAAIEAAETAFGPWKKKTHAERAALLERWHALMIEHLEDLALILTLEQGKPLDEARGEIRYGAAFVKWFAEEARRIGGHTIPSPTPDRRIVVLKEAVGVCAIVTPWNFPNAMITRKVAPALAAGCTVVIKPSEFTPFSALALGVLAERAGIPAGVVNIVTGMPTAIGNEIMANETVRKISFTGSTRVGSLLMRGAADSVKRLSLELGGNAPFIVFDDADLDLAVEGAIASKFRNGGQTCVCANRILVQSGVYDAFAEKLAARVNAMKVGPGTEPGVAIGPMINAAAIDKIDRHVEDALAKGAKIAARGRSLPVGRQYTAPLVLTGATTEMLLASEETFGPVAPLFCFETEEEAITIANGTPFGLAAYFYTENLKRSWRVAEALEFGMVGLNTGAISTEVAPFGGVKQSGLGREGAQVGIEEYLELKSFHIGGLA

SEQ ID NO: 10873 - protein, 347 aa, Rhizobium sp. NGR234
MKSYSIALIPGDGIGQDVTDAAWQVLSTVARHSGFTLTATPFPWSCAFYKETGAMMPPDGIETLRRFDAILLGAVGWPAEVPDSVSLHGLLLPIRKAFVQYANIRPHRLLSGVKGPLKAEGFDILCIRENTEGEYSGAGGRVHQGTADEVAVETSIFTRTGVERILRFGFDQARQRRRKLASVTKSNAQKYSMVLWDEITRELAAEYPDVEVTSYHIDAMAARMVMAPESLDVVVASNLFGDILTDLGAAIQGGLGFAASANINPDRSAPSMFEPVHGSAPDIAHLGIANPIAAIWSGAMMLDHLGQARAARKVIEALERTTARGIGTVPGKNRTETITAAVLAALD

SEQ ID NO: 10874 - protein, 215 aa, Marinomonas mediterranea
AIVVADNTFATPLNQSPLTLGVDVVLHSATKFLSGHADAMGGVACGAESLMSQVRHYREINGASLDPFSAYLIIRGIKTLALRMRQQQASAMALAEYLQTEPLVEAVNYPGLPTHTGHEIAKAQMKGFGAIVSFVLKGGMETVTKLLPKLQFAHCAGNLGAVETIYGPARTTSHVENTLEERLALGISEGLVRISVGIEDTEDLVADLKQAFASL

SEQ ID NO: 10875 - protein, 725 aa, Neurospora crassa
MKSSLLVLTPATAALAFPDCGQPCIAPALDSSGCATLACLCERTHELQTMFECFMANCNAQEYHPAITRISNDCINHGPAQYAVPMSYISGSTKIASPSVDRMPYSLNPTLHLFTTNPTSIKENCPDGSGNGNGNGGSGLGAGGLPPSFPFGPAGSGAGAYGNGAGNGAGNGGNGGNGNGGNGAGSGLGGFGAGAGAYGNGAGNGAGNGAGNGAGNGAGNGAGNGFGGNGNSDLGNSAGNGAGNGLGVNGIGGLGNSAGGLGDGSGAYGNGAGAGNGAGNGGLGNGSGNGLGNGGSGANNGNGGMGDCSGMGGGAGGPGGGAGGLGNGASGPGNGVGGLGNGAGGLGYSSGGPGGGTSNGNGNIGASNNNGNSAGNGNNNGNGSGNGNGAGSGAPCPDGNGNGNGNGNGNGNGNNGAGNGGNGGNGNGNGGNGSNGGGGAGGPLPSPAQMQGPLVQTIFVIGTPSPEAIVPGSGAGNGGGNGNGNGSGSGNSNGSGAGNGNGGNGSGNGNGAGNGGNGGNGNGNGNDAGAGNGGAPAPTPCPTGSGPSSFLVLTITVPQPARVVEKKQYWNANVMAYGGPDDGAGAAPGSGGSGVAPGNGNGGSGSAPGSGGSGVAPGNGNGGSGVAPGNGGMGPGNGGSGVAPGNGNGGSGSAPGNGGSGSAPGSGGSGVAPGNGNGGSGVAPANGAPPAQVTHSLADTNTPSVGLLLIPVTVMIGWGSLLLFV

SEQ ID NO: 10876 - protein, 298 aa, Zea mays
MAVDLMGCYAPRRANDQLAIQEAAAAGLRNLELLVTSLSTQAAAPHRAADQPFGEIAGQAVSKFRKVISILDRTGHARFRRGPVEPPPPTPPPPPVVPGPAPLAAVSVAQPPQSLTLDFTKPNLAVSAATSVTSTSFFSSVTAGEGSVSKGRSLMSSGKPPLSGHKRKPCAGAHSEATTNGSRCHCSKRRKNRVKRTIRVPAISSKVADIPSDEYSWRKYGQKPIKGSPYPRGYYKCSTVRGCPARKHVERATDDPAMLVVTYEGEHRHTPGAVQGPSPLATASPVPVAVSAGNGLVV

SEQ ID NO: 10877 - protein, 420 aa, Buchnera aphidicola str. APS (Acyrthosiphon pisum)
MKKINILVPDLPESISDATVVKWHKKIGDTVHCDDNIVDIETDKVMLEVSSPCDGILQSILEKEGKVVISQQTLGEINKSTVVDNHLSNNHIIEKEDNLLKKEEKYITTEEKKEIEYLLKDNHKHLTPSMRRSVKIHNINNGFLNQVIETSKKTNFENIIKEEKKESNQILFNHNIFNANENNKNNNNKVTNRVKMTRLRQRIAERLLDSKNNTAMLTTFHEVNMKPIILLRKKYGEDFEKKHNVRIGFMSFFVKAVIQALKNFPEINAYIDQTDIVFYKNFDISIAISTPRGLITPVIRNADTMTMAEIEKKIKDFSIKGLQNKINIKELMGGNFTITNGGVFGSLMSTPIINPPQTAILGMHVIQERPVVVNGQIKILPMMYLALSYDHRLIDGKESVGFLINIKNILEDFNRIAIDV

SEQ ID NO: 10878 - protein, 230 aa, Escherichia coli
RPVDRIGWVKGIDDNWHLTLFIENGRILDYPARPLKTGLLEIAKIHKGDFRITANQNLIIAGVPESEKAKIEKIAKESGLMNAVTPQRENSMACVSFPTCPLAMAEAERFLPSFIDNIDNLMAKHGVSDEHIVMRVTGCPNGCGRAMLAEVGLVGKAPGRYNLHLGGNRIGTRIPRMYKENITEPEILASLDELIGRWAKEREAGEGFGDFTVRAGIIRPVLDPARDLWD

SEQ ID NO: 10879 - protein, 381 aa, Lactobacillus plantarum WCFS1
MKFETQLIHGGISEDATTGATSVPIYMASTFRQTKIGQNQYEYSRTGNPTRAAVEALIATLEHGSAGFAFASGSAAINTVFSLFSAGDHIIVGNDVYGGTFRLIDAVLKHFGMTFTAVDTRDLAAVEAAITPTTKAIYLETPTNPLLHITDIAAIAKLAQAHDLLSIIDNTFASPYVQKPLDLGVDIVLHSASKYLGGHSDVIGGLVVTKTPALGEKIGYLQNAIGSILAPQESWLLQRGMKTLALRMQAHLNNAAKIFTYLKSHPAVTKIYYPGDPDNPDFSIAKQQMNGFGAMISFELQPGMNPQTFVEHLQVITLAESLGALESLIEIPALMTHGAIPRTIRLQNGIKDELIRLSVGVEASDDLLADLERGFASIQAD

SEQ ID NO: 10880 - protein, 320 aa, Buchnera aphidicola str. APS (Acyrthosiphon pisum)
MIKKIGVLTSGGDAPGMNAAIRGVVRTALSERLEVFGIYDGYLGLYENRMVQLDRYSVSDMINRGGTFLGSARFASFYQDKIRSIAVQNIKKRKIDALVVIGGDGSYIGAQKLTEMGIPCISIPGTIDNDVSGTDYTIGYFTALQTVVEAIDRLRDTSSSHQRISIVEVMGRHCGDLTLAAAIAGGCEFIVLPEIDYKKEDLVIEIQAGIAKGKKHAIVAITEYICDVEELAQYIEKKTNRETRATILGHIQRGGAPVVYDRILASRMGAYSVELLIKGYQGKCVGIQNEKMVFNDIKNALKNMKRTFKKDWLITAKKLY

SEQ ID NO: 10881 - protein, 263 aa, Buchnera aphidicola str. APS (Acyrthosiphon pisum)
MNIYRKKNIIKKCFMEFFGTGLVMFFGIGCLAASKLTNANFTQFEISCIWGFGVSIAIYFSSSISGAHLNPAVTIFFWLSSKLNKRKVLPYIISQTLGSFFFTMLTYYLYNNLLISFERNNNVVRGTQESLNLASIFCVYPNYNNSFIYDFIIEIFSTALFILIVLEFNNRNSNYFLYNRSVAPILTGFLVCMINLVINPLNNISLNPARDLGPKILLSLTGWGLFSFTGGNDNILYCFIPIMGPILGANLGGWIHKTLINNS

SEQ ID NO: 10882 - protein, 408 aa, Brucella suis 1330
MATEIRVPTLGESVTEATIGKWFKKAGEAIAVDEPLVELETDKVTVEVPAPAAGVLAEITAKEGDTVEVGALLGQISSDGAAVAAAPAQKKEEAKPAAAAPAAAPVASASSGPAMQPAPAAAKLLAESGLSADQVEGSGKRGQVLKGDVLDAITKGVSAAPAAPVAARPASSADDASREERVKMTRLRQTIARRLKDAQNTAAMLTTFNEVDMSAVMELRNKYKDVFEKKHGVKLGFMGFFTKAVTHALKEIPAVNAEIDGTDIVYKNFCHVGMAVGTDKGLVVPVIRDADQMSIAEVEKELARLARAARDGSLSMADMQGGTFTITNGGVYGSLMSTPILNAPQSGILGMHKIQERPMVVGGQIVVRPMMYLALSYDHRIVDGKEAVTFLVRVKESLEDPERLVLDL

SEQ ID NO: 10883 - protein, 180 aa, Arabidopsis thaliana
MASSMLSSATMVASPAQATMVAPFNGLKSSAAFPATRKANNDITSITSNGGRVNCMQVWPPIGKKKFETLSYLPDLTDSELAKEVDYLIRNKWIPCVEFELEHGFVYREHGNSPRYYDGRYWTMWKLPLFGCTDSAQVLKEVEECKKEYPNAFIRIIGFDNTRQVQCISFIAYKPPSFTG

SEQ ID NO: 10884 - protein, 466 aa, Ralstonia eutropha JMP134
MKTIQTDVAVIGAGTAGLAAYRAAIAAGKRAVIIEGGPYGTTCARVGCMPSKLLIAAAEAAHELRHTAPFGVHVDGQIRIDGREVMARVRSERDRFVGFVVRGVDGIPEADRIRGYASFIDNTTLEVAADDGNITVRASRVVIATGSRPVLPAPFKVFGDRLIVNDDVFAWEDLPRSVAVFGPGVIGLELGQALSRLGVRVRVFGVRGSLGPLTDPVIRRYADETFRKAFYLDTEASVTEMAREGDLARITYIDREGKSVAETFDYVLAATGREPNVRGLGLENTGLELDARGVPVFDPVTLQCGVSPVFIAGDANNILPLLHEAADEGKAAGENAATYPRVLPLARRAPLAVVFSDPQIAMVGKRFADLAEGSFVTGEVSFEDQGRSRVMLRNRGLMHVYADKATGQFLGAEWTGPRAENIAHLLAWSYQQGLTIAQMLAMPFYHPVVEEGLRTALRDAAAKLEG

SEQ ID NO: 10885 - protein, 1135 aa, Zea mays
MSLPSNNRRTCSRSSSARSKHSARVVAQTPVDAQLHAEFEGSQRHFDYSSSVGAANRPSASTSTVSTYLQNMQRGRYIQPFGCLLAVHPDTFALLAYSENAPEMLDLTPHAVPTIDQRDALGIGVDVRTLFRSQSSVALHKAAAFGEVNLLNPILVHARTSGKPFYAILHRIDVGLVIDLEPVNPADVPVTAAGALKSYKLAAKAISRLQSLPSGNLSLLCDVLVREVSELTGYDRVMAYKFYEDEHGEVISECRRSDLEPYLGLHYPATDIPQASRFLFMKNKVRMICDCCATPVKVIQDDSLAQPLSLCGSTLRASHGCHAQYMANMGSVASLAMSVTINEDEEEDGDTGSDQQPKGRKLWGLVVCHHTSPRFVPFPLRYACEFLLQVFGIQLNKEVELAAQAKERHILRTQTLLCDMLLRDAPVGIFTRSPNVMDLVKCDGAALYYQNQLLVLGSTPSESEIKSIATWLQDNHDGSTGLSTDSLVEAGYPGAVALREVVCGMAAIKISSKDFIFWFRSHTTKEIKWGGAKHEPVDADDDGRRMHPRSSFKAFLEVVKWRSVPWEDVEMDAIHSLQLILRGSLPDEDANRNNVRSIVKAPSDDMKKIQGLLELRTVTNEMVRLIETATAPVLAVDIAGNINGWNNKAAELTGLPVMEAIGRPLIDLVVTDSIEVVKQILDSALQGIEEQNMEIKLKTFHEHECNGPVILKVNSCCSRDLSEKVIGVCFVAQDLTRQKMIMDKYTRIQGDYVAIVKNPTELIPPIFMINDLGSCLEWNKAMQKITGIKREDAINKLLIGEVFTLHDYGCRVKDHATLTKLSILMNAVISGQDPEKLFFGFFDTDGKYIESLLTVNKRTDAEGKITGALCFLHVASPELQHALQVQKMSEQAATNSFKELTYIRQELRNPLNGMQFTCNLLKPSELTEEQRQLLSSNVLCQDQLKKILHDTDLESIEQCYMEMNTVEFNLEQALNTVLMQGIPLGKEKQISIERNWPVEVSCMYLYGDNLRLQQILADYLACALQFTQTAEGPIVLQVMSKKENIGSGMQIAHLEFRIVHPAPGVPEALIQEMFQHNPGVSREGLGLYISQKLVKTMSGTVQYLREADTSSFIILMEFPVAQLSSKRSKPSTSKF

SEQ ID NO: 10886 - protein, 308 aa, Neisseria meningitidis MC58
MSFAFFFPGQGSQSLGMMNGFAEHAIVKNTFAEASAILGQDLWAMINGSDAEIIGQTVNTQPIMLAAGVAVYRAYLEAGGKTPAAVAGHSLGEYTALVAAGALNFADAVKLVRLRAELMQSAVPQGVGAMAAILGLEDEQVKAICAEAAQSEVVEAVNFNSPGQIVIAGNAAAVGRAMAAAKEAGAKRALPLPVSVPSHCSLMKPAADKLAEALKTVEIKQPQIRVIHNADVAAYDDADKIKDALVRQLYSPVRWTETVNALVSDGIAESAECGPGKVLAGLAKRINKAAACSALTDAGQVAAFIEAH

SEQ ID NO: 10887 - protein, 148 aa, Pinus resinosa
MAAKRITKELQDLQRDPPISCSTGPVGDDLFHWQATIMGPVDSPYAGGVFFIVIHFPPDYPFKPPKVTFKTKVYHPNVNSNGSICLDILKEQWSPALTVSKVLLSICSLLTDPNPDDPLVPEIAHIYKSQRARYEETARAWTQKYAMN

SEQ ID NO: 10888 - protein, 349 aa, Oceanobacillus iheyensis HTE831
MEALNLYGIEDLRYEDTPKPMIEKDDDVIIKVKSVGICGSDTSRYKKLGPYVEGMTFGHEFAGEVIEVGKSVTNFKSGDRVVACPTFSCGNCHYCREGHPTRCVELTVIGARNPGAYAEYTKLPEGHVKILPDSIDDDTAALVEPSAVVAHGFYRASITPGSSVAIMGVGSIGLLAVQWAKIFGASKVIAIDIDDHKLKIAQELGADIVVNPMKENAEGIVKQHTDELGVDLAVESAGSPITSEQVLALPKKGGEVVFLGIPYGDITLKRYYFEKIVRNELRILGSWNALSAPFPGKEWNATLHYMSTGQLNIKPMISHRLGLQAGPEIFHQITNKLSDAVKVIFHPGK

SEQ ID NO: 10889 - protein, 279 aa, Zea mays
MGPINGRRRRRLLLLAAVALAGAAVDAQPDYFNPKNFNPSMAIVMVVLVTAFFLLGFFSIYLRRCAGPPLGGPDDHYHVRQLGLGLGNNSYAPPPSRRMRGLDRAVLDSFPTMAYADVRAHKGALECAVCLSEFDDGDTLRLLPRCAHAFHTDCIDAWLASHVTCPVCRAILLVPDAAEPTALAAAPVTAAPDDDHAVVVDAAAAAGETEDQRLREGGGRRAAADRQRQARAAKQQVAVPALAHHGPLNFRRVAAWLRSSFTPSGRVLYSFFLQQKACT

SEQ ID NO: 10890 - protein, 386 aa, Erwinia carotovora subsp. atroseptica SCRI1043
MTRKQATIAVRSGLNDDEQYGCVVPPIHLSSTYNFTGFNQPRAHDYSRRGNPTRDVVQRALAELEGGAGAVMTSSGMSAIMLVCTVFLRPGDLLVAPHDCYGGSYRLFDSLSKRGAFRVKFVDQGDTHALNAALAEKPKLVLVESPSNPLLRVVDIAAICQAAREAGAVSVVDNTFLSPALQKPLELGADLVVHSCTKYLNGHSDVVAGAVIAKDVDTITELAWWANNIGVTGAAFDSYLLLRGLRTLSPRMAAAQRNAQQVVEFLQTQPLVKALYHPSLPNNPGHDIARRQQSGFGAMLSFELDGDEDTLRRFLASLELFTLAESLGGVESLISHAATMTHAGMAPEARAAAGISETLLRISTGIEDGDDLVADLDRAFQAAAKR

SEQ ID NO: 10891 - protein, 344 aa, Oceanobacillus iheyensis HTE831
MKALVKTELGHGNLHIQNVEEPSVSSHQVKIKVAYAGICGSDIHTYEGHYKVAAPVTLGHEFSGRIVEVGEGVTDFKVGDRVTSETTFSICGECRYCQTGDYNLCNHRKGLGTQQNGGFTNYLIAREESLHHLPDEVDDRSASMTEPLACTYHAIQKINIKPGDLVVVLGPGPIGLLAAQVAKSYGATVMMSGLDNDKIRLDKAKEVGIDYVINIQEEDIKEKIAALTDGYGVDVVLECSGSIHAANQGLDLLRKKGSYAQVGIFPDSHVKFDMEKVIQKEIHVVGSRSQKSADWEPSLQLMKEKKVDAKALVTHEFTIDQWDEAYQAIKDGEAIKVLLKPLQD

SEQ ID NO: 10892 - protein, 768 aa, Nostoc punctiforme PCC 73102
MEMNLQFPGINLISLKEAPIHISSQIQPHGVLLVLEEPELKILQVSTNTLKVFGIAPENMLHKKLEDLLDPFQIERIKTGLSGENLDFINPTKVWVRKKGDEYVVFDAIFHRNIEGFLILELEPAITQENIPFLSFYHLARASINQLEKTANLRDFCQVIVQEVRKITEFDRVMLYKFDDDGHGSVIAEEKLESLEPYLGLHYPESDIPKPARKLFAANSIRIIPDAYSQPVKLFPVNNPISDRPINLTNSILRSAASCHTEYLHNMGVGASLTISLIKDQKLWGLIACHHQSPKYVSYELRKACEFLGRVIFAEISAREETEDYYHRINLTHLQSILIEYMSQEENFIDGLVKNPQHLLDLASAQGAAVCFAGNCTVVGETPREEDLNFLVQWLKNNVEEEVFYTDSLPQIYPDAESFKNVASGLLAIPIAKRTYVLWFRPEVIQTVNWGGDPNKAFEVSQSEGNVRLCPRKSFELWKETVRLTSLPWKDVEVKAALELRKAIVNIVLRQADELAQLAQDLERSNAELKKFAYVASHDLQEPLNQVVNYVQLLEMRYSEELDEDAQEFISYAVQGVSLMQTLIDDVLAYSKVDMQAIAFQMNDVETALMRGLGNLRQRINETGATITHDPLPTVMADSTQLMQLFQNLIGNAIKFHSDQPPQIHVGAERIEDAWLFSVRDNGIGIDPKFSDRIFVIFQRLHTRDEYTGTGMGLAICKKIVECHRGRIWVESELGQGATFYFTIPVGGRELERRNGRKTQNHLFGRGQ

SEQ ID NO: 10893 - protein, 260 aa, Triticum aestivum
GAKPEQRRKASETSVADEKAPAGLGRYEADAEDGQEGAGAEKSGRSGLLWRGGSAYDAWSSGASNQVARVPLTLRCSSAQPGMVRGILLQRFYGLLGSWTADPISLLSLEYRTRNAKDEVDFRNPVIQWIEVLDGLLGRHWRNVGLAFNCTFLLFGSVIQLIGCASNIYYVNDHLDKRTWTYIFGACCATTVFIPSFHNYRVWSFLGLLMTTYTAWYIAVASLMHGQADAVKHSGPTTIMLYFTGATNILYTFGGHAVTV

SEQ ID NO: 10894 - protein, 502 aa, Avicennia marina
  unsure (1)..(502): unsure at all Xaa locations
MAIRIPSRQLFIDGKWREPVNRKRLPIVNPATEETIGDIPAATAEDVNIAVEAARKAFFHNGGKDWATASGAHRAKYLRAIAAKVTEKKEELAKLEVLDCGKPLEEAAWDMDDVAGCFEYFADLAERLDSNQIPVSLPMDTFKCHVLKEPIGVVGLVXPWNYPLLMATWKVAPALAAGCTAILKPSEIASVTCLELAQVCKEVGLPAGVLNILTGLGPEAGAPLASHPHVDKITFTGSGATGSKIMTAAAQLVKPVTLELGGKSPIVVFEDVDLDTAAEWTLFGCFWTNGQICSATSRLLVHESIATTFLEKLVKWCEKIKISDPLEEGCRLGPIISRGQYEKVMKFISTAKEEGATILCGGARPEHLEKGYFVQPTIITDVKTSMQIWIEEVFGPVLGVKTFSKEDEPFELANDPHYGWAAAVLSQDLERCERMTKAFQAGIVWVNCSQPCFCQAPWGGKKRSGFGRDLGEWGLDNYLNVKQVTRYVSSEPWDWYKSPSKL

SEQ ID NO: 10895 - protein, 345 aa, Marinomonas mediterranea
MRGFFVTATNSAVEMLIANSNTFFILLGAIMVFAMHAGFAFLEVGTVRSKNQVNALVKIMTDFAISALVYFFIGYQIAYGINFFESAATLAEQSGYALVKFFFLMTFAAAIPAIISGGVAERARFYPMLISAAVIVGVAYPFLEGLIWNGNYGFQDWLETQFGAPFHDFAGSIVVHGFGGWVALAAIILLGTRNGRFRGDKLVAFAPSNIPFLALGAWILCIGWFGFNVMSAQTLDGISGLVAVNSLMAMVGGIIAAMILGKNDPGFIHNGPLAGLVAVCAGSDIMHPIGALATGLVAGALFTWLFTLIQQKFQHIDDVLGVWPLHGICGAWGGIAAGIFGLESL

SEQ ID NO: 10896 - protein, 330 aa, Zea mays
MVRPPCCDKEGVKKGPWTPEEDLVLVSYIQDHGPGNWRAVPTRTGLMRCSKSCRLRWTNYLRPGIRRGNFTEQEEKLIVHLQALLGNRWAAIASYLPERTDNDVKNYWNTHLKRKLQAGGGDGDGDGAAKPPAHRPPSSNSKGQWERRLQTDINLARRALREALTPLGDLKPQLQPPRAGAGAGTGGGDSPPASSSSSQSSPAPAAFAAAAAGPYVLTAENISRMLDGWAGRKVRGGGTPGTPGGAESASTGSSDASEVSYGGAAVASAAPAPACGGPVFEYEAKPGVPTSHQQMPLSAIESWLFDDDSHLHHAVQSASLLDAAPMDYPF

SEQ ID NO: 10897 - protein, 475 aa, Rhizobium sp. NGR234
MKHARKFYIDGEWVEPSVSKTLEVIDPSTEQPMGTIALGSAADAEKAVAAARRAFASYSQTSKQERVELLRRILTILKRRNDELGDIISREMGAPLAMARAEQAGIGAAHFEQAIKSFETFAFDYMQGTTRIVHEPVGVVAMITPWNWPINQIACKVAAALATGCTMVLKPSEIAPFNAVLFAEIMDEAGVPKGVFNLVQGDGPTVGAALASHPDVDMVSFTGSTRAGIAVAQAAAPTVKRVHQELGGKSPNIILRSADFPAAVAAGVRRCFGNSGQTCTAPTRMLVPAERMDEAGAIAARQADALVVGPPSDSRTDLGPVASAAQFDKIQALIERGIAEGAELVAGGLGRPSHLNAGYYVRPTVFARVTNQMSIAREEIFGPVLSIIGYDSEDEAIAVANDTPYGLAAYIQGDPKETRALAGKLRSGTVRLNSSGWDSAAPFGGYKQSGNGREYGKFGLHEFTEIKGIVGFLNE

SEQ ID NO: 10898 - protein, 256 aa, Pseudomonas putida
MNDQRKGDHAEPTTHFGYQDVPESQKAKKVAEVFHSVAAKYDLMNDVLSGGMHRLWKRFTIELSGVRAGNRVLDIAGGTGDLAAKFSRLVGPTGQVVLADINESMLKVGRDRLLDRGVAGNIEFVQADAEKLPFPDNHFDCVTIAFGLRNVTHKDEAIRSMLRVLKPGGRLLVLEFSKPTNKLMSKAYDAYSFAFMPLAGKLITNDSESYRYLAESIRMHPDQETLKAMMVEAGFDRVTYHNMTSGIVAVHRGIKP

SEQ ID NO: 10899 - protein, 173 aa, Lemna gibba
MMVSTAAVARVRPAQTNMVGAFNGCRSSVAFPATRKANNDLSTLPSSGGRVSCMQVWPPEGLKKFETLSYLPPLSVEDLAKEVDYLLRNDWVPCIEFSKEGFVYRENNASPGYYDGRYWTMWKLPMFGCTDASQVIAEVEEAKKAYPEYFVRIIGFDNKRQVQCISFIAYKPT

SEQ ID NO: 10900 - protein, 396 aa, ASPERGILLUS NIDULANS FGSC A4
MDSQDQSISPDEIALYDRQIRLWGVKAQEKLRSANILIITFKALANEVAKNLVLAGIGSLTIIDDGIVTEEDLGAQFLVNQDCIGQNRAQAAAPAVRAYNKRVKVYADASGISSKPPEFFGQFDLTIATELDFAMYNVINSACRVAGRPFYAAGLHGFYGFVFSDLIEHDFVITREKSNVPSPINETSTRTILNITSKKENDKMIEMVTKREKYHPLLLANTSPLPDELTRLPRRRKQVTPLLSCLRALWEFQKINHGRLPTFSHQDLESFTKLARDAHQELKLDISTLDSAFLRTFLSNLGSELSPVAGFLGGALAQDVMNVLSAREQPLQNLLLVDGERSVAPIYSLHPFYSMDTPNAMAAVPPAPNPIPLNGHPGIENGQPSIGNGQPGVGLS

SEQ ID NO: 10901 - protein, 377 aa, Zymomonas mobilis
MTAIVSIHGRQVVDSRGNPTVEVDVTLEDGSFGRAAVPSGASTGVHEAVELRDGDKTRWGGKGVTKAVHAVNNEIANAIIGLEAEDQELIDQTMIKLDGTPNKGKFGANAILGVSLAVAKAAAEARGLPLYRYVGGTAAHVLPVPMMNIVNGGMHADNPIDFQEFMIAPVGASSINEAVRIGTEVSHTLKKELSAKGMNTNVGDEGGFAPSLDSASSALDFIVDSISKAGYKPGEDVFIALDAASSEFYNKDQNIYDLKGEGRKLTSAQLVDYYVELCGKYPIYSIEDLAEDDFEFWKILTEKLGDKVQLVGDDLFVTNVKRLSDGIERGIANSLLVKFNQIGSLSETLAAVNMANDASYTPVMSHRSGGNRRHHDC

SEQ ID NO: 10902 - protein, 243 aa, Mesorhizobium loti
MGAPAQSTEIRMHGSITARCRRLTLVSAAALALTIIPYRISLHGSAPGIDAASAQAAKGGNGGGNGGGNGGGNGGGNGGGNGGGNGGGNGGGNGGGNGGGNGGGNGGGNSGGNGGGDSGGNSGGNGGGNGGGNSDGNGGGDSGGNSGGNGGGNSGNSGGGNSGTEGGGETSGLGKGQVDKGVSHVNGTTGDKVEVSDNKITVTHPDGITEKIENGRFKMKDALGRTIIDRRATPADVSRLKAL

SEQ ID NO: 10903 - protein, 205 aa, Schizosaccharomyces pombe
MAMFSLEIPAISAETSKKLVVVGDGGCGKTCLLIVFSSGTFPERYVPTVFENYITDITYGPNSKVIELALWDTAGQEEYDRLRPLSYPNSNVILLCFSIDCPASLNNVTEKWYPEVQHFCPRTPIVLVGLKADLRKDRNATEVLRTQGLTPVTYQQAQSVALSMNAPYVECSAKENTGVNEVFQLAVGLTIKKSFSFSKKSCVIL

SEQ ID NO: 10904 - protein, 82 aa, Oryza sativa
  unsure (1)..(82): unsure at all Xaa locations
MAPTVMVYSVTFVAPFQGLKSTVRLPRSRRFTNLGFGNXVSNGGRIMCMQAWPIEGIKKFETLSYLPPLTVEDLLKQTEYLV

SEQ ID NO: 10905 - protein, 259 aa, Oryza sativa
MVSPDTIRTAIGVVGNGTALVLFLSPVPTFIRIWKKGSVEQYSAVPYVATLLNCMMWVLYGLPAVHPHSMLVITINGTGMAIELTYIALFLAFSLGAVRRRVLLLLAAEVAFVAAVAALVLNLAHTHERRSMIVGILCVLFGTGMYAAPLSVMKMVIQTKSVEYMPLFLSLASLVNGICWTAYALIRFDLYITIPNGLGVMFAVAQLILYAIYYKSTQQIIEARKRKEADHVAMTDVVVDSAKNNPSSGAAAAAANGRY

SEQ ID NO: 10906 - protein, 970 aa, Mesorhizobium loti MAFF303099
MNIKADFPSLVEEIDYGTPESRAQKQVTLNVDGRSITVPEGTSIMRAAMEGGVEIPKLCATDMLDSFGSCRVCLVEIEGRGGTPASCTTPVGEGMVVRTQSDRLDAIRRGVMELYVSDHPTGWNEKAGTGASEFDTVAKSVGLTENRYGVEGRNHVKQEDGVAPGHGSLAVDYIARDESNPYFTYDPAQCIVCSRCVRACEEVQGTFALTIEGRGFESRMVAGMHEDFIASECVSCGACVQACPTDALREKTVLEKGMPERSAVTTCAYCGVGCSFKAEVKDDEVIRMMPYKDGKANHGHSCVKGRFAYGYATHKDRILSPMIREKISDPWREVSWEEAIAHTAKEFRRIQYQYGRTSIGGITSSRCTNEETYLVQKLVRQGFRNNNVDTCARVCHSPTGYGLGQTYGTSAGTQDFDSVEFTDVAVVIGANPVSAHPVFASRLKKRLRQGAKLIVLDPRRTEMVKSAHIEADYHLPLKPGTNVAVLTSLAHVIVTEGLFDEAFIRERCDWTEFQDWASFVALPENSPETVGKLSGVDPDLIRGAARLYAKGGNGAIYYGLGVTEHSQGSTTVMAIANLAMATGNIGRPGVGVNPLRGQNNVQGSCDMGSFPHELPGYRHISGEAVRDIYESLWGVKLDDEPGLRIPNMLDAAVDGSFKGIYIQGEDILQSDPDTKHVAGGLAAMECVVVHDLFLNETANYAHVFLPGSTFLEKDGTFTNAERRINMVRKVLEPKARYADWEATQELARAIGLDWNYTHPSQIMDEIAQTTPSFANVSFELLDRVGSVQWPCNEKAPLGTPIMHIDGFVRGKGKFIRTEYVATDERTGPRFPLLLTTGRILSQYNVGAQTRRTDNVMWHSEDRLEIHPHDAENRGLRDGDWVRLTSRSGETTLRALITDRVSPGVVYTTFHHPDTQANVITTDFSDWATNCPEYKVTAVQVGASNGPSDWQREYDEQARNSRRIASLQAAE

SEQ ID NO: 10907 - protein, 546 aa, Escherichia coli O157:H7
MAIHNRAGQPAQQSDLINVAQLTAQYYVLKPEAGNAEHAVKFGTSGHRGSAARHSFNEPHILAIAQAIAEERAKNGITGPCYVGKDTHALSEPAFISVLEVLAANGVDVIVQENNGFTPTPAVSNAILVHNKKGGPLADGIVITPSHNPPEDGGIKYNPPNGGPADTNVTKVVEDRANALMADGLKGVKRISLDEAMASGHVKEQDLVQPFVEGLADIVDMAAIQKAGLTLGVDPLGGSGIEYWKRIGEYYNLNLTIVNDQVDQTFRFMHLDKDGAIRMDCSSECAMAGLLALRDKFDLAFANDPDYDRHGIVTPAGLMNPNHYLAVAINYLFQHRPQWGKAVAVGKTLVSSAMIDRVVNDLGRKLVEVPVGFKWFVDGLFDGSFGFGGEESAGASFLRFDGTPWSTDKDGIIMCLLAAEITAVTGKNPQEHYNELAKRFGAPSYNRLQAAATSAQKAALSKLSPEMVSASTLAGDPITARLTAAPGNGASIGGLKVMTDNGWFAARPSGTEDAYKIYCESFLGEEHRKQIEKEAVEIVSEVLKNA

SEQ ID NO: 10908 - protein, 279 aa, Erwinia carotovora subsp. atroseptica SCRI1043
MSQAERSTLRGQCIAEFLGTGLLIFFGVGCVAALKLAGASFGQWEISIIWGLGVAMAIYLTAAISGAHLNPAVTIALWLFACFDGRKVLPYIVAQIAGAFCAAALVYGLYYNLFVDFEQTNNMVRGSTESLSLASIFSTYPNPHISVMQALLVETVITAILMCLILALTDDGNGIPRGPLAPLLIGILIAVIGASMGPLTGFALNPARDFGPKLFAFLAGWGNVAFTGAREIPYFLIPIFGPIIGACLGAFGYRALIGRNLPCDVCEPEAEATTRRESR

SEQ ID NO: 10909 - protein, 383 aa, Helicobacter hepaticus ATCC 51449
MKSTLDTLLIHGGATTDPRTGAVNIPIYQTSTYAQSALGEHLGYEYSRTKNPTRDGIESLIAQCEGGKFGFAFASGMAAIGTILSLFQSGDCIIISNNVYGGTFRILDKVFSHFNISYKIVDTRDLKALESAITPEVKAVLIETPANPLLSVTPLEQVAILAKKKGILSIVDNTFMTPYLQKPLELGIDIVMHSATKYLGGHSDLIAGLVVVNDSALAERIGFLQNSIGGVLAPFDSFLLIRGMKTLGVRLQRHCENALFLAQALSEHSGVEKVYYPGLKSDEGYQIQNSQARSGGGMLSFELKKNYDYRIFFKSTQTIVLAESLGGVESLLCHPASMTHASIPKDVRERMGISEHLIRLSVGIEYAQDLLDDLNQAIKKAKV

SEQ ID NO: 10910 - protein, 703 aa, Pneumocystis carinii
MAHNLSSQYFMNPGPAPAPPIKIPSYSSSNIYAGRCFDVSHTYKGSKGVLKAGWANVKEEGIKSWIWSKKYLVLTDKVLRVMKNESSTSPGLSIPLREIMNVSRAELKDYCFEILRDPGIGSGTKKSYFISLKSDNDLYSWMDEIYSRCPLMMVSNPTNFTHKVHVGFDPKSGGFTGLPEEWTRLLTASAITKEDYAKNPEAVIEVLQFYSDTQLREKEEFGEPSTLGPDLYNIENQDIKSLEQNKMTMEKHYVNNGFNSQYPVSSTSKGAVPLREWLKKMDIKDSEKMVPQRVPPALPSNLPTRLNTDMASFPHESDSFLTCGSSNVDKGFGVTAKKRQNVPLETLKHKQSQNNLAFISQAPTQPLPKIPTSSKNIPDIPTTFPETTMKQPNATKLPLSLSNARAIKQEPSSDEKVNDLTRSQVMERLRNVVSTNDPNTLYTKIKKVGQGASGSVYVARVAIKQMDIAHQPRRELIVNEILVMKESHHPNIVNFLDAYLAKNSELWVIMEYMEGGALTDIIDNNTLTEDQIAAISLEGLQHLHQQKIIHRDIKSDNVLLDFHGRVKITDFGFCAKLTEQKNKRATMVGTPYWMAPEVVKQKEYGAKVDIWSLGIMAIEMIETEPPYLNEEPLKALYLIATNGTPTLKKPDKLSKELKSFLAVCLCVDVKSRATAEELLEHDFLKKSCSLSNLSSLLAFKSGK

SEQ ID NO: 10911 - protein, 412 aa, Glycine max
LRVLTDSTYHNHRNHQLPFRVLFHSFLFHFAILLSLINMSSPQVITCKAAVAWRAGEALVMEEVEVSPPQPMEIRIKVVSTSLCRSDLSAWESHAIFPRIFGHEASGIVESVGQGVTEFKEGDHVLTVFIGECMSCRQCTSGKSNTCQILGLERRGLMHSDQKTRFSLKGKPVYHYCAVSSFSEYTVVHSGCAVKVSPLAPLEKICLLSCGVAAGLGAAWNVADVSKGSTVVIFGLGTVGLSVAQASKLRGASRIIGVDNNPQKCENAKAFGVTEVVDPNSYKEPIAQVIKRITDGGADFSFECVGDTDMITTALQSCCDGWGLTVTLGVPKVKPEMSAHYGLLLMGRTLKGSLFGGWKPKSDLPSLVEKYLNKEIQIDDYITHNLSFDDINKAFNLMKEGECLRCVIHMPR

SEQ ID NO: 10912 - protein, 415 aa, Eremothecium gossypii
MSLSSKLTVKDLSLAGKRVFIRVDFNVPLDGKTITSNQRIVAALPTIKYVLEQGPKAVVLASHLGRPNGERNEKYSLAPVAAELEKLLGQKVNSWTLRGQHVTAAVNGAAAGSVFLLENLRFHIEEEGSRKVDGEKVKASAEDVQKFRQGLMSLADVYVNDAFGTAHRAHSSMVGFELPERAGGFLLSRELEYFSKALENPTRPFLAILGGAKVADKIQLIDNLLDKVDSIVIGGGMAFTFKKVLENMEIGNSIYDKAGAEIVPKLAEKAKKNGVKIVLPVDFVIGDDFSQDANTKIVSASEGIPSGWEGLDCGPESRKLFSETIASAKTIVWNGPPGVFEIPKFSEGTQAMLAAAVKASEAGSTVIIGGGDTATVAKKYGVVEKISHVSTGGGASLELLEGKDLPGVTFLSSKQ

SEQ ID NO: 10913 - protein, 456 aa, Rhizobium sp. NGR234
MSKQATTLPKGFRGDMPNGFNPQDTSHLTSEDLAHITRRQRLLGPAYRLFYKSPVEVSRAKGVFLYDRHGNEYLDAYNNVVSLGHSHPRVVEAIQKQLEVLCTHTRYMQEPLLDYAEALINTFGGELGRTGCAMFTCTGSEANDLALRIARYHTRKTGVIVTAEAYHGNSGAVAAISPSLGKKSALDPYLRTVAAPDSYRLPVEEIGRRMAEDVARQIADMERHGGGLAAFIADSVFSSDGLYVDPTDVLAPVAEVVRKAGGLFIADEVQSGFGRTGTHLWGHSRHKVDPDIVTMGKPMGNGYPVAGVVLRPELVAEFGSSMRYFNTFGGNSVAIAAARAVLDTILEEGLMDNAAKVGSEILDGLRDLQTKYEFVGDVRGAGLYFAVELVKDRDRKTPDMDRALAAVNALRDRRILISATGVDAHILKIRPPLIFTSANAARLLEGVDEALRSVQI

SEQ ID NO: 10914 - protein, 480 aa, Polytomella sp. Pringsheim 198.80
MLSFKSDTSIFSGRKGPCANLFPPVSRKLNNAKPILMKAASKLVTTKSEEIFNEALELLPGGVNSPVRAFRSVGGKPIVFSKVKGARCYDVDGNSFLDYVGSWGPAIVGHAHDEVNAAIIDQVSRGTSFGAPGPLENELAKVVISRVPAVEMVRFVSSGTEACLSVLRLMRAATGRDGLIKFAGCYHGHADSFLVKAGSGVATLGLPDSPGVPASTTASTFTATFNDLDSVEKIFAAHPTEIAGIIVEPVVGNGGFIPPSPTFLRGLRALCDKYKALLCFDEVMTGFRVHKNCAQKLFGVTPDLVTLGKVIGGGLPVGAYGGRKDLMLHVAPAGTMYQAGTLSGNPLAMAAGLKTLEILDRPGAYEHLDRISKKLVEGVVAAGRAAGHPLVGGSFGGMFGFFLLKQEELGKEVEKKAPQSFEEAQSRADTAKFARFHRLMLEEGVYLAPSQFEAGFTSLAHTDEDIEFTISAAANAFKRL

SEQ ID NO: 10915 - protein, 405 aa, Escherichia coli O157:H7 EDL933
MSSVDILVPDLPESVADATVATWHKKPGDAVVRDEVLVEIETDKVVLEVPASADGILDAVLEDEGTTVTSRQILGRLREGNSAGKETSAKSEEKASTPAQRQQASLEEQNNDALSPAIRRLLAEHNLDASAIKGTGVGGRLTREDVEKHLAKAPAKESAPAAAAPAAQPALAARSEKRVPMTRLRKRVAERLLEAKNSTAMLTTFNEVNMKPIMDLRKQYGEAFEKRHGIRLGFMSFYVKAVVEALKRYPEVNASIDGDDVVYHNYFDVSMAVSTPRGLVTPVLRDVDTLGMADIEKKIKELAVKGRDGKLTVEDLTGGNFTITNGGVFGSLMSTPIINPPQSAILGMHAIKDRPMAVNGQVEILPMMYLALSYDHRLIDGRESVGFLVTIKELLEDPTRLLLDV

SEQ ID NO: 10916 - protein, 564 aa, Streptomyces avermitilis MA-4680
MAATPQNPAAAPRRKVSRHRGEGQWAVGHFTPLNGNEQFKKDDDGLNVRTRIETIYSKRGFDSIDPNDLRGRMRWWGLYTQRKPGIDGGKTAILEPEELDDKYFMLRVRIDGGRLTTEQLRVIGEISQEFARGTADITDRQNIQLHWIRIEDVPEIWQRLEAVGLSTTEACGDTPRVILGSPVAGIAEDEIIDGTPAIDEIHRRILGNKDFSNLPRKFKTAVSGSPLLDVAHEINDVAFVGVNHPEHGPGFDLWVGGGLSTNPKLGQRLGAWVPLDEVADVHVGVLSIFRDYGYRRLRTRARLKFLVADWGVEKFRQILEDEYLKRKLVDGPAPDQPVASWRDHVGVHRQKDGRFYVGFAPRVGRVDGTTLTKIAEVAAAHGSGRLRTTVEQKMIVLDVEEGQVESLVEGLEALDLTVKPSSFRRGTMACTGIEYCKLAIVETKARGASLIDELERRIPEFDEPITINLNGCPNACARIQVADIGLKGQLVLNDQGEQVEGFQVHLGGALGLEAGFGRKVRGLKVTSDELPDYIERVLKRFQAEREDGERFATWAARASEEALS

SEQ ID NO: 10917 - protein, 433 aa, Triticum aestivum
  unsure (1)..(433): unsure at all Xaa locations
MNLAAPISTSTSTSTSTAVRPHAHGLMPLNLPSAASSSLRRSIFASLRKKISPMASAPASASAALSTAAPADNGAAKPTEQRPVQVAKRLEKFKTTIFTQMSMLAVKHGAINLGQGFPNFDGPDFVKEAAIEAIKAGKNQYARGYGVPELNSAVAERFLKDSGLQIDPDKEVTVTSGCTEAIAATILGLINPGDEVILFAPFYDSYEATLSMAGANVKAITLRPPDFAVPLEXLKAAVSKNTRAIMINTPHNPAGKMFXHISMASIPLIYERTVTRNSLLKTFSLTGWKIGWAIAPPHLTWGAHSFLTFATSTPMQSAAAAALRAPDSYFEELKRDYGAKKALLVDGLKAAGFIVYPSSGTYFVMVDHTPFGFDNDIEFCEYLIREVGVVAIPPSVFYLNPEDGKNLVRFTFCKDDDTLRAAVDRMKAKLRKK

SEQ ID NO: 10918 - protein, 77 aa, Lycopersicon esculentum
VRANRKNSFPSKKAEAECGMYVKVSMDGAPYLRKIDLKLYKGYPELLKALEKMFKLSIGEYSEREGYKGSEFAPAYE

SEQ ID NO: 10919 - protein, 69 aa, Lycopersicon esculentum
VRSYRKNILEASYVKVSMDGAAYLRKIDLNTYKSYPQLLKALENMFKCSIDVYSETDGYNGCNYIPTYE

SEQ ID NO: 10920 - protein, 79 aa, Lycopersicon esculentum
VRSYRKNHVSKLSESDNNSSGMYLKVSMDGAPYLRKIDLQVYKSYQELLKALQSMFKCTIGVYSEREGYNGSDYAPIYE

SEQ ID NO: 10921 - protein, 458 aa, Glycine max
MSITHSLTTSLSSSSSAFLAPSSFNSRGQVSLPVKSVSICKCVATPEAETAYKTGVTRNPNMGKLQAGYLFPEIARRRSAHLLKYPDAKVISLGIGDTTEPIPEVITDAMSKRSHALSTIEGYSGYGAEQGEKPLRRALASTFYSDLGIEEDDIFVSDGAKCDISRLQIVFGSNVKMAVQDPSYPAYVDSSVIMGQTGLYQKDVEKFANIEYMRCNPENGFFPDLSSISRPDIIFFCSPNNPTGAAATREQLTQLVQFAKDNGSIVIHDSAYAMYISGDNPRSIFEIPGAKEVAIETSSFSKYAGFTGVRLGWTVVPKQLLFSDGFPVAKDFNRIVCTCFNGASNISQAGGLACLSPDGLKAMRDVIGFYKENTDIIMETFDSLGFKVYGGKDAPYVWVHFPGRSSWDVFAEILEKTHVVTTPGSGFGPGGEGFIRVSAFGHRENVLEACRRFKQLYK

SEQ ID NO: 10922 - protein, 100 aa, Lycopersicon esculentum
IRSFRKNTLASASKNNEEVDGKAGSPALFIKVSMDGAPYLRKVDLRTCSAYQELSSALEKMFSCFTIGQYGSHGAPGKDMLSESKLKDLLHGSEYVLTYG

SEQ ID NO: 10923 - protein, 439 aa, uncultured bacterium 581
MAAPEYPGLDTLALHAGSQPDPATGARATPIYQSASFCFPDSDYAASLFNIERAGHVYSRLSNPTNAVLEERIAALEDGVGAIATASGQAALTLAIMTLMGAGSHIVAAAALYGGSHNLLAYTLPRLGIETTFVDARDPQAFAAAIQDNTRLVFAETVGNPGLDVLNIPEVAAVAHQAGLPLMVDSTFTTPYLIKPFEHGADIIMHSATKFLSGHGIVIGGLLVDGGRFDWDAFGKFPTLTEPYAGFHNLVFSEEFGPAAFIQRARKEGLRDFGACMSPTTAFHILQGVETLGIRMHRHVENTRRIVEFLNQHEQVSRVGYPELEGHPDQALASALLPKGCSAVFSFDLVGGREAGIAFVDALNLFSHLANVGDAKSLVIHPASTTHHRMDAAALAAGGIGEGTIRLSIGLEDAKDLIADLKQGLRAAGKVAAKQSVTP

SEQ ID NO: 10924 - protein, 393 aa, Methylobacillus flagellatus KT
MTVINMTDLDLAGKRVFIRADLNVPVSDGKVTSDARITASIPTIRHALDAKARVMVTSHLGRPEEGVYSEENSLQPVADVLADKLGQPVRLIKDWVDGGFEVAEGEVVLLENCRFNKGEKKNAEETARKYAALCDVFVMDAFGTAHRAEASTYGVAQYAPVAAAGLLLVGELDALGKALCEPARPMVAIVGGSKVSTKLTVLESLAEKVDQLVVGGGIANTFLKAAGKPIGRSLSEDDLVPTAQCLMEKMAKRGAAVPIAVDVVCGKQFDANEPAVLKSAEDVADDDMIFDIGPESAKQLAEIILNAGTVVWNGPVGVFEFDQFGEGTKTIADAIAKTKAFTLAGGGDTIAAIQKYDIYDKVSYISTAGGAFLEFLEGKKLPAVEILEQRAKG

SEQ ID NO: 10925 - protein, 496 aa, Shigella flexneri 2a str. 301
MITAFVFIPIFAIAAGVAQSLQYLNRYHVIREPPEHILNRLPSSASALACSAHALNLIEKRTLDHEEMKALNREVIEYFKEHVNPGFLEYRKSVTAGGDYGAVEWQAGGLNTLVDTQGQEFIDCLGGFGIFNVGHRNPVVVSAVQNQLAKQPLHSQELLDPLRAMLAKTLAALTPGKLKYSFFCNSGTESVEAALKLAKAYQSPRGKFTFIATSGVFHGKSLGALSATAKSTFRKPFMPLLPGFRHVPFGNIEAMRTALNECKKTGDDVAAVILEPIQGEGGVILPPPGYLTAVRKLCDEFGALMILDEVQTGMGRTGKMFACEHENVQPDILCLAKALGGGVMPIGATIATEEVFSVLFDNPFLHTTTFGGNPLACAAALATINVLLEQNLPAQAEQKGDMLLDGFRQLAREYPDLVQEARGKGMLMAIEFVDNEIGYNFASEMFRQRVLVAGTLNNAKTIRIEPPLTLTIEQCELVIKAARKALAAMRVSVEEA

SEQ ID NO: 10926 - protein, 256 aa, Citrobacter freundii
FVIVAAGIKEIVLVTHASKNAVENHFDTSYELESLLEQRVKRQLLAEVQSICPPGVTIMNVRQAQLLGLGHSILCARPIIGDNPFVVVLPDVVLDTASADPLRYNLAAMVARFNETGRSQVLAKRMEGDLSEYSVIQTKDPLDNEGKVSRIVEFIEKPDQPQTLDSDLMAVGRYVLSADIWAELEKTAPGAWGRIQLTDAISEPAKKQSVDAILMTGESYDCGKKMGYMQAFVKYGLRNLKEGPKFRKSIEKLLAM

SEQ ID NO: 10927 - protein, 215 aa, Agrobacterium tumefaciens str. C58
MKIITGMDDISEGLDHLARLDPALSPVIEKAGPLELRIHEPGFAGLAHIVVSQMVSRASANAIWARILAGTGGKVTAENYLAVSEELRATFGLSRAKATTLEGLARAVTEGQVDLDGVVRKEAGAAFSELVALRGIGPWTAEVYLMFCGGHPDIFPVGDVALRSAVAHALDLEVRPDAKWLAERATLWSPWRSVAARLFWGYYANIMRRAMVPLP

SEQ ID NO: 10928 - protein, 444 aa, Rhizobium sp. NGR234
MSTDLMPNRFTPGEATIPPRESELIARRDSVLGASYRLQYRRPVLFVRGEGIWLYDPDGRRYLDFYNNVPSLGHCNPEINAAVADQASRISANTRYLEPRLVDYAERLVATFPGELNRVVFTCTGSESNDLALRIARLTSGNEGVIVSSHAYHGTSAATAMVSPNLGDAVKLSPAVRMVSLPGPAGISEAQAADFFEAQVRAAITDLNRRGTGIAALLIDSIFSSDGVWVDPPGFIVGGVRAVREAGGLVIADEVQPGFGRTGTHMWGFERHEVVPDLVTLGKPMGNGFPIGAVVGRKAPMDRFGATARYSNTFGGNTVGIAAADAVLTILQRDQIPEHAHAMSERLRLGLEHLAKLHPGIRGIRNAGLFFGIDIGLDGAEEASRRAMALDIVNLMRDDGVLISTTGANEDTLKVRPPLICQAAHVDRFLEAMECALKKAVAQM

SEQ ID NO: 10929 - protein, 155 aa, Xylella fastidiosa Ann-1
MSRRIVARKSRIHGNGVFAVVSIHQGERIIEYKGRIRTHAAVDANSHGHIESGHTFLFTLNDDYVIDANDAGNIARWINHSCSPNCEAVVEEDTGGNRRKDKIFIQAIRDIASGEELTYNYGIVLAERHTARLKKIWACLCGSDHCTHTMLQPKR

SEQ ID NO: 10930 - protein, 543 aa, Ustilago maydis 521
MSASSSSSYMHAAVAFNKVAGTLSLHTDETVQWVPSSASSGVSGFHLKFCDIAGLQTSKAGAAQIALMLVLANAVQIASKSKVLLVFNAAQQTALEDRERFKTELAAAVGRNRASMDGASGGATPSSLPGSPAQACSPAATATATATAATRGATPDTRAATPSRIAPPASAKQPRLNDTARRKTEIELRISVIKSNASLRALHKDIVISGEMSDAEFWSHPQRQRLVRAERAKLEQRAGRNARLADPKPTPNEAGELKLSITPELIRDLFEQFPIVARAYQDNVPSKLDQASFWTRYFQSKLYHRLRTSARSAASEHIVHDDAIFDAYLEDEDNELQPRREFNPHDRLLDLQATEEDHAETGNEKDWTMRAGAERRTLPLMRRFNDHSQSLLDSALGEQERGQSKRRIVGGVGDEYPTATHSARQGDANSAQHTSSAHDADQVDDSVDWIKKHYYREIVIDDLNDSVATDKVRLNMADLEGYFSTTVQGGDEAVSSVRLNGAEDEKAVLTMHEYVAVVHKFTQTMQLAIAHTSCSDQSHECGT

SEQ ID NO: 10931 - protein, 461 aa, Oryza sativa
MAMASARCRTRACATVAYKAMEPNAGGGVVSCDLGLIDMGVLCFGASNILLCAEDSSSVLGLGGFGGGGGEVAAELGCGGGGGFDFFGFGGGAVFPIDSDEFVALLVEKEMDHQPQRGYLEKLELGGLECSWRKDAIDWICKVHSYYNFGPLSLYLAVNYLDRFLSSFNLPHDESWMQQLLSVSCLSLATKMEETVVPLPMDLQVFDAEYVFEARHIKRMELIVMKTLKWRLQAVTPFSFIGYFLDKFNEGKPPSYTLASWCSDLTVGTLKDSRFLSFRPSEIAAAVVLAVLAENQFLVFNSALGESEIPVNKEMVMRCYELMVEKALVKKIRNSNASSSVPHSPITVLDAACFSFRMSVKTTPEMGEEEAAAMPTAILLMQCKELKTSVLTPAMLASACTLHLHGRCTTTASPSIAATPRAEEHEEYSTLSQAIRLSLQAASEEEAGRMHSTAQLAAGKM

SEQ ID NO: 10932 - protein, 653 aa, Magnetococcus sp. MC-1
MCGISGFYQPAASEQELAHNITRMTATLQRRGPDDGGFWLEPSCGLALGHRRLAIQDLSPLGHQPMADASGRYQIVFNGEIYNFLELKQNLERHYGPQPWRGHSDTEVLLALIGHSGLEAALAQCRGMFALALWDRQQRILTLARDRLGEKPLYYGRQGDSLLFASELKALRAHPHWQGGVDRHALTLFMRHSTVPAPYTIHPGIHKLQAGCYQRFQWHPEQGMQDLGMIHYWSMSQVVAHANAHPFDGDETAALQAVEQQLMAIIGRQMVADVPLGAFLSGGIDSSLITAMMQAQSSRPVQSFTIGFAEASHDESAYAQAIARHLGTQHTTLQVTPQDALALVPSLPLIYDEPFSDASQLPTTLLAGLTRQHVTVALSGDGGDELFGGYDRYGESMALWRLRGRVPSPLRRPLARAGRALPSGVWSALLRPVAACLPAKARDNPGDIVHKMMDLLVQPDFAHLYRHMLSHWSDPGNLVVGGHEPPTNLTRGWTQPWRQDPVAQMMYWDTLLYLPDDILVKVDRAAMWSSLECRIPLLDHRLVELVWSMPMHFKRRDGVPKWLLQRLLGKRVPEALFERPKMGFGVPLERWLRGPLKGWAQDLLAPALLQRQGYLNPEPIARIWRQHQQGSHNWHHLLWDLLMWQAWLAEHEG

SEQ ID NO: 10933 - protein, 476 aa, Trichodesmium erythraeum IMS101
MTQEFDYDLIIIGAGVGGHGAALHATSCGLKTAIVEVAEMGGTCVNRGCIPSKALLAASGKVRELRNAHHLKTLGIELDNVSYDRQVMATHASNIVTKIRGDMSKSLKRLSVDIITGWAQVAGKQKVTVKTEKGEENFTAKDIILAPGSVPFVPPGIELDGKTVFTSDDALKLDWLPPWVAIIGSGYIGLEFSDIYTALGSEITMIEALDKLMPTFDPDIAKIAQRVLIQSRDIEVKVGKLAIKVVPGSPVIIELADAKTKEVEEIIEVDACLVATGRIPYTKDLGLDSVAVETDKYGFIPVNSKMAVLSSGEPVPNLWAIGDATGKMMLAHAASAQGITVVENICGRDREPDYLSIPAAAFTHPEISYVGMTEPAAKDLGQKQGFEVASVRTYFKGNSKAIAEDETDGIAKVIYRQDTGELLGVHIIGLHASDLIQEAANAIAKKQSVNELSFNVHTHPTLSEVLDEAFKRATVH

SEQ ID NO: 10934 - protein, 167 aa, Listeria monocytogenes
ARGAGAHGKFVTKKSMKKYTIAKFLQEEGTETEVFARFSTVIHGQHSPETLRDPRGFSVKFYTEEGNYDFVGNNLPVFFIRDAIKFPDVIHSLKPDPRTNIQDGNRYWDFFSLTPEATTMIMYLFSDEGTPASYREIRGSSVHAFKWINEEGKTVYVKLRWIPKAGI

SEQ ID NO: 10935 - protein, 543 aa, Mycobacterium tuberculosis H37Rv
MSFVTAAPEMLATAAQNVANIGTSLSAANATAAASTTSVLAAGADEVSQAIARLFSDYATHYQSLNAQAAAFHHSFVQTLNAAGGAYSSAEAANASAQALEQNLLAVINAPAQALFGRPLIGNGANGTAASPNGGDGGILYGNGGNGFSQTTAGVAGGAGGSAGLIGNGGNGGAGGAGAAGGAGGAGGWLLGNGGAGGPGGPTDVPAGTGGAGGAGGDAPLIGWGGNGGPGGFAAFGNGGAGGNGGASGSLFGVGGAGGVGGSSEDVGGTGGAGGAGRGLFLGLGGDGGAGGTSNNNGGDGGAGGTAGGRLFSLGGDGGNGGAGTAIGSNAGDGGAGGDSSALIGYAQGGSGGLGGFGESTGGDGGLGGAGAVLIGTGVGGFGGLGGGSNGTGGAGGAGGTGATLIGLGAGGGGGIGGFAVNVGNGVGGLGGQGGQGAALIGLGAGGAGGAGGATVVGLGGNGGDGGDGGGLFSIGVGGDGGNAGNGAMPANGGNGGNAGVIANGSFAPSFVGFGGNGGNGVNGGTGGSGGILFGANGANGPS

SEQ ID NO: 10936 - protein, 288 aa, Enterococcus faecium
MKGIILAGGSGTRLYPLTKATSKQLMPIYDKPMIYYPMSTLMLAGIKEILIISTPQDTPRFKELFGNGNDLGLQIEYAVQESPDGLAQAFIIGEEFIGDDSVCLVLGDNIYYGGGLSKMLQRAASKDTGATVFGYHVNDPERFGVVEFDENMQALSIEEKPAQPKSNYAVTGLYFYDNEVISIAKGIKPSERGELEITDVNKAYLDKGKLSVELMGRGFAWLDTGTHESLLEASTFIETIEKRQNLKVACLEEIAYRMGYIDKEQLLALAQPLKKNQYGQYLLNLAAE

SEQ ID NO: 10937 - protein, 65 aa, Cicer arietinum
PKQNKCNTCDVSFEDAKLYREHHKSEWHKHNMKRKTRQLPPLTEEECMADLELVESKSDLKDYSF

SEQ ID NO: 10938 - protein, 183 aa, Oryza sativa
  unsure (1)..(183): unsure at all Xaa locations
GTRGWAAARPPGRRRRLRPPPLLPLVRVALEPIDSGAHPGTHPRLGAVEHICFHPLAHASLRHVADLAGAVAADIGDKLQVPMFLYGAAHRDGRTLAYIRRQLGYFKPNSSGDQWRGAXETDAMXVAPDTRPERPSRSKGVLSTTTTALSSNLPPLPTHPRRRSPSCTSSSPVMPHAAIPTSC

SEQ ID NO: 10939 - protein, 588 aa, Zea mays
  unsure (1)..(588): unsure at all Xaa locations
MCGILAVLGCSDWSQAKRARILACSRRLKHRGPDWSGLYQHEGNFLAQQRLAVVSPLSGDQPLFNEDRTVVVVANGEIYNHKNVRKQFTGTHNFSTGSDCEVIMPLYEKYGENFVDMLDGVFAFVLYDTRDRTYVAARDAIGVNPLYIGWGSDGSVWIASEMKALNEDCVRFEIFPPGHLYSSAGGGFRRWYTPHWFQEQVPRTPYQPLVLREAFEKAVIKRLMTDVPFGVLLSGGLDSSLVASVTKRHLVETXAAEKFGTELHSFVVGLEGSPDLKAAREVADYLGTIHHEFHFTVQDGIDAIEEVIYHDETYDVTTIRASTPMFLMARKIKSLGVKMVLSGEGSDELLGGYLYFHFAPNKEEFHRETCRKVKALHQYDCLRANKATSAWGLEVRVPFLDKEFINVAMGMDPEWKMYDKNLGRIEKWVMRKAFDDDEHPYLPKHILYRQKEQFSDGVGYNWIDGLKSFTEQQVTDEMMNNAAQMFPYNTPVNKEAYYYRMIFERLFPQDSARETVPWGPSIACSTPAAIEWVEQWKASNDPSGRFISSHDSAATDHTGGKPAVANGGGHGAANGTVNGKDVAVAIAV

SEQ ID NO: 10940 - protein, 485 aa, Oceanobacillus iheyensis HTE831
MTKGNNDEQNNSRNYSQGFGSQGLHGYPGNASDKSHANPAAFNWNIDLPAEIHSQTVGKRGPILKQDNIEHETLQTFIHEKITERPVHVKGWGAFGYFETLYSMSDYTTLSFLQIPGTQVPVFVRFSLAVSTKGTPDTSRNVRGFATKFYSEDGIFDLICNHIPVFSVRDTIRFPEAIKAFLPSPVNNLIDPTRYWNFVARAPESLLFTLLVYSNLGTVKSLRHLPGHSVNTYVWKNAEGKRYFIKYTWAPIAGEEYIRNEEAVKLAGENPDIAGQDLHDAIERGEPVEYGLYIQIMDPKDAASLPYDPLDDTKLWDQQQFPFKPVGVMKLNKNPDNYMEQVEKAAFSPTNLLEGVELSDDKMLQGRANIYSDSQRYRIGPDFRNVPVNNQSNWWPGDLVTSGDGRFVEGELQRSDIEKQDDFTQPGLFYESLSEEDKEDLITNMAEGLSVVSNDVFNTVHGYIQEASRDLANRLNKTVILKRKK

SEQ ID NO: 10941 - protein, 273 aa, Erwinia carotovora subsp. atroseptica SCRI1043
MQQRKIAFIGAGNMAQAIIAGLVNGGYPAQHISVCAPSGKNRDVLAAQYGVISSADNVRCAQEADVIVLAVKPQMMATVCEPLHEQVNVAGKLVLSIAAGINIARFQALLGEPLNIVRIMPNTPSLVGKGMSGMYAPASVSQADKDFTAQLMQSVGKICWVDSEQGINSVIAAAGSAPAYFFLFMEAMQQEAIRQGFDQETARLLVQQAASGAAALVEANPDTPLSTLRENVTSKGGTTAEALRVFNEQQLTQTVAEAMQAAIARAQEMETLF

SEQ ID NO: 10942 - protein, 181 aa, ASPERGILLUS NIDULANS FGSC A4
MALNLEKQLLFVNVAIHITCVPILLFTGIAMASNSPPLIKLPEVLQFEDLPPNIGTIAALFYAIFYVLLEPVAGTLIAPLLLGAAALGNRLIATYGMTVNYWFGGIHVVSWLLQFVGHGAFEGRAPALLDNLVQALLLAPLFVWMEILFFFGYRPELRARYEASVKKEIAAFKEKRNKALK

SEQ ID NO: 10943 - protein, 639 aa, Pirellula sp. 1
MCGITGFWNPSRTNERELRFALDPMLDVLDHRGPDERGSRFFQERGLAMGHTRLSIIGLACGHQPIETDDGDYAVTVNGELYDYKRIRTALACENYECNGKSDSAITLPLYLKHDLAMVDHLRGEFAVVLYDDRKERLVLIRDRFGVKPLYYAVNDNGFIWGSEVKSILQHPDVEPRLCPKAAVHQMMQVMVPGSTAFEGVDALLPGHMLVVQRNGDSLEVQTKRWWDFEFPESHDENADPEPFIQGVQDRLIDAVAARLEADVPVGCYLSGGIDSCSILGLANTLQQSPVKAFTIAFDSDEYDESNIAKRMAERTGAEQELLRLTEKELYGPAFERATWHAERTFYNTLAVAKWHMSRRVRACNYKAVITGEGSDELFGGYPFFKRDWLGRDDEGGIFAGAILAEEDLKHSAWQDLCGFTPSWIQPWMLVLKRFEPILSSSLTDLLQEYDPVGEVAGAIDPAQVRGRHRLDVSQYTWSKTMLEGQILTWGGDRMDMANSMEARPAFLDHHVAEYATTIPPNIRIRNGVEKWVLREAMVNVLPRELYERKKFAFMAPPAHTDPVKRAAVQEMIDHWLTPSRVESVGFFQHDKLMQFIDDAWKESDGTIARRNDIVMNHVLQLHMLHGQYVEGLPLPAVD

SEQ ID NO: 10944 - protein, 167 aa, Listeria monocytogenes
ARGAGAHGKFVTKKSMKKYTMAKFLQEEGTETEVFARFSTVIHGQHSPETLRDPRGFSVKFYTEEGNYDFVGNNLPVFFIRDAIKFPDVIHSLKPDPRTNIQDGNRYWDFFSLTPEATTMIMYLFSDEGTPASYREIRGSSVHAFKWINEEGKTVYVKLRWVPKAGI

SEQ ID NO: 10945 - protein, 158 aa, Triticum aestivum
  unsure (1)..(158): unsure at all Xaa locations
MAPTVMASSATSVAPFQGLKSTAGLPVSRRSNGASLGSVSNGGRIRCMQVWPIEGIKKFXETLSYLPPLXTEALLKAGGTTWIRSKWVPCLXXNKVXSSSRGAHASPRGTNDGRYWXTMWELPMFGCTDXTQVINEVEXVKEXXPDAYSASSVRQHRK

SEQ ID NO: 10946 - protein, 167 aa, Listeria monocytogenes
ARGAGAHGKFVTKKSMKKYTMAKFLQEEGTETEVFARFSTVIHGQHSPETLRDPRGFSVKFYTEEGNYDFVGNNLPVFFIRDAIKFPDVIHSLKPDPRTNIQDGNRYWDFFSLTPEATTMITYLFSDEGTPASYREIRGSSVHAFKWINEAGKTVYVKLRWVPKAGI

SEQ ID NO: 10947 - protein, 328 aa, Magnetococcus sp. MC-1
MSDTFKALVLRQDAQQTLAAIEQLSLDQLPEGEVLVAVEHSSLNYKDGLAITGTGKIVRHFPHVPGIDLAGEVISSESALFKPGDRVVLTGWGVGERHWGGHAQRARVKAKWLNHLPTGFSSARAMAVGTAGLTAMLCMMALQTSGITPHDGPILVTGAAGGVGSIAVALLAAAGYEVHASSGRAALEPYLKELGAHHIIPREQLSRESRPLESEQWAGAIDTVGSQTLATLLSQMRYNGAVAACGLAGGMDLHTTVFPFILRGVRLLGIDSVYAPAPHRQQAWQQLAQQLPMALLDSLTRHIPLEACPEAANQIMAGQIQGRVVVDL

SEQ ID NO: 10948 - protein, 244 aa, Gossypium hirsutum
MGHLGFLAAALLSLLNFVHGSLGPWTNAHATFYGGGDASGTMGGACGYGNLNSQGYGINTAALSTALFDNGLSCGACYELKCVSDPQWCLPGSIVVTATNFCPPGGWCDPPNHHFDLSQPIFQHIAQYRAGIVPVMYRRVKCRRSGGIRFTINGHSYFNLVLITNVGGAGDVHSVSIKGSKTRWQAMSRNWGQNWQSNSYLNGQSLSFIVTTSNGHSVVSFDVAPSSWSFGQTYTGGQFGATKI

SEQ ID NO: 10949 - protein, 297 aa, Micromonospora echinospora
MRGVLLAGGTGSRMWPVTRAVSKQLMPVYDKPMIFYPLSTLVTAGVREILIITRPDEQPLFRRLLGDGGQWGLDLRYAVQERPDGIAHALLLAADFLAGGPAVLILGDNIIHSAGLDRQLAELTEVDGGLVFGLPVADPRPYGVLDFDECGAVRDIVEKPLVPPSRYAVPGLYVYGADVVSIAAELTPSARGELEITDVNREYLRRGRLEVRLLGRRTAWLDTGRFGDLMKAAEYVRVIEERHGVKVGCVEEAAWRAGLLDDAAMRRLAVPLRASGYGDYLLRLLDGERPARPAAVG

SEQ ID NO: 10950 - protein, 266 aa, Triticum aestivum
RAPSPSPCLRSGPLTRRRPRRPPPGASLSLTAASPGARTPSVSQWWGTIAQLYLSKAKGANAKRATQVALAGQVSDERCSLGKSLALPQLAALAARAKPRKGGIALVLTAEDVAVEGFCRSRCGLHGSDAAARTAYVWVGNSASQCPGQCAWPFHKPAYGPQAPALVAPSGDVGMDGMVMNVASMVAGAVTNPFGDGFYQGPREAPLEAATACPGVYGSGASPGYAGNLAVDATTGASYNANGANGRKYLLPALFDPDTSTCSTLV

SEQ ID NO: 10951 - protein, 381 aa, Micromonospora echinospora
MSGMRFDTRLVHGGRRPSAGTGDVVPPIHVSTTYERRAQDEPRYFYGRGENPTREELEECLAGLERAPFATVFSSGQAAAATLLSLVRPGQCVVSTDDVYAGTDGLFDLAARQGVRVRYADLTTPEGIAAALAEPDLALVWIETPTNPLLTVVDVAEVSRRAHERGARVVVDNTFASPVLQQPLALGADVSLYSTTKSIAGHADVLGGALVYRDADLHAAVRAYRTTAGNVPGALDCFLVRRGLHTLSLRVHRQVATARVLVERLRASPVVGAVHYPGLPEHPQHAVVKAQMSAPGAIVSFDYLGGPAERLLDRFTLFTCGVSLGGVHSLVECPALMTHRPLSAEARARRGIGESLIRLSVGIEDPQDLAEDLSRALAGGT

SEQ ID NO: 10952 - protein, 403 aa, Cytophaga hutchinsonii
MTTITNPQTLSTVVNSLSESETLAMTKKARELASQGNKVISLSVGEPDFKTPQHVMDAAKKAIDEGYHSYSPVAGFADLRAAIAEKLVKENNINVTAENIVVSTGAKQSLANVIQAIVDKGQEVIILAPYWVSYSEMVKLAEGKSVILTGTIENDFKVTAAEIAKAITPKTRAIMYSSPCNPSGSVYSEKELREIGELLKQNPQIVAIADEIYEYINFEGKNFSLGSIDEIKDQVVTVNGFSKGFAMTGWRLGYIAAPKYIAAATEKLQGQVTSGTCSITQRAGLAALQGDLSAPLKMKEAYLRRRDLIIDLLKEIPGLKINKPAGAFYIFPDVSAYLGKSVNGQVIKTSSDLSMFILNDAFVSTVGGDSFGSPNNIRISFAASDENIIEAIKRIKECLAKLK

SEQ ID NO: 10953 - protein, 293 aa, Oryza sativa
MSPAPRVLVLVVATVVALQVSPAAGRIPGAYGGGEWQSAHATFYGGSDASGTMGGACGYGNLYSQGYGVNNAALSTALFNSGQSCGACFEIKCVNQPGWEWCHPGSPSILITATNFCPPNYALPSDNGGWCNPPRPHFDLAMPMFLHIAEYRAGIVPVSYRRVPCRKKGGVRFTINGFRYFNLVLITNVAGAGDIVRASVKGTSTGWMPMSRNWGQNWQSNSVLVGQALSFRVTGSDRRTSTSWNAAPAGWHFGQTFEGKNFRVCFLPWLSLGSSSVGGLVKVRGRGKTGGKD

SEQ ID NO: 10954 - protein, 390 aa, Oryza sativa (japonica cultivar-group)
MEQMNTAAAKSIRCRAAVSRVAGQPLEMEEVEVAPPRAHEVRIKILCTSICHTDITFWRMEGNHPSIFGHEAVGVVESVGEHVQEVAVGDMVVPVFAAQCSECPDCLSDRSNLCSKLPNVAGLMPRDRTTRFSSVSTGEPIRHFLSVSSFAEYTVVDITHIVKLDVGFPPAMACLLSCGISTGVGAAWKVAAVEPGSSVAVFGLGAVGLAVAQGARMRGAKRIIGVDLNPDKFDVGKRLGMTDFINPNDTGGKTVSEVIKEMTGGGGADYCFECIGSTSVMAEAFQSTRNGWGKTILLGVSGNKAPISIPSHEILRGRSVIGSLFGGIKPKNDIPMLAQKYLDKELELEEFITHEMGFEEINRAFELLTQGKSIRCIIWMDGAKVIDNGE

SEQ ID NO: 10955 - protein, 246 aa, Micrococcus luteus
MRKWCLMSKQLNGQEKSELVHNVFQNVSTKYDRLNDIISFNQHKSWRKYTMKQMNVKKGSKALDVCCGTGDWTIQMAQAVGKNGHVIGLDFSENMLSVAQGKTNHIQNIELIHGNAMELPFEDNIFDYTTIGFGLRNLPDYKKGLEEMYRVLKPGGMIVVLETSHPTMPVFKQGYKLYFKYVMPLFGKVFAKSMKEYSWLQQSAFEFPDKYTLALLMAETGFTHIKFKGFTGGVSAMHLAYKPKEK

SEQ ID NO: 10956 - protein, 384 aa, Shigella flexneri 2a str. 301
MAARRRGEDIIDFSMGNPDGATPPHIVEKLCTVAQRPDTHGYSTSRGIPRLRRAISRWYQDRYDVEIDPESEAIVTIGSKEGLAHLMLATLDHGDTVLVPNPSYPIHIYGAVIAGAQVRSVPLVEGVDFFNELERAIRESYPKPKMMILGFPSNPTAQCVELEFFEKVVALAKCYDVLVVHDLAYADIVYDGWKAPSIMQVPGARDVAVEFFTLSKSYNMAGWRIGFMVGNKTLVSALARIKSYHDYGTFTPLQVAAIAALEGDQQCVRDIAEQYKRRRDVLVKGLHEAGWMVEMPKASMYVWAKIPEPYAAMGSLEFAKKLLNEAKVCVSPGIGFGDYGDTHVRFALIENHDRIRQAIRGIKAMFRADGLLPVSSKHIHENAE

SEQ ID NO: 10957 - protein, 461 aa, ASPERGILLUS NIDULANS FGSC A4
MAATQAANLVEKAVGHSGTATVTTDISNYNNEHGVETGEKIRATVWQGKNSVGIVEMPKPRVVDAGDVIVRVTGSTVCGSDLHLYHDYLSDRAHAGVIPQLQKGDVLGHECCGVIESVGPESTKYKPGQRVVVSFPIACGTCKRCKAQLYSQCENTNENTITNAMYGKRTAGIFGYSHFTGGFAGGQAEYLRVPYGDVNLLPIPDDVPDEKALFLSDVISTSWHCVVDTGVNKGDIVAVWGAGPIGQMAVDFAFYHGAERVILIDGGDGAWRLEYVKSKLPKVEVIDFTNLPKGESVSSHLRKITDHNLDVCLECVGGEYAKGWIHFFEQMVGAETDTSEIVNEMITAVRPFGRVGLTGVYAGYTNHFNIGSLMQTGVRLIGNGQAPVQKYWGDLMNLIQKGDIDPLRMVSHRFRLEDIDKVYSLFNERNGGVQKVYLETRHSAPAAKEGPQLTNWHMIFI

SEQ ID NO: 10958 - protein, 280 aa, Streptococcus pneumoniae R6
MNTYQLNNGVEIPVLGFGTFKAKDGEEAYRAVLEALKAGYRHIDTAAIYQNEESVGQAIKDSGVPREEMFVTTKLWNSQQTYEQTRQALEKSIEKLGLDYLDLYLIHWPNPKPLRENDAWKTRNAEVWRAMEDLYQEGKIRAIGVSNFLPHHLDALLETATIVPAVNQVRLAPGVYQDQVVAYCREKGILLEAWGPFGQGELFDSKQVQEIAANHGKSVAQIALAWSLAEGFLPLPKSVTTSRIQANLDCFGIELSHEERETLKTIAVQSGAPRVDDVDF

SEQ ID NO: 10959 - protein, 853 aa, Serratia sp.
MKFGFIAHPTSVGLKRYVKMIDLLQRNSTELHSGYKRDLWRRENLVPFMNFAKITSATGATCEGVIKYMPLVADEMLADARGIANRVVSGIEELVEDGAELVGLGGFTSIVGRRGEATAEKSPVPVTSGNSLTTYAGYKALMQIQSWLDIQPEQEPVAIVGYPGSICLALSRLLLAQGFSLHLLHRAGHKDEDELLSHLPEQYRSRVTLTSDPEDLYPRCKLFVAATSAGGVIDPYKLQPGSVFIDVALPRDINSDTRPDRDDILIIDGGCVTATDAVKLGGESLNVTIKQQLNGCMAETIVLALENRRENFSLGRYLALDNVLEIGELAEKHGFLVYPLASYGERIDRQRVINLKRYYHHDIYSDEPDTEQPPASQLAFIDAIIAQDPAREDTLDRYHQFINPMMVEFLKLQHCDNVFRRASGTQLFTADGEAFLDMVAGYGCINLGHNPQPIIDALKAYLDAQGPNFIQYISIPEQAAKLAEVLCHFAPGNMGRVFFSNSGTEAVEAAMKLAKASTGKAGIAYLKNSYHGKTLGALSITGREKHRRHFKPLLASMIEVPFADIEALRQTLSRDDIGALMIEPIQGEGGVHVPPPGYLRTVQEICRQTDTLLMVDEVQTGLGRTGKLFACEWEGIEPDVLMLSKSLSGGVMPIGATLCRAIFGNGPYGTADRFLMHSSTFGGGNIAAVVALSALREILAQDLVGNAERLGTYFKQALTDVAARYPFVAEIAGRGLMLGIQFDQTFAGAVGASAREFATRLPGDWHTTWKFLPDPVQAHLKAAMERMEQSLGEMFCMKFVTKLCQDHNILTFITANSSTVIRIQPPLTISKAEIDRFVSAFATVCDELSTFLE

SEQ ID NO: 10960 - protein, 953 aa, Ustilago maydis 521
MSAPRDAYSVASSQASTITPFSTDVASSVASLDSSIPTSPEPSDLGDDTDIKSAFISHKDRRGPNGYRFATQCATVDDPNHKDQYGSSSAPIYMSATFKGLPGGEFDYSRSGNPTRSMLQHHLCQLQNCKYSYAVSSGMACLDVITRIVKTGERIIAGDDLYGGSNRLLGYLASHQNIHSDHVDTTDASKVEEMLQKRSQEAAAGLCGKVSMVLLETPTNPCLKICDLQRCAAAAKKWAPDAVVVVDNTMMSPYLMRPLELGVDIVYDSGTKYLSGHHDLMAGVIACDRDDLGKQIAFTINSIGNALTPMDSFLLLRGIKTLAVRMDRQQASAITVAHYLDSLGFKVNYPGLASHPSKAVHDKQAAGPGSVLSFVTGDKALSERIVGATRLWGISVSFGCVNSLISMPCLMSHASIDPKVRAARGMPEDLIRLCVGIEDERDLLDDLENALLQAGAIRRKPSARSSALASTTESSRAASPDLIAYERTPLHTDEHTQQDKIGSLVDDMNRARLETRGGEGEPRSAQDHPPPSSVVVSAPGKVILFGEHAVVHGITAVAASVALRCYANVSPREDGKISLDLPDLGVIHTWNIADLPWSAVPKSIQGGGAVPDSLDKTLIGAIEKVVGDTVNESERSHAASIAFLVLYMCIAGQADARAQAFVLRSALPIGAGLGSSAALSSCLAAALTILYGRIPAPGSELSAEHSTHINEWAFLSEKVIHGTPSGVDNTVAVHGGAIAFTRAHPSNTLTANKMNKLKGFSSFRFLLVDSCVGREGKKLIAHVAAQKESEPTRVNAALARIQTIADSAQLVLTGNSGLSRSEQVAQLRELIKQNHSELVGLEVSHASLELIKNKTESFAPDQLATKLTGAGGGGCAVTLLPDDFEEEKVKELMSELENAGFKCYETRVGGDGFGVKLLQDEQEEAEAKLRFKEANVSNELAVWADELAGWVFA

SEQ ID NO: 10961 - protein, 167 aa, Listeria monocytogenes
ARGAGAHGKFVTKKSMKKYTMAKFLQEEGTETEVFARFSTVIHGQHSPETLRDPRGFSVKFYTEEGNYDFVGNNLPVFFIRDAIKFPDVIHSLKPDPRTNIQDGNRYWDFFSLTPEATTMIMYLFSDEGTPASYREIRGSSVHAFKWINEEGKTVYVKLRWIPKAGI

SEQ ID NO: 10962 - protein, 348 aa, Candida albicans SC5314
MSVPTTQKAVIFETNGGKLEYKDIPVPKPKANELLINVKYSGVCHTDLHAWKGDWPLATKLPLVGGHEGAGVVVALGENVKGWKVGDYAGVKWLNGSCLNCEYCQSGAEPNCAEADLSGYTHDGSFQQYATADAVQAARIPAGTDLANVAPILCAGVTVYKALKTAELEAGQWVAISGAAGGLGSLAVQYAKAMGYRVLAIDGGEDKGEFVKSLGAETFIDFTKEKDVVEAVKKATNGGPHGVINVSVSERAIGQSTEYVRTLGKVVLVGLPAGAKISTPVFDAVIKTIQIKGSYVGNRKDTAEAVDFFTRGLIKCPIKIVGLSELPEVYKLMEEGKILGRYVLDNDK

SEQ ID NO: 10963 - protein, 235 aa, Triticum aestivum
  unsure (1)..(235): unsure at all Xaa locations
AHTSCLSPSLSLSCQAHTPPALTLPSLLSPHSILLHHTKHTFSLSSPMAVAIAEAPFHVLAVDDSVLDRKLIERLLKTSSFQVTTVDSGTKALEFLGLHDEDASISSVHADQLDVEVNVNLIITDYCMPGMTGYDXLKKIKESSSFRDIXRCLEEGANEFFLKPVRLSDMSKLEPYIMKSRCNQHCHQDKPLLSNSARNQGKHMTPGRRPAKQQRRPTSQNNRQQAAIPSPFSGQ

SEQ ID NO: 10964 - protein, 478 aa, Streptomyces avermitilis MA-4680
MENMNTPDVIVIGGGTGGYSAALRAAALGLTVVLAERDKVGGTCLHRGCIPSKAMLHAAELVDGIAEARERWGVKATLDDIDWPALVATRDDIVTRNHRGVEAHLAHARVRVVRGSARLTGPRSVRVEGAPDDLPGGAGDFTARRGIVLATGSRPRTLPGLVPDGRRVVTSDDALFAPGLPRSVLVLGGGAIGVEYASFHRSMGAEVTLVEAADRIVPLEDVDVSRHLTRGLKKRGIDVRAGARLLDAELLEAGVRARVRTVRGEIRTLEAERLLVAVGRAPVTDGLDLAAAGLATDERGFVTPSDWDRLETAVPGIHVVGDLLPPPSLGLAHASFAEGLSVAETLAGLPSAPVDYAAVPRVTYSSPQTASVGLGEAEARARGHEVDVNTMPLTAVAKGMVHGRGGMVKVVAEEGGGQVLGVHLVGPHVSEMIAESQLIVGWDAQPSDVARHIHAHPTLSEAVGETFLTLAGRGLHQQ

SEQ ID NO: 10965 - protein, 475 aa, Pirellula sp. 1
MHAPVVVLGGGPGGYAAAFLAADEGMEVTIVEAEPRLGGTCLIRGCIPSKALLHVAKVISEVEELKSEWGIEYSGEPKIDVDVVRARKDKVIDNLTGGLGGLAKRRNVTVIQARGSFVSSNELKLEGDHESIPEGGKLTFDKCIVATGSIPAMPPAFDIGSDRVMDSTGALALKDIPETLLVVGGGYIGLEMGTVYAHLGSKVSVVELGEGLLPGADRDLVKPLAKKIDKMCDGRVFLNTKVGSLAEDGDKVVVSFEGPSKFGTESYDRVLISIGRRPVTRGLGLENTKVEVNERGFIVCDEQQRTADPNILAIGDVAGDPMLAHKATHEGRVAAEVLAGKNVAFDKAAIPAVVFTDPEIAWAGLTEGEAKAAGRKVDVEVYPWAASGRAQAIGVTNGLTKWLVDPETHRVLGCGIVGTGAGELIAEAVLAIEMGCEVTDITESVHPHPTLSETLMNAGEVHFGTATEIYKPKRK

SEQ ID NO: 10966 - protein, 167 aa, Listeria monocytogenes
ARGAGAHGKFVTKKSMKKYTMAKFLQEEGTETEVFARFSTVIHGQHSPETLRDPRGFSVKFYTEEGNYDFVGNNLPVFFIRDAIKFPDVIHSLKPDPRTNIQDGNRYWDFFSLTPEATTMIMYLFSDEGTPASYREVRGSSVHAFKWINEEGKTVYVKLRWVPKAGI

SEQ ID NO: 10967 - protein, 343 aa, Arabidopsis thaliana
MRKELCRNFQRGSCRYGENCRFLHPQQAKPNNPFGFGTQNQQQQQQQQQQNSSNPFGFGVQSGGSSRPNQFQNTWSRTASTPTGGGAAASTQQTGKQTQPADHKCTDPAACKRVMQDDFKNERPMWKLTCYGHWKYFPCDVTGDISYEELRAVAYEEAKRGIPLQSIVERERNLQNSKIAEFENFLRNPYKGSVTANQSPFAATTPSIFPQSSQINSPSPAFSGFNQQTAFSNTNAGGLSSSGPPNAFASFNQQTTFPNTNAGGVSSSGPPNPFASFTQQSNNQQTAFSNTNAGGLRPRDSPSSETSFANDHRSLWFPNQSINNIQTSIIWTWTRICHNSTKQ

SEQ ID NO: 10968 - protein, 480 aa, Neisseria meningitidis MC58
MKQLAMYINGRFENDFNGEWRDVLNPSTEEAIAREPKGGKADVDRAVAAARAAQPAWERLPAVERGAYLRKIAQGIRERADELTDTIVAEGGKTKDLARVEVMFTADYLDYQAEWARRYEGEIIQSDRPRENILLFKRPLGVIAGILPWNFPFFLIARKMGPALVTGNTIVVKPSSVTPINCHIFAEIVDAVGLPAGVFNVVNGPGAEIGNALSAHPQVDMVSLTGSVEAGRQVMEAASANITKVSLELGGKAPAIVLKDADLDLAVKSILASRVGNTGQICNCAERVYVHSSLKDAFIEKMTAAMKGVRYGNPAEAEAGALEMGPLIEERAVKAVAEKVERAVKQGAKLVCGGKRAEGRGYFFEPTLLTDTDNSMDIMKEETFGPVLPVSAFDTLDQVIALANDCEFGLTSSVYTTNLNEAFYVTRRLQFGETYINRENFEAMQGFHAGWKKSGIGGADGKHGLEEYLQTQVVYLETDI

SEQ ID NO: 10969 - protein, 626 aa, Shigella flexneri 2a str. 2457T
MAIEIKVPDIGADEVEITEILVKVGDKVEAEQSLITVEGDKASMEVPSPQAGIVKEIKVSVGDKTQTGALIMIFDSADGAADAAPAQAEEKKEAAPAAAPAAAAAKDVNVPDIGSDEVEVTEILVKVGDKVEAEQSLITVEGDKASMEVPAPFAGTVKEIKVNVGDKVSTGSLIMVFEVAGEAGAAAPAAKQEATPAATPAPAAGVKEVNVPDIGGDEVEVTEVMVKVGDKVAAEQSLITVEGDKASMEVPAPFAGVVKELKVNVGDKVKTGSLIMIFEVEGAAPAAAPAKQEAAAPAPAAKAEAPAAKAEGKSEFAENDAYVHATPLIRRLAREFGVNLAKVKGTGRKGRILREDVQAYVKEAIKRAEAAPAATGGGIPGMLPWPKVDFSKFGEIEEVELGRIQKISGANLSRNWVMIPHVTHFDKTDITELEAFRKQQNEEAAKRKLDVKITPVVFIMKAVAAALEQMPRFNSSLSEDGQRLTLKKYINIGVAVDTPNGLVVPVFKDVNKKGIIELSRELMTISKKARDGKLTAGEMQGGCFTISSIGGLGTTHFAPIVNAPEVAILGVSKSAMEPVWNGKEFVPRLMLPISLSFDHRVIDGADGARFITIINNTLSDIRRLVM

SEQ ID NO: 10970 - protein, 474 aa, Shigella flexneri 2a str. 2457T [sequence omitted]

SEQ ID NO: 10971 - protein, 374 aa, Oceanobacillus iheyensis HTE831
MQVKTAVLRTQGADSPYKESKPIKIETLELDAPQLGEVLIQIKAASLCHSDLSVINGSRPRPLPMALGHEASGVVVEVGEGVTYLEPGDHIVCVFVPSCGHCVPCKEGRPALCEPGADSNTAGTLISGGIRLHADGEAINHHLGVSAFSEFAVVSRNSLVKVKKDIPFEKLALFGCAVITGVGAVVNTANVKLGSTVAIVGLGGIGLSALLGAVAAGASRIIAVDINENKLKQAKELGATDVFNSTEETVIQQIKEATDGGVNYAFETAGAVPAMEVAYGITKRGGTTVTTGLPHPEHQFSFPYVTLTAEEKTLKGSYVGSCVPDRDIPRYMNLFKQDRLPVDKLMTDFISLDEINEGFDKLAKGDSSRIIIKM

SEQ ID NO: 10972 - protein, 361 aa, Streptococcus pneumoniae R6
MKPSIHSLAHQTMQEWVLEQGEKKFRADQIWEWLYRKRVQSFEEMTNLSKDLIAKLNDQFVVNPLKQRIVQESADGTVKYLFELPDGMLIETVLMRQHYGLSVCVTTQVDCNIGCTFCASDLIKKQRDLNNGEIVAQIMLVQKYFAERGQDERVSHIVVMGIGEPFDNYNNVLNFVCTINDDKGMAIGARHITVSTSGLAHKIRNFADEGVQVNLAVSLHAPNNELRSSIMKINRAFPIEKLFAAIEYYIETTNRRVTFEYIMLNEVNDSVEQALELAELLKNIKKLSYVNLIPYNPVSEHDQYSRSPKERVLAFYDTLKKKGGNCVVRQEYGTDIDAACGQLRSNTMKRDRQKAVAEVNP

SEQ ID NO: 10973 - protein, 476 aa, Methylobacillus flagellatus KT
MKALERGRRKYRILLSDNMTIPGRSPQVFLKGMEFLQGFQRSADERAVQASLGSAHCYCRASQSFAPAAVAGPLGLSSPIKYKEHLMRALTYHGSKDVRIETVPDPVLQADDDIIIRVTSTAICGSDLHLYRGKIPQLHDGDILGHEFMGIVEDTGHGVTEVRKGDRVIIPFVIACGHCFFCAQQQFAACETTNPGPGPSLNKKSGTPPAALFGYSHLYGGIPGGQAELVRVPHGNVGPFKINGSLADEQVLFLTDILPTGYQAVLNAGVGKGSSLAIFGAGPVGLMAAACARMMGVETIFMIDDLQYRLDFAQAQYNTISINLDEVEDPADYILEHTAHRGVDGSIDAVGFEAKGSVVESALTALKLETSNGKVIRQCIAATRRGGTVSIPGVYAGFIHGFLIGDAFDKGLTFKMGQTHVHRFLPELLEFIENGDLHPADIITHRMALEDAPLGYRIFNDAEENCRKVVLTPGLH

SEQ ID NO: 10974 - protein, 388 aa, Fusobacterium nucleatum subsp. vincentii ATCC 49256
MVRNYMAIIYLAENKENISPLTKVRALASIPVGGSYRIIDFSLSNVVNAGIRNVGLFCGNEELNSLTDHIGMGAEWDLARKKDGIFIFKQMLDSNFSLNQSRIRKNMEYFFRSTQKNIVVLNAHMVYNLDIADLIEKHEASEKEITMVYKKVKNANEHFNHCSSVKIDENNRVIGIGQNLFFKEEENISLDAFVLSKELMLKLLVDSIQEGKYNILSEIIARNLPSLNINAYEFKGYLQCINSTREYFDFNMNLLNQEVRDDVFGLKSGRKILTKVKDTPSTFFKETADVENSLVSNGCIIEGTVKNSILSRGAIIEKDVVLEECVILQDCHIKKGAHLKNVIVDKNNIIHENEKLSASREYPLVIEKSMKWNTKQYQDLMDYIRNKE

SEQ ID NO: 10975 - protein, 510 aa, Neurospora crassa
MNGIKDLGLGFSKASTRLHFFSLLLALGSFVWGYNVGVLASVLAHPGFRETIPGYGPYKRGLITSINYLGTWLSYIFFSRPATDLLGRRYAAMVGMSVLCVGQALQAAASGSVALSMVIFGRVVSGLGTGIVSTSVPLYQSEIAPAKQRGRLVVLNHVGFVAGLASGFCSHGYLSGWRLSVSLSFIPALIFFVGLPFLHESPRWLVEHGRPDEALKALQFYREGSFTPSQIQSELTDIKRNVCAYQATSLKKWTSLFTNPSLFTRLWRAALLHFMAQMCGATAMKYYLPDLFRVLGLSPRVSLLAGGIESTLKIGCTVLEMFVIDKVGRRMTLAVGAGIMAFALLINGALPLAYPNNTNRASDYTCVVFIFIYSLGYSMGFGPAAWVYGSEIFPTAARARGLSFAASGGAVGSIIVSQLWPIGIAELGSKIYFFFMAVNLACVPIIFLLYPETKGRPLEDMEVLFGGYEGGTPSTTSLLLADEREDGNEEDEENETLGRPLLGDGRGMAR

SEQ ID NO: 10976 - protein, 384 aa, Fusobacterium nucleatum subsp. vincentii ATCC 49256
MRMKKKRIIAMILAGGQGTRLKELTEDLAKPAVAFGGKYRIIDFTLTNCSNSGIDTVGVLTQYEPRILNNHIGRGSPWDLDRMDGGVTVLQPHTRKNDKKGWYKGTANAIYQNIKFIEEYDPEYVLILSGDHIYKMNYNKMLQFHIQKEADVTIGVFKVPLKDAPSFGIMNTNDDMSIYEFEEKPKEPKSDLASMGIYIFNWDLLKEYLDEDEKNPNSDNDFGKNIIPNMLNDGRKLFAYPFKGYWRDVGTIQSFWDAHMDLLSEDNELDLFDKSWRVNTRQGIYTPSYFEKGSKVQNTIIDKGCLIEGEIKHSVIFSGVKVGKNTKIIDSIIMADTEIGNNVTIRKAIIANNVKITDNINIGDGEKIAVVGEKKIIDSQSLVK

SEQ ID NO: 10977 - protein, 405 aa, Arabidopsis thaliana
MPLSLQSPPCATLSASIRKGRWKTLAAGFSVTPLPAVNFSLRRSIPRILASASSSSSPASSSLEAGENNELNAVSAFSEIVPDTVVFDDFERFPPTAATVSSALLLGICGLPDTIFRNAVDMALADSSCAGLETTESRLSCFFNKAIVNVGGDLVKLVPGRVSTEVDARLAYDTNGIIRKVHDLLRLYNEIDVPHDRLLFKIPATWQGIEAARLLESEGIQTHMTFVYSFAQAAAASQAGASVIQIFVGRLRDWARNHSGDTEIKSAIKSGEDPGLALVKRSYNYIHKYGYKSKLMAAAVRNKQDLFSLLGVDYVIAPLKVLQSLKDSPAIPDDEKYSFVRKLTPETATHYHFTNKELVKWDQLSLASSMGPASVELLSAGVEGYANQAKRVEELFGKIWPPPNV

SEQ ID NO: 10978 - protein, 393 aa, Saccharomyces cerevisiae
MGQLLSHPLTEKTIEYNEYKNNQASTGIVPRFYNCVGSMQGYRLTQEDAHLIRNENSVVYVRFFNPFIDKYETLSLNVFAVFDGHGGDDCSKFLSGGRHHRDGNGSSNGNGEPNAGLIKWIAYSFENHHYTSTTNNDSSKFKRSFNTLEGLVSQIFKDAFILQDEELYRHFANSSCGSTAVVACIINEESLYVANCGDSRCILSSKSNGIKTMSFDHKPQHIGELIRINDNGGTVSLGRVGGVLALSRAFSDFQFKRGVTYPHRRTKLTNITQNLTYGTPPQEAQVTVEPDVLMHKIDYSKDEFLVLACDGIWDIYNNKQLIHFIKYHLVSGTKLDTIITKLLDHGIAQANSNTGVGFDNMTAIIVVLNRKGETLQDWFNKMKTRLERERGLV

SEQ ID NO: 10979 - protein, 580 aa, Arabidopsis thaliana
MVEEASKSEQINITEVWTTTWETPYIMRLALSAGIGGLLFGYNTGVIAGALLYIKEEFGEVDNKTWLQEIIVSMTVAGAIVGAAIGGWYNDKFGRRMSVLIADVLFLLGALVMVIAHAPWVIILGRLLVGFGVGMASMTSPLYISEMSPARIRGALVSTNGLLITGGQFLSYLINLAFVHTPGTWRWMLGVSAIPAIIQFCLMLTLPESPRWLYRNDRKAESRDILERIYPAEMVEAEIAALKESVRAETADEDIIGHTFSDKLRGALSNPVVRHGLAAGITVQVAQQFVGINTVMYYSPTILQFAGYASNKTAMALALITSGLNAVGSVVSMMFVDRYGRRKLMIISMFGIITCLVILAAVFNEASNHAPKIDKRDSRNFAKNATCPAFAPFTASRSPPSNWNCMKCLQYDCGFCSNGAQEYAPGACIVQSADMKALCHSKGRTFFKDGCPSKFGYLAIVFLGLYIIVYAPGMGTVPWIVNSEIYPLRYRGLAGGIAAVSNWMSNLVVSETFLTLTNAVGSSGTFLLFAGSSAVGLFFIWLLVPETKGLQFEEVEKLLEGGFRPSLLRPTTKENQVETP

SEQ ID NO: 10980 - protein, 486 aa, Candida albicans SC5314
MTTVEQLETVDITKLNAIAAGTNKKVPRVVAAGLGGKLMGTSDLVKVTAEEITKDSMESLAEKDAREKAKYANKKHISEEPWTLDNFAKKINWLNMILVVFIPVFGAYCAWNYPPQWKTLVLTFVMYAFSGISITAGYHRLYSHKSYDAALPVRLFFAFFGAGAIEGSIKWWGHSHRIHHRYTDTPRDPYDARRGFWFSHMGWMLTKANPKNRARADISDLVADWVVTFQHRHYLLLMITAAFIFPTLVAGLGWGDYWGGFIYAGILKGFAIQQATFCVNSLAHWIGVQPFDDRRTPRDHVLTAFVTFGEGYHNFHHEFPSDYRNALKWYQYDPTKVTIWCLSKLGLAWNLKKFSQNAIEQGLVQQQQKKLDRMKNKLNWGAEIEKLPVWTREEFNERAKQEGLIIISGIIHNVKNFIKEHPGGQALVRASLGKDATKAFNGAVYAHSNAAHNLLATMRVAVVKDGEVNADTFDLQEQMMEKEKQS

SEQ ID NO: 10981 - protein, 393 aa, Bordetella parapertussis
MSSALANIYARLPVSFTHGRGVWLWDTGERRYLDALAGIGVSCLGHGHPGLVAAISEQAARLIHTSNIYEVPQQAALARRLAELSGMSEVLFSNSGSEANEAAIKLARYYGYKQGNTHAHIITMDSSWHGRTLATLAATGSDKARQGFGPMPSGFIQVPYNDLPAIRAAGEAEPRVTAVLLEVLQGEGGIRPSDMAFLRGVRQLCTERGWLLMIDEVQSGIGRTGKWFAHQWADIRPDVMTLAKGLAGGVPIGAMLAAGPAAGVFAPGSHGTTFGGGPLACAAGLAVIDAIEQEGLLANAHEVGAHLHAALASELAGVPGIIEVRGHGLMLGIELDRPCGILATRAMEAGLLINVTRERVVRLLPPLILSGEEADQIVRILVPLIKQFLAQQQ

SEQ ID NO: 10982 - protein, 406 aa, Caulobacter crescentus CB15
MSTDFHRIRRLPPYVFEEVNKIKARLRAEGTDIIDFGMGNPDMPTPQHIVDKLIETARDPKAGRYSASKGVPGLRKAMANYYGRRFGVKLNPDTEVIATLGSKEGFANLAQALTGPGDVIICPNPAYPIHAFGFIMAGGIIRHVPALSPEEYLSNISRAVKHSVPPPSVLILSYPSNPTAQWVDLDFYKDAVALAKKHDLLVISDVAYGEIYFDNNPPPSILQVDGAKDIAVEVNSLSKTYAMAGWRVGMVVGNARICAALARVKSYLDYGAYTPVQVAAATALNGPQDCVDEIRGIYKSRRDTLIKSMKAAGWDIPNPPASMFAWAKIPEAYREAGSMLFSRLLIEEAGVAVAPGIGFGEYGEGYVRIGLVENEHRIRQAARNVKKFIANADSILAKAHNKMEQA

SEQ ID NO: 10983 - protein, 461 aa, Mycobacterium tuberculosis H37Rv
MSFVNVAPQLVSTAAADAARIGSAINTANTAAAATTQVLAAAQDEVSTAIAALFGSHGQHYQAISAQVAAYQQRFVLALSQAGSTYAVAEAASATPLQNVLDAINAPVQSLTGRPLIGDGANGIDGTGQAGGNGGWLWGNGGNGGSGAPGQAGGAGGAAGLIGNGGAGGAGGQGLPFEAGANGGAGGAGGWLFGNGGAGGNGGIGGAGTNLAIGGHGGNGGNAGLIGAGGTGGAGGTGGGEPSAGASGGNGGNGGNGGLLIGNSGDGGAAGNGAGISQNGPASGFGGNGGHAGTTGLIGNGGNGGAGGAGGDVSADFGGVGFGGQGGNGGAGGLLYGNGGAGGNGGAAGSPGSVTAFGGNGGSGGSGGNGGNALIGNAGAGGSAGAGGNGASAGTAGGSGGDGGKGGNGGSVGLIGNGGNGGNGGAGSLFNGAPGFGGPGGSGGASLLGPPGLAGTNGADG

SEQ ID NO: 10984 - protein, 519 aa, Ipomoea nil
MATLTLIFCTLVFAIFLYFLILRVKQRYPLPLPPGPKPWPVLGNLPHLGKKPHQSIAAMAERYGPLMHLRLGFVDVVVAASAAVAAQFLKVHDSNFSNRPPNSGAEHIAYNYQDLVFAPYGPRWRMLRKITSVHLFSAKALDDFCHVRQEEVATLTRSLASAGKTPVKLGQLLNVCTTNALARVMLGRKVFNDGGSKSDPKAEEFKSMVEEMMVLAGSFNIGDFIPVLGWFDVQGIVGKMKKLHARFDAFLNTILEEHKCVNNQHTTLSKDVDFLSTLIRLKDNGADMDCEEGKLTDTEIKALLLNLFTAGTDTSSSTVEWAIAELLRNPKILNQAQQELDLVVGQNQLVTESDLTDLPFLQAIVKETFRLHPSTPLSLPRMGAQGCEINGYFIPKGATLLVNVWAIARDPNVWTNPLEFNPHRFLPGGEKPNVDIKGNDFEVIPFGAGRRICSGMSLGIRMVHLLVATLVHAFDWDLVNGQSVETLNMEEAYGLTLQRAVPLMLHPKPRLQPHLYTLN

SEQ ID NO: 10985 - protein, 426 aa, Magnaporthe grisea 70-15
MSTGSAKFQPAARVAGRRQDVWSIINEAATASPKQPIVNMGQGFFGYNPPDFILNAAKQALDKVDCNQYSPTKGRPRLKKAIADAYAPFWGRQLNPDTEVTITTGANEGMLSAFMAFIEPGDEVIIFEPFFDQYISNIEMPGGKIVYVPLHPPTEGATKTLSAGAWNIDFDELERAITPKTKMIVLNTPHNPVGKVFTKDELQKIADLCLKNEIIILSDEVYDRLFYTPFTRIATLSPEVERITLTVGSAGKNFYATGWRVGWLMGPAELIQHVSAAHTRICYSSVSPLQEACAVGFEQAEKEGFWDECVRDMKRRMDLFNQVWHELGIPFSEPEGGYFVMVNLSTVQMPENYPFPPHVASRPRDFKLAWFLIQELGVAAIPPTEFFTDANAHIVEDYLRFAVCKPDDVLELAKERLRGLKKFIKQ

SEQ ID NO: 10986 - protein, 456 aa, Vibrio parahaemolyticus RIMD 2210633
MHRYKEEASSLIKLATPVLIASVAQTGMGFVDTVMAGGVSATDMAAVSVASSIWLPSILFGIGLLMALVPVVAQLNGSARREKIPFEIQQGVVLALLISIPIIGVLLQTQFILQLMDVEAVMAGKTVGYIHAVIFAVPAFLLFQTLRSFTDGMSLTKPAMVIGFIGLLLNIPLNWIFVYGKFGAPELGGVGCGVATTIVYWVMFALLLAYVMTSSRLKSINVFGEYHKPQWKAQVRLFKLGFPVAAALFFEVTLFAVVALLVSPLGPIIVAAHQVAINFSSLVFMLPMSVGAAVSIRVGHRLGEENVDGARVASRVGIMVGLALATITAIITVLSRELIAELYTNNPEVISLAMQLLLFAAVYQCTDAVQVIAAGALRGYKDMRAIFNRTFIAYWILGLPTGYILGRTDWIVEPMGAQGFWLGFIIGLTAAALMLGVRLRWMHRQEPDVQLNFSLQ

SEQ ID NO: 10987 - protein, 853 aa, Serratia marcescens
MKFGFIAHPTSLGLKRYVKMLDLLQRNSTEQHSGYTRELWERQNLVPFMNFARITSATGATCEGVIKYMPLVADEMLADARGIAARVVQGIEELAGDGAELVGLGGLTSIVGRRGEATAEKSPVPVTSGNSLTTYAGYKALMQIQSWLEISPEEEPVAIVGYPGSICLALSRLLLAHGFSLHLLHRAGNHDRSELLSHLPEEYHSRVTLTSDPEDLYPRCKLFAAATSAGGVIDPARLQPGSIFIDVALPRDIASETRPARDDILIIDGGCVTATDAVKLGGESLNVTIKQQLNGCMAETIVLALENRRENFSLGRYLAPEKVLEIGEIAERHGFFAYPLASYGERIDRQSVTNLKRYYHHDIYAGEPADAALPASRLAFIDAVIAQTPAREDTLDRYHQYINPMMVDFLKLQRCDNVFRSAAGTQLYDDAGEAFLDMVAGYGCLNLGHNPQPVVNALKNYLDAQGPNFIQYISIPEQTAKLAEVLCRLAPGNMGRVFFSNSGTEAVEAAMKIAKASTGKPGIAYLRNSYHGKTLGALSITGRDKHRRYFTPLLDAMVEVPFGDLAALREALNREDVGALMIEPIQGEGGVHIPPAGYLQAVQQLCRETGVLLMVDEVQTGLGRTGKLFACEWDGIEPDVLMLSKSLSGGLIPIGATLCRTELWQKAYGTADRFLVHSSTYGGGNLASVVALSALREILAQDLVGHAERMGAYFKQALSEIAARYPFVSEVRGRGLMLGIQFDQAFTGAVNASAREFATRLPGDWHTTWKFLPDPVQAHLRAAMDRMEQALGEMFCMKFVTKLCQDHKILTFITANSSTVIRIQPPLIISKAEIDRFVGAFATVCEELSTFLD

SEQ ID NO: 10988 - protein, 519 aa, Ipomoea purpurea
MATLTLIFCTLVFAIFLYFLILRVKQRYPLPLPPGPKPWPVLGNLPHLGEKPHQSIAAMAERHGPLMHLRMGFVDVVVAASAAVAAQFLKVHDANFSNRPPNSGAEHIAYNYQDLVFAPYGPRWRMLRKITSVHLFSAKALDDFCHVRQEEVATLTRSLASAGKTPVKLGQLLNVCTTNALARVMLGRKVFNDGGSKSDPKAEEFKSMVEEMMVLAGSFNIGDFIPILGWFDLQGIVGKMKKLHARFDAFLNSILEEHKFVNNQHTTLSKDVDFLTTLIRLKDNGADTDSEEGKLTDTEIKALLLNLFTAGTDTSSSTVEWAFAELLRNPKILNQAQQELDSVVGQNRLVTESDLTHLPFLQAIVKETFRLHPSTPLSLPRMGAQGCEINGYFIPKGATLLVNVWAIARDPNVWTNPLEFKPHRFLPGGEKPNVDIKGNDFEVIPFGAGRRICSGMSLGIRMVHLLVATLVHAFDWDLMNGQSVETLNMEEAYGLTLQRAVPLMLHPKPRLQPHLYTLN

SEQ ID NO: 10989 - protein, 120 aa, Zea mays
  unsure (1)..(120): unsure at all Xaa locations
SVFSKYSLKPLVPRLSELIGVEVGMANDCIGEEVEMLSVDMPEGVELVLEKVRFYKVEKYNEAEYAKKLTFVGDIYGKKTLGIAHXAYVLIEGVTNYFKPLIDGLCYLYRTLFFFVGNYF

SEQ ID NO: 10990 - protein, 902 aa, Erwinia carotovora subsp. atroseptica SCRI1043
MNAHVCRTTCPYCGVGCGVLAEHDGQGEVKISGDPAHPANFGRLCVKGSALGETLDLKGRLLWPLVEGRRVSWDQALDAVAERLLATMQQHGPQSVAFYGSGQLLTEDYYVANKLMKGFIGVANMDTNSRLCMASAVIGYKRGLGADAVPCNYEDIEQADVVVLVGSNTAWAHPVVYQRLAQAKQQRPQMQVVVIDPRRTATCDIADLHLPLQPGSDAGLFNGLLQWIAQDPRINLTELAERFSGVEAALQSAQAWSVAQVADFCQLDDADIECFYHLFSTSEKVVTLYSQGVNQSSSGSDKCNAIINAHLLSGKIGVPGSGPFSITGQPNAMGGREVGGLANQLASHMGLTPQDIERVGRFWQSDNVATQPGLNAVDLFHAIERGDIKAVWIMGTNPVVSMPDADRVKQALECCPLVIVSEVMRHTDTAETADILLPALGWGEKDGTVTNSERRLSRQRAFLPAPGEAKADWWMLSQVAQRMGFAEAFAYQHPADIFREHAALSGFENNGSRAFDISGLATLSNQQWQQLEPIQWPVNAAFPNGRARLGDDGRFWHTDGKAHLVAVTPSLPQSPWSAAYPLVLNTGRIRDQWHTMTRTGKAARLMRHISEPYCELHPQDAQMHDIQAGDLVRLSSVHGWMLARARLDAGQARGSVFVPMHWNQQFSAQARADSLVAPITDPYSGQPESKHSRVRIQPWHTAWQATLFFADEPMSSPLALPDEHDVLPPPATYWSKIPHEGVTQYLFADRTPVDDWQAWLAEHYGLENMQCQIAQGKGIFHLIGWREGRVALACYVSAQALHIDSDTIRQAFITPPQLPHERNALLAGQAPQGQVTQGATICSCYSVGEAIIVGAIRKGCHSVAALGGALKCGTNCGSCIPELKALLSQHVPITVNELKKAG

SEQ ID NO: 10991 - protein, 182 aa, Shigella flexneri 2a str. 2457T
MVRDMKHTVEVMIPEAEIKARIAELGRQITERYKDSGSDMVLVGLLRGSFMFMADLCREVQVSHEVDFMTASSYGSGMSTTRDVKILKDLDEDIRGKDVLIVEDIIDSGNTLSKVREILSLREPKSLAICTLLDKPSRREVNVPVEFIGFSIPDEFVVGYGIDYAQRYRHLPYIGKVILLDE

SEQ ID NO: 10992 - protein, 392 aa, Vibrio cholerae O1 biovar eltor str. N16961
MRGQIMSVIKMIDLDLAGKRVFIRADLNVPVKDGKVTSDARILASLPTIKHCLEAGAKVMVTSHLGRPTEGEYAEEFSLLPVVNYLNDALDCEVRLVKDYLDGVELNAGELVVLENVRFNKGEKKNEEALSKKYAALCDVFVMDAFGTAHRAQASTHGVGMFAPIACAGPLLADELEALGKAMDKPARPMVAIVGGSKVSTKLTVLESLSKIADQLVVGGGIANTFIAAAGHNVGKSLYEADLVETAKKLMEECAIPVATDVACAKAFDENAEAEIKHVSEVQDDDMIFDLGPNSTAELAEILKNAKTILWNGPVGVFEFKNFEAGTRGIAEAIAQSEGFSVAGGGDTLAAIDKFGIKADVSYISTGGGAFLEFVEGKKLPAVEMLEARAKA

SEQ ID NO: 10993 - protein, 440 aa, Oryza sativa
  unsure (1)..(440): unsure at all Xaa locations
MGAREEVGDVAGEDGDGAGGKEEEKAAAAAAAVSCSICLDAVVAAGGERSTARLQCGHEFHLDCIGSAFNAKGVMQCPNCRKIEKGNWLYANGSRPTQDVNMDEWAHDEDLYDVSYSEMPFRFHWCPFGRLAQLPSFFEEGESSPPVTFHDFMGQHMFTEHVAAVSSAPGAAHPCPYVAYLHPLPSLASSSSSHVPERTMDGPAYHDPWHPLAGPSDGRPLQSVQPADFHHNHWAHVPNSYPQPNNNNGVAEQQGVPFGTTRAARVDGDTQRRGSSISPSYFSNGSGXSRSRAPNVPPMVPQFMRAHGSISEQYQQSSSSSLFAGAHRSGGMRTAPPPPLPENPAFCLFPPGSSGHNSMETDDAGGNRFYAWERDRFAPYPLMPVDCETNWWSSQQSHGTSEPAPAPRRLFGQWIGVGRSSPENRSPEGSSYRQMHTPRM

SEQ ID NO: 10994 - protein, 318 aa, Persea americana
  unsure (1)..(318): unsure at all Xaa locations
DIIKNAAEIIAKTSFGMNHQYAERVFEKLKAMQVTLYRSGRLLGVPFGRLVYLKQTLEERKLGKEIDDLLLSIITARKASHIAEPPKDLLGLLLPDNHVNELLGKKLSPRELVDECKTFFFGGHETTALASLWTLFLLAKQPKWQTLLREXIMEVTGGEPLDFTMLPKLEKMGWVMNEVLRLYPPAPNVQRQVREDIQVGDTIIPKGTNIWIDLVGMHHDPALWGEDVNEFRPERFKEDVLYGGCKHKMGYLPFGFGGRMCVGRNLALMEYKTVLSLILTRFSMSLSPNYLHSPTHLLSLRPSCGMPLILQPITPNHP

SEQ ID NO: 10995 - protein, 456 aa, Photorhabdus luminescens subsp. laumondii TTO1
METIRMSKHYDYIAIGGGSGGIASINRAAMYGQKCALIEAKALGGTCVNVGCVPKKVMWHAAQIAESIHQYGPDYGFDATINRFNWKTLIASRTAYIDRIHQSYGRGLGNNKVDVIQGFARFVDAHTVEVNGEKITADHILIATGGRPVWPDIPGAEYGIDSDGFFALEEMPKRVAVVGAGYIAVEIAGVLHALGSETHLFVRQHAPLRSFDPMIVETLLEVINTEGPTLHTESVPKSVSKNADGSLTLQLQNGKEQTVDTLIWAIGREPVTDNLNLSVAGVELNEKGYIRVDEYQNTNVKGIYAVGDNTGAVELTPVAVAAGRRLSERLFNNKPEEHLDYTNIPTVVFSHPPIGTVGLTEPQAKAQFGEEQVKTYQSSFTAMYTAVTQHRQPCRMKLVCVGPEEKIVGIHGIGFGMDEMLQGFAVALKMGATKKDFDNTVAIHPTAAEEFVTMRG

SEQ ID NO: 10996 - protein, 290 aa, Juglans nigra x Juglans regia
MDQYEKVEKIGEGTYGVVYKARNRKTNQTLALKKIRLEQEDEGVPSTAIREISLLKEMQHGNIVKLQDVVHGEKRLYLVFEYLDLDLKKHMDSSPEFANDLRQIKMFLHQILRGIAYCHSHRVLHRDLKPQNLLIDRRSNSLKLADFGLARAFGIPVRTFTHEVVTLWYRAPEILLGSRHYSTPVDVWSVGCIFAEMVNQRPLFPGDSEIDELFKIFRVLGTPNEDTWPGVTSLPDYKGAFPKWPPKDLAAVVSSLDSTGVDLLSKMLSLDPSRRITARTALEHEYFKDI

SEQ ID NO: 10997 - protein, 483 aa, Arabidopsis thaliana
MIARRIWRSHRFLRPFSSSSVCSPPFRVPEYLSQSSSSPASRPFFVHPPTLMKWGGGSRSWFSNEAMATDSNSGLIDVPLAQTGEGIAECELLKWFVKEGDSVEEFQPLCEVQSDKATIEITSRFKGKVALISHSPGDIIKVGETLVRLAVEDSQDSLLTTDSSEIVTLGGSKQGTENLLGALSTPAVRNLAKDLGIDINVITGTGKDGRVLKEDVLRFSDQKGFVTDSVSSEHAVIGGDSVSTKASSNFEDKTVPLRGFSRAMVKTMTMATSVPHFHFVEEINCDSLVELKQFFKENNTDSTIKHTFLPTLIKSLSMALTKYPFVNSCFNAESLEIILKGSHNIGVAMATEHGLVVPNIKNVQSLSLLEITKELSRLQHLAANNKLNPEDVTGGTITLSNIGAIGGKFGSLLLNLPEVAIIALGRIEKVPKFSKEGTVYPASIMMVNIAADHRVLDGATVARFCCQWKEYVEKPELLMLQMR

SEQ ID NO: 10998 - protein, 405 aa, Streptococcus mutans UA159
MEQIMRLVALFSGQGVKKLDFSSFFLSEKNLKEIIDKGSSVLGINLRTEIISEEPKTILNDPYLSQIAVFLYSLLEFKDFERRKDIDPIYFAGQSLGELTALVCSRKVDVETGFYLVKNRAKFMQECIAKDEGSMYSLKNVPISRIERYIKEIKLEQNIFISNINSSKQVIVSGEKHCVEEFISYLASKNVYYMKLNTLGAFHTKLMAPAAKKLFNLLGEINFVHNDKVLFSNVTGSIYDKSNYRELLSRQICEPVQWQKIIENLQSYGLSNFIEIGGNRIIANLLKESRMSFNKLIPENIDPNDRLQASREVILSFCHFGINQMVINKNSNHLYDQEIIKIYKYLEQAKEKFSIEEEIAFLIELDEIYNEVKKALVLKEVSNTQLERFDECYYTFKNEINHYLR

SEQ ID NO: 10999 - protein, 448 aa, Streptococcus pneumoniae R6
MREYDIIAIGGGSGGIATMNRAGEHGAQAAVIEEKKLGGTCVNVGCVPKKIMWYGAQIAETFHQFGEDYGFKTTDLNFDFATLRRNRESYIDRARSSYDGSFKRNGVDLIEGHAEFVDSHTVSVNGELIRAKHIVIATGAHPSIPNIPGAELGGSSDDVFAWEELPESVAILGAGYIAVELAGVLHTFGVKTDLFVRRDRPLRGFDSYIVEGLVKEMERTNLPLHTHKVPVKLEKTTDGITIHFEDGTSHTASQVIWATGRRPNVKGLQLEKAGVTLNERGFIQVDEYQNTVVEGIYALGDVTGEKELTPVAIKAGRTLSERLFNGKTTAKMDYSTIPTVVFSHPAIGTVGLTEEQAIKEYGQDQIKVYKSSFASMYSACTRNRQESRFKLITAGSEEKVVGLHGIGYGVDEMIQGFAVAIKMGATKADFDATVAIHPTSSEEFVTMR

SEQ ID NO: 11000 - protein, 171 aa, Larix laricina
APSKTGNSNVVSAFTGLKSMAQFPSSKTMSNAGAEWERKTTSNGARVRCMQVWPPYANKKWETLSYLPRLTPEQLVKEVEYLLKNKWVPCLEFEEDGEIKRVYGNSPGYYDGRYWVMWKLPMFGCTEASQVLNEVNECAKAYPNAYIRVIGFDNVRQVQCISFIVHKPEYN

SEQ ID NO: 11001 - protein, 178 aa, Helianthus annuus
MASISSSVATVSRTAPAQANMVAPFTGLKSNAAFPTTKKANDFSTLPSNGGRVQCMKVWPPLGLKKYETLSYLPPLTETQLAKEVDYLLRKKWVPCLEFELEHGFVYRENARSPGYYDGRYWTMWKLPMFGCTDSAQVMKELAECKKEYPQAWIRIIGFDNVRQVQCIMFIASRPDGY

SEQ ID NO: 11002 - protein, 572 aa, Streptococcus pneumoniae R6
MSYQENYQKWVDFVELPDYLRQDLENMDEKTKEDAFYTNLEFGTAGMRGLVGAGTNRINIYVVRQATEGLARLIESKGGNEKERGVAIAYDSRHFSPEFAFESAAVLAKHGIKSYVFESLRPTPELSFAVRHLNCFAGIMVTASHNPAPFNGYKVYGEDGGQMPPHDADALTTYIRAIENPFAVEVADVETEKASGLIEVIGEAVDIEYLKEVKDININPALIEEFGKDMKIVYTPLHGTGEMLARRALAQAGFDSVQVVEAQATADPDFSTVTSPNPESQAAFALAEELGRQVGADVLVATDPDADRVGVEVLQKDGSYLNLSGNQIGAIMAKYILEAHKNAGTLPENAALCKSIVSTDLVTKIAESYGATMFNVLTGFKFIAEKIQEFEEKHNHTYMMGFEESFGYLIKPFVRDKDAIQAVLVVAELAAYYRSRGLTLADGIEEIYKEYGYYAEKTISVTLSGVDGAEQIKAIMAKFRNNAPTEWNATAITVVEDFKAQTATVADGTVTNLTTPPSDVLKYTLADGSWIAVRPSGTEPKIKFYIAVVGETNEESQAKIANIEAEINAFVK

SEQ ID NO: 11003 - protein, 106 aa, Triticum aestivum
AGRVSEKNCNALLLKVNQIGTLTESIQAAKDSYADGWGVMVSHRSGETEDVTIADIAVGLRAGEIKTGAPARSERLAKLNQILRIEEELGDQAIYPGKDFRKSVNL

SEQ ID NO: 11004 - protein, 554 aa, Pseudomonas syringae pv. tomato str. DC3000; identical to SEQ ID NO: 341

SEQ ID NO: 11005 - protein, 750 aa, Salmonella typhimurium LT2
MSHNEKSPHQSPVHDTRESQPGLDSLAPSDGSHRPTPETTPPGAQPTAPGSLKAPETANDKLTALDAFRKGSENYALTTNQGVRIADDQNSLRAGSRGPTLLEDFILREKITHFDHERIPERIVHARGSAAHGYFQPYKDLSDITKAAFLCDPQKITPVFVRFSTVQGGAGSADTVRDIRGFATKFYTEEGIFDLVGNNTPIFFIQDAHKFPDFVHAVKPEPHWAIPQGQSAHDTFWDYVSLQPETLHNVMWAMSDRGIPRSYRTMEGFGIHTFRLINAQGKATFVRFHWKPLAGKASLVWDESQKLTGRDPDFHRRDLWEAIEAGDFPEYELGLQLIAEEDEFKFDFDLLDPTKLIPEELVPVQRVGKMVLNRNPDNFFAENEQAAFHPGHIVPGIDFTNDPLLQGRLFSYTDTQISRLGGPNFHEIPINRPTCPYHNFQRDGMHRMDIDTNPANYEPNSINDNWPRETPPAPKRGGFESYQERVDGNKIRERSPSFGEYYSHPRLFWLSQTPIEQQHIIDAFSFELGKVARAYIRERVVDQLAHIDVTLAQGVAHNLGFALTHEQTQIAPPPDVNGLKKDPALSLYAVPDGDVKGRVVAILLNDKVNAAELLTILQALKAKGVHAKLLYSRMGEVTADDGSTLTIAATFAGAPSLTVDAVIVPCGNIADIESCGDARYYLLEAYKHLKPIALAGDARRFKALLNIDSQGEEGLVEADNVDHHFMDTLLTLMAAHRVWSRAGKINAIPA

SEQ ID NO: 11006 - protein, 554 aa, Vibrio parahaemolyticus RIMD 2210633
MCSVFGILDIKSDAAALRPIALEMSKKLRHRGPDWSGIYSSERAILAHERLAIVGLNSGAQPLYSPDKKLILAVNGEIYNHKEIRARYEGKYEFQTDSDCEVILALYQDMGADLLEELNGIFAFVLYDEEKDEYLVGRDHIGIIPLYQGYDEHGNYYVASEMKALVPVCKTVSEFPPGSHYSSKDAEPQRYYIRDWNEYAAVQGNSTSKEELTEALEAAVKRQLMTDVPYGVLLSGGLDSSITSAVAKRYAAMRIEDDEKSEAWWPQLHSFAVGLEGAPDLKAAREVAEKIGTVHHEMTYTIQEGLDAIRDVIYHIETYDVTTIRASTPMFLMGRKIKAMGIKMVLSGEGADEIFGGYLYFHKAPNAKEFHEETVRKLLALNMFDCARANKSLAAWGVEGRVPFLDKEFIDVAMRLNPADKMCGNGKMEKHILRECFEHYLPDSIAWRQKEQFSDGVGYSWIDTLKAVAEEKVTDQQMETAQYRFPYNTPTTKEGYVYREIFEELFPLPSAAECVPGGPSVACSSAKAIEWDESFKNCVDPSGRAVQTVHNDAY

SEQ ID NO: 11007 - protein, 496 aa, Staphylococcus aureus subsp. aureus Mu50
MELLKHLSQRQYIDGEWVESTNKNTRDIINPYNQEVIFTVSEGTKEDAERAILAARRAFESGEWSQETAEKRGKKVRAIADKIKEHREALARLETLDTGKTLEESYADMDDIHNVFMYFAGLADKDGGEMIDSPIPDTESKIVKEPVGVVTQITPWNYPLLQASWKIAPALATGCSLVMKPSEITPLTTIRVFELMEEVGFPKGTINLILGAGSEVGDVMSGHKEVDLVSFTGGIETGKHIMKNAANNVTNIALELGGKNPNIIFDDADFELAVDQALNGGYFHAGQVCSAGSRILVQNSIKDKFEQALIDRVKKIKLGNGFDADTEMGPVISTEHRNKIESYMDVAKAEGATIAVGGKRPDRDDLKDGLFFEPTVITNCDTSMRIVQEEVFGPVVTVEGFETEQEAIQLANDSIYGLAGAVFSKDIGKAQRVANKLKLGTVWINDFHPYFAQAPWGGYKQSGIGRELGKEGLEEYLVSKHILTNTNPQLVNWFSK

SEQ ID NO: 11008 - protein, 522 aa, Ipomoea tricolor
MATLTLILCTLVFAICLYFLILRVKQRYPLPLPPGPKPWPVLGNLPHLGEKPHQSIAAMAQSYGPLMHLRLGFVDVVVAASAAVAAQFLKVHDANFSSRPPNSGAEHIAYNYQDLVFAPYGPRWRMLRKITSVHLFSAKALDDFCHVRQEEVATLTRSLASAGKTPVKLGQLLNVCTTNALARVMLGRKVFNDGSSKSDPKAEEFKSMVEEMMVLAGSFNIGDFIPVLGWLDLQGIVGKMKKLHARFDAFLNTILEEHKFVNNQDTTLFKDMDFLSTLIRLRDNGAAMDGEDGKVTGVTDTEIKALLLNLFTAGTDTSSSTVEWAFAELLRNPKILNQAQQELDLVVGPNRLVTESDLTQLPFLQAIVKETFRLHPSTPLSLPRMGAESCEINGYFIPKGATLLVNVWAIARDPNVWTNPLEFNPHRFLPGGEKPNVDIKGNDFEVIPFGAGRRICSGMSLGIRMVHLLVATLVHAFDWGLVDGQSVDTLNMEEAYGLTLQRAVPLMLHPKPRLQPHIYTLN

SEQ ID NO: 11009 - protein, 124 aa, Glycine max
MASSMISSPAVTTVNRAGAGMVAPFTGLKSMAGFPTRKTNNDITSIASNGGRVQCMQVWPPIGKKKFETLSYLPDLDDAQLAKEVEYLLKKGWIPCLEYEYEHGYVYREHNRSTIYYDRRYLTM

SEQ ID NO: 11010 - protein, 392 aa, Desulfovibrio desulfuricans G20
MTQTRRVARRVQQIRISATKLMPMLAARIGGCVSLGQGVPSFSTPPHIVDAVCRVLRDDPSAGKYSLQPGMPALRQAIAEHLTAAKGFAADPDSEVAVTVGAMEALLMALLTVVDRGDEVIIPSPGYASHAEQVLMAEGVPVHVPLRPADWGLDVEAVRAAVTERTRAVIVCNPGNPTGTVYADEDVRALCRLALEHNLVLISDETYDYMVFGGHAAPLSPASLPEMRENVIVINSFSKKYALTGWRVGYAAASAGWMGEMLKVHDATAICAPTVSQHAALAALTGPQDCVEQMCAALEKRRSLTMDRMAALAPAFTCVPPRGAFYVMARYSCTPEPSPEVARRILEEARVITVPGASFGPAGENHLRLSFGADEAELTECFDRLQRWAERQ

SEQ ID NO: 11011 - protein, 192 aa, Magnetococcus sp. MC-1
MTVTQNAEAKANLDHLEPFIDRAHIALRVAELGVQIRGDMVGKDPVFLVVLKGGFVFAADLMRALDHTVPVAFTNARPCAHLPIFSREDEDLLRGKDIWVVDALLDQGHSAMRLMQGLQPLQPTSIQFAVLLHKTVERAEKIPVRYVGFEVPDTRLVGYGLDENQQFRGMRNLYAWWPYAQAIRADEPEEFL

SEQ ID NO: 11012 - protein, 421 aa, Thermus thermophilus
MTARAVRGTKDLFGKELRMHQRIVATARKVLEAAGALELVTPIFEETQVFEKGVGAATDIVRKEMFTFQDRGGRSLTLRPEGTAAMVRAYLEHGMKVWPQPVRLWMAGPMFRAERPQKGRYRQFHQVNYEALGSENPILDAEAVVLLYECLKELGLRRLKVKLSSVGDPEDRARYNAYLREVLSPHREALSEDSKERLEENPMRILDSKSERDQALLKELGVRPMLDFLGEEARAHLKEVERHLERLSVPYELEPALVRGLDYYVRTAFEVHHEEIGAQSALGGGGRYDGLSELLGGPRVPGVGFAFGVERVALALEAEGFGLPEEKGPDLYLIPLTEEAVAEAFYLAEALRPRLRAEYALAPRKPAKGLEEALKRGAAFAGFLGEDELRAGEVTLKRLATGEQVRLSREEVPGYLLQALG

SEQ ID NO: 11013 - protein, 512 aa, Arabidopsis thaliana
MCGILAVLGCSDDSQAKRVRVLELSRRLRHRGPDWSGLYQNGDNYLAHQRLAVIDPASGDQPLFNEDKTIVVTVNGEIYNHEELRKRLKNHKFRTGSDCEVIAHLYEEYGVDFVDMLDGIFSFVLLDTRDNSFMVARDAIGVTSLYIGWGLDGSVWISSEMKGLNDDCEHFETFPPGHFYSSKLGGFKQWYNPPWFNESVPSTPYEPLAIRRAFENAVIKRLMTDVPFGVLLSGGLDSSLVASITARHLAGTKAAKQWGPQLHSFCVGLEGSPDLKAGKEVAEYLGTVHHEFHFSVQDGIDAIEDVIYHVETYDVTTIRASTPMFLMSRKIKSLGVKMVLSGEGADEIFGGYLYFHKAPNKKEFHQETCRKIKALHKYDCLRANKSTSAFGLEARVPFLDKDFINTAMSLDPESKMIKPEEGRIEKWVLRRAFDDEERPYLPKHILYRQKEQFSDGVGYSWIDGLKDHAAQNVNDKMMSNAGHIFPHNTPNTKEAYYYRMIFERFFPQVRVL

SEQ ID NO: 11014 - protein, 1832 aa, Podospora anserina
MYNPPGQRDATRPFHVPPPPPPMSPPPPTVGINNPMMTIPPPPPRHPNAPSTTGNVLLPPPPSGPPPNSGFPNSAIAPPSALGSTAPWHGAWGRAYDGRTAFNIPPPPPGGGAGGGGGGGSGGVLRAYDPKYHAQVLAAANNGATYTVPPPPPPQQQQQQQQQQQQQQQQQQQQQQQQQQQQQQQQQQQQQQQQQQQQQQQQQQQQQQQQQQQQSDQMGALTSATYIPQGDTYGEGVGIPGLGLEDSAIGWNMGAHLESATATPLDESSGRDRLYANAMAQRGSSTTSNATVSSVSVPPELAAQWPMEKVLGWLQANSFSSHWQETFKYLGLDGARFLELGSSHGGRGNFGMMHQQVYPRLLALSGPEWNQAREREEGKRMRRLVRSIVTGRPVEVKGGRLGGGQQQPQHARQNSTSAPPAVTGGQTGNRSAESPNVSVDDGFWDTGVTDADDGDKQTPNPIKIPEFGFSRRFSQSRATTMPTLSSTMPTDHRNMMKEIDTSRRHSPTLSESGEAGGTFRGGSTPLGGGGGGGGGGGRDSPSAGSPNPASGLFPSSTAGNLSASPHSSRFGHRSRNSTDSVSSSAAIYGSGVPADAAAMLKSGMNIADVVNAARNANDRRHAQDGGRPSPQESGGGDRSAGEPPGSAKGSGSFLSIFTRKKHGRKDDGFGGDEDSPTSPGLSFKPQSLGDNRPGSSAGTYGHHHAGNVRANRGGPRVFILATADCWNYRMLDVTDIETASDLRQLICINLGLPESEGAHLYPTELGKFEHDGEALDDSKLLAIKTQRADAIGTLKLFVRVGGPPQMRQTGAQIAMDEETYVKLNGRMRSSSSPPTSRQNTLTGKEGEDKMLTAEAIEYRTEQLRKQKEYLAKRKQVAENNHVADRSPSSSIVGRTVDFDQPRHSPFEDRKMDTLLPQRKPPAPPSDPSATLIKANSLKKTGHGLRLSGDSGYHPKRKTSSDLRSSGDVVFEKQKRWGPVADPSAGIGALLVGMSDGMASIARPRPGGGMMQQRQPSPHRVATEPITSQELQRGKKAMSTVNFGPAHQRERSGSGGGSPRPGGMPGSPGSYTWSSKNVPFLVPDYSPNGTPAPPTASRMPDGGGNSGDGCLDQNHNHQAQNGTIAKMRNVARAPSPGNVSPSSRRRPSDSFSSQAAVAKKRKSHGPDTDFTDNDVTFSASSTRASKKVDDSDSDDDSDDGLFAIPIAARNSGPDKGKTTAPAEGNSGDSDGASGTGTGKRPSLRLNTRSGSNSRAKKTLSVAFAVSPQSSSAGGKTPLEDDDSGRSSSQRRGTPGTPQSEGGWDSEEKDSKISRRKSFIEKDVWANRPPTDALVNNLEDFFPDLDVDQPVLEEGVDQEPPSPIAEGDENNQGSASVPPLPPLPPGLSTGKLHTFYNDNDTLGSDESTLKALESRPVSMQSLAHRSIRRSGGGGGLGRMKSIREVARGANEFGKRYTQGPGQIDAQSSAAAAGNRNTNLMRRKSTKMFNANIVQIQPDRGSLNLAMGGLTTIPQDSLPTRSTNSRESIPKRQTTFRWFKGQLIGKGTFGRVYLGMNATTGEFLAVKEVEVNPKAAQGDKKKMQELVAALDQEIDTMQHLDHVNIVQYLGCERKETSISIFLEYISGGSIGSCLRKHGKFEEPVVASLTRQTLSGLAYLHREGILHRDLKADNILLDLDGTCKISDFGISKKTDNIYGNDKTNSMQGSVFWMAPEVIRSQGEGYSAKVDIWSLGCVVLEMFAGRRPWSKEEAVGAIYKIANGETPPIPEDIREVISPVAIAFMLDCFTVVSSERPTADVLLSQHPFCELDPTYSFLDTELYAKIAGRVNDLGRGQ

SEQ ID NO: 11015 - protein, 584 aa, Phaseolus vulgaris
MCGILAVLGCSDHSRAKRVRVLELSRRLKHRGPDWSGLHQHGDCFLAHQRLAIVDPASGDQPLFNEDKSVIVTVNGEIYNHEELRKQLPGHKFRTGSDCDVIAHLYEEHGEGFVDMLDGIFSFVLLDTRDNSFIVARDAIGVTSLYIGWGLDGSVWISSEMKGLNDDCEHFECFPPGHLYSSKDRGFRRWYNPPWFSEAIPSAPYDPLVLRRAFEQAVIKRLMTGVPFGVLLSGGLDSSLVASITSRYLANTKAAEQWGSKLHSFCVGLEGSPDLKAAKEVADYLGTVHHEFHFTVQDGIDAIEDVIYHVETYDVTTIRASTPMFLMSRKIKSLGVKWVISGEGSDEIFGGYLYFHKAPNKEEFHRETCRKIKALHQYDCLRANKSTFAWGLEARVPFLDKEFINAAMNIDPEHKMIKRDEGRIEKWILRRAFDDEDQPYLPKHILYRQKEQFSDGVGYSWIDGLKAHAAKHVTDKMMLNAGNIYPHNTPVTKEAYYYRMIFERFFPQNSARLTVPGGASVACSTAKAVEWDAAWSNNLDPSGRAALGVHISAYENQNNLANKGVEIEKIIPMDAAPLGVAIQS

SEQ ID NO: 11016 - protein, 87 aa, Triticum aestivum
  unsure (1)..(87): unsure at all Xaa locations
VDRLFKLTEGAKXKEKIDKMFKGEKINTTEKQXLLKVALKPPENASITIDGVNLAPEFGAVKDKIRQFPKTFRIGPWVGATGKPLTN

SEQ ID NO: 11017 - protein, 493 aa, Zea mays
VRRSGSSSSLATAMDPYKHARRAPSTPVLDHNSAPRVEQRQLLTVGARGPILLEDLVVEKLANFDRERIPERVVHRCGASAKGFFEVTHDITTDVADSAGRTAGMQAVIAVSLNCVALALRYHDGSPETLGPRVASVYTGGNWTVETLPSLIRDGIKSGHVHALKPNPRTHIQDNWRILDFFSHHPESLHMFSFLFDDSGIPADVRPHGGSGVHTYTLVSRAGTVTYVKFHWRPTCGVRSLMDDEAVAVGAQPQPRTKDLTDAIAAGNFPEWTLYIQTMDPEMEDRLQHLDPLDVTKTWPEDVPLEPVGRLVLNRNIDNFFAENEQLAFSPGLIVPGIYYSDDKLLQTRIFSYSDTQRHRLGPNYLLLPANAPKCAHHNNHYDGSMNFMHRTEEVDYFPSRYDAVRNAPRYPIPTAHIAGRREKTVISKENNFKQPGERYRAMDPARQERFITNGSTLEIPGYRARIRNHGHSCFLCEIVIRSQFHTTYEPEA

SEQ ID NO: 11018 - protein, 370 aa, Zea mays
MASPRGRMSFPLRSFLMICLMAQLGASNVVLMANNTTLSFDDVEAIFTPAVKGSGVNGVLYAVEPMDACSPLKTKAIGGSVSPFALVIRGGCHFDDKVRNAQNAGFKAAVVYDTEDNGVLVSMAGSSSGVHIYAVFVSKASGEELKKYSGQTDAELWIIPTYANSAWSIMAISFISLLVMSAVLAACFFARRHQIRRDRARLPQTREFHGMNSRLVKAMPSLIFTKVQEDDCTSATCAICLEDYSAGEKLRVLPCRHKFHAACVDLWLTSWRTFCPVCKRDANAGTPDPPVSESTPLLSSSAIRLPEPTASASFRSTVAAAASPPRPISRHPSPSRSISRKHSVFGFQHPWHPSPFMQAHHLLPAQWEAV

SEQ ID NO: 11019 - protein, 193 aa, Oryza sativa
RTRGRTRGRAPTTETSSPPSAAMQQRRPASGRPSGTDGSDFSYRMVVDSRYQRVADGKSRLGRLILVQALHQVAGGALLLLALSKGAEMNKFAVMSVAAGLLAIVLGEIGRRRTMAVLLRMYTSLSSIAVAFSVACIIRSELFFKITKQNTESITSHELLEVVRVALGVLLQLVVIATTTRLLQNMSPPRRAS

SEQ ID NO: 11020 - protein, 299 aa, Oryza sativa (japonica cultivar-group)
MRKRCDQILAKLRKDKRSIWFNAPVEVDRLGLQDYHAVIKCPMDLGTVRANLAAGRYPSHDDFAADIRLTFSNALRYNPAGHEVHTFAGDLLASFEKMYKASVSWFEQELKILEPPMPVPPPELPPAKAPAQVKPRAGNVKMRKTKAREPNKREMTLEEKNLLRVGLESLPEEKMHNVLQIVRKRNGNPELVGGEIELDIDEMDVETQWELDRFVNKFKKALNKSRRAAIVNGENADVIDASVANDSDMLVNGSTATMVDNGDVTMAIESKDPDKITTQAEQLDEYVDALGPPLCRCRG

SEQ ID NO: 11021 - protein, 285 aa, Shigella flexneri 2a str. 301
MFILYFQREWSVTLCINKESIKMGKLTGKTALITGALQGIGEGIARTFARHGANLILLDISPEIEKLADELCGRGHRCTAVVADVRDPASVAAAIKRAKEKEGRIDILVNNAGVCRLGSFLDMSDEDRDFHIDINIKGVWNVTKAVLPEMIARKDGRIVMMSSVTGDMVADPGETAYALTKAAIVGLTKSLAVEYAQSGIRVNAICPGYVRTPMAESIARQSNPEDPESVLTEMAKAIPLCRLADPLEVGELAAFLASDESSYLTGTQNVIDGGSTLPETVSVGI

SEQ ID NO: 11022 - protein, 180 aa, Echinochloa phyllopogon
PSGASTGIYEALELRDRPSDYLGKGVLKAVDNVNSIIGPAIYGKEPTEQVDIDNLMVQQLDGTSNEWGWCKQKLGANAILAASLAAVKAGSMVKIPLYQHIANLAGNKKIVLPVPALNVINGGSHAGNKLAMQEFMILPTGVSSFKEPMKMGVEVYHNLKSIIKKKYGQDATNVGDEGGF

SEQ ID NO: 11023 - protein, 99 aa, Zea mays
  unsure (1)..(99): unsure at all Xaa locations
SREPIEDPFDQDDWSSYAKLTDDIGQKSXIVGEDLLVTSPPRVARARSERTGSALVLKVNQIGAVSDSTEIVRTPTRPVWGVMVCHTSGETXDTFIADL

SEQ ID NO: 11024 - protein, 156 aa, Haemophilus influenzae
NRTNTPVLVDGKDVMPEVNAVLAKMKDFCQRIISGEWKGYTGKAITDVVNIGIGGSDLGPYMVTEALRPYKNHLNMHFVSNVDGTHIAETLKKVNPETTLFLVASKTFTTQETMTNAQSARDWLLKAAKNESAVAKHFAALSTNAKDVEKFGIDTN

SEQ ID NO: 11025 - protein, 351 aa, Saccharomyces cerevisiae
MPSQVIPEKQKAIVFYETDGKLEYKDVTVPEPKPNEILVHVKYSGVCHSDLHAWHGDWPFQLKFPLIGGHEGAGVVVKLGSNVKGWKVGDFAGIKWLNGTCMSCEYCEVGNESQCPYLDGTGFTHDGTFQEYATADAVQAAHIPPNVNLAEVAPILCAGITVYKALKRANVIPGQWVTISGACGGLGSLAIQYALAMGYRVIGIDGGNAKRKLFEQLGGEIFIDFTEEKDIVGAIIKATNGGSHGVINVSVSEAAIEASTRYCRPNGTVVLVGMPAHAYCNSDVFNQVVKSISIVGSCVGNRADTREALDFFARGLIKSPIHLAGLSDVPEIFAKMEKGEIVGRYVVETSK

SEQ ID NO: 11026 - protein, 344 aa, Saccharomyces cerevisiae
MSSSVASTENIVENMLHPKTTEIYFSLNNGVRIPALGLGTANPHEKLAETKQAVKAAIKAGYRHIDTAWAYETEPFVGEAIKELLEDGSIKREDLFITTKVWPVLWDEVDRSLNESLKALGLEYVDLLLQHWPLCFEKIKDPKGISGLVKTPVDDSGKTMYAADGDYLETYKQLEKIYLDPNDHRVRAIGVSNFSIEYLERLIKECRVKPTVNQVETHPHLPQMELRKFCFMHDILLTAYSPLGSHGAPNLKIPLVKKLAEKYNVTGNDLLISYHIRQGTIVIPRSLNPVRISSSIEFASLTKDELQELNDFGEKYPVRFIDEPFAAILPEFTGNGPNLDNLKY

SEQ ID NO: 11027 - protein, 456 aa, Arabidopsis thaliana
MCGILAVLGCSDDSQAKRVRVLELSRRLRHRGPDWSGLYQNGDNYLAHQRLAVIDPASGDQPLFNEDKTIVVTVNGEIYNHEELRKRLKNHKFRTGSDCEVIAHLYEEYGVDFVDMLDGIFSFVLLDTRDNSFMVARDAIGVTSLYIGWGLDGSVWISSEMKGLNDDCEHFETFPPGHFYSSKLGGFKQWYNPPWFNESVPSTPYEPLAIRRAFENAVIKRLMTDVPFGVLLSGGLDSSLVASITARHLAGTKAAKQWGPQLHSFCVGLEGSPDLKAGKEVAEYLGTVHHEFHFSVQDGIDAIEDVIYHVETYDVTTIRASTPMFLMSRKIKSLGVKMVLSGEGADEIFGGYLYFHKAPNKKEFHQETCRKIKALHKYDCLRANKSTSAFGLEARVPFLDKDFINTAMSLDPESKMVTTKLTSQTQYLPSQVNVEQIFYMGFSRSSQRKEGSRNGF

SEQ ID NO: 11028 - protein, 778 aa, Mycobacterium tuberculosis H37Rv
MSFVIAVPEALTMAASDLANIGSTINAANAAAALPTTGVVAAAADEVSAAVAALFGSYAQSYQAFGAQLSAFHAQFVQSLTNGARSYVVAEATSAAPLQDLLGVVNAPAQALLGRPLIGNGANGADGTGAPGGPGGLLLGNGGNGGSGAPGQPGGAGGDAGLIGNGGTGGKGGDGLVGSGAAGGVGGRGGWLLGNGGTGGAGGAAGATLVGGTGGVGGATGLIGSGGFGGAGGAAAGVGTTGGVGGSGGVGGVFGNGGFGGAGGLGAAGGVGGAASYFGTGGGGGVGGDGAPGGDGGAGPLLIGNGGVGGLGGAGAAGGNGGAGGMLLGDGGAGGQGGPAVAGVLGGMPGAGGNGGNANWFGSGGAGGQGGTGLAGTNGVNPGSIANPNTGANGTDNSGNGNQTGGNGGPGPAGGVGEAGGVGGQGGLGESLDGNDGTGGKGGAGGTAGTDGGAGGAGGAGGIGETDGSAGGVATGGEGGDGATGGVDGGVGGAGGKGGQGHNTGVGDAFGGDGGIGGDGNGALGAAGGNGGTGGAGGNGGRGGMLIGNGGAGGAGGTGGTGGGGAAGFAGGVGGAGGEGLTDGAGTAEGGTGGLGGLGGVGGTGGMGGSGGVGGNGGAAGSLIGLGGGGGAGGVGGTGGIGGIGGAGGNGGAGGAGTTTGGGATIGGGGGTGGVGGAGGTGGTGGAGGTTGGSGGAGGLIGWAGAAGGTGAGGTGGQGGLGGQGGNGGNGGTGATGGQGGDFALGGNGGAGGAGGSPGGSSGIQGNMGPPGTQGADG

SEQ ID NO: 11029 - protein, 548 aa, Vibrio parahaemolyticus RIMD 2210633
MAMHPRAGQKAQQEDLHNIPALVANYFLLQPDANNAEHKVQFGTSGHRGTADKQTFNENHILAIAQAVAEVRAKQGTTGPLFVGKDTHALSEPAFSSVIEVLIANGVKVIVQQDNGYTPTPGVSHAILTYNLKHDEKADGIVITPSHNPPQDGGIKYNPTHGGPAEAELTQAIEDRANEIIAGGLKDVKRLALAEAKASELFVEMDLVKPYIDDLVNVIDMEAIQKSKLKIGVDPLGGSGIDYWRQIGQAYNLDLTLVSEAIDPSFQFMSLDKDGVVRMDCSSPYAMAGLLALKDEYDLAFGNDPDYDRHGIVTPKGLMNPNHFLAVCIDYLYRHREAWGKDVAVGKTLVSSALIDRVVADLGRELCEVPVGFKWFVDGLYTGKFGFGGEESAGASFLRKDGTPWSTDKDGILLCLLAAEITAVTGKNPQEYYEELAAKHGESKYNRIQAVANGPQKDVLKKLSPEMVAAETLAGDPITARLTHAPGNGAAIGGLKVTTENGWFAARPSGTEDIYKIYCESFKGEEHLKQIEAEAQEIVNQVFAAAGL

SEQ ID NO: 11030 - protein, 487 aa, Rubrobacter xylanophilus DSM 9941
MSETQTREELVSYPAIIGGERVSPERSFEDVDPSTGRPCALVARCGRQEVDRAVEAAREAHEKAWRRSTPAERARVLHRISQLLRRDHEEIARLESLDTGKPLSQARADATVAARYFEFYANTIESFYGETIPALPDAFVYTLREPHGVTGHIIPWNYPIQISCRSVAPALATGNCCVLKPAEEAPLTALRLGELALEAGLPPGALNVVPGYGEEAGAALAAHPGIDHLSFTGSVEVGRLVSRSAADNVVPVTLELGGKSPNIVLADADLERAVPVIVNSIIQNAGQTCSAGSRLLVESRLHGELVERVASRFQEIRIGPGPEDPDLGPIISEAQRERVKGYVETGRREAELVTGGGVPQDPRLAGGFYFEPTLFDRVEPGSTIFREEIFGPVLAVSTFEEAEEAAALANATDYGLIAAVWTRDVGKAHWLARELRVGQVYINTYGAGGGVELPFGGFKKSGHGREKGYEALYEYTQVKTVALSYAR

SEQ ID NO: 11031 - protein, 428 aa, Vibrio cholerae O1 biovar eltor str. N16961
MMMDLAFDRCHIWHPYTSTLTPLTCYPVSRADGVMITLEDGRSLVDGMSSWWAAIHGYNHPKLNQAAHQQIEQMSHIMFGGLTHQPAIELCQKLLKLAPNNLQQVFLADSGSVAVEVSLKMALQYWHSKGQPRAKFLTLRHGYHGDTFAAMSVTDPDNSMHSLYKGFLPEHIFANSPEGGFFDAWDERDIADFRHKLTEHHHQIAAVILEPIVQGAGGMRIYHPEFLRQVRALCDEFGVLLILDEIATGFGRTGKLFACEHAGIQPDILCVGKALTGGYMTLSATLTTQQVADTVCAGEAGCFMHGPTFMGNPLACAVASASLSLIEQGDWQQQVANIEAFFAEQLPKLNDSPRVKQTRWLGAIGVVETHLPVNMEVIQALFVEHGVWIRPFGRLIYLMPPYISQPEHLQKLVDAMAAALNQPDCFKQ

SEQ ID NO: 11032 - protein, 456 aa, Oryza sativa (japonica cultivar-group)
MASALLAGRGGVNHHHHHHQWGETRAPLAPVAPNSDPNHPLQQRANGSATRPPPSSYVALRPGAMAHREARALRDRLAGELGQVRALIARIDTWQQGQVKRHGSPRRDLPTPPAKLRAAMRKRCEQILAKLRKDKRSIWFNAPVEVDRLGLHDYHAVIKCPMDLGTVRANLAAGRYPSHDDFAADVRLTFSNALRYNPAGHEVHTFAGDLLASFEKMYKASMSWFEQELKLLEPPMPVPPPELPPATAPVQVKPRAANVKMRKPKAREPNKRDMTLEEKNLLRVGLESLPEEKMHNVLQIVRKRNGNPELVGGEIELDIDEMDVETQWELDRFVNNFKKALNKSRRAAIVNGENADVIDASVANDSDMLVNGSTATMVDNGDVTMAIESKDPDKITTQAEQLDEYVDIGDEMPTATYQSVEIEKDTEAASSGSSSSSDSGSSKDSVSESGNAHSLV

SEQ ID NO: 11033 - protein, 426 aa, Pseudomonas syringae pv. tomato str. DC3000
MSQTNESLMQRRHAAVPRGVGQIHPIFAASAKNATVTDVEGREFIDFAGGIAVLNTGHLHPKIVAAVQEQLTKLTHTCFQVLAYEPYVELCEKINAKVPGDFDKKTLLVTTGSEAVENAVKIARAATGRAGVIAFTGAYHGRTMMTLGLTGKVVPYSAGMGLMPGGIFRALYPCELHGVSVDDSIASIERIFKNDAEPRDIAAIIIEPVQGEGGFYVAPKAFMLRLRELCDKHGILLIADEVQTGAGRTGTFFAMEQMGVAADLTTFAKSIAGGFPLAGVCGKAEYMDAIAPGGLGGTYAGSPVACAAALAVLDIFEEEHLLERCKTVGERLVTALKGMQAKYPVIGEVRALGAMIAVELFEDGDSHKPNAAAVAQVVAKARDKGLILLSCGTYGNVLRVLVPLTAEEELLTRGLAILDECFAEIA

SEQ ID NO: 11034 - protein, 412 aa, Pseudomonas syringae pv. tomato str. DC3000
MLIATFFFTSHFSRAKQPMWYNGLLDLSVWQVIAVTLAMTHVTIVGVTVYLHRYSAHRSLELNAGLKHFFRFWLWLTTAQNTREWTAIHRKHHAKCETVDDPHSPVVKGLSTVLRKGAELYREEAQNQDTLRIYGKNCPEDWIERNLYSRYKMLGIVLMAVIDLALFGAIGITVWAIQMMWIPFWAAGVVNGLGHAVGYRNFECRDAATNLVPWGIVIGGEELHNNHHTYPNSAKLSVKPWEFDMGWAWIKLFSFLRLAKVQRVAPIAHRVEGKGHIDMDTAMAILNNRFQIMAQYRKLVIAPLVTQELAKADESVRHQFRRAKRLLSRETSLLDDKHHLRIQTMLEHSHALKVIYEKRLALQQIWVKTSSNGHDMLSAMKEWIHEAEASGIQSLREFADQLKTYSLRPVHA

SEQ ID NO: 11035 - protein, 174 aa, Microbulbifer degradans 2-40
MLACTFTASTHAAEESAQCPSYLDHSFKKLHSTQTVNLCELYTGKPLLIVNTASHCGYTKQFGGLEKLYQSYKDQGLQVIGFASDDFKQAAKSEMEAATICYKNYGVTFTMLAPTTVTGEKANAVFSHLNANTSAPSWNFNKYLITKNGQNIEKFNSDVTPLASDLEKKVQKAL

SEQ ID NO: 11036 - protein, 296 aa, Pseudomonas fluorescens PfO-1
MTTTNRKGIILAGGSGTRLHPLTLGVSKQMLPIYDKPMIFYPLSVLMLAGMREILIISTPEDLPCFKKLLGDGSLYGIKLSYAEQPSPDGLAQAFIIGEEFIGKDPCCLILGDNIFYGQHFSDNLRSASAQASGATVFGYHVSDPERFGVVEFDKTGQALSIEEKPLKPKSNYAVTGLYFYDNDVVKIAKGIKPSERGELEITDVNRAYLEQKSLKVEMLGRGFAWLDTGTHDSLLEASHFVHTIEQRQGLKVACLEEIAYHNGWITAEQLSAQADALKKTGYGQYLQKLLDSPAH

SEQ ID NO: 11037 - protein, 176 aa, Perilla frutescens var. crispa
MAADEEPNTSLNKGAWTADEDGILAQYVAQHGPKRWKSLAIDAGLNRCGKSCRLRWLNYLRPDIKRGNFSDAEDDLILRFHRLLGNRWSLIAKRIPGRTDNEIKNYWNTHLRKKARLMEKLPAISVTAAMELNIWHDESSSSGTEIRDDDESFDFTAQGTSGLDWVKTFLELEEDA

SEQ ID NO: 11038 - protein, 502 aa, Pseudomonas fluorescens
MTRSLTMNSSLPAIDGLRLPHQMLIGGQWVNAQSDKTLNVYNPATGDTLTDVPDGDVEDVNAAVESAAATLQSDAWRRMPPSARERILLRLADLLEAHGDELARLETLNNGKLLIYSKMMEVGASAQWLRYMAGWATKLTGSTLDLSLPLPPDVRSRASTQRVPVGVVAAIIPWNFPLLMAVWKIAPALACGNTVVLKPAEETPLTALRLAELAMEAGLPAGALNVVTGRGETAGDALVRHPKVAKVAFTGSTEVGRIIGSACGRSLKAVSLELGGKSPVIVLADCDPQEAAEGAAAAIFFNHGQVCTAGSRLYVHESIYEDVIQRLAVIGESIVVGSGLEQGVHMGPMVSKKHHENVLRHIRNGIEDGADLICGGTEAPCAQGFFVKPTIFANREKKDIRLLSQEVFGPVLVATPFSDIAEVVNEANRSVYGLGASIWTNDLSAALRINDELEAGTVWVNTHNMVDPNLPFGGFKDSGVGREHGAAAIEHYTTTRSLVIAY

SEQ ID NO: 11039 - protein, 301 aa, Rhizobium sp. NGR234
MDRIRTVRKAVIPVAGNGTRFLPATKAVPKEMLTIVDRPVVQYAVDEARQAGIEHIVFVTSRNKQVIEDHFDDTPELISSLSRSGKNAQISELEAMLPKAGSVSFTRQQAPLGLGHAVWCARDLIGDEPFALLLPDMVSYGARGCMAGLMDLYREVGGNVVAVEQCAPEEASKYGIVGKGDTVRHGFSVTEMVEKPPAGQAPSNFYLNGRYILQPEIFSILAHQARGAGNEIQLTDGMLNLSADQPFHAHPYEGRTFDCGSKQGFIEANVAFALARADIGDVVFESVREIVLSHESRIRAA

SEQ ID NO: 11040 - protein, 727 aa, Microbulbifer degradans 2-40
MLFGRRKKNPIVIRDKGVTEWKYATCGYCSVGCSIEIGVNKEGTPVTTRGVGGADVNRGKLCIKGLTEAQIFQAAGRGAEPKIRNKTFEDWQITDWDTALDKTAAEFKRIQEKYGRDSVAVISTGQIMTEEFYTLGKLVRGVIGTNNYDGNTTLCMASAVSGYKRSFGSDGPPGCYEDFEHTDCLLAFGSNLCEQHPIIYWRLKEALEKRKFPVIVVDPRVTMFAQFADIHLPITPGTDLVLLNSLAHVILKEGLADQEYIERCCSGYEDFAAEVEKFDPTSAAKICGIDEDTIRHVARLYAKAGAAMSIWTMGINQSTHGSDGVCGINNLNLITGNIGKPGGTSLSITGQCNAMGTREWSSCSGLPGYRALENAEHREEIGKFWGVDPEFFPKKRGLFQTDIFPAIETGQIKALWVVATNPMTSMPNSARIRKTMEKLEFCVVQDSYEDVETAQYAHVYLPGSVWAEKKGCFTNTERRVNITTPVMAPYGNSKPDVWIFSQMAKRWEQGAKMSFPLDTADVFDEMKQLSKGDHRILDISGMSHELIEQKRGIQWPMREGDSEGTQRLYADGKFCYPDGKAKLMAMPWVDNNEVPDEDYPFWMNSGRVVEHFHTRTKTGKVGNCNKFSPTPYMEMNPDAAEELGIKHMSYVRLVSRRGDAVVMVQLTHRVAFNAVFIPFHFHDCVNRLSLGLLDPYSRQPAFKQCTVRIEHVDQKEAAKLNVEMRAF

SEQ ID NO: 11041 - protein, 499 aa, Sphingomonas sp.
MATQLKSGTNEYGIKSEYGHFIGGEWISSDSGKTIDLINPATGAVLTKIQAGNAKDIQRAVAAAKAAFPKWADSSAAERQEILIEVARRLKARHQHYATLETLNNGKPIRESMHFDMPQAIGQFELFAGAAYGLHGQTMDYPDAVGIVHREPLGVCAQIIPWNVPMLMMACKIAPALASGNTVVLKPAETVCLSVIEFFVEMADLLPPGVINVVTGYGADVGEALVTHEDVRKVAFTGSVGTARRIMQYASTNIIPQTLELGGKSAHIVCADADIDAAVESATMSTVLNKGEVCLAGSRLFLHESIQDEFLAKFKVALEGIRQGDPLDFATQLGAQASQMQMDKVISYLELATEEGANVLTGGSANDKLADGNFIRPTVFTNVNNSMRIAREEIFGPVTSVISWKDEDDMMKVANDTNYGLAGGIWTRDIARAHRMARKLETGTVWINRYYNLKANMPLGGYKQSGFGREFSHEVLNHYTQTKSVVVNLQEGRTGMFDQ

SEQ ID NO: 11042 - protein, 298 aa, Saccharomyces cerevisiae
MSGELANYKRLEKVGEGTYGVVYKALDLRPGQGQRVVALKKIRLESEDEGVPSTAIREISLLKELKDDNIVRLYDIVHSDAHKLYLVFEFLDLDLKRYMEGIPKDQPLGADIVKKFMMQLCKGIAYCHSHRILHRDLKPQNLLINKDGNLKLGDFGLARAFGVPLRAYTHEIVTLWYRAPEVLLGGKQYSTGVDTWSIGCIFAEMCNRKPIFSGDSEIDQIFKIFRVLGTPNEAIWPDIVYLPDFKPSFPQWRRKDLSQVVPSLDPRGIDLLDKLLAYDPINRISARRAAIHPYFQES

SEQ ID NO: 11043 - protein, 379 aa, Pseudomonas syringae pv. syringae B728a
MKAIVYSGPRDVSVKNVPDAKIQKPTDALVRVTSTNICGSDLHMYEGRTSFETGRIFGHENLGQVIEVGAGVDRIKVGDWVCLPFNIGCGFCENCEKGLTGYCLTANPGSAGAAYGFADMGDHEGGQAELLRVPYADFNCLLLPEDAAEREEDYVMLSDIFPTGWHATELAGLLPGESVAIYGAGPVGLMAAHSAMIKGASQVFVVDNHPDRLALAAKMGATPINSLEQGAVDQILNLTDGKGTDRGCECVGYQCCDRHGHEANHVTMNNLVASTKATGGIGVVGVFVPQDPGAKSDLAKEGKMAFDFGSFWFKGQQIRTGQANVKAYNRRLAELIHHGRAKPSQIISHRLKLEEGPDAYKHFDARDEGWTKVVLKPGA

SEQ ID NO: 11044 - protein, 598 aa, Magnetococcus sp. MC-1
MTIRDVLSPFTAWKNLFREPVSIKDPIHRKAAPRYRGFHKNDVEKCIGCGTCEAICQNGAIDMVENRDVPGNRSDSGLRPRIDYGRCCWCALCVDVCMTSSLTMSNAYQWVDSDPKAFMFTPGVDPKYWDNMEQGYRRPEGHRLTPAARVHMHEMEAEERLDSFTEIVDGYSVTDAQFEADRCVACGLCVATCPAHMSIPDYIAAVRDGDYERGLALLYETNPFSNVCGRVCTHKCETVCAVNHEGEPIAIRWLKRHIADQVPVEKYRQIIGDPAPAVGKKVAVVGAGPAGLTAAFDLAKMGYQVEVYEARPKPGGMFRYGIPEYRLPYDMMDRDIDVITSMGVNIHCNMRVGHDIAMEQLREGHDAVLLTIGLHLGRSTRIPGSDHPNVTKAIDLLRQITEGQQIEVPRQLVVIGGGNVAMDIARSVARLQKQSYGEIKVTLTALEDRAHFLADPDEIRESLEEGIEILDARGPQEILVDDNGALVGLRTLRVLAIFDSEGRFAPSYDESDERIHPANMISEAIGQMSDTELLGEPLKEALEWNRGRIAVDGMGRTSEPWLWAAGDCVKGPDVIHAVADGHRAAESIDAAIKGQGGA

SEQ ID NO: 11045 - protein, 330 aa, Neurospora crassa
MVKAVVAGAAGGIGQPLSLLLKLSPLVDELALYDVVNTPGVAADLSHISSPAKTTGYLPPNDGAKAAFKDADIIVIPAGIPRKPGMTRDDLFNINAGIVKGLIEVAADVAPNAFILVISNPVNSTVPISAEVLKAKGVFNAQRLFGVTTLDIVRAETFVAEIAGNSNPQELVVPVIGGHSGETIVPLFSKVSPSVTIPDDKYDALVNRVQFGGDEVVKAKEGLGSATLSMAYAGYRFAEKLLKAAKGAKGLVEPTYVYLPGIPGGKEIAEKTGVDFFSVPVELGPNGAEKAIDILGDITEKEKTLLEAAIKGLKGNIQKGVDFAHNPPQK

SEQ ID NO: 11046 - protein, 256 aa, Streptococcus mutans UA159
MKIGFIGVGKMASAIITGLKKTDFELIISDSSLKAGQDKAEALGVAVAQSHQELVDEVDLLVLGVKPQVLASVLNPLILTKPILSMAAGTSLEYLDKLSQADLPIIRIMPNLNAKILQSSTAICRNDKVSDQLFAIAKQITDSFGTTFEIAEKDFDTFTALAGSSPAYIALFIEAMSKAGLKHGFPKDLAFKIVSQTVLATTSNLIQGQEKPNDLIDKVSSPGGTTIAGLLDLEKTGFTASTISAIDATIDKSKNM

SEQ ID NO: 11047 - protein, 493 aa, Pseudomonas syringae pv. syringae B728a
MSLTRFQMCIDGQWVDALSGKTFDSLDPALAEPWAQLPDADEADVERAVQAAQKAFEGQAWRGLTATARGKLLRKLGDLIAENKEQLAQLESRDNGKLIRETRGQVGYLPEFFHYTAGLADKLEGGTLPLDKPDLFAYTVHEPMGVVAGIIPWNSPLYLTAIKLAPALAAGNTIVLKPSEHASATVLELARLALEAGIPPGVVNVITGYGPTTGAALTRHPLVRKIAFTGGAATARHVVRSSAENFAKLSLELGGKSPNIIFADADLDSAINGAVAGIYAASGQSCVSGSRLLVQDEIYDEFVERLAERASRIRIGNPQDEGTEMGPMATAQQLAVVEGLVADALAEGARLRLGGKRPELDSKGWFYEPTLFECDHNSMKIMQEEVFGPVASVIRFKDEAEALAIANDSQFGLAAGIWTRDLGRAHRLARDIRSGIIWVNTYRAVSAMAPIGGFKNSGYGRESGIDSVLAYTELKTVWINLSQAPMPDPFVMR

SEQ ID NO: 11048 - protein, 180 aa, Nicotiana tabacum
MASSVLSSAAVATRSNVAQANMVAPFTGLKSAASFPVSRKQNLDITSIASNGGRVQCMQVWPPINKKKYETLSYLPDLSQEQLLSEVEYLLKNGWVPCLEFETEHGFVYRENNKSPGYYDGRYWTMWKLPMFGCTDATQVLAEVEEAKKAYPQAWIRIIGFDNVRQVQCISFIAYKPEGY

SEQ ID NO: 11049 - protein, 401 aa, Vibrio parahaemolyticus RIMD 2210633
MTIEILVPDLPESVADATVATWHKQPGDTVERDEVLVDIETDKVVLEVPAPEAGVLEAILEVEGATVLSKQLLAKLKAGAVAGEPTADKTEATEASPDKRHKATLTEESNDALSPAVRRLLAEHGLEAHQVKGTGVGGRITREDIEAHLANAKAAPKADAPAVEAPATARSEKRVPMTRLRKTVANRLLEAKNSTAMLTTFNEVNMKPIMDLRKQYKDQFEERHGIRLGFMSFYVKAVTEALKRYPEVNASIDGDDIVYHNYFDISMAVSTPRGLVTPVLKDCDKLGFADVEKGIKELAIKGRDGKLTVDELMGGNFTITNGGVFGSLMSTPIINPPQSAILGMHKIQERPMAVNGKVEILPMMYLALSYDHRLIDGRESVGFLVTIKELLEDPARLLLDV

SEQ ID NO: 11050 - protein, 191 aa, Suillus bovinus
MQTIKVVVVGDGAVGKTCLLISYTTNKFPSDYVPTVFDNYAVTVMIGEDPYTLGLFDTAGQEDYDRLRPLSYPQTDVFLVCFSVTSPPSFENVREKWIPEVHHHCPGVPCLIVGTQIDLRDDAQVIEKLSRQKQRPVPTEHGERLSRELGAVKYVECSALTQKGLKNVFDEAIVAALEPPVVKKTHKCVVV

SEQ ID NO: 11051 - protein, 550 aa, Porphyromonas gingivalis W83
MLDNADTTELVDAFYRDLEFGTGGLRGIMGAGTNRMNRYTVGAATQGLSNYLLREFAGSSNISVVIGYDCRNNSRFFADTAAAVFSANGIGVYLFEELRPTPEISYAIRHLGCKSGVMITASHNPKEYNGYKAYWEDGAQIIAPHDRNIIAEVNRIRSVDEIKFEAKPELIRMIGENIDSAFIAEVKALSLSPESIARHRDMKIVYTPIHGTGSTVVPRALREYGFANIIHVPEQDVVSGDFPTVHSPNPEEPAALAMAIAKAEETGADLVLASDPDADRIGVAVRNNEGRMVLINGNEICSLLIYYSIMRRKELGDLHPDDYIVKTIVTTELIRDIAKKEHVSMFDCYTGFKWIAAVIRENEGRRRYIGGGEESYGFLWEDFIRDKSSVSACALFCEMAAWALDRGMSVYRLIRSIYLEYGLYYEKGLSVVRKGKSGAEEIEAMMRNYREYAPVELGGSPVQEILDYASLEGKDFTRGEKFSLDMPTTSNVLQYKTEDGTKVSIRPSGTEPKIKFYIGVHFSVANEQELDRAYIVAEEKIATILHDLGV

SEQ ID NO: 11052 - protein, 579 aa, GIBBERELLA ZEAE PH-1
MAIAMGWQKPDNVAGSSAPAIMVGLFVASGGLLFGYDTGAINGILAMTEFKEQFGKHTNCVDENGAVDICTKDSSIIVAILSAGTALGALLAAPTGDSLGRRKTLLLAVAIFCVGAIFQVAANNIDLLLVGRFFAGVGVGLISVLVPLYQSEMAPKWIRGTLVCAYQLSITFGLLAASIVNILASKLNNSSAYRIPLGLQIVPAIILTGGLLLLPETPRFLVKKGLHEAAGLSLSRLRRLDITHPALVDELQEMIANHQYELTLGPDSYKQLFIGSPHLGRRMFTGCGLQMLQQLTGINFIMYYSTSFFDGAGVESPYTKSLIINIINVVSTIPGLLVIEKWGRRRLLMIGALGMAGCQLLMASFDTATGQSYEKASQTILIAFCAINIFFFAASWGPVVWVVTSEIYPLKVRAKAMSVSTASNWLLNFAIAYCAPYLVGTGPGNASFGPKIFFIWGAFCILAVFFVWCMVYETSKISLEQIDEMYERVNHAWNSKSFEPSWSFQQMLNDGWSPSAQPPADHELQTTTSASSADTTLGDGDASSITVSQSNNNSSSPNNNNDQNKGPPAMSMANVDFSY

SEQ ID NO: 11053 - protein, 951 aa, Vibrio parahaemolyticus RIMD 2210633
MKLVKRSDSVSKETNQLGVSRRAFMKNTSLAAGGAVVGASLFAPGMMKKAQAKSVDPEAKTEVKRTICSHCSVGCGIYAEVQNGVWTGQEPAFDHPFNAGGHCAKGAALREHGHGERRLKYPMKLENGKWKKLSWDQAIEEIGNKVMDIRKESGPDSVYFLGSAKHSNEQAYLFRKMASLWGTNNVDHQARICHSTTVAGVANTWGYGAMTNSFNDMHNCKSMLFIGSNPAEAHPVAMQHILIAKEKNNCKIVVADPRRTRTAAKSDHYVSLRPGSDVAFIWGVLWHIFENQWEDKEFIRQRVFGMDEIRAEVAKWTPAEVERVTGVSEEDVYQTAKLLSENRPGCIVWCMGGTQHTTGNNNTRAYCVLELALGNIGKSGGGANIFRGHDNVQGATDLGVLSDTLPGYYGLSEGAWRHWSKVWEIDYEWIKGRFDDNAYGGQKPMNSAGIPVSRWVDGVLENKDNIRQRENIRAMFYWGHAVNSQTRGVEMKKAMQKLDMMVIVDPYPTVAAVMNDRTDGVYLLPATTQFETYGSVTASNRSLQWRDQVIEPLFESKPDHEIMYLLSKKLGYSDLLFKNIRVENNQPVIEDLTREFNKGMWTIGYTGQSPERLKAHQQNWHTFHKTTLEAEGGPVNGETYGLPWPCWGTPEMKHPGTHILYDTSKTVAEGGGNFRTRFGVEFEGKSLLAEDSYSKGCEIKDGYPEFTDKLLKQLGWWDDLTAEEKAAAEGKNWKTDLSGGIQRVAIKHGCIPFGNAKARAIVWTFPDRVPLHREPLYTPRRDLVTDYPTWDDKDAIFRVPTLYKSIQEQDKSGEYPIVLTSGRLVEYEGGGEETRSNPWLAELQQEMFVEVNPKDANDLGFRDGDDVWVEGAEKGRIKVKAMVTRRVKPGLAFIPFHFGGKFEGEDLRPKYPEGTQPYVVGEAANTATTYGYDPVTLMQETKVTLCNIRKA

SEQ ID NO: 11054 - protein, 278 aa, Podophyllum peltatum
MGSTSTPDSSTNRLQDKVAIITGGAGGIGETTAKLFVRYGAKVVIADIADDHGQKVCNNIGSPDVISFVHCDVTKDEDVRNLVDTTIAKHGKLDIMFGNVGVLSTTPYSILEAGNEDFKRVMDINVYGAFLVAKHAARVMIPAKKGSIVFTASISSFTAGEGVSHVYTATKHAVLGLTTSLCTELGEYGIRVNCVSPYIVASPLLTDVFGVDSSRVEELAHQAANLKGTLLRAEDVADAVAYLAGDESKYVSGLNLVIDGGYTRTNPAFPTALKHGLA

SEQ ID NO: 11055 - protein, 321 aa, Avena sativa
MMTMDLMGRYGRADEQVAIQEAAAAGLRGMEHLILQLSRTGTGTGTSESSLAGASEPAAQGQQQQQQVDCREITDMTVSKFKKVISILNHRTGHARFRRGPVVAQSQGPSVSEPAPVRTASSSRPMTLDFSKSASVFGNKDAAYSVSAASSSFLSSVTGDGSVSNGRGGGSSLMLPPPPSASCGKPPLAAAAAGPKRKCHEHAHSENVAGASGGRCHCSKRRKSRVKRMTRVPAISSKAAEIPADDFSWRKYGQKPIKGSPYPRGYYKCSTVRGCPARKHVERDPSDPSMLIVTYEGDHRHTPGDQEAAAALTPLPELHKL

SEQ ID NO: 11056 - protein, 277 aa, Forsythia x intermedia
MAATSQVLTAIARRLEGKVALITGGASGIGETTAKLFSQHGAKVAIADVQDELGHSVVEAIGTSNSTYIHCDVTNEDGVKNAVDNTVSTYGKLDIMFSNAGISDPNRPRIIDNEKADFERVFSVNVTGVFLCMKHAARVMIPARSGNIISTASLSSTMGGGSSHAYCGSKHAVLGLTRNLAVELGQFGIRVNCLSPFGLPTALGKKFSGIKNEEEFENVINFAGNLKGPKFNVEDVANAALYLASDEAKYVSGHNLFIDGGFSVCNSVIKVFQYPDS

SEQ ID NO: 11057 - protein, 567 aa, Vibrio cholerae
  unsure (1)..(567): unsure at all Xaa locations
MISKNMRSHLKLSFKSIFSIKFIVISHLVKRVIYPYILAGQKRAFDFFILRNVGQNGRSHWRATMHMSKSFLIISMGFVAVSVQAQTLTRDNGAPVGDNQNSITAGEHGSVLLQDVHLIQKLQRFARERIPERVVHARGTGAHGEFVASGDFSDLTLSAPFTSKGKITPVFVRFSTVIHSKGSPETLRDPRGFATKFYTEQGNWDLVGNNLPVFFIRDSIKFPDMVHSLKPSPVTNLQDPNRFFDFFSHEPGSTHMLTWVYTNLGTPASYRTMDGFGVHAYKWINQKGDVNYVKFHWKSLQGIESLRPDEVVKVQGQDFNHLTNDLYTQINAGNHPKWDLYVQVLTPEQLSKLDYNGLDATKVWLDVPEKKVGTMTLNKVPDNFFLETEQSAFAPSNLIPGIEPSEDRLLQGRLFAYADTQLYRLGANLFQLPINRPLVEVNSHNQEGASNSAQTASDINYQPSRKLELKEDPQFKAVQTQLVGSVQQKAISNPRNFYQAGVLYRSLNEQDKQDLITNLXGXLNKVTDKEIKATMVSHFYRADKDYGTRLARATNTDLKQVAKLAAM

SEQ ID NO: 11058 - protein, 360 aa, GIBBERELLA ZEAE PH-1
MSVPDKFQGFQSPSAEHWTDFQKNSFEPRPFGEYDVDIKVECCGVCASDRHTISGDWGACPYPLAVGHEVVGKVLRVGDKVTLAKVGDRVGAGAQVWSCMDCRQCKNDNETYCKDQIDAYGADYLDTGFKTQGGYSSHSRVHEYWVYPIPEALSSTQAAPMLCAGITVYSPLKRLGAGPGKKVGIVGIGGLGHYGVIFAKALGAEVWAISRSRAKEEDARKMGADGFLATGEKNWTEGHKMTFDIIINTATSFDGFALSEYLSLLDIHGHWNSVGLPGGDGIEIRNQDFITNGCYIGTSHLGSRREMLEMLQLAADKGLKSWIEEIPISTKGLQQAMQALEKSSVRYRSCMTNYDEAFGA

SEQ ID NO: 11059 - protein, 486 aa, Oceanobacillus iheyensis HTE831
MLKTDKQSYLNFINGRWKSSEGGETKEVLNPADKNDVVGVIQRSTIDDVNEAIASAKSAKESWRKLSGNERGNYLYKVANILESRLDDVAETLTREMGKTLPEAKGETARGVAILRYYAGEGLREVGDVIPSTDSSGIMYTTRTPLGVVGVITPWNFPVAIPIWKMAPALIYGNTVVIKPATEAAATAAKVMECFADAELPDGVVNMVTGSGSIVGNRIAEHPDVNGVTFTGSDQTGKHIGQTALARGAKYQLEMGGKNPVIVADDADLDLAVKATISGGLSSTGQKCTATSRVIVQRSVYDAFKEKLLTQIQALTVGNGLEDGNWMGPSVSESQLETVLHYIKKGKEEGATLLTGGHRLTDAEHKDGNFVEPTVFEDVTNDMTIAQEEIFGPVLALIKVETFEEAMKLANDTEYGLSAAVFTENIRKMLTFIDDIEVGLVRVNAETAGVELQAPFGGMKSSSSHSREQGKAAIEFFTSIKTVFIK

SEQ ID NO: 11060 - protein, 263 aa, Streptomyces coelicolor
MSTTGTTPATTGYAAEFAGRTALVTGAASGIGLATARRLGAGGARVVVADFNAEGAEKAAAELRAGGVEAAAVELDVTRPESVEAAVGFAVDTFGSLDLAVNNAGIGGPSAPTGEYDVAAYQRVVRTNLDGVFYSMRYELPAIEAAGKGGSIVNVASILGSVGFAGSPAYVAAKHGVVGLTKAAAAEYAARGIRINAVGPGFIDTPLLKTMDEAAYKGWSPCTRPAASGAPRRSRTLIAFLLSDRASFVAGSYHLVDGAYTAV

SEQ ID NO: 11061 - protein, 432 aa, Rubrobacter xylanophilus DSM 9941
MADVTFDYRNLLEVEGGLTGRELEEISPRLRAAVGTLLEDPPGFMRLPRTREHLEASLEVAERVRSDGATDFVHVGIGGSALGPMVLHRALSHPFYNLLPDRGGPRLHFAENADPATLSGILDVIEPEGTWVNVVTKSGSTAETMANFLVIRGALAEALGDFGYQARTVVTTDPEKGFLKRIADREDLVTLQVPPEVGGRFSVLSPVGLLPAAVAGLDVEALLAGAARCVEELEEQGAEHPAVVGAAMHHLMDASRGRNIRVMMVYADALERLAAWFVQLWAESLGKDGKGSTPHGAVGTTDQHSQLQLYMEGPQDKVIEIVEVREHPRDVGIPGAYEDLEGVGYLSGHTVGELLNVECDATRRALTGAGRPNATIRLGSLSAENLGYLMQALEVQTAVAGALYGVNPYDQPGVEAGKRITYARMGRPGYRA

SEQ ID NO: 11062 - protein, 174 aa, Pseudomonas syringae pv. tomato str. DC3000
MKTLVDHLSQYASYHRDSRNILTHFVGIPLIVLAVAVLLSRPGWNISGLWISPAALLALGSTVFYLRLDKALGAVMAVLLALCIWAGANLAQQATMAWLSAGVGLFVIGWIIQFIGHYYEGRKPAFIDDLTGLIIGPLFVVAELAFLMGLRKTLQHAIEERSGPVGRNARKAAV

SEQ ID NO: 11063 - protein, 271 aa, Glycine max
MADYSAGTESQEVVVNVTKNTSETIQRSDSLVSVPFLQKLVAEAVGTYFLIFAGCASLVVNENYYNMITFPGIAIVWGLVLTVLVYTVGHISGGHFNPAVTIAFASTRRFPLIQVPAYVVAQLLGSILASGTLRLLFMGNHDQFSGTVPNGTNLQAFVFEFIMTFFLMFVICGVATDNRAVGEFAGIAIGSTLLLNVIIGGPVTGASMNPARSLGPAFVHGEYEGIWIYLLAPVVGAIAGAWVYNIVRYTDKPLSETTKSASFLKGRAASK

SEQ ID NO: 11064 - protein, 578 aa, Ustilago maydis 521
MAGAVPAASPGGVTVGETKLWSQANVRPIFFCALAVIGAILYGYDGTYFTGILEMDRFKRDFGVINPDNGQYEIPSNDQSLYASIVQAGEVVGSLLAAPLGDYVGRRGGFFGACTLVALGVVLQLVTVGSKALLTLGRGVLGAGVGVISNCTPLYLSEIAPTAIRGAIVSSWQLMLAIGQVIGACIAQGTKDIDSTWSYRIPIIFNLFFVAVLVAAQFIIPESPRWLIQKNRDEKALAALKRVNKGQKDDVRDKVIALEYNAFRQARADELELSGEGGWKSLMHGVELRKFACVLGILIGQQIGGVQFIFSYTVTFMTAVGLKDAFIITIIVDVIEVVGVLCSFLLVNRFGRRPLILWTSVPMFISLFVVAGIGTKGLPPRGESLPWPGVISVTEGRTIAAMICIYVFFFNLAWGPLAWVVASELAVGKNRSKIMSVGTACFWIIAWAVTFTLPYLFYNAGLGAQIGWIYGVGTLIAMTFVYFYIPETFGRSLEEINEMLEARVPTRKWTTYMTQQERVLVDQSRHLDDDSALGTKPSNVSLTASNADDKKLDAKDGSGAPSQDRNPTRLGTSDVDSV

SEQ ID NO: 11065 - protein, 296 aa, Xylella fastidiosa 9a5c
MIKRIRKAVFPVAGLGTRFLPATKTIPKEMLPIIDKPLIQYAVDEAIQAGCDTLVFVTNRYKHAVADYFDKAYELEQKLERAGKYEQLELVRHVLPDGVRTVFVTQTEALGLGHAVLCAKPVVGDEPFAVLLPDDLMWSRNGGALKQMADVAEVSGSSVIAVEDVPVDKTVNYGIVGTDVFDGSKGRITQIVEKPKPDDAPSNLAVVGRYVLSGKIFEMLENTSIGTGGEIQLTDAIAELLKYERVDAYRFQGRRFDCGAHIGLIEATLHLALEHRKHGQAVREILRDTLLPVDKN

SEQ ID NO: 11066 - protein, 588 aa, Glycine max
MSSSFSVRFLAPPSSCFPSSRPKTWLCAATTPTVAPATASSEVEASRLEPRVEERDGFWVLKEEYRGGISPQEKVKLEKDPMKLFMEGGIEDLAKMSLEEIESSKHTKDDIDVRLKWLGLFHRRKQHYGRFMMRLKLPNGVTTSAQTRYLASVIRKYGKDGCADVTTRQNWQIRGVVLPDVPEILKGLDEVGLTSLQSGMDNVRNPVGNPLAGIDPDEIVDTRPYNNLLSQFITANSRGNPAMSNLPRKWNVCVVGSHDLFEHPHINDLAYMPANKDGRFGFNLLVGGFFSAKRCAEAIPLDAWVSADDVIPLCKAVLEAYRDLGFRGNRQKTRMMWLIDELGIEVFRSEVEKRMPGKQLERASEEELVKKKWERRDYLGVHPQKQEGLSYVGIHIPVGRVQADDMDELARLADEYATGELRLTVEQNIIIPHVDNNKIDGLLNEPLLKGRFSPEPSLLMKTLVACTGNQFCGQAIIETKERALKVTEEVERQVAVTRPVRMHWTGCPNTCGQVQVADIGFMGCMARDDNGKATEGVDIFLGGRIGSDSHLAQVYKKGVPCKDLVPVVVDILVKHFGAVLRNREEGED

SEQ ID NO: 11067 - protein, 886 aa, ASPERGILLUS NIDULANS FGSC A4
MLTSKAYAGPLGLPSSQTPTASYHTTTQKSSTFSESQTGTVYTSPTKSEFSEADDGLDAVRSWDENQVISWLHSINCQQYEPLFRANNFNGNNLIECDQKILQEMGIKKIGDRVRIFVAIKQLRNKSVVNKKQKNLRQLAALEAAHQQASPDSARSYSARQQTSSAGHASRTGDYSYGRPTSRPGSPLRPHRYVANSPMDSGRKDYLSAGSGAGRNPGTPVERIGTHSRQNPSLDGMTMGSLLSNAPVIRVIYSGGQTKVLDIKHCKTPDEIILCVLKKLQLPEHQYRNYCFYVLDGLDPDPSNCRRLSDHELMEICEGFHRSERGRLILRKIHAGEPDAEEVHRAAQLALDESQQAHMNALSSSNARNQMKIQQLTGESWHNIRQPMSPVSSRHNTTPSDHEIRPPQVSERVSKLRSFFGARPPSEMIIHEISSYFPGHQREDIEKTMRMSVRRSQRLSRAASRLSVVSNTSYASSLRDAPPIPSIADTWLNNGTPPTRAARPLSVLSTRPGLPSTSYRDSIASSSLHPLQEESPVEPNRKSYVSFDSGSDDPNNSRHSLLDENASVAATDGGSFNERLSVLVAEDGEEEDDGLAEFLAGNNFVNWMKGSLIGEGSFGSVFLALHSITGELMAVKQVEIPSATKGTEFDKRKNSMVEALKHEIDLLQGLHHPNIVQYLGTTADDQYLNIFLEYVPGGSIATMLKQYNTFQEPLIKNFVRQILAGLSYLHSKDIIHRDIKGANVLVDNKGGIKISDFGISKRVEASTVLGSRASNGGGHIHRPSLQGSVYWMAPEVVRQTAHTKKADIWSLGCLVIEMFIGSHPFPDCSQLQAIFAIGSNKARPPAPEHASKDAVAFLDMTFQLDHEKRPDADELLKSPFLATTLT

SEQ ID NO: 11068 - protein, 551 aa, Haemophilus somnus 2336
MTALFTTAQNWLAQDPDAETRAELQTLLNQAKAGDMNAQKELHNRFNGRLQFGTAGLRGRLQAGSMGMNRVLVAQAAGGLAEYLKGYDSEPSIVLGYDGRKNSDVFVRDTAEIMAGAGIKTFLLPRKLPTPVLAYAIKHLNTTAGVMVTASHNPPEDNGYKVYLGKANGGGQIVSPADVDIAKLIDKVANGDIRDLPRSQHYTVLDDEIVEAYIAKTASIAKEPQANINYVYTAMHGVGYEVLSKTLAKAGLPQPHLVEEQIQPDGSFPTVNFPNPEEKGALDLAIKLAKAKNAEFIIANDPDADRLAVAVPDSEGNWKPLHGNVIGCFLGWYLAKQYHAQGKQGKLACSLVSSPALAEIAKKYGFQSEETLTGFKYIGKVNDLLFGFEEALGYLVDPDKVRDKDGISAAIAFLDLVRSLKKEGKTLTDYANDFTAEFGAYVSGQISIRVNELSDIGKMMTALRKEPLTELGGFVTQFIDHSKTDRASDILVFVLENGSRLIVRPSGTEPKVKFYLDVCGTDPKNADEVLAEFDENVRQILRQEKYGKQDC

SEQ ID NO: 11069 - protein, 463 aa, Bradyrhizobium japonicum USDA 110
MHSPNPDMSQLFADRQAQRSALHNRYLNEQFVRVLKTIGYDVGFQKGQGQYLYDRDGARYLDLLSGFGVFAIGRNHPVMRDALKSVLDADLPNLVQFDVSTLAGVLAERLLKYVPYLDKAFFANSGAECVEAAIKFARGATGRPGIVYCAHGYHGLTYGALSLTGDSNFRTGFEPLLPGCTPVPFNDLAALEKALASREVAAFVVEPIQGKGVNMPTDEFLPGAAALCKKYGTLFVADEIQTGMGRTGRFLAVEHWNVEPDMVLLSKSLSGGHVPVGAVLTRKGIFDKIFNQMDRAVVHGSTFSKNDLAMAAGIATLDVMESEKLIESAAKRGAELRLALTRMVPGYELMKEVRGKGLMIGVEFGPPKSLRLRASWNVLEAANKGLFCQLITVPLFKDHKILTQVAGHGSHTIKLLPPLTITEEDCGWIERAFDDVIAGSHKVPGAIWSLGKTLVDNAVRRSA

SEQ ID NO: 11070 - protein, 303 aa, Enterococcus faecium
MSTGFLFPGQGSQKLGMLADIPEMYMERLENVTGYRLVDKEENYQDTVFIQLALLTKAVFYLDEMEKNGIQPDIAAGHSIGAFCAAVACRSLRFENAAELVYHRAVLMKEAYPSGYAMGVVVGVTRSEAEEIVAKTFDPDHPVYLSNENCPMQHTLSGSIEGLSVTLAEAKRHQAQTAKLLKVPVPSHCLLMNDTVKKFKPYMQSVHLSDARCLYIKNTDGRATQDAEEIRKDLLENLAFPVQWNQMMDLAKELGMDLTIEFPPGNTLTKLIHTKFGVDKGIRTINLDQHGIDDATFLYQKWR

SEQ ID NO: 11071 - protein, 136 aa, Zea mays
QRKARLLIVSVEVGSYVNTNDVFKEPNDVFKEPGSNKRLRSGSNDVHVPTSKASREKLRRNKLNDRFLELGSTLEPGKPVKADKAAILSDVTLMVIQLRSEAQQLKETNGSLEEKIKELKVIQPFLLNTVNPQIMH

SEQ ID NO: 11072 - protein, 225 aa, Glycine max
MTRLRKRVATRLKDSQNTFAMLTTFNEVDMTNLMKLRSDYKDAFVEKHGVKLGLMSGFVKAAVNALQHQPIVNAVIDGDDIIYRDYIDISIAVGTPKGLVVPVIRNADTMNFADIEKQINTFAKKANDGSLSIDEMAGGTLTISNGGVYGSLLSTPIINPPQSAILGMHSIVSRPTVVGGNIVPRPMMYVALTYDHRIIDGREAVFFLRRIKDIVEDPRRLLLDI

SEQ ID NO: 11073 - protein, 340 aa, Xanthomonas axonopodis pv. citri str. 306
MKAVALTRHLPIDDPESLLDVELPAPAAPSGYDLLVRVEAISVNPVDTKVRAPKPQPLQAPKVLGYDAAGVIEAVGPEVTAFAVGDEVYYAGDIGRPGSNAQYQLVDARIAGCKPTSLSFAQAAALPLTTLTAWELLFQRMPYSFDGARNRGRHLLIVGGAGGVGSIAIQLARHAGFTVIATASRPESIEWVRQMGAHHVIDHHQPLQPQLQALGLETVDAALNLADTDRYWQPLGEVLAPQGHVGLIVEPRGPLSIGDPYKSKCIGIHWELMFTRARYATEDMVEQHRILNRAASLIDAGELRTTHTETLSPINAQQLREAHRRLESGSTIGKLVLAGW

SEQ ID NO: 11074 - protein, 461 aa, Zea mays
MASFSSLSASSSTSTPSFNLPAKTSAGTGSLSFHRARESQKSRARMVTVRAEAVDTTISPRVNALRPSKTMAITDQATALRQAGVPVIGLAAGEPDFDTPAVIAEAGINAIRDGATRYTPNAGTLELRKAICKKLEEENGLSYSADQVLVSNGAKQCITQAVLAVCSPGDEVLIPAPYWVSYPEMARLAGATPVILPTSISDNYLLRPESLASVINENSRILILCSPSNPTGSVYPKELLEEIAAIVRKHPRLLVLSDEIYEHIIYQPAKHTSFASLPGMWERTLTVNGFSKAFAMTGWRLGYLAAPKHFVAACGKIQSQYTSGASSISQKAGLAALNLGYAGGEAVSTMVKAFQERRDYLVRSFRELPGVKISEPQGAFYLFIDFSSYYGSEVEGFGTIKDSESLCLFLLEKAQVALVPGDAFGDDKGVRISYAAAMSTLQTAMGKIKEAMALLRPPVAV

SEQ ID NO: 11075 - protein, 427 aa, Vibrio parahaemolyticus RIMD 2210633
MVMTLTLMHRMSALQITEINIMSVTADQVHGVVQALTQSSDTLFLLLGAIMVFLMHAGFAFLEVGTVRQKNQVNALVKIIADFGISAIAYFFIGYWVAYGGTFFSDAQTLSQDNGYELVKFFFLLTFAAAIPAIVSGGIAERARFYPILIATFFTVGVVYPLFEGMIWNGNFGVQAWFESTFGYGFHDFAGSVVVHGVGGWIALVAVTFLGMRRGRIRAGKHTNFAPSNIPFLALGAWILCVGWFGFNVMSAQTLSGISGLVAMNSLMAMVGGIVASLLAGKNDPGFIHNGPLAGLVAVCAGSDLMHPLGALVTGAVAGVLFVYLFTYLQNRTKIDDVLGVWPLHGVCGAWGGIAAGVFGQSGFGGMGGVSFAVQVLGTFFGISIAVLGALVVYGAINALTGLRLSEEDEFNGADLAIHKISSTNED

SEQ ID NO: 11076 - protein, 336 aa, GIBBERELLA ZEAE PH-1
MSENKAAYLVAVNTPLELKSAPYPEPEDGQVIVKNHAVALNPVDCAQQKLGTYFPWLKFPAILGSDVSGQVVALGSGITKFKIGDRVTGSTMGSFQEYVPVKEYSCAKIPDNISYEKAATLPLCLSVAVKALFHPEYLALDLPAPDTEANGKVILIWGGSTSVGCNTIQLAKAAGFEVITTASPRNFDYLKKLGSSQVFDYNSTSIKQDLLAAVHGKTVAGCIANGGLDPSQYAPIVEACAAVALSSPDNCKLVPLTMVPRFPLPEGVETKFVVPLSTNKDLSSKIFNDYISDELASGNFIAAPEAKVVGHGLSSLQAAMDILNAGVSATKIVVTM

SEQ ID NO: 11077 - protein, 432 aa, Enterococcus faecalis V583
MATKEIKMPHLGESVTEAAIVQWLVKPGDSVKRYDPLMEVVSDKVTTEVPSDFDGVVKEFLISLDTDVPIGTAVMTLETEETTEETEVATLAPVKEASAEQAQEHETAETTSTATSHQKNNGRYSPAVLKIAQEKKIDLTQVTGTGRDGRITRKDVTNFTPTQARTPEKTVSPGTSPSISEEPVASQNESAATASPTETSTDKIVSADPVRKAIAKKMVQSVNEIPHAWLMVEADVTNLVQLRNSLKDEFKQQEGLSLSFFPFFAKAVIQALKKNPKINTSWDDGSIIYHKDVNLSIAVTTDEHLYVPVIQQADNYSIAGLAKEINRLAQEVRQGTLASKEMQGGTFTLNNTGTLGSVQSMGIINHPQAAILQVESINKRLVPTADGGFKVADMVNLCLSIDHRILDGQQAGKFLRDVKDNLAKYNADTDIY

SEQ ID NO: 11078 - protein, 404 aa, Erwinia carotovora subsp. atroseptica SCRI1043
MSPIEKSKKLENVCYDIRGPVLKEAKRLEEEGNKVLKLNIGNPAPFGFEAPDEILVDVIRNLPTAQGYCDSKGLYSARKAIVQHYQARDMRDMTVEDVYIGNGVSELIVQSMQALLNPGDEMLVPAPDYPLWTAAVSLSNGNAVHYLCDESSDWFPDLDDIRKKITSNTRGIVIINPNNPTGAVYSKELLLDIVAIAREHSLIIFADEIYDKILYDDAQHHSIAALAPDLLTVTFNGLSKTYRVAGFRQGWMVLNGPKKHAKGYIEGLEMLASMRLCANVPMQHAIQTALGGYQSISEFIQPGGRLYEQRNRSWELINQIPGVSCVKPRGALYMFPRIDAKRFNIHDDQKLVLDLLLQEKVLLVQGTAFNWPYPDHVRIVTLPRIDELDMAIHKLGRFLGHYHQ

SEQ ID NO: 11079 - protein, 469 aa, Enterococcus faecalis V583
MAEQTDLLILGGGTGGYVAAIRAAQKGLNVTIVEKYKLGGTCLHKGCIPTKALLRSAEVFDTLKQAASFGIETEAASIDFSKIQQRKEGIIEQLHKGVEGLCKKNKIKILAGEGAILGPSIFSPVSGAVAVTFNDPTREEEIIVPKNVIIATGSSSKTLPNLPLDEEFILSSDGMLELEELPESIAIIGGGVIGVEWASLLNSLGVNVTIIEFLDRLLINESATISKELKKRLEQRGINILLGSKVQEAKVTGQKVQVEVAGQETLTVDKVMVAIGRQPNINKLGLQNTSVKYTDKGIEVNEFYQTTEGHIYAIGDCIDTLQLAHVAMKEGELAVQHLLGETVEPLNYTNVPRGVYTNPEIASVGYTRETLPAEKEVVIGTFNFNGNGKSLVYGETDGFIEVIRDKKTDDLLGVSMIGPHVTDLIAEASTAMYLDAAPIEIGEAIHAHPTMTEVLQEAALDTYGLAIHK

SEQ ID NO: 11080 - protein, 504 aa, Glomerella cingulata
MGSDEKSPSTYRYDETPTYTTSNGAPVANPQHWQRPGPSGPLLLQDFHLIDLLAHFDRERIPERVVHAKGAGAYGEFEVTHDISDIASIDMLKEVGKKTKAVVRFSTVGGEKGSADSARDPRGFASKFYTDEGNWDWVYNNTPIFFIRDPSLFPVFIHTQKRHPRTNLKDATMMWDYWSTHQECVHQLMHLFSDRGTPYSYRHMNGYSGHTHKWTKPDGSFVYVQIHLKTDQGNKTFTNEEAAKLASENPDWHTQDLFESIQRGEHPSWTVYVQTLTPEQAEAFRWNVFDLTKVWPQSEVPLRPFGRLTLNRNPDNYFAEIEQVAFSPSHLVPGVEPSADPVLQSRLFSYPDTHRHRLGVNYQQIPVNRPLNAFNPHQRDGAMSVDGNYGANPNYPSSFRPLNYKPVKAAGAHKQWAGKVVEDLFGPVTAQDYEQAAGLWAVLGRQDGQQRNFVLNVSGALAGARADVRARVYDMFSKVDAGLGAAIETETEAVAKPADVRSKL

SEQ ID NO: 11081 - protein, 157 aa, Triticum aestivum
  unsure (1)..(157): unsure at all Xaa locations
MAPTVMASSATSVAPFQGLKSTAGLPVSRRSNGASLGSVSNGGRIRCMQVWPIEGIKKFETLSYLPPLKHGGLLKAXSDYLIRSKWGALPPIQARLGHLPXEHNASPWGTXDGRYWXMXNCLVXGAPTQQVXNEVXGVKEDTXXYSASRFTSPHASP

SEQ ID NO: 11082 - protein, 316 aa, Shigella flexneri 2a str. 301
MNELDGIKQFTTVVADSCDIESIRHYHPQDATANPSLLLKAAGLSQYEHLIDDAIAWGKKNGKTQEQQVVAACDKLAVNFGAEILKIVPGCVSTEVDARLSFDKEKSIEKARHLVDLYQQQGVEKSRILIKLASTWEGIRAAEELEKEGINCNLTLLFSFTQARACAEAGVFLISPFVGRIYDWYQARKPMDPYVVEEDPGVKSVRNIYDYYKQHHYETIVMGASFRRTEQILALTGCDRLTIAPNLLKELQEKVSPVVRKLIPPSQTFPRPAPMSEAEFRWEHNQDAMAVEKLSEGIRLFAVDQRKLEDLLAAKL

SEQ ID NO: 11083 - protein, 303 aa, Ipomoea batatas
RMDYERFIQAHRETDADITVAALPMDEKRATAFGLMKIDEEGRIIEFAEKPKREQLKAMKVDTTILGLDDQRAKELPFIASMGIYVISKNVMLNLLREKFPGANDFGSEVIPGATSIGMRVQAYLFDGYWEDIGTIEAFYNANLGITKKPVPDFSFYDRSAPISTTPRYLPPSKMLDADVTDSVIGEGCVIKNCKIHHSVVGLRSCISEGAIIEDSLLMGADYYETDADRRLLAAKGSVPIGIGRNSHIKRAIIHNIARIGNDVKIINNDNVQEAARETEGYFIKSGIVTIIKDALIPSGTII

SEQ ID NO: 11084 - protein, 400 aa, Candidatus Blochmannia floridanus
MVMIKMSDVDLFNKRILIRADLNVPIRNGIITSARRIHASLPTIQLALSRSNQVMVTSHLGRPVEGEYDSQFSLQPVVDYFQKNLSAKIGGVRLVKDYLDGINWISNELLILENVRFNKGEKTDDEVLAKKYASLCDVFVMDAFGSAHRIQSSTHNVSKFVKVACSGLLLEQEIAALHKALSNPVRPMVAIVGGSKVSSKLMVLESLSKVVDYLIVGGGIANTFLAAQGQNVGKSLYEAELISTAKSLLKDCNIPIPTDVRVSSEFSETAQSIMKNVTEIKDDEQILDLGDNSIINILNILNNAKTILWNGPVGVFEFPNFRKGTEMVSNAIANSNAFSIAGGGDTLMAIDLFGIANQISYVSTGGGAFLEFIEGKTLPSIEVLEEHKRMRNGNYSDINY

SEQ ID NO: 11085 - protein, 687 aa, Sinorhizobium meliloti
MAKKPSAPNNTKPATIHDQKATRGNGGELHQIAEGDTPVLTTAQGGPVADDQNSLRAGERGPTLIEDFHFREKIFHFDHERIPERVVHARGYGVHGFFETYESLAAYTRADLCQHPGERTPAFVRFSTVAGSKGSFDLARHVRGFAVKIYTKEGNWDLVGNNIPVFFIQDAIKFPDVIHSVKPEPHREFPQAQSAHDNFWDFISLTPESMHMIMWVMSDRGIPRSFRFMEGFGVHTFRFVNAKDESTFVKFHWKPKLGLQSLVWNEAVKINGRDPDFHRRDMWQAIQSGNFPEWDLHVQLFDQDFADKFDFDILDPTKVIPEEVLPTKPVGRLVLDRMPENFFAETEQVAFMTQNVPPGIDFSDDPLLQGRNFSYLDTQLKRLGSPNFTHLPINAPKCPFQHFQQDGHMAMRNPVGRVNYQPNSWSEGPKLRIRAESFADHYSQARQFFISQTPPEQRHIADALTFELSKVETPVIRERMVAHLLNIDETLGKKVGHALGLETMPKPADAAVATRQDLDPSPALSIIQRGPKRFEGRKLGILATDGADGALLDALIGAVENEKAAFELIAPKVGGFTASDGKRIAAHQMLDGGPSVLYDAVVLLPSAEAVADLIDVATARDFVADAFAHCKYIGYAGAAVPLLERAGIAELLDEGTIELTDAASAAAFLTEIGKLRVWGREPSVKLK

SEQ ID NO: 11086 - protein, 532 aa, Synechococcus elongatus PCC 7942
MLDASISPVVLVILDGWGYRNATEGNAIRTAETPIMDALWEAYPSTLIHTSGKDVGLPDGQMGNSEVGHLNLGAGRIVPQELVRITDAVEDGSILENPALLQACSAVRQHGSKLHLIGLCSDGGVHAHLDHLGGLLKLAAAQGIQDVYIHAITDGRDTNPTEGVNCITKIERLIATAGVGQIVTICGRYFAMDRDRRWDRVRKAYELLTIDGEGCGQTATEVLQETYAKGVSDEFVEPTRLAPGAIAPGDGVIFFNFRPDRARQLTYAFVEAEFEGFERDLIQPLTFVTFTQYDANLNVPVAFEPQNLTNILGEVVANHGLRQFRTAETEKYPHVTYFFNGGIEEPFPGEDRELIPSPMVATYDRAPKMSAQAVTDAAIAAIDKGIYSLVVINYANPDMVGHTGKMGATVEAIETVDRCLGRLVSAINRAGGTALITADHGNAEYMWDENGEPWTAHTTNLVPFIVVEGERRKLPGFGTEIPLREDGRLSDIAPTILQLLGLPQPVEMTGRSMIEPAAYEVKQGRTPVKVGV

SEQ ID NO: 11087 - protein, 307 aa, Vibrio vulnificus CMCP6
MSKFAIVFPGQGSQAVGMLADLGEQYEIVKQTFAQASEALGYDLWALVQNGPAEDLNQTFRTQPALLASSVAIWRVWQELGLAQPENLAGHSLGEYSALVCAGVIDFQEAIKLVELRGQLMQEAVPAGTGAMYAIIGLDDEAIAKACEEAAQGEVVSPVNFNSPGQVVIAGSKDAVERAGALCKEAGAKRALPLPVSVPSHCALMKPAAEKLAVALESIEFKAPQLPVINNVDVVAETDPAKIKDALVRQLYSPVRWTESVELMSSQGVEKLLEMGPGKVLTGLTKRIVKSLEAAAVNDVASLDAVK

SEQ ID NO: 11088 - protein, 265 aa, Mesorhizobium sp. BNC1
MRRLSSKENSMRLPLVAVSTDVTHDGNYTWHAAPEQYLEAALSGAGVLPLLLPSFGERIDFDELLASVDGVLITGAKSNVYPPLYGGAAEEESKPYDQRRDATTIPLIRRAIEKGVPLLAICRGIQELNVALGGTLANEIQERDGALDHRGHGETPDERFMIHQTVTIKPGTCLAEILGSGEIKVNSVHRQGIERLGPNLQVEAVAPDGTIEAVSVAGSKGFAVGVQWHPEYWAASDAPSRQIFEAFGNAVRAHRAARLQLQGVG

SEQ ID NO: 11089 - protein, 497 aa, Oryza sativa
MASPPQPGPYMPDLPAVPAWLNKGDTAWQLVAATFVGIQSMPGLVVIYGSIVKKKWAVNSAFMALYAYASTLIVWVLVGFRMAFGDRLLPFWAKAGPALTQDFLVQRAVFPATAHYGSDGTLETPRTEPFYAEAALVLFEFEFAAITLVLLAGSLLGRMNIKAWMAFTPLWLLFSYTVGAFSLWGGGFLYQWGVIDYSGGYVIHLSSGVAGFTAAYWVGPRLKSDRERFSPNNILLMIAGGGLLWLGWAGFNGGAPYAPNVTATVAVLNTNVSAATSLLTWTCLDVIFFGKPSVIGAVQGMMTGLVCITPGAGLVHTWSAMLMGMFAGSVPWFTMMILHKKSTFLMKVDDTLAVFHTHAVAGILGGVLTGLLATPELCALDCPIPNMRGVFYGSGIGQLGKQLGGALFVTVWNLIVTSAILLCIGLFIPLRMSDDQLMIGDDAAHGEEAYALWGDGEKFDVTRPETTRTGGAGGAGREDTMEQRLTNMGARGVTIQL

SEQ ID NO: 11090 - protein, 450 aa, Gloeobacter violaceus PCC 7421
MQKHYDLVVLGTGVAGSSVAKRCREAGWKVAVVDSRPFGGTCALRGCTPKKVLVQAGELLDRWRHLAGKGLRAEEARIDWPELMRFKRSLIEPLPAAREAEYAEAGIESYHGVARFVGATALEVEGAHLQGEKVLIATGSRPATLGIEGEEHLASSDDFLELGTLPRRIVFVGGGYISMEFAHLAARAGSQVHVLHQDERPLAPFDPDLVDRLIEATRELGALCLCHKVKAIEKTAQGLLVHTDGDGGPYAADLVVHGASRVPNVEALDLDGAGVEAGKKGIKVNAHLQSVSNPAVYAAGDVADAPGPQLTPVAGLHAETVAENLLKGNTRSLEQAVFASTVFTVPALAGVGLLEEQAQAQGLHYRVLQADHRDRLAVRSLAAPYAAHKILVEEPGGRILGAHLLGPFATEIINVFALAIQAQVDIDQLRATHFAYPTGSSEIFAMLSKG

SEQ ID NO: 11091 - protein, 958 aa, Bordetella bronchiseptica RB50
MLETVIKRDRDLGTPARESAQLVTLTIDGQPVSVPAGTSVMRAAAEAGINIPKLCATDSLEPFGSCRLCLVQIEGRRGYPASCTTPVEAGMVVQTENARLRDLRRGVMELYISDHPLDCLTCPANGDCELQDMAGVVGLREVRYGYDGENHLAEAKDESNPYFTYDPSKCIVCNRCVRACEETQGTFALTISGKGFASRVSPGQDQPFMDSECVSCGACVQACPTSTLQEKSIIMLGQAEHSVITTCAYCGVGCGFKAEMKGEEVVRMVPWKDGQANRGHSCVKGRFAWGYTTHKERVLKPMIRQRITDPWREVSWEEAIGHAASEFRRIQAAHGRDAIGGITSSRCTNEETWLVQKLVRAAFGTNNVDTCARVCHSPTGYGLKQTLGESAGTQTFDSVMHTDVVIVMGANPSSAHPVFASRLKRRLREGARLIVIDPRRIELVSAPHVKADFHLQVRPGTNVALLTAMAHVIVTEGLVAESFVAERCEAPSFDMWREFVARAENSPEAMQEVTGVPAQLVRGAARLYATGGNGSIYYGLGVTEHSQGSTTVMAIANLAMATGNIGREGVGVNPLRGQNNVQGSCDMGSFPHELPGYRHISDDAVRGEFERDWGVTLQPEPGLRIPNMFEAALGGSFLGLYCQGEDIVQSDPNTQHVAAALSAMECIVVQDLFLNETAKYAHVFLPGSSFLEKDGTFTNAERRISRVRKVMRPRNGMADWEITMALSNALDYPMHYAHPSEIMDEIARLTPTFAGVTYEKLDRLGSIQWPCNEDAPEGTPTMHIDEFVRGRGRFMLTKYVATDERSTRRYPLLLTTGRILSQYNVGAQTRRTPNVMWHGEDVLEIHPHDAQERGVADGDWVGIQSRAGETVLRATLTDRVQPGVVYTTFHFPESGANVVTTDNSDWATNCPEYKVTAVQVTRVSQPSEWQRQWSRFADVQQKLLHERARETEPALANK

SEQ ID NO: 11092 - protein, 116 aa, Neurospora crassa
MTDAPASAPVVKKNTAAESKGKKADGKPRFEVKKWNAVALWAWDIVVDNCAICRNHIMDLCIECQANQSSATSEECTVAWGICNHAFHFHCISRWLKARQVCPLDNRDWEFQKYGR

SEQ ID NO: 11093 - protein, 340 aa, Zea mays
MDRHTCKLCFRRFHNGRALGGHMRSHVMAASSAAAYYSPPPLSLASTSSTEMDDDADPAPQKPPTPCVAREEGAKKAFCFPELSGGGRAARGESSVVQDGESDTESSPRFAVSRRRSKRARRRAPPPAASDPEHPASSVSDATPEEDVAMSLVMLSRDSWTRRSRPGPGPGPDPRWGPASSGADRSKDGGVRSFVGADDEADREHGDVARPRGRHRCGVCRKVFRSYQALGGHRASVKKGKGGCVPVPVPPSAAAPSPKARRGQTGPAVHECPFCSRVFESGQALGGHKRAHVAHGAPAPWTPARCGDSSGSIDLNVPAATDDDFELSAVYDAEFGSARQ

SEQ ID NO: 11094 - protein, 109 aa, Glycine max
  unsure (1)..(109): unsure at all Xaa locations
ASSMISSPAVTTVNRAGAGMVAPFTGLKSMAGYTTIKTNNDITFIAINGGRVQCMQEWPPIGXTKYEILYYLSDLDDAQLAMEIEYLLTKGWILYXEFNWEHCFMYREH

SEQ ID NO: 11095 - protein, 313 aa, Enterococcus faecalis V583
MKAVVINQYGSKEVLEEAEVTLPELSEHQVLVKEYATSINPIDWKLREGYLKQMFDWSFPIILGWDVAGVITEVGSQVTDWQVGDKVFSRPETTRFGTYAEVTIVDDHLLAKIPETISFEEAAAVPLAGLTAWQALFDHGHLKEGEIVLIHAGAGGVGTYAIQLAKEAGAHVITTASAKNHTLLKKIGADEVIDYHTTNFAEVLTDVDLVFDTMGGEVQKNSFAVLKPNTGRLVSIVGIEDKQLAAEKNISAESIWLQPNGEQLQKIADLMAAGKVKSIIGEVFPFSRQGIYDAHALSETHHAVGKIVVQMAE

SEQ ID NO: 11096 - protein, 400 aa, uncultured bacterium 582
MALLSDTLARVKPSPTVAMSSKAIEMRAAGRDIISLSAGEPDFDTPENIKSAAIAAILAGKTKYTAPDGIIELKQAICDKFLRDNALRYRPEQVSVGTGGKQVLYNALMATLNPGDEVIIPAPYWVSYPDMVYLAGGEPVILETSVERGFKLSAEALEAAITPRTKWFIFNSPSNPTGAGYHWDELRALTEVLQRHPHVWILSDDIYEHLVYDNFKFCTPAEVAPDLMDRTLTVNGVSKGFAMTGWRIGYAAGPRALIAAMRTIQGQSTSNPCTVSQWAALEALNGPQDYIASNNILFRTRRDLVVAQLNAIDGITCPTPEGAFYVYASIDGLIGKTTAAGVLLANDEAFAMQLLEEANVAIVFGAAFGLSPCFRVSYAASEDTLKAACTRIAEFCAALT

SEQ ID NO: 11097 - protein, 556 aa, Rhizobium leguminosarum bv. viciae
MYRYDEFDHAFVTERVEQFRDQVERRLSGELAEDAFKPLRLMNGVYLQLHAYMLRIAIPYGTLSSRQLRMLAHIARTYDRGYGHFTTRQNLQFNWPKLSDIPDALADLASVEMHALQTSGNCIRNVTADHFAGAAADEIADPRPYAEILRQWSSVHPEFSFLPRKFKIAVTGAERDRAAIQVHDIGLHVKKNDKGEIGFAVYVGGGQGRTPMIAKLIRDFLPEEDLLSYTTAIVRVYNLHGRRDNKYKARIKILVHETGTEELTRQVEAEFAALKDTELKLPEKDVQSIAAYFAPPDLPQRAEGWENLARWKKADSGFSRWVQQNVQPHKNPDYGMVTISLKPIGGIPGDASDAQMDAIADLAEEYAFDEIRVSHEQNLILPHVALADLEAVYRGLVAINLAEANAGLITDIIACPGLDYCALANARSIPLAQEISRRFGNAERQAEIGELKIKISGCINACGHHHVGHIGLLGVEKKGAELYQITLGGSGDEHTSIGEIIGRGFEPDRVTDAIETIVDTYLGLRLDHSENFLAAYRRVGPQPFKTALYGSAAEAA

SEQ ID NO: 11098 - protein, 292 aa, Zea mays
  unsure (1)..(292): unsure at all Xaa locations
MALRQAVLLAVVLAALLPLALSRGLGLVHGHVRPHTHGLGLGHHHAQPHPHPHGHAPLVGGAWSSAHATFYGGGDASGTMGGACGYGNLYSQGYGTNTAALSTALFNNGLSCGACFEVRCDAXGGGSHSCLPGSXVVVTATNFCPPNNALPSDDGGWCNPPRAHFDMSQPVFQRIALYRAGIVPVSYRRVACNKKGGIRFTINGHSYFNLVLVTNVGGAGDVHAVAVKAERSPGWQALSRNWGQNWQSNTLLDGQALSFRVTTSDGRXSVLSNNAAPRGWSFGQTFSGAQFN

SEQ ID NO: 11099 - protein, 369 aa, Synechococcus elongatus PCC 7942
MKSRAAIAWAAGQPLTIEEVDVQAPQAGEVMVKLVATGVCHTDAFTLSGADPEGIFPCILGHEGAGIVVEVGEGVTSVAVGDHVIPLYTPECGECKFCKSGKTNLCQAIRATQGKGLMPDGTSRFSLNGQPIYHFMGTSTFSEYTVLPEIAIAKINPAAALDKVCLLGCGITTGIGAVLNTAKVEPGSTVAVFGLGGVGLSVIQGAVLAKASRILAIDINPDKAEFAKQLGATDFINPKDYDRPIQEVIVELTDGGVDYSFEAIGNVNTMRAALESCHKGWGESTIIGVAGAGQEISTRPFQLVTGRVWRGSAFGGVKGRSQLPGYVEQYLNGQIKVDEFVTETRPLEEINEAFEDMHAGKVIRTVITF

SEQ ID NO: 11100 - protein, 385 aa, Enterococcus faecium
MNLKGASPMKAVTWQGKQKMEIRNVDDPKILEPTDAIIRITATAICGSDLHLYHHGEAVLEKGYVVGHEPMGIVEEVGSQVQTLKKGQRVVIPFNISCGHCHFCLNHMESQCDESNPDQLYGGLFGFGKLNGNHWGGQAEYLRVPYADSTSFVVPDNDLPDEKVLFLSDILPTAYWSVENAGVKKGDTVVILGSGPVGLFAQKFAVMAGAERVIAVDPVQHRLDKAANYNGVETYFLEDTAQAGTELYELAKGGADVIIDCVGMDGLEPVKEKAKNLVSLQSGTISPLQMASQAVKKFGTVQVTGVYMTPASSYPLQEFFMRDIAVKHGQAPIIHLMPKIYAMIAEGLFDPTQIITHSLPLSEAAQAYEIFDKKEDKNIKVVLKP

SEQ ID NO: 11101 - protein, 422 aa, Triticum aestivum
  unsure (1)..(422): unsure at all Xaa locations
IVDSRGNPTVEVDLVAGDGSLHRSAVPSGASTGIYEALELRDGDKSVYGGKGVLTAVRNINEVIAPKLVGVDVRNQKDVDAIMLDIDGTENKSPVGANAILGVSLSVCRAGASAKGVPLYKHIQELSGTKELVMPVPAFNVINGGSHAGNNLAMQEFMLLPVGATSFAEALRMGSEVYHVLKGIIKAKYGQDACNVGDEGGFAPNVQDNREGLVLLMDAIEKAGYTGKIKIGMDVAASEFLMKDGSYDXANFKNQPNNGAHVLSAQSLCDLYKEFVKDFPIVSIEDPFDQDDWSSWASLQSSVDIQIVGDDLLVTNPKRIVEAIDKKACNALLLKVNQIGTVTESIQAALDSKAAGWGVMVSHRSGETEDNFIADLAVGLASGQIKTGAPCRSERLAKYNQLVRIEEELGNVRYAGEAFRSP

SEQ ID NO: 11102 - protein, 178 aa, Zea mays
  unsure (1)..(178): unsure at all Xaa locations
MDPTKFRPSSSHDTTVTTTNAGAPVWNDNEALTVGPRGPXLLEDYHLIEKVAHFARERIPERVVHARGASAKGFFECTHRXVTSLTCADFLRAPXGCGRPVIVRFSTVIHERGXSPETIRDPRGFAREAPTPREGNWGPCWANNFPVFFIRDGLRVPPTWIHAFSPSRVEREKKNGPA

SEQ ID NO: 11103 - protein, 394 aa, Synechocystis sp. PCC 6803
MSLNWISRADRLQALPPYVFARLDELKAKAREQGLDLIDLGMGNPDGKAPQPIIEAAIAELENPESHGYPPFEGTQSFRQSITRWYARQYGVDLDPDSEALPLIGSKEGLGHLALAYVNPGDLVLVPTPSYPAHFRGPLIAGAEIYPIMLSAKDDWLIQLDQIPEAIAQRAKILYFNYPNNPTTATAPREFYEAITDWARHYQIMLVHDLCYAELAFDGYQPTSLLEIPGAKDFSVEFHTLSKTYNMAGWRVGFVVGNQEIIQGLRTLKTNLDYGIFRVVQKAAETALSLPESYIEVVRKRYQERRDFVINGLSKLGWSITPSQATMYLWVPCPVGMSSTDFALTVLEKTGVVMTPGNAFGEGGERYVRLSLIADGDRLGEALQRIEQAGIRYS

SEQ ID NO: 11104 - protein, 541 aa, Synechocystis sp. PCC 6803
MTSIDTLWLLLCAGLVFFMQAGFMCLESGLTRSKNSINVAIKNFADFGISVALFWSFGFSIMFGLSQGGWWGTGYSFVDVGGEPTLAVFFLFQAMFCGTATTIISGAAAERLKFSAYLLVAGLASGLIYPLFGDWAWNGLATVAGIETTGGWLENLGFRDFAGSTVVHSVGAWIGLATILVVGPRQGRFPKTGKTLKIQGSNMPFSVLGTLILWFGWLGFNGGSTFGLTPEVPGIMVNTVLAGVGGMLMAGLISLLQDKMIQVEPLMNGSLAGLVAITASANVVMTPIAMVIGATGSAIAYLVGKKMLHWGVDDAVDAVAVHGGAGVWGTLCVGLFGQLPLVDTGLNRWQQCGVQLLGIGVCTLWAFGLAWVFLTLLNRVFALRISPEDEEIGLNVSEHQATTETYELFQVMDRQAKTHDLSLRVPVNPFTEVGHIAGRYNQVMDAFEARHHRSVEDLAQIYYVTAAIAAAIENNSFKADQLGLEEVTNRADELGALARTIQQMAEMLQQRDQELIAVKQQLVLQQQKQHHGNGESVDLSP

SEQ ID NO: 11105 - protein, 363 aa, Aspergillus terreus
MGDQPFIPPPQQTALTVNDHDEVTVWNAAPCPMLPRDQVYVRVEAVAINPSDTKMRGQFATPWAFLGTDYAGTVVAVGSDVTHIQVGDRVYGAQNEMCPRTPDQGAFSQYTVTRGRVWAKIPKGLSFEQAAALPAGISTAGLAMKLLGLPLPSPSADQPPTHSKPVYVLVYGGSTATATVTMQMLRLSGYIPIATCSPHNFDLAKSRGAEEVFDYRAPNLAQTIRTYTKNNLRYALDCITNVESTTFCFAAIGRAGGHYVSLNPFPEHAATRKMVTTDWTLGPTIFGEGSTWPAPYGRPGSEEERQFGEDLWRIAGQLVEDGRLVHHPLRVVQGGFDHIKQGMELVRKGELSGEKLVVRLEGP

SEQ ID NO: 11106 - protein, 948 aa, Rhodopseudomonas palustris CGA009
MALVHETDFGTPPSLSENMVTLTIDGRSVSVPEGTSIMRAAMEIGTAIPKLCATDMVDAFGSCRLCLVEIDGRSGTPASCTTPVADGLVVHTQTERLKQIRKGVMELYISDHPLDCLTCSANGDCELQDMAGAVGLRDVRYGYSGEKHPNPGLDESNPYFTYDASKCIVCSRCVRACEEVQGTFALTIAGRGFDSVVSPGMQESFLGSECVSCGACVQACPTATLNEKSVIEIGTPERSVVTTCAYCGVGCTFKAEMRGEELVRMVPYKDGKANRGHSCVKGRFAWGYANHKERILKPMIRGKITEPWREVSWDEAFAYAASELKRIQAKYGRDSVGGITSSRCTNEETFLVQKLIRAGFGNNNVDTCARVCHSPTGYGLSTAFGTSAGTQDFDSVEHADVVMIIGANPTDGHPVFGSRLKKRLRQGAKLIVVDPRRIDLVRSAHVEAAQHLPLKPGTNVAVLTALAHVIVTEGLANEAFVRERCDWSEYEHWAAFVSDEKHSPEATAAFTGVDPQAVREAARLYATGGNGAIYYGLGVTEHSQGSTTVMAIANLAMATGNLGRPGVGVNPLRGQNNVQGSCDMGSFPHELPGYRHISTDAVRESFEALWNVKLDNEPGLRIPNMLDAAVEGSFKALYVQGEDILQSDPNTKHVAAGLEAMECVIVHDLFLNETANYAHIFLPGSTFLEKNGTFTNAERRIQRVRKVMTPKNGLEDWEVTLRLAEAVGYKMNYTHPSQIMDEIAALTPTFTGVSYDRLEELGSIQWPCNERAPEGTPVMHIDHFVRGKGKFVITEYVATDERTGPRFPLLLTTGRILSQYNVGAQTRRTANTVWHDEDRLEIHPHDAEQRGVRDGDWVRLASRAGETTLRALITDRVAPGVVYTTFHHPDTQANVVTTEYSDWATNCPEYKVTAVQIAPSNGPSEWQRSYEQQAAAARRIAVPAEAAE

SEQ ID NO: 11107 - protein, 302 aa, Zea mays
MGRPPCCDKMGVKKGPWTPEEDLMLVSYVQEHGPGNWRAVPTNTGLMRCSKSCRLRWTNYLRPGIKRGNFTEQEEKLIVHLQALLGNRWAAIASYLPKRTDNDIKNYWNTHLKKKLKNMQGGEGGAGGKRPAVPKGQWERRLQTDIHTARQALRDALSLEPSATPLAKVEPLPTAPGCATYASSADNIARLLEGWLRPGSGKGPEASGSTSTTATTRQRPQCSGEGTASASASHSGGAAANTAAQTPECSTETSKMAGSSVGAGSAPAFSMLERWLLDDGMGHAEVGLMTDVVPLGDPSEFF

SEQ ID NO: 11108 - protein, 136 aa, Triticum aestivum
  unsure (1)..(136): unsure at all Xaa locations
MAPTVMASSATSVAPFQGLKSTAGLPVSRRSNGASLGSVSNGGRIRCMQVWPIEGIKKFETLSYLPPLSTEALLKQVDYLIRSXKWVPLPRSSARLGFIFREAQRNSPXGYYELGRVLGQCGKLPMFGMQPTPNAR

SEQ ID NO: 11109 - protein, 217 aa, Ophioglossum pedunculosum
RSGLLKKAYELSVLCDAEVALIIFSGTGKLFEFASSSMKKILERYRKYGGGLHDNSIATRDAEYWRNEVMRMKEHIACLEESQRHLLGENLVSLSVKNLQKLEHQLEIGANRIRTRKTQILLEQIQELQKKEHFLHGENNILKTKLEQLSTRQVPSLGTLIYTSTVTTTSTTSAGAGVEDNAGGHDSMNAMQKMTLHSNFQPATSAQNTLQLGYYPD

SEQ ID NO: 11110 - protein, 162 aa, Shewanella oneidensis MR-1
MTSTIYRHNAIDIQGNPTPLTQYQGKVILIVNTASECGFTPQYKGLEALYQEYKARGFVVLGFPCNQFGAQEKANEQGIKSFCELNFGVSFPLFSKIEVNGEHTHPLYQYLKKAAPGMLGTERIKWNFTKFLINRQGEAVARFAPTTKPEDIRDKIESLLNK

SEQ ID NO: 11111 - protein, 554 aa, Saccharomyces cerevisiae
MSNNSFTNFKLATELPAWSKLQKIYESQGKTLSVKQEFQKDAKRFEKLNKTFTNYDGSKILFDYSKNLVNDEIIAALIELAKEANVTGLRDAMFKGEHINSTEDRAVYHVALRNRANKPMYVDGVNVAPEVDSVLKHMKEFSEQVRSGEWKGYTGKKITDVVNIGIGGSDLGPVMVTEALKHYAGVLDVHFVSNIDGTHIAETLKVVDPETTLFLIASKTFTTAETITNANTAKNWFLSKTGNDPSHIAKHFAALSTNETEVAKFGIDTKNMFGFESWVGGRYSVWSAIGLSVALYIGYDNFEAFLKGAEAVDNHFTQTPLEDNIPLLGGLLSVWYNNFFGAQTHLVAPFDQYLHRFPAYLQQLSMESNGKSVTRGNVFTDYSTGSILFGEPATNAQHSFFQLVHQGTKLIPSDFILAAQSHNPIENKLHQKMLASNFFAQAEALMVGKDEEQVKAEGATGGLVPHKVFSGNRPTTSILAQKITPATLGALIAYYEHVTFTEGAIWNINSFDQWGVELGKVLAKVIGKELDNSSTISTHDASTNGLINQFKEWM

SEQ ID NO: 11112 - protein, 452 aa, Neurospora crassa
MAPLADTASNGGSTLSLDHLITGSDKYHAAATNVAIAAENEYAAHNYHPLPVVFAKAQGVHVWDPEGKHYLDFLSAYSAVNQGHCHPELVKALTEQASRLTLSSRAFHNDVFPVWAAKVRSVFGYDMVLPMNTGAEAVETAIKIARKWAYKVKGVPHDKALVFSAADNFHGRTMTAISLSVDPESRDNYGPYVPQIGAVSPSTGKTIRYNNIADLEEVLEAHGKETAAFIVEPIQGEAGVVVPDEDYLQKVSALCKKHNVLFICDEIQTGIARTGRMLCSDWANIKPDIITLGKAISGGMYPVSAVLADKEIMLVVEPGTHGSTYGGNPLGCAVSLRALELVEEEGLVEKAEKLGQIFREGVEAFKSPIVKLVRGKGLLNAVVIDESAAAGRTAWDLCILLKEKGVLAKPTHGNIIRFAPPLVITEEELRGAIKTFGEALQELPTVTKSEGH

SEQ ID NO: 11113 - protein, 422 aa, Thiobacillus sp.
MVTKQDVEAAYLLLLGRPAEPGAAEYWMENVYHTIDLVTGLMASDEFRINRLPRLVEAGLSLSDFAPAAAPKALADNGPPMQAALHRGIGQIEVVEINRPEALPGTVVVKVGASGICGTDLRAYRQDPNSQDLPHGHEFAGTIVEVGEGVSRDRIGKRVTADLFLNAMCGNCQFCISGHAYHCIDKALPFRSGGFAEYLRVRNAATFDLPDSIDDALGALVEPLAVSTHAIRLVGVQPGMIGVVIGAGTIGLCAIAAALHAGATNVFVVARHAFQGELARAIGATDILPDDIGSAINRIREVAPHGADFVIEAVGGGQATIDQATRFLAPRGRVGIVGETGPGIKVVEAYPALMKELTFLYSNCYGYLDGKHDFEVAIENLALDGERLRKLITHEFLIADAPLAFQTANNKKFSSVKVQLKP

SEQ ID NO: 11114 - protein, 446 aa, Pirellula sp. 1
MQPEHVAGANMPNAVGNHDPMMRQTVTVILAGGRGSRLEPLTRDRAKPAVPIGGAYRIIDFVLSNCLNSDMRRLLLLTQYKAQSLDRHINVAWRNYFCRELGEFIDVVPPQQRIDDNWYQGTADAVYQNIYAIEREAPEYVVILAGDHLYKMNYESMVNFHHRKGADVTVGALRVSREEARQFGVMQVDTDNRLVEFQEKPENPRPTLDDPDVCLASMGIYVFNTRFLFERLCDDATQPDSDHDFGKNIIPGAIEDSQVFAFPFTDENRKRDAYWRDVGTLEAYYEANMDLVGVDPQLNLYDRQWPIRSFQPQLPPPKFVFGSEGRSSRRGEALDSIVCQGAIISGGCVRRSVIGTGCRINSYAQVEDSILFDDVNVGRHSRIRRAIIDKGVQIPPETEIGYDLALDRARGLTVTDSGLVVIARGEMIASPVSTNGSHDPTSSLTS

SEQ ID NO: 11115 - protein, 184 aa, Methanosarcina mazei Go1
MHKIVFVTGNKGKFAEVRDILKNFGIEAIQNKDGYPELQEDELEPIAANGAQYVANKLNMPVMVDDSGIFINALNGFPGPYSRFVEDKLGNPKVLKLMEGEKDRSAYFKTVIGYCEPGQEPLVFPGVVEGKIAYEERGTGGFGYDPIFEYNGMTFGELGDEEKNKVSHRRRAVDNFLEWFIGGA

SEQ ID NO: 11116 - protein, 1955 aa, Ustilago maydis 521
MSFHLDSFVNSPASADQAPAWQLHSSTDSYLEWDANPKSLIEQQPSSTTTSPPPSMSRLRSTSSTVATLAPGAQTPAEPPSTDSASVLSHNGHTTSPERSVSPSYFTKLYFHPPDRTTSATSPTITFTSAIEPSLVAHAQPSPLLPTDAQSASHLPSPARESHTGRRPSISAVGSSSTTSPLTTPLSPTLSSRSSAAGGGFFASLRPSSPGNLPISTSKPQDGDNLGKPRRPSSVFDHVGNVWERFGRKVHHTRTATSEHHSSSSSHTRRSASQASPPIGLTPESADPFDTARNSPSGSFISQASPSQSTTTDSECRTPATPGGEPPAQLSTPQPLPSAPAYTSVSALDSSVNAPQQEEAEELPYLAPESPRPQPQSFNTIGSPRIPSGQRSATSHRRTSSLLERVLIQVTDDNERFSVVDISGVDSADAIKERMFAKLHLFDADHSSFQLFRTEIGQSEATGPVVSDDALLVLCLQMGDDRGTLKFLVQQIAPPPNSTVRALPPPTSTIVSQRAINNIRRTSGTGSAPGQHLRTESQSSKSSLSDALVYPEMIGADAAHEGSNRNSGSSLTRSKAQTRRALPSAPPVDDLRSPTHSCISSTTQSAVQDRRSIASSGDGSANESWARHGASASDGAPSAIPTQRSSSVNANASAAQSSSSGSAGRHPSNLEDDRQRYDAEPGVNRSLHAPATGSSHWQERSDEGARESLRVQTTAQLPGLTLHNAKSMDDLHRPSQSASQPSTLTTQAEVRKQAGMDRDGRYPTPAIMRPSTAAPAGAGARESASSHRQYSSDALGSSRSPQEPTLGLDPRMLQRNRSAQAAIPSGQQLVNHGPTRMSSTPQIRSPPMQHVYLGQGQIDPRFNTQPPHSAHPMQAHPSNMVARPPYSAAPSFASQPAYQSQSFGQAALRPMGHGFVNEFGARAPAASVNFNTYHGHDPRMNASAMQGSLTPRPYSYYEQPSMHQQQPMYRPYAQPSLVTASPYRTREDPFTTRYFPASSSRQVSEFQMQAGRLEPGMTVQQTLRTQEAIWGHTSAGSPGQAYQSAHAHPPGPSYGPRDPRQPGQSNQYTGMQAYPNASAAPQMQQRPSYQGSAMPNLHHVPPPRPQSYPSAQPQPQPPRNAHDRHPAPPAGHSGPQMMPQSSGSSAGRAPMQPQQNQQLSQPSQPSQREQPGHAQAMPGSESHRRDPPVRTNASERSSGSSFSSQGSFQHGRPHNDDCNSRNSIEESFSAPTSARSSQSEAASAKPVNVEHRSSYADQERDLADDELEHVRPLPKLPHSSATTRTDAFKSSSCDASGATVGGSVRRSEDEDTLRAGEWAQLWRALDPKSDGTVSGTAISGSSGGDGDTVRAEPSTPGASRPQTKDGATLPISLEPPRIPSPSLAPEENGTVSSFGTFDDDETESGTWAQPLDSDVNAPRLPLRLDADSEALSDDHATLLPGQDTLLQASTRGTRGFSAASNSPKRPELRLTIDPAAGPTVMTWTASQASTNSPRASTSHLSSALNSGGITRSNSFARRDDDWAFRPPPEQLYENLDDFFPKHDLDKPLLDTTAGPESGLVSSPRAEASVPSVASVGAQQGLSQRSRHKKSIRLVAEDRKRILERADTRRAAQGAELSSGLVRRRSTKLWGTKVVEMTPGQELATPASATSAESPWSDTASTTGQPVFKWVKGDLIGKGTYGRVYLALNATTGEMIAVKQVELPRTASDREDSRQKGVVAALKSEIETLKDLDHPHIVSYLGFEETRQFLSIFLEYVPGGSVGSCLRKHGKFEESTIKSFLHQILEGLAYLHSKGILHRDLKADNILVDFEGTCKISDFGTVRRSDDIYGNVENMSLQGSIFWMAPEVVSLSKKGYSAKIDIWSLGCVVLEMFAGRRPWSDDEAVQAMFKIGAQRKAPPIPADVKLTKQAAHFLKNCFEIDPAKRPTAQRLLDHVFTVPVPGWQFSHSALCRSLHR

SEQ ID NO: 11117 - protein, 182 aa, Rhodobacter capsulatus
MSQSGYVIDQMISAKAIAARVEALGAEITEAFKDTDRLVVVGLLRGSFVFIADLIREIGVPCEVDFLEASSYGNETTSTREVRVLKDLRGIIGGRDVLVVEDIIDTGHTISKVMEMLRARAPRRIECCAMLDKPSRREVDVKARWTGFEIPDEFVVGYGLDYAQNHRNLPFIGTVRFTDPQK

SEQ ID NO: 11118 - protein, 212 aa, Zea mays
GYLEAGRVSPFLTRLSLSLVAASRPHRSLHATAAPAAPGHPRPRPPLPRTPLCEPSSRTRRSAPTCSHHGSSYRSISSPAAAPSTPHQPNPQEKPAAEKRSRRDRELQSMPPPQPPTMDPKMTEVTQMFARFKTAYARNDLNTCVTLLSQLKVHLTQFPSLPALFQQTPNIVEELKLARDIYEHAVVLSVKFEDQDAFERDFCQLKPYYMDT

SEQ ID NO: 11119 - protein, 572 aa, Streptococcus agalactiae NEM316
MTYTENFQKWLDFEQLPDYLRQELLSMDEKTKEDAFYTNLEFGTAGMRGYIGAGTNRINIYVVRQATEGLAKLIETKGEEAKKRGVAIAYDSRHFSPEFAFESAQVLAQHGIKSYVFEALRPTPELSFAVRHLNAYAGIMVTASHNPAPFNGYKVYGQDGGQLPPADADALTDFIRAIENPFAVELADLDESKSAGLIQVIGEDVDIEYLREVKDVNINQDLINNFGKDMKIVYTPLHGTGEMLTRRALAQAGFESVVVVESQAKADPDFSTVKSPNPESQAAFALAEELGREVDADVLVATDPDADRLGVEIRQPDGSYKNLSGNQIGAIIAKYILEAHKTAGTLPENAALAKSIVSTELVTKIAESYGATMFNVLTGFKFIAEKIQEFEEKHNHTYMFGFEESFGYLIKPFVRDKDAIQAVLLVAEIAAYYRSRGLTLADGIDEIYKEYGYFAEKTISVTLSGVDGAAEIKKIMDKFRENGPKQFNNTDIVLLEDFQKQTATKNDGTISNLTTPPSNVLKYTLADDSWIAVRPSGTEPKIKFYIATVGNDLADAETKIANIEKEITTFVN

SEQ ID NO: 11120 - protein, 379 aa, Gossypium hirsutum
MSTAGQVIRCRAAVAWESGKPLSIEEVEVAPPQKDEVRIKILFTSLCHTDVYFWDAKGQNPLFPRILGHEAGGIVESVGEGVTDLKPGDHVLPIFTGECKECPHCLSEESNMCDLLRINTDRGEMINDGKSRFSINGKPIYHFLGTSTFSEYTVVHVGQVAKINPEAPLDKVCVLSCGMSTGFGATVNVAKPKKGQSVAIFGLGAVGLAAAEGARVSGASRIIGVDLNPSRFEQAKKFGVTEFVNPKDYNKPVQEAIVEMTGGGVDRSVECTGSIQAMISAFECVHDGWGVAVLVGVPNKDDAFKTHPVNLLNEKTVKGTFFGNYKPRSDIPAVVEKYMNKELELDKFITHTVPFSEINKAFELMLAGEGLRCVIRMDE

SEQ ID NO: 11121 - protein, 421 aa, Burkholderia fungorum LB400
MDTPARLNDLQRTTLAIVLAGGRGTRLGPLTNKRVKPAVHFGGKYRIIDFALSNCLNSGIRRIAVVTQYKAHSLLRHLQRGWSFLRGEFGEFIDLWPAQQRVEGAHWYRGTADAVFQNLDIIRSIRPKYVVVLAGDHIYKMDYTRMIADHAESGADCTVGCIEVPRMDAVAFGVMHVDENRRVTGFVEKPADPPAIPGRPDTALASMGIYVFSADYLYSLLEENISSVDTDHDFGKDILPRVVTQGTAIAHPFSMSCVSSDPNVEPYWRDVGTIDAYWAANLDLASTIPTLDLYDRSWPIWTYQEQLPPAKFVRDMKGLQGSGNNLIVCGGCVISGSQISRSVLSSNVKVSSFCNINEAVLLPQVTVGASCRLQKVVIDRGCAIPDGTVIGEDPVSDAERFYRTDDGVVLVTPEALRQMPK

SEQ ID NO: 11122 - protein, 446 aa, Zea mays
  unsure (1)..(446): unsure at all Xaa locations
MAATIQSVKARQIFGSRGNPTVEVDVFCSDGTFARAAVPSGASTGVYEALELRDGGSDYLGKGVSKAVNNVNSVIGPALIGKDPTAQTEIDNFMVQQLDGTXNEWGWCKQKLGANAILAVSLAVCKAGASIKRIPLYQHIANLAGNKQLVLPVPAFNVINGGSHAGNKLAMQEFMILPTGAASFKEAMKMGVEVYHHLKSVIKKKYGQDATNVGDEGGFAPNIQENKEGLELLKTAIEKAGYTGKVVIGMDVAASEFYSDKDQTYDLNFKEENNDGSQKISGDSLKNVYKSFVSEYPIVSIEDPFDQDDWVHYAKMTEEIGEQVQIVGDDLLVTNPTRVAKAIKEKSCNALLLKVNQIGSVTESIEAVKMSKRAGWGVMTSHRSGETEDTFIADLAVGLSTGQIKTGAPCRSERLAKYNQLLRIEEELGAIAVYAGAKFRAPVEPY

SEQ ID NO: 11123 - protein, 119 aa, Phaseolus vulgaris
NIDNFFTEDEQLAFCPAIVVPGVYYSDDKMLQTRIFSYADSQRHRLGPNYLQLPANAPKCAHHNNHHEGFMNFMHRDEEVNYFPSRYDSVRHAESFPIPPAICSGRREKCGIEKENNIK

SEQ ID NO: 11124 - protein, 379 aa, Hordeum vulgare
MATAGKVIKCKAAVAWEAGKPLTMEEVEVAPPQAMEVRVKILFTSLCHTDVYFWEAKGQIPMFPRIFGHEAGGIVESVGEGVTDVAPGDHVLPVFTGECKECPHCKSAESNMCDLLRINTDRGVMIGDGKSRFSIGGKPIYHFVGTSTFSEYTVMHVGCVAKINPEAPLDKVCVLSCGISTGLGASINVAKPPKGSTVAIFGLGAVGLAAAEGARIAGASRIIGVDLNAVRFEEARKFGCTEFVNPKDHTKPVQQVLADMTNGGVDRSVECTGNVNAMIQAFECVHDGWGVAVLVGVPHKDAEFKTHPMNFLNERTLKGTFFGNFKPRTDLPNVVEMYMKKELEVEKFITHSVPFSEINTAFDLMAKGEGIRCIIRMDN

SEQ ID NO: 11125 - protein, 272 aa, Zea mays
  unsure (1)..(272): unsure at all Xaa locations
MPSHQPTAGMMAVDPDYVKQPSSMASTSEPNRNPKYDPKKPHITDTPITKSNWYKHVNWLNVTFIIGIPLAGCIAAFWTPLKWQTALWAVIYYFWTGLGITAGYHRLWAHKSYNASLPLSVFLALVGGGAVEGSIRWWSRDHRAHHRYTDTNKDPYSVRKGLLYSHLGWMVMKQNPKRIGRTDITDLNEDPXVVVWQHKNYIKVVIFMGLIFPSAVAGLLWNDWKGGFIYAGILRIFFVQQATFCVNSLAHWLGDQPFDDRNSPRGHVITAL

SEQ ID NO: 11126 - protein, 1121 aa, Pisum sativum
  unsure (1)..(1121): unsure at all Xaa locations
SNNNNNRNIKRESLSMRKAIAQYTEDAXLHAVFEKSGDSFDYAQSIRVTAATESVPEQQITAYLAKIQRGGFIQPFGSMIAVDETSFRVLAYSENARDMLGIAPQSVPSMEDDSSSSSFFSLGVDVRSLFSASSSVLLEKAFSAREISLMNPIWIHSRSTGKPFYGILHRIDIGVVIDLEPARSEDPALSIAGAVQSQKLAVRAISQLQALPGGDVKLLCDAVVESVRELTGYDRVMVYKFHEDEHGEVVAESKRVDLEPYIGLHYPATDIPQASRFLFKQNRVRMIVDCNASPVRVFQDEALVQPVCLVGSTLRAPHGCHAQYMANMGSIASLAMAVIINGNDEDGGGIGGAARGSMRLWGLVVCHHTSARCIPFPLRYACEFLMQAFGLQLNMELQLAVQSLEKRVLKTQTLLCDMLLRDSHTGIVTQSPSIMDLVKCDGAALYYQGNYHPLGVTPTESQIRDIIDWLLAFHSDSTGLSTDSLADAGYPGAASLGDAVCGMAVAYITEKDFLFWFRSHTAKEIKWGGAKHHPEDKDDGQKMHPRSSFKAFLEVVKIRSMQWDNAEMDAIHSLQLILRDSFKEAENNDSKAVVHTHMAELELQGVDELSSVAREMVRLIETATAPIFAVDVDGRINGWNAKVSELTGLLVEEAMGKSLVHDLVYKESRETVDKLLSHALKGEEDKNVEIKMKTFGPGNQNKAVFIVVNACSSKDYTNNIVGVCFVGQDITGQKVVMDKFINIQGDYKAIVHSPNPLIPPIFASDDNTCCLEWNNAMEKLSGWSRADVIGKLLVGEVFGSFCQLKGSDAMTKFMIVLHNALGGHDTDKFPLSFLDRHGKYVHTFLTANKRVNMDGQIIGAFCFLQIVNPELQQALTVQRQQDSSSLARMKELAYICQEVKNPLSGIRFTNSLLESTCLTDEQKQLLETSVACEKQMLKIVRDIALESIEDGSLELEKQEFLLENVINAVVSQVMLLLRDRKLQLIRDIPEEIKALAVYGDQLRIQQVLADFLMNVVRYAPSPDGWVEIHVFPRIKQISEGLTLLHAEFRMVCPGEGLPPELIQDMFHNSRWVTQEGLGLSMSRKIIKLMNGEVQYVREAERCYFLVLLELPVTRRSSKAIN

SEQ ID NO: 11127 - protein, 237 aa, Lactococcus lactis subsp. cremoris
DTVGAIAKKHGIPVIVDTTFTTPVTFKPFVHGANVIVHSPTQFIGGHGTSIGGVIVDGGNFDWANGKFPDFTQADEIYNGIKFAELGEIAFVTRIRAILLRDDGAALSPFHSWLFFQGLETLSRRVERHNANTKKIVDFLDKHPKVELVNHPLLESNAYHALYQKYYPKDAGSIFTFELKDKDEKKARDLIDHLEIFSLLANVGDTKSLAIHPASTTHQQLNDEELASAGISKGTIR

SEQ ID NO: 11128 - protein, 564 aa, Bradyrhizobium japonicum USDA 110
MVWCSSASFEGYRGVAVAEVDPAAGKPVAPSALANIPRLVTAYFAGKPDVADPAQRVAFGTSGHRGTSFRNTFNEGHILATTQAICDYRKEKGLTGPLFIGIDTHALAEPALVSAVEVFAANGVDVMVDKDGGYTPTPVISHAILTYNKGRTSGLADGVVVTPSHNPPEDGGYKYNPPHGGPADTDATSVVEKRANAYLADGLKGVARMDYARAKKSATVHAYDFITPYVADLGNVVDLDLVKSAGINIGIDPLGGAAVHYWHPIIERYGLKATVVNEAIDPTFRFMTVDWDGKIRMDCSSPYAMASLIAMRDRFDVAFANDTDADRHGIVTRTGGLMNPNHYLATAISHLFAHRPNWSKDAAIGKTVVSSSIIDRVAKKLGRKLVETPVGFKWFVDGLLTGGFGFGGEESAGASFLRRDGTVWTTDKDGIILGLLAAEIMAKTGRDPSQLFGDLTAEFGVPHYARIDVAATTPQKNILKSVTPEQFGLKDLAGDPVRATLSKAPGNGQPFGGIKVETDFGWFAARPSGTEDVYKIYAESFRSTEHLKRIQEEAQAGLAKVFGV

SEQ ID NO: 11129 - protein, 354 aa, Bradyrhizobium japonicum USDA 110
MGVRPMTKPFPMNAWYAAAWDAEVKPALLPRTICGKHVVMYRKADGAVAALEDACWHRLVPLSKGRLEGDTVVCGYHGLKYNAQGRCTFMPSQETINPSACVRAYPVVERHRYIWLWMGDPALADPALVPDMHWNHDPAWAGDGKTIRVNCDYRLVLDNLMDLTHETFVHGSSIGNDAVAEAPFDVTHGEKTVTVTRWMRNIEPPPFWAKQLGKPGLVDRWQIIRFEAPCTIAIDVGVAPTGTGAPEGDRSQGVNGFVLNTITPETEKTCHYFWAFVRNYQIGEQRITTEIREGVSGIFHEDELILEAQQRAMDENPDRVFYNLNIDAGAMWTRKLIDKMVAKENAPQHLQAAE

SEQ ID NO: 11130 - protein, 373 aa, GIBBERELLA ZEAE PH-1
MGNDSSILADGSAMVAPGTSFNHTLFETALPPLPIFSLEVQPDLLSWVSDFWLNLLLPVVVYWVLSLTFHAIDVLDLFPQHRLHTPEEITKRNHVSRYEVARDVIVQQVIQVVTGALLALSEPPEMVGKGEYDVAVWATRIRIAQRALPTLLSLVGLNATAISKGLLDSHPLLAGAIAGGYYPSLVNANSEPAFASWEITLAKIIYNFMIPAIQYFIGAAIIDTWQYFLHRLMHVNKWLYAHFHSRHHRLYVPYAYGALYNHPVEGFLLDTLGAAVAFKVTRMTLRQGILFFSMSTIKTVDDHCGYAFPWDPLQLVTSNNAEYHDIHHQHYGIKTNFAQPFFTFWDTLLDTKYKGSRSNKPSEKKAKQEAKAR

SEQ ID NO: 11131 - protein, 393 aa, Synechocystis sp. PCC 6803
MVSVDRFLLTDNCSLNPRPNNITAIKIFMKALILSGGKGTRLRPLTYTGAKQLVPVANKPILWYGIEAIAKAGITDIGIIISPETGEEIKTITGNGEKFGIQITYILQSEPLGLAHAVKTAADFLQDSPFVMYLGDNLIQDHLEQFLAHFQAKSLDSLILLRRVSNPSAFGVATVNDQGKVLALVEKPEHPPSNLALVGLYFFAPTIHQAIANIEPSARGELEITDAIQYLISHDYRVESLQLKGWWLDTGKKDDLLAANQIILDTLVEKNIQGTVDDQSKISGRVTIGPHSQIINSVIRGPVAIGPNCHLENCFIGPYSSIAEGVKIRDADLEHSVVLQGASIVAIQQRIVDSVIGKNAKIFPAPRRPQALRFLIGNDSQVELIGPSSYPQD

SEQ ID NO: 11132 - protein, 406 aa, Arabidopsis thaliana
MKNGMAECSVCRSRLVSPSSKAISRAYDNYNYKIRVSSKQRALNVFLVVGDCMLVGLQPVLVYMSKVDGKFNFSPISVNFLTEIAKVIFAMVMLLFQARHQKVGEKPLLSLSTFVQAARNNMLLAVPAGLYAINNYLKFTMQLYFNPATVKMLSNLKVLVIAVLLKMIMKRRFSIIQWEALALLLIGISINQLRSLPEGATTVAVPIATGAYICTFIFVTVPSLASVYNEYALKSQYDTSIYLQNLFLYGYGAIFNFLGILGTVIYKGPGSFDILQGHSRATMFLILNNAAQGILSSFFFKYADTILKKYSSTVATIFTGIASAALFGHILTMNFLLGISIVFISMHQFFSPLSKAKDEQQNGNIELVDAKDGHRAKDSFINMAAGATEEASHRIESDDRVPLLPR

SEQ ID NO: 11133 - protein, 369 aa, Haemophilus influenzae
MTQQYAIDTLLAQAGNRSDERTGAVSAPIFLSTAYGHCGIGESTGFDYTRTKNPTRTVLEETIAKLENGDRGFAFSSGMAAIQVLMTLFTAPDEWIVSSDVYGGTYRLLDFSYKNNNSVKPVYVNTASASAIEAAINPNTKAIFIETPSNPLMEECDVVEIAKLAKKHNLMLIVDNTFLTPVLSRPLDLGADVVIHSGTKYIAGHNDALVGLIVAKGQELCDRIAYIQNGAGAVLSPFDSWLTIRGMKTLSLRMKRHQENAQAIAEFLKAQPQVESVLYPNKGGMLSFRLQDEAWVNTFLKSIKLITFAESLGGTESFITYPATQTHMDIPESERVARGITNTLLRFSVGIEDVEDIKADLLQAFANLK

SEQ ID NO: 11134 - protein, 501 aa, Hordeum vulgare subsp. vulgare
MMAMATAMAATYGAPIPAPAPSASSPRRAAPDGGRRLRAVAGRPRPLFSPRAVSDSRNSQTCLDPDASTSVLGIILGGGAGTRLYPLTKKRAKPAVPLGANYRLIDIPVSNCLNSNVSKIYVLTQFNSASLNRHLSRAYGNNIGGYKNDGFVEVLAAQQSPENPNWFQGTADAVRQYLWLFEEHNVMEFLILAGDHLYRMDYQKFIQAHRETDADITVAALPMDEERATAFGLMKIDDEGRIVEFSEKPKGEKLKAMMVVTTILGLDSERAKELPYIASMGIYVFSKDAMLRLLRDNFPSANDFGSEVIPGATEIGMRVQAYLYDGYWEDIGTIEAFYNANLGITKKPVPDFSFYDRSAPIYTQSRYLPPSRVLDADVTDSVIGEGCVINHCKINHSVVGLRSCISEGAVIEDSLLMGADYYETENDKKVLSETGGIPIGIGKNTHIKKAIIDKNARIGENVKIINVDDIQEASRESDGYFIKSGIVTVIKDALIPSGTVI

SEQ ID NO: 11135 - protein, 499 aa, Escherichia coli
MTEPHVAVLSQVQQFLDRQHGLYIDGRPGPAQSEKRLAIFDPATGQEIASTADANEADVDNAVMSAWRAFVSRRWAGRLPAERERILLRFADLVEQHSEELAQLETLEQGKSIAISRAFEVGCTLNWMRYTAGLTTKIAGKTLDLSIPLPQGARYQAWTRKEPVGVVAGIVPWNFPLMIGMWKVMPALAAGCSIVIKPSETTPLTMLRVAELASEAGIPDGVFNVVTGSGAVCGAALTSHPHVAKISFTGSTATGKGIARTAADHLTRVTLELGGKNPAIVLKDADPQWVIEGLMTGSFLNQGQVCAASSRIYIEAPLFDTLVSGFEQAVKSLQVGPGMSPVAQINPLVSRAHCDKVCSFLDDAQAQQAELIRGSNGPAGEGYYVAPTLVVNPDAKLRLTREEVFGPVVNLVRVADGEEALQLANDTEYGLTASVWTQNLSQALEYSDRLQAGTVWVNSHTLIDANLPFGGMKQSGTGRDFGPDWLDGWCETKSVCVRY

SEQ ID NO: 11136 - protein, 448 aa, Triticum aestivum
  unsure (1)..(448): unsure at all Xaa locations
GTRAHSAGYYDDETGAFNELLLISGKAMQVWVDYESDSTQISVFLAPLKNGAKPSTPLVSAKSNLSKVLVEPAYAGFSSSTGTVRSRHYLLGWSFAMDGPAPPIDIGSLPKLPFVGAKPRSKVPDIVLPIATAAFVLGVVAVVILLVRRRSRYAEVREEWEVEFGPHRFTYKDLFRATEGFKNKTLLGFGGFGRVYKGALPKSKLEVAVKKVSHESRQGIKEFVAEVVTIGRLRHRNLVQLLGYCRRKGELLLVYDYMSNGSLDKXLYSGTKWYSTQVWATMWWMAPELGHTGKASKASDVFALGAFMIEVACGRKPVXRTRDDNHLVLVDWVLDQWRAGTVTGAVDRRLGRDVGVEEASLVLTLGVLCSDPLAGAQATSRQVAQHLDGDLKLPHLPAACQSFRKVALNQEHGMHPHDMSYPLTCFSVRTLIQSPELDAWILSAVLDV

SEQ ID NO: 11137 - protein, 478 aa, Rhodopseudomonas palustris CGA009
MPAGSDWRTQPPSDYAQWNPAPRMPNQPKPLTTAHHQFAAIVQNSFDAIVSKDVEGNVQSWNPAAEQIFGWTADEMIGNSIRVLIPPDRQHEEDDILQRIRTGEMVPKFETERLHKSGRRIHVAVTVSPLRDPDGRIVGASKIAHDITETVEIRRRLVASEHQFRSLANSIPQLAWIAESDGTVFWYNDRWFDYTGTTLEQLRGSGWTALHHPDHLERVRSKLQHSWDTGEAWEDTFPLRGKDGEYRWFLSRAMPLRDDSGEVWRWFGTNTDITVQRQHEQQIQMLMGEINHRAKNMLAVVQAMVMRTADRSFAESLGARLQALSRNQDLLIKRNWSGTPIGELIESQLAAVNDLIGTRVLIEGERELLLSPVASETIGLAIHELTTNATKYGALSNADGTVRIACEIRHTVDGPKLDLIWHEQGGPPVGEPNRAGFGTVMIDRNPRSALGADVEISYPESGLRWCLNAPLDRLVATP

SEQ ID NO: 11138 - protein, 392 aa, Enterococcus faecalis V583
MDLTNRFNRQVNKIAVSLIRQFDEQVSGIEGILKLTLGEPDFNTPEHVKKAAKEAIDANFSHYTGMSGLLDVREAAAYFMKEKYHLTYQPATEILVTVGATEAISASLLAILEQGDKVLLPAPIYPGYEPIITLAGAEPVYLDTRDNDFVLTPEMIEAAMAEHGEQVKAIILNYPSNPTGVTYNRQELQAIADVLKKYDIFVISDEIYSELTYDESHVSIAEMLRDQTILINGLSKSHAMTGWRIGFIFAPAILTAEIIKVHQYLVTAAATVSQKAAVRALIEGMHDAEIMKEEYRKRRDFVYEQMTQLGFEVARPNGAFYIFAKIPTGYEQDSMKFCIDLAQKEAVALIPGISFGPEAEGYVRISYASDMDKLTTAMERIAHYMATQRVTH

SEQ ID NO: 11139 - protein, 381 aa, Zea mays
LGALHWWCARPSSVVTHSLPHIPFPPTAPLAARNNMSNRATHWCYACQRPIRLRGQDIICPNCSDGFIQEISEMGGVLNTYGLTEPDFEERQARRFGMMDAISSLMRQRLSEIGRDSLFDIHGRQGTGTEYGRRSTAIPTLVFGGIPSPAVGSSDINVVIREGRRAGAARPNFSSLVVGPSLEALFEQLLLQNNRQGPPPAPQSAIDSMPVVKINRRHLDEDPQCAVCKDKFEVGAEAREMPCKHLYHTDCIIPWLVQHNSCPVCRHPLPSQRSGSSTSSARVPSAYYNETACPPAVARADFDPVPSAYYNETATDPPAVTRADFDPAPGNYGSESQESHVPFSFLWPFGPSSSYQYEENVDEPAVYDPNQIAYSAWHYDH

SEQ ID NO: 11140 - protein, 514 aa, Escherichia coli O6
MSVSKKPMVLVILDGYGYREEQQDNAIFSAKTPVMDALWANRPHTLIDASGLEVGLPDRQMGNSEVGHVNLGAGRIVYQDLTRLDVEIKDRAFFANPVLTGAVDKAKNAGKAVHIMGLLSAGGVHSHEDHIMAMVELAAERGAEKIYLHAFLDGRDTPPRSAESSLKKFEEKFAALGKGRVASIIGRYYAMDRDNRWDRVEKAYDLLTLAQGEFQADTTVAGLQAAYARDENDEFVKATVIRAEGQPDAAMEDGDALIFMNFRADRAREITRAFVNADFDGFARKKVVNVDFVMLTEYAADIKTAVAYPPASLVNTFGEWMAKNDKTQLRISETEKYAHVTFFFNGGVEESFKGEDRILINSPKVATYDLQPEMSSAELTEKLVAAIKSGKYDTIICNYPNGDMVGHTGVMEAAVKAVEALDHCVEEVAKAVESVGGQLLITADHGNAEQMRDPATGQAHTAHTNLPVPLIYVGDKNVKAVEGGKLSDIAPTMLSLMGMEIPQEMTGKPLFIVE

SEQ ID NO: 11141 - protein, 373 aa, Hordeum vulgare subsp. vulgare
MATAGKVIKCKAAVAWEAGKPLSMEEVEDAPPQAMEVRDKILYTALCHTDVYFWEANGQTPVFPRILGHEAGGIVESVGEGVTELVPGDHVLPVFTGECKECAHCMSEESNLCDLLRINVDRGVMIDDGQSRFTIDGKPIFHFLGTSTFSEYTVIHVGCVAKIDPEAPLDKVCLLSCGISTGLGATLNVTKPKKGMTVAIFGLGAVGLAAMEGARMSGASRIIGVDLNPAKHEQAKKFGCTDFVNPKDHTKPVQEVIVEMTDGGVNRAVECTGNADAMISAFECVHDGWGVAHKEAVFKTHPMNFLNERTLRGTFFGNYKPRTGLPGVVDMYMRKELELDKFITHSLPFSQINTAFDLMLRGEGLRCVIRSEE

SEQ ID NO: 11142 - protein, 185 aa, Zea mays
  unsure (1)..(185): unsure at all Xaa locations
MASAALICGTEQWKALQAHVGAIQKTHLRDLMADADRCKAMTAEYEGIFLDYSRQQATGETMEKLLKLADAAKLKEKIEKMFKGEKINSTENRSVLHVALRAPRDAVINSDGVKCGPXFGSVKDKIKQFSETFRSGSWGWSNWKTLTNVXVSVGXIGGSFLGPLFVHTALQTDPEAAECAKGRQL

SEQ ID NO: 11143 - protein, 379 aa, Hordeum vulgare subsp. vulgare
MATAGKVIKCKAAVAWEAGKPLSIEEVEVAPPQAMEVRVKILYTALCHTDVYFWEAKGQTPVFPRILGHEAGGIVESVGEGVTELVPGDHVLPVFTGECKDCAHCKSEESNLCDLLRINVDRGVMIGDGQSRFTINGKPIFHFVGTSTFSEYTVIHVGCLAKINPEAPLDKVCVLSCGLSTGLGATLNVAKPKKGSTVAIFGLGAVGLAAMEGARMAGASRIIGVDLNPAKYEQAKKFGCTDFVNPKDHTKPVQEVLVEMTNGGVDRAVECTGHIDAMIATFECVHDGWGVAVLVGVPHKEAVFKTHPMNFLNEKTLKGTFFGNYKPRTDLPEVVEMYMRKELDLEKFITHSVPFSQINTAFDLMLKGEGLRCITRTDQ

SEQ ID NO: 11144 - protein, 190 aa, Zea mays
MAKPRSGGGGGLLDLEGHYAFYGAYHSNPVNVGIHELFVWPIFLTALMLLHLTAPSTHAAGISAAVYAAYYFLLDRRAGALAALLCYLCWAASGALSARLGFSVGWKVVLVAQLFCWIMQFIGHGVFEKRAPALLDNLVQAFLMAPFFVLLEILHTFGGYEPYPGFHDKVSKLIEEARKEWEDKKSKKSS

SEQ ID NO: 11145 - protein, 257 aa, Triticum aestivum
  unsure (1)..(257): unsure at all Xaa locations
MDPYKYRPSSSFNAPMWSTNSGAPVWNNDNSLTVGSRGPILLEDYHLVEKIADFDRERIPERVVHARGASAKGFFEVTHDVSHLTCADFLRAPGVQTPVIVRFFNVIHERGFPETLRDPRXXAIKFYTREGNWDLVGNNFPVXFIRDGMKFPDMVHALKPNPKTHIQENWRILDXXFHHPEXLPHVXTFFFDDIRXXPPDYXHNGTGFRGTTLPLCPAARQRHLRSKVPESPTLGGGQFFFGRQGGGPPQGPPDLGP

SEQ ID NO: 11146 - protein, 107 aa, Hyacinthus orientalis
GDIISDLCAGLIGGLGLTPSCNIGEGGICLAEAVHGSAPDIAGKNLANPTALLLSSVMMLRHLQLNDKADRIQNAILKTIAEGKYRTGDLGGTSTTSEFTEALCDNL

SEQ ID NO: 11147 - protein, 483 aa, Bacillus subtilis
MSSNKLTTSWGAPVGDNQNSMTAGSRGPTLIQDVHLLEKLAHFNRERVPERVVHAKGAGAHGYFEVTNDVTKYTKAAFLSEVGKRTPLFIRFSTVAGELGSADTVRDPRGFAVKFYTEEGNYDIVGNNTPVFFIRDAIKFPDFIHTQKRDPKTHLKNPTAVWDFWSLSPESLHQVTILMSDRGIPATLRHMHGFGSHTFKWTNAEPEGVWIKYHFKTEQGVKNLDVNTAAKIAGENPDYHTEDLFNAIENGDYPAWKLYVQIMPLEDANTYRFDPFDVTKVWSQKDYPLIEVGRMVLDRNPENYFAEVEQATFSPGTLVPGIDVSPDKMLQGRLFAYHDAHRYRVGANHQALPINRARNKVNNYQRDGQMRFDDNGGGSVYYEPNSFGGPKESPEDKQAAYPVQGIADSVSYDHYDHYTQAGDLYRLMSEDERTRLVENIVNAMKPVEKEEIKLRQIEHFYKADPEYGKRVAEGLGLPIKKDS

SEQ ID NO: 11148 - protein, 261 aa, Helicosporidium sp. ex Simulium jonesii
IGERAGNGRPAVMELGGKSAMLVFEDADIDRAVEWAMFGVFWTNGQICSSTSRCLVHERIAPQFYQALRTRARSINVCDPMRGDCRMGPLINEQQHKKVLGFIEQARQEGCTLLTGGGRPRVGGSGDFVPGYFVEPTVFTDVRPDHSLWRNEVFGPVLACATFCTEEEAVQLANASEYALAAAVISQDLDRCRRVQERLHVGICWINCSQPCFCQAPWGGNRNSGFGRELGVWGLENFCSVKQVTRYVKDSIWDWYPKPKM

SEQ ID NO: 11149 - protein, 625 aa, Mesorhizobium sp. BNC1
MASAIAHRGPDERGTAVLDGAGLCHTRLSIVGLADGQQPMSLDGGRLTIAFNGEIFNYVELREALIARGRTFRTASDTEVILHLYDEKGPDCLADLNGDFAFAIWDAPRRRMFLARDRMGVRPLFYTSVGDRLFFASEVKTLLQVPGVEAEMDPFALDQMFTLWAPIAPRTAFKNIHELEPGHMMLVEEGRQAIRPYWSLSFPEHGAPSRHTDERAVAEELRALLTDATRLRMRADVPVGSYLSGGLDSSVISALAAGMTPEILRTFSVAFESAEHDESAFQNEVAAALGTMHASVNCGDGDIAAVFPDVIRFTERPILRTAPAPLFKLSALVRERGLKVVLTGEGADEVFAGYDIFKEARVRRFCARQPGSRMRPHLFRKLYPYLPGLKQQSAEYLAAFFGAGADSLDDPLFSHKPRMRATGAAKLFFSAQLRETLAGYDAAEELASRLPQEFPRWHPLHQAQYLESRFLLPGYILSSQGDRMAMAHGIEGRFPFLDHRLVEFATTLPPEMKLKGLVEKHILREATKGLLPESILRRTKQPYRAPDSASFRGAGEKDYVREAMSAEKLADCGLFNPASVSKLFAKSRQQPLSGFRDNAAFVGILSSQLWLETFTGSRIRAVEAA

SEQ ID NO: 11150 - protein, 237 aa, Lycopersicon esculentum
IANMADQSNGAGASGTLAFDAEYSRWLEEHNKHINELRTAVNSHASDPELRSIVNNVTAHYDEVFRVKGNAAKADVFHVLSGMWKTPAERCFMWIGGFRPSELLKLLVNQLEPLTEQQLAGIYNLQQSSHQAEDALSQGMEALQQSLAETLANGSPATEGSSGDVANYMGQMAMAMGKLGTLEGFLRQADNLRQQTLQQMHRILTTRQSARALLAISEYFSRLRALSSLWLARPREQ

SEQ ID NO: 11151 - protein, 299 aa, Streptococcus agalactiae NEM316
MKVRKAVIPAAGLGTRFLPATKALAKEMLPIVDKPTIQFIVEEALKSGIEDILVVTGKSKRSIEDHFDSNFELEYNLKEKGKNELLKLVDETTGIRLHFIRQSHPRGLGDAVLQAKAFVGNEPFVVMLGDDLMDITNNKVIPLTKQLINDFEATHASTIAVMEVPHEDVSAYGVIAPQGEGVNGLYSVNTFVEKPSPEEAPSNLAIIGRYLLTPEIFNILETQKPGAGNEIQLTDAIDTLNKTQRVFARKFTGDRYDVGDKFGFMKTSIDYALQHPQVKDDLKKYIIDLGKSLEKTSKK

SEQ ID NO: 11152 - protein, 152 aa, Synechocystis sp. PCC 6803
MLFQRFLDYGQPKGWTAQTLANVDPELLRELGISRYKTRYLKTWAIALQNNFPSLPELETWGDRAIVEQLTAIKGIGPWTAQLFLLFRLRRQDILPNQDLGIRIAIQKLYQLPDRPNPKQVSEYGKNWQPYRSLASWYLWRSLSATVSQIHL

SEQ ID NO: 11153 - protein, 257 aa, Bacillus anthracis str. Ames 0581
MTKIFILASTLSLSFFSGLNIGNAATENFSPITNAIVQNNDYFVEGNSKDNNKPPGNGGSQDDSGSDGNGSDGSGSGDNGSGDNGSGGNGSGGNGSGENGSGGNGSGSSGSGDNGSGGNGSGGNGSGSSGSGENGSGGNGSGSSGSGENGSGGNGSGSSGSGENGSGGNGSGGNGSGGNSSGGSGSGGSGSQGGNRVKGDSSSQGGNGSQGGNVKDNAKKQGDKLPNTATHYPASILMGLSTFLIGMLLFIRRKNAK

SEQ ID NO: 11154 - protein, 106 aa, Glycine max
  unsure (1)..(106): unsure at all Xaa locations
ISSPTITRCXHSQAGMRTPFTVLKYMASFPTIKTNNDITSITTNGGRVQPMHVMTPLLMNKFKTTXYLPNLDDAQLAKEVXYLLKKVCIPCLEFELDHRFLFLEPN

SEQ ID NO: 11155 - protein, 920 aa, Oryza sativa
MLNSSAASTRSCPNHRIRSRSGLMLSPPPRRDGRNGGVFCSVEGGGMAGEGGDKIMVGKLGKELCMRDTELRAMHTLEEHISSTGVDGLAPLDMAGASCLVMCVLGLQLENMVLCGKLDFAVPSFGSRTSSPAGDSKGLRRESCEGCGRRRSSISSTGADGLAPLDMAGASCLVMCVLGLQLENMVLCGKLDFAVPSFDRYFVNHPSYYSLLIRWLMFILHHRSVIGGAGLTLGKSEPSDLMDAPIVPVLDEAPTGREGQNPSSQIPLSRSYFSPATSEQNNSEGSDGSPPKYNRKCETASYSLQAEMYLVLQCQDALNNGPICPTTQISQRWKTKLVNHIRITNHRSIASHGSRAQRPAIGESGGPPCGMLKFIPETEQTRGPGAARAGYKFSSRISAAHSITLPTHTHPSTVSISVVILAASPLVPPPGATMCGILAVLGAADWLKHRGPDWSGLYQCEGNFLAQQRLAIVSPLSGDQPLYNADRTIVVVFVTCDKSCHVYLVCCLLNLLCWVGIELKANGEIYNHKKIRKQFASKHTFSTGSDCEVIIPLYEEYGEDFVDMLDGVFAFVLYDTRTKTYMAARDAIGVNPLYIGRGSDGAVWISSEMKALNEDCVEFEIFPPGHLYSSAAGGLRRWYKPQWFAENVPATPYQPLLLREAFEKAVIKRLMTDVPFGVLLSGGLDSSLVAAVTKRHLIKTEAAEKFGAELHSFVVGLEGSPDLIAAREVADHLGTIHHEFHFTVQDGIDAIEEVIYHDETYDYNADLGRIEKWVMRKAFDDEEHPYLPKVSDEMMKNAAKVYPHNTPVNKEAYYYRMIFERLFPQESARETVPWGPSIACSTPAAIEWVEQWKASHDPSGRLIASHNSASASANHTNHANANANGNSNGKANGNCAMAANGTNGVGLVVANGTANGKMEA

SEQ ID NO: 11156 - protein, 140 aa, Triticum aestivum
MAPTVMASSATSVAPFQGLKSTAGLPVSRRSNGASLGSVSNGGRIRCMQVWPIEGIKKFETLSYLPPLSTEALLKQVDYLIRSKWVPCLEFSKVGFIFREHNASPGYYDGRYWTMWKLPMFGCTDATQVINEVEESRRST

SEQ ID NO: 11157 - protein, 312 aa, Haemophilus somnus 129PT
MKKFAMVFPGQGSQAVGMLAELAAEYPIVEETFQQASSVLGYDLWQLVQQGPAEELNKTWQTQPALLAASVAIYRVWQQKYPHLKPEVMAGHSLGEYSALVCAGVIDFQDGIKLVQLRGKLMQQAVPEGTGAMYAIIGLDNESIVQACKASEQGEIVSAVNFNSPGQVVIAGAKVAVERAAVACKEAGAKRALPLAVSVPSHCALMKPAAEELAVALEKMTFSIPQIPVINNVDVKAENETTKIRTALVRQLYSPVRWTEIVENMAREGIELLFEMGPNKVLTGLTSRIVKELNAKAVNDLSSLNTVEESLD

SEQ ID NO: 11158 - protein, 145 aa, Neurospora crassa
MLNTRQRSTVERLDRPSAYFFNKVYELFSKCGEIKRLVMGLDRLQKTPCGFCFVEYYTHQDALDCMKYIGGTKLDERIIRTDLDPGFEEGRQYGRGKSGGQVRDEYREDYDEGRGGLGRQIQAERMREHDHKRYDDNDEQYGRLR

SEQ ID NO: 11159 - protein, 299 aa, Zea mays
  unsure (1)..(299): unsure at all Xaa locations
GITSPHAKKLAKFYRXDLAKITGGGRDGLITPXDLDPAAGIKPKSEPTPADAAAPPPVAAPSVGAVPQAAVLPPVPSATVVPFTTMQAAVSKNMVESLAVPAFRVGYPIVTDKLGELYEKGKPKGVTMTVLLAKAAAMALAQHPVVNSTCRDGKSFTYNSNINIAVAVAIDGGLITPVLQDADKLDIYLLSQNWKDLVKKARAKQLQPNDYNSGTFTLSNLGMFGVDRFDAILPPGQGAIMAVGASKPTVVADKDGFFSVKSKMLVNVTADHRIVYGADLAAFLQTFAKIIEDPESLTL

SEQ ID NO: 11160 - protein, 357 aa, Helicosporidium sp. ex Simulium jonesii
IGAGVGGHGAALHAVENGLKVAIVEGGDIGGTCVNRGCVPSKALLAAAGNLRKLKDDHLNKMLGLQIPGAVSYDRTALAAHATNLASTIRGHLTRSLESLGVTTLKGNARFEEAHRLRYGLPGRVDVGGEVTFKHAIIATGSTPFVPPGVELDGQTVFTSDHALRLEWVPDWLAIVGSGYIGLEFSDVYTALGSEVTFVETLPELAPGFDADIARLARRLLISPRRVEGHTGVLAARVKPGVRGVRPVIIELVDAASKEPREVLEVDACLIATGRVPFTKGLNLSALGVEVDRRGFVPVDTHMRVLAAAGGGGGGGNGAPDTTKNGAHHACHHRALPHVFCIGDANGKYMLAHAASA

SEQ ID NO: 11161 - protein, 206 aa, Brassica rapa
MSNEYDYLFKLLLIGDSSVGKSCLLLRFADDAYIDSYISTIGVDFKIRTIEQDGKTIKLQIWDTAGQERFRTITSSYYRGAHGIIIVYDCTEMESFNNVKQWLSEIDRYANDSVCKLLIGNKNDMVESKVVSTETGKALADELGIPFLETSAKDSTNVEQAFLTIAGEIKKKMGSHTNANKTSGSGTVQMKGQPIQQNNGGGCCGQ

SEQ ID NO: 11162 - protein, 251 aa, Magnaporthe grisea 70-15
MSRRYDSRTTIFSPEGRLYQVEYALEAISHAGTAIGILAKDGIVLAAERKVTSKLLEQDTSAEKLYILNDNMICAVAGMTADANILINFARQNAQRYLLTYNEDIPCEQLVRRLCDLKQGYTQHGGLRPFGVSFIYAGWDPQRQFQLYLSNPSGNYGGWKATSVGANNASAQSLLKQDYKEDCSLKEACGMAVKVLSKTMDSTKLSSEKIEFATVGQTKDGKVYHRLWSADEITALLKEHDLAKDDSTDDK

SEQ ID NO: 11163 - protein, 384 aa, Zea mays
MLAARSFASPARQCLRQANRSRWAPALSQVSARTYASEVAKFHGTKGSDGKYCVTLIEGDGIGPEIAQSVKDIYSAANVPIKWESVDVTPRLNEEGKTVISDESIASVKKNLVALKGPLATPIGKGHVSLNLTLRRTFNLFANVRPCRSIAGYKTPYDDVDTVLIRENTEGEYSGIEHIVVDGVVQSIKLITREASERVLRYAFQHARDIGRKKVRAVHKATIMKMSDGLFLSTAREIAKDFPDIEFDAELLDNTCLKMVTDPVPYNDKVLVMPNLYGDILSDMCAGLIGGLGLTPSGNIGDNCSIFEAVHGSAPDIAGKQLANPTALLLSSIMMLRHMGLNSEAANIEQAIFKVLAEGKTITGDLGGKAKTFEYADAVIKALK

SEQ ID NO: 11164 - protein, 450 aa, Synechocystis sp. WH 8501
MSYDFDLFVIGGGSGGIATARRAAEYGAKVGLAEYNRLGGTCVNVGCVPKKLMVYTSHFSAQFQESQGYGWSPVKSTLDWSKMITAVNEETQRLNGIYLRMLDNSKVKLYRDYAKLLDPHTIEVGNSKITADKILIAVGGHPVRPDIPGIENTIISDQMFTLAEQPKRMVIWGGGYIGVEFACIMRGLGSDVIQVIRRDKILRGFDEDIRSTIQESMENHGIKILKNCTITAIEKTSQGLKIAVQGDQNNEMVLVDTIGLAATGRKPSLDNLGIENTAVEVNNGAIAVDQYGCTAQDNIYAVGDCTDRINLTPVAINEGRAFADTHFGGKSRVMSYENVPSAVFSTPEAATVGLTEEEAKQQYGEDAIKVYRSKFRPMYYVLPGKEEKTLMKLIVHQESEKVLGAHMVGDYAAEIIQGVAIAVKMGAKKSDFDATVGIHPTSAEEFVTMR

SEQ ID NO: 11165 - protein, 436 aa, Cunninghamella elegans [sequence omitted]

SEQ ID NO: 11166 - protein, 219 aa, Oryza sativa
MASSSSLRSTSCLASAAETDADNLCLRLGPPGSSITTTTTTGGADPAAKRSLGAKRSLESTDSMASGTGTSAAGDEHDDDTAAPAKAQVVGWPPVRAYRRNTFHQAAAAAAATKKGGDEKQKQQQQGGGLYVKVSMDGAPYLRKVDLKMCKGYRELREALDLLFTKCFSATASDGCSDGQFAIAYEDKDGDLMLVGDVPWEMFISSCKKLRIMKGSEAR

SEQ ID NO: 11167 - protein, 228 aa, Arabidopsis thaliana
MNLKETELCLGLPGGTETVESPAKSGVGNKRGFSETVDLKLNLQSNKQGHVDLNTNGAPKEKTFLKDPSKPPAKAQVVGWPPVRNYRKNVMANQKSGEAEEAMSSGGGTVAFVKVSMDGAPYLRKVDLKMYTSYKDLSDALAKMFSSFTMGSYGAQGMIDFMNESKVMDLLNSSEYVPSYEDKDGDWMLVGDVPWPMFVESCKRLRIMKGSEAIGLAPRAMEKFKNRS

SEQ ID NO: 11168 - protein, 128 aa, Oryza sativa
  unsure (1)..(128): unsure at all Xaa locations
LAYKRAHHNNHYDGAINNMHRDEEERYYPXSHAPLRHAPPTPITPRPEVGRRQKATIHKQNEHSQXGERHRSRAPDRQGRKKRRFAGELAHPKVSARDCSTYRVNYLSQSDELVKAKTEARDAVKPSM

SEQ ID NO: 11169 - protein, 391 aa, Shewanella oneidensis MR-1
MAIINMSDLDLQGKRVLIREDLNVPVSNGVVTSDARLRASLPTIELALAKGAAVMVMSHLGRPTEGEYNSEFSMQPVVDYLAKALSCPVRLATDYLDGVEVAVGEVVVFENVRFNKGEKKNDEALSKKMAALCDVYVMDAFGTAHRAEASTNGVGLYAPIACAGPLLAQELDALGKALDNPARPLVAIVGGSKVSTKLTVLESLSGIVDQLVVGGGIANTFIAAAGHNVGKSLYEADLIDEAKRLVANAQSRGGDIPVPTDVVVAGEFSPTAAATLKAVSDVGDSDMIFDIGPDSAEALAKIIESAGTIVWNGPVGVFEFDQFGEGTKRIAHAIADSKAFSIAGGGDTLAAVDKYGIADKVSYISTGGGAFLEFLEGKELPAVAMLKKRGA

SEQ ID NO: 11170 - protein, 201 aa, Cicer arietinum
AILITLAVNDRIIMPLWKKMKGKPGFTNLQRIAIGLLLSTFGMAAASLCEVKRLSVAKSVKGNQATIPISVFLLIPQFFLVGSGEAFIYTGQLDFFITQSPKGMKTMSTGLFLTTLSLGFFISSFLVSVVKKVTGTRDGQGWLADNINKGRLDLFFALLTILSFINFVAFLVCAFWYKPKKAKPSMQMGAINNGSSVEEKC

SEQ ID NO: 11171 - protein, 467 aa, Trichodesmium erythraeum IMS101
MAKADKINYSCPSGFPEFLPGEKRLESYLMDTIRQVFERYGFTPIETPAVERLEVLQAKGNQGDNIVYGLSPILPPNRQAEKDQAGDSGSEERGLKFDQTVPLAAYIARHLNALNFPFARYQMDVVFRGERAKDGRFRQFRQCDIDVVGRGKLSLLYDAQIPAIIAEIFEAIKIGDFLIRINNRKVLTGFFASVGVLVENIVSCIRIVDTVEKVGEVKVKKALKEIGLSEDQVEKVWDFTNIKGTVDDVLDKLKSMTKTVENSEVLSQGIYELETVISGVRNLGVSDQRFCIDLSIARGLDYYTGTVYETTLIGHEALGSICSGGRYEELVGTFIGEKMPGVGISIGLTRLMSRLLKAGILESFAPTPATVMVVNMQESLMATYLDVSQKLRRSGMNVITSFDGRGVGKQLQQADKQKIPFCIIIGSEEAAANMCSLKDLRTGEQMKVPIGSLADVLKQRLSNIISG

SEQ ID NO: 11172 - protein, 119 aa, Schedonorus arundinaceus
GGVGHMGVKVAKSMGHHVTVISSSNKKRAEAMDDLGADAYLVSSDEAQMAAAMDSLDYIIDTVPVKHPLEPYLALLKMDGKLVLMGVIAEPLSFVSPMVMLGRKTITGSFIGSIEETQE

SEQ ID NO: 11173 - protein, 295 aa, Bacteroides thetaiotaomicron VPI-5482
MKAFVFPGQGAQFVGMGKDLYENSALAKELFEKANDILGYRITDIMFNGTDEDLRQTKVTQPAVFLHSVISALCMGDDFKPEMTAGHSLGEFSALVAAGALSFEDGLKLVYARAMAMQKACEATPSTMAAIIALPDEKVEEICASVNAEGEVCVPANYNCPGQIVISGSVPGIEKACELMKAAGAKRALPLKVGGAFHSPLMDPAKVELEAAINATEIHTPKCPVYQNVDALPHTDPAEIKKNLVAQLTASVRWTQSVKNMVADGATDFTECGPGAVLQGLIKKIDGTVSAHGIA

SEQ ID NO: 11174 - protein, 69 aa, Zea mays
MKLKGCFTNRCFQLSYEVEEHPEWEIKNGAVFFQKAKESQPCKEIPSLQLINQTLSYARELERLSLSGI

SEQ ID NO: 11175 - protein, 397 aa, Bordetella bronchiseptica RB50
MSNVNTLSALAKSGALSGKRVFIRADLNVPFDDAGRISEDTRIRASVPGIRLALDAGAAVMVTSHLGRPKEGALTEADSLAPVAQRLSELLGMQVRLVPDWVDGVSVEPGEVVLLENCRGNVGEKKDDEGLSRKMAALCDVYVNDAFGTAHRAEATTHGIARFAPVACAGPLLEAELEALGRALHDPKRSLVAIVGGSKVSTKLSILQSLADKVDQLVVGGGIANTFMLAAGLPIGKSLAEPEQVEQARAVIEIMKRRGAEVPIPTDVVCAKSFGADAAATVKAAADVAEDDMILDIGPQTAQRLADILKAAGTIVWNGPVGVFEFDQFAHGTEVVARAIADSAGFSIAGGGDTLAAIAKYGIADQTGYISTGGGAFLEFLEGKALPAVAVLQARAA

SEQ ID NO: 11176 - protein, 320 aa, Enterococcus faecalis V583
MKRIGILTSGGDAPGMNAAIRAVVRKSIFDGIEVYGINYGFAGLVAGDIRRLDVADVGDKIQRGGTFLYSARYPEFATEEGQLKGIEQLKKFGIEGLVVIGGDGSYHGAMALTKRGFPAVGIPGTIDNDIPGTDFTIGFDTAINTVLESIDRIRDTATSHVRTFVIEVMGRNAGDIALWSGVAGGADEIIIPEHDFDMKNVAKRIQEGRDRGKKHCLIILAEGVMGGNEFADKLSEYGDFHTRVSILGHVVRGGSPSARDRVLASKFGSYAVELLKEGKGGLCIGMLDNQVVAADIIDTLENNKHKPDLSLYELNHEISF

SEQ ID NO: 11177 - protein, 532 aa, Oryza sativa
MLVACGLAQRGGELRAGPSHAAATSCRRLELRHRHCHVIPVPLPPPVSSGRSEAEAFSFRTAASLSLFLNFGRCRPSSSAAFPSFRSSMTRHESASISSCRRHHSQILPKRCLRRMPPCQSAPTTRWSAAVTLERENKEEEEEYDKWGKGIVILIISGNNNNNQAMYLEQDEDFSQMIMELCDFDASSTTQARHGGEAAAAAAGNARAVLTYLTFLEQKIGHLRGIISSTPNPPPQIVAAELSCIVVQLVSISKNLAAARRGGDDADADAKHDGSSDADEGADGDGERAPPRGSYEVVQIEKEEILAPHVHFCGVCGKGFKRDANLRMHMRGHGEEYKSAAALAKPGGSPSRSPAAADAAARRRFYSCPYVGCKRNREHKSFQPLKTPTCVKNHYRRSHCDKSFTCRRCNVKRFSVVADLRTHEKHCGRDRWVCSCGTSFSRKDKLFAHVAIFDGHSPALPPEDYDDDAASGQLPHAAGEAVGRTVDTNRFFSDGLMIKGSMEDERGSLSPMGLDYCEFDGIDLFAAAAFDF

SEQ ID NO: 11178 - protein, 475 aa, Glycine max
MAVSLAMRLVRRRSPPLLWRRSFSMSAVDAEKEVVVVPELPPFDYSPPPYVGPTAEEILAKRREYLSPSILHSYKNPVNIVEGKKQYLFDEKGRRYVDAFGGIATVCCGHCHHDVVEAIVNQTKKLQHSTVLYLNHVITDFAQALASKLPSDLKVVFFTNSGTEANELAMLIARLYTGCHDIISLRNAYHGNATGTMAATAQSIWKFNVVQSGVHHAVNPDPYRGIFGSDGEKYARDVQDIINFGTSGNVAAFISEAIQGVGGIIELAPGYLPVVYNTIKKAGGLFIADEVQAGFGRTGSHFWGFEAHNVVPDIVTIAKGIGNGIPLGAVVTTPEIAEVLTRRSYFNTFGGNPVCTAAGLAVLKVIEKEQLQQNAFVVGSHLKERLTALKDKYELIGDVRGRGLMLGVELVTDRELKTPAKNETLHVMDQMKELGVLIGKGGYYGNVFRITPPLCFTKEDADFVADAMDLTLSRM

SEQ ID NO: 11179 - protein, 123 aa, Triticum aestivum
  unsure (1)..(123): unsure at all Xaa locations
MAPTVMASSATSVAPFQGLKSTAGLPVSRRSNGASLGSVSNGGRIRCMQVWPIEGIKKFETLSYLPPLNTEALLKQVDYLIRSKWVPCLEFNKVGFTSVKHNASPGYXXAGYXTMWETAXFSG

SEQ ID NO: 11180 - protein, 548 aa, Candidatus Blochmannia floridanus
MQNNLFQVKKSIINETKLIDQYYNLSPDPYNNKEHKVFFGTSGHRGSSYQYSFNEAHVFAISQSIVQIRTLYGITGPCYVAKDTHTLSEPAFISVLEVLTANSINVIIEKNDLYTPTPVISNAIINYNRHRYHNNQSKADGIIVTSSHNPPEDGGIKYSSIFGGPAEIDITYLIEKYANRFLLNNLRTVNKITLNHAWRSGYIHPQDLVQNYVQNLSTIINMKAIQKSGLKIGVDPLSGSSINCWYDIAQYYQLNLTVINSKIDRTFSFMNIDYDGRIRINCTSELTLSKVLSSSKKFDLFFINDPDCDRHGIITKGGLIQSNYYFPIVINYLFHNRDFWKKKILSVGKTNVSSMSIDQVANNLNCQLLTTPVGFKWFTQGLLHSKLGFAGEDSSGASFLDQRCMPWSTDKDGFIMCLISAEILAVTDHTLQDHHIQFNKNLNCTFNYNQTYLVINHSQKKSIINTLFNQIHMNELVGDPIIKVENIKPLNKFISMDGLKIVTRNGWIAGRLSGTELVYKIYCESFLSSDHRLKMEQKMIRCIYQIIN

SEQ ID NO: 11181 - protein, 492 aa, Xylella fastidiosa 9a5c
MHSNSCHLSDMKNGFFAMLKSLFYTLCILIALALLAGGNAIGRAEAQVQTNPLPSEQVTTELLMSEAAPSDAAAIPKTTPTPVVDKGDVAWMLTSTLLVLLMVLPGLALFYGGMLRSKNVLSIMVQIGVVFSLIAILWVLYGYSLAFADGDMFIGTFNKAFLYGVDTATLADTFSKGFKLPEYLYVAFQLTFAGITGVLIVGAFAERVKFAAVLLFIFIWFSFGYLPLAHMVWSTPGFLLSKGALDFAGGTVVHINAGIAGLVGAYFVGKRFGFGQVAVKPHNVPMTFTGAALLWVGWFGFNAGSALEANSIAALAFINTMLATAAAILVWSLLEKMTKGKFSALGVASGMIAGLVGITPAAGTVGPFGAIAIGAVAAVCCIWGITGLKRLLKVDDTLDVFGVHGIGGIVGAILTGVFTDKALGGQGYAEGMTMSNQVMIQAMGVGISIVWIGIVSLVGFLIVKLLFGLRVSEEAEREGLDITSHGESAYES

SEQ ID NO: 11182 - protein, 291 aa, Pisum sativum
MSVTSTTPLFKSLTIAALFHNKTKPTSFSLPSKPFKFHISLNSSPSLTLSLKTNRATPLFAAQEGETLTTEEGVVETEGLIDWEPEAAENETGGEDYAGGDFAEPSEDAKLFVGNLPYDVDSEKLAMLFEPAGTVEIAEVIYNRETDQSRGFGFVTMSTVEEAEAGAAKFNRYDYNGRPLTVNKAAPRGSRPEREERPPRTFEPVLRVYVGNLSWELDDSRLEQVFSEHGKVVSARVVYDRETGRSRGFGFVTMSDEKEMNDAIAALDGQILEGRTIKVSVAEDRPRRGSF

SEQ ID NO: 11183 - protein, 622 aa, Arabidopsis thaliana
MGAEEFPSVPFNSNAMDNAEYTDTDLVFAVRKALASVQNGDTDDYSQLKTVMCLTEDADFDAVAQLETVLKSLSVSVAWIDLVHHKDLLEAMSLWYHSHRPSVMDALVDLIISLRITFCVFVVSHHEAATSGKYLDPCLNMLVRNFSQPTFKHKVSQTQLVKKMQEVHPRVHAALHKISYLIPLAPWNLVSILAQNMRKIDKKDPSIVTYVDNLLRLENSSIGEVVGSVILMMVMERMLDLDLVSGCDDSNGGMFDMELEDAVESTMNEGDEFPVGALKQNTSGGNVVSELLDKLMVLFFHHLESCQNSDRLDEVWHQMVFEILFKSFENYILNTYKTKFSQFLMFYACSLDPENCGVRFASKLLDIYLSSNTCRLTRMSAVAYLASYLSRGKFLPASFVASMLKRLVDECAEYCGTCNDDVKPEAHQVFYSGCQAILYVLCFRMRSIVEIPRFQSQFRSLESILSHKLNPLLVCLPSVVSEFLKQAKAGGLFIVSESFIFDDLHESELSRAFGGFERLDTFFPFDPCLLKMSSSYISPNFNFWSMVKTTYGEDGDEELCDEVIVNGDADSAEEPDDDVELDSEMNTMSTTPKHSFMRETERLLKMPSRIRPSTSPPESFLI

SEQ ID NO: 11184 - protein, 1244 aa, Nostoc sp. GSV224
MINSLNTNDFNNSEIAIISLAGRFPKAKDIDSFWQNLYDGVESISRLTDEELITSGVSLDLLNNPNYVKASAVLSDIELFDANFFAYSAKEAELIDPQQRLFLELAWEAIEKAGYDPHTYNGLIGVYAGVGMNRYLVNNLYPHHQLLETVDPLQLTISNDKDFLPTRVAYKLNLTGTAVNVQTACSTSLVAVHLACQSLLNYECDMALAGGVTLSIPQKIGYLHQEGMILSPDGHCRAFDAKAQGTIASSGAGIVVLKRLKDAIADRDHIHAIIKGSAINNDGAMKVGFTAPSVSGQAAVIAEAQAIAGVDAETISYIEAHGTATPLGDPIEIAALTQAFSQTTDKKGFCAIGSLKTNLGHLDTAAGVAGLIKTVLALQNKMLPPSLHFETPNPKIDFANSPFYVNTTLTEWRTNTTPRRAGVSSFGIGGTNAHVILEEAPMFEQGSRGAGEQGRNYQLLVLSAKTASALEKATANLITHLKEHPELDLGDVAYTLNSGRRGFNYRRMLICQDLEDAVKTLSSLEAQQVFSNYTEITERSVVFMFPGQGSQYVNMAREIYQTETVFKEQVDYCSEVLKPLLGIDLRHILYPSEEKIDEASKQLQQTAVAQPAIFVIEYALPKLWQSYGVQPQAAIGHSIGEYVAATLAEVFSLEDALSLVAARGQMMQQLPTGAMLSIPLPADKIKSLLGPELSVAAINQPSQCVVSGSTAAIDTLQNQLAAQGIECRQLHTSHAFHSQMMEPILKAFVERVKKVTLNPPKLPYISNLTGNWITVTQATNPDYYAQHLRSTVLFAQGVEKLLATPEQVLLEVGPGNTLTTLVKRHPDKAATQTVLTSVRHPQEKQSDNHVLFTTLGQLWLAGVNIDWFGFYSHQEHYRLPLPTYPFERQRYWIDPPQKTAWGQLQALPTPSQLWTSLVQGSQNQANTRNVEFNELTYQENRQWLDRLCTAYINSAFRQLGAFSNAEEKYSLENLLAQCHISPRYQQLFSRWLQILVEQGQLQEHEGLFTGLLPCSQDYINEHLEEVRVRFATLSLVDLDLVQRCGENLAAIVVEQEPLEIFNELVYPKENNGSYSESPLNTYYNSILHSSLGQVVKLLPLPQASASAAFSIKSRLEQNNQKSEISLQRKPDIFQPEKLSALHSRPDLPNSYLAPRNEIEQRLADIWEELLGIKQVGIHDNFFKLGGDSLIAVQVLSRIRNIFSIRLSVANLFESPTIAEIAPKLEKQIDPDTSFGASEREEITI

SEQ ID NO: 11185 - protein, 507 aa, Zymomonas mobilis
MARIANKAAIDAAWKQVSACSEKTLKQLFEEDSNRLSGLVVETAKLRFDFSKNHLDSQKLTAFKKLLEACDFDARRKALFAGEKINITEDRAVEHMAERGQGAPASVARAKEYHARMRTLIEAIDAGAFGEVKHLLHIGIGGSALGPKLLIDALTRESGRYDVAVVSNVDGQALEEVFKKFNPHKTLIAVASKTFTTAETMLNAESAMEWMKKHGVEDPQGRMIALTANPAKASEMGIDDTRILPFAESIGGRYSLWSSIGFPAALALGWEGFQQLLEGGAAMDRHFLEAAPEKNAPILAAFADQYYSAVRGAQTHGIFAYDERLQLLPFYLQQLEMESNGKRVDLDGNLIDHPSAFITWGGVGTDAQHAVFQLLHQGTRLVPIEFIAAIKADDTLNPVHHKTLLTNAFAQGAALMSGRDNKDPARSYPGDRPSTTILMEELRPAQLGALIAFYEHRTFTNGVLLGINSFDQFGVELGKEMAHAIADHPENSDFDPSTKALIAAALK

SEQ ID NO: 11186 - protein, 566 aa, Cladosporium fulvum
MAPSATAHSADGRTTGDIHRDYNDDRNASAEDTVYCTSNGVPIAHPYEAQRVGDNGPLLLQDFHLVDLLSHFDRERIPERVVHAKGGGAHGYYQTTDPLDDLCLADIFQAGKKCPISVRFSTVGGESGSHDCARDPRGFSVKFRTEEGNWDMVANNTPVFFLRDPAKFPHFIHTQKRDPQSHLTHADDSTMFWDYLSQNPESVHQVMILMGDRGIPDGWRKMHGYAGHTLKLVNKKGDWVYAQMHMKSKQGTDFITQEDSANYSPDYAQKDLYQAIEKGDYPGWDVEFQTMTPKEAEDLWETQKINVFDLTHVWPQKQFPRRKVGEFFLNENVKNYFAEIEQIAFNPAHMPPGIEPSADPVLQSRLFSYPDTHRHRIGVNYQQLPVNAPRVPYRIANFQRDGAMAYLNQGSRPAYLSSIQPNQFRKRTVNLDKTHGHFVGDAVTFLSEIRPEDFNAPRALWERVWDDGARERFINNVSGHMSNCTKEEIIKRQIAIFREVSNDLATRLEKATGVEGYDGIAGLSFNGEHNGMAKDASLRAANNMVDKQSMAANNGAPAAGTHVKVN

SEQ ID NO: 11187 - protein, 191 aa, Oryza sativa
MAMQMMDVDNDDASGQRIRIIRSRSFYDSPGIVPVLFPGLRPESEAAEAMADDDYNDMDMGYEDEPPEPEIEEGAEEEPENNEDGPDEVVGAEAEDKEQEKTQRPRKTSKYMTKYERARILGTRALQISMNAPVMVELEGETDPLEIAMKELRARKIPFTIRRYLPDGSYEDWGVDELIVEDSWKRQVGGG

SEQ ID NO: 11188 - protein, 493 aa, Oryza sativa
  unsure (1)..(493): unsure at all Xaa locations
MAMAAAMGVASPYHAAHAAASTSCDSLRLLVAEGRPRRPRGVASSSSSSSSAGRRRRPLVFSPRAVSDSKSSQTCLDPDASTSVLGIILGGGAGTRLYPLTKKRAKPAVPLGANYRLIDIPVSNCLNSNISKIYVLTQFNSASLNRHLSRAYGNNIGGYKNEGFVEVLAAQQSPDNPNWFQGTADAVRQYLWLFEEHNVMEFLILAGDHLYRMDYEKFIQAHRETDSDITVAAXLPLDEKREAAHLKTMMVDTTILGLDDVRAKEMPYIASMGIYVISKNVMLQLLREQFPGANDFGSEVIPGATNIGMRVQAYLYDGYWEDIGTIEAFYNANLGITKKPVPDFSFYDRSAPIYTQPRHLPPSKVLDADVTDSVIGEGCVIKNCKIHHSVVGLRSCISEGAIIEDSLLMGADYYETEADKKLLGEKGGIPIGIGKNCHIRRAIIDKNARIGDNVKIINVDNVQEAARETDGYFIKSGIVTVIKDALLPSGTVI

SEQ ID NO: 11189 - protein, 568 aa, Eremothecium gossypii
MSITIESVPTKAFADQKPGTSGLRKKTKVFEQTEHYTENFIQAIMESIPEGSENAVLVIGGDGRYYNDAVMQKIAEVGSANGVRKLIIGQNGLLSTPAASHIIRTYHDKVTGGIILTASHNPGGPDNDFGIKYNLANGAPAPEKVTNSMFERSRNLTHYKITRGMPKLDLGKIGENQQYGNLLVDVIDPTEAYVRLMKEIFDFPLIKKFLEHAQKEYGLKVLFDALNGITGPYGKAIFVDELGLSEDSLQNFVPKPDFGGLHPDPNLTYAHTLVSRVDRENIAFGAASDGDGDRNMIYGAGPAFVSPGDSVAIIAEYASEIPYFIKNGIHGLARSFPTSGAIDLVAKEKNLDCYEVPTGWKFFCNLFDSKKLSICGEESFGTGSDHVREKDGLWAIVAWLNVLAIYHRRHPDREPSIKTIQEEFWAKYGRTFFTRYDFEECDTEDANKVIELLRTFAENPAVVGQPFPAWHEVSVSAAGDFSYTDLDGSVSEHQGLYIKLSNGTRYVVRLSGTGSSGATIRLYVERYTNDPAYYAQTADQFLAPDIKAVLKFLRFKDLIGTEEPTVRT

SEQ ID NO: 11190 - protein, 722 aa, Eremothecium gossypii
MTMYGWKLTNKLKFGRSKEEKDKDREKERDSRHNSGSKHGVFGHLSKRLSSTEEQVRCRTEEANTGAGTPRTSKDRKETIVATANSIAPVRLSTDVAAPGWPNEGVQSSVPSSFRDAGSETTDVGDEERAGTSSGSVVPEQANHSSASVSEERGEASMVNSTGIMTIKVYNGNSFKLPFALTSNPQILGKLLSSGVNAISRTGRSSVDELISSVEQVTLSEDEDKLLPGDAATNYIPATIKLPDSEDLNPLIYLTIEFDNTVATIEPECGNLKSPVFNKISTFDVTRKLPYLKVNVFVRIPSILLPSKAWQQVYAAQDPELQDLLKKVNSNMDVQLDSFQLPLNLQFNSATSIRLYNHQWLNMEKGLGRVNITIDYKPSKNKPLSIDDFDLLKVIGKGSFGKVMQVKKKDTNKIYALKAIRKSYIVSKSEVTHTLAERTVLARVDNPFIVPLKFSFQSPEKLYLVLAFINGGELFFHLQKEGRFDLSRARFYTAELLCALETLHSLNVIYRDLKPENILLDYQGHIALCDFGLCKLNMKDQDKTNTFCGTPEYLAPELLLGQGYSKVVDWWTLGVLLYEMLTGLPPYYDEDVPKMYKKILQEPLRFPDGFDREAKNLLIELLCRDPKRRLGYNGADEIKRHPFFSQLSWKRLWMKGYIPPYKPPVMSALDTSNFDQEFTREKPVDSVVNDFLSESVQQQFGGWTYVGSEQLGSSIIPGKNIR

SEQ ID NO: 11191 - protein, 361 aa, Deinococcus radiodurans R1
MRSGISILFMKALIPAAGLGTRLRPLTFTRPKPVLRVAGQPIIRHAIRTLTEAGITDIGIVVSDVTRDEIQHAVREIRDVKLTLINQHDQLGLGHAVLTAREWVGQDDFCVYLGDNLFEFGARPFIESFHQKHPAALIALVKVADPTAFGVAELDGEQITRLVEKPKDPPSNLAVAGLYCFTPQIFEVLDVMPPSARGEYEITDGIQGLIERGQTVVGQRVEGWWKDTGRPADLLDANRLLLEQIETDVQGDMEGSRMTGRVIVPASSKVLRSKIVGPVIIGEDVIIEDAYIGPFTSIGRGTVIRNAEIEHSSVDSGVVIENVQTRLQDCLIGVKAQVRGGRTLPKTHKLTISDASVVELA

SEQ ID NO: 11192 - protein, 625 aa, Eremothecium gossypii
MMSIEKVQKRSSSQDLPLSSDKGEGKKRKVEFADGLVHSRHRNELADEQPQDFSTKLYKGYIRDALDDLETSKDTGKLDTIANQLSLSASSPDRISAENFAILLEMLGNNITKIDNKRGVAIVRAVLNFEKWWDLPPLTLGNYVFFLQILCSSIPKWWQDVSMLLISNFRLPVDKTTKHHEILKYFLRAIPSSSNFIDSYIAKYFPNKNDSKKNLVNYISNVLTLTEYCEELRFQAWSMIIEKIIAVDVELQNELDELDDDVDEEIDDKLADSDDGEDELPGDDDAAEASTHSADDTSFDSEDEQLEGNEEYNIEVTRNIKELSKKLDVILSMLTTRLSDALTPETLESGEGVNTFNTLVSLFKSHILPTYYTRSVQYLMFHVSQQQPQLMDAFLVTLIDIAFSPNETMEKKIKSLQYLGSFIARAKKLTHTQITFVASYLTSWLNRYVLEREEEVDLPGGMDRFKHFYAAFQALCYIFCFRHALFRDGNAWECDIDAFFQRTVISKFNPLKYCNENVMLMFARIAQHEGIVYCFSIIENNNNERLRGIMGKSSERSDGLASATGAASTWSLAARQQFIDLQSYFPYDPLFLKQYKNLMRDYYIEWSEISADYESDDSNEFTDAA

SEQ ID NO: 11193 - protein, 232 aa, Streptomyces antibioticus
IESPSNPGLDVCDIRRLADAAHARGALVAVDNTLATPLGQRPLELGADFSVASGTKQLTGHGDVLLGYVAGRDAEAMAAVGRWRKIVGAISGPMEAWLAHRSIATLQLRVDRQNATALAVAEALRQRPEVSGLRYPGLSDDPSHPVAARQMRRYGCVVSFTLPTRARAERFLAALRLVEDATSFGGVRSTAERRRRWGGDDVPEGFIRMSVGAEDPEDLVADVLRALDESAE

SEQ ID NO: 11194 - protein, 178 aa, Zea mays
  unsure (1)..(178): unsure at all Xaa locations
PSIPYDPMALRKAFDKPVVKRLMTYVPFGVLLSGGLDXSLVTAVAVRHLAGTEAARRLGTKLHSFYVGLKGSPDLKAAREVAEYLGTLHHEFHFTVXDDIDAIEDVIYHTEAYDVTTIRASTPMFLMSHKIKSLGVKMVISGEGSDELFGGYLYFHKAPNKEELHRETCRKVCVSFFH

SEQ ID NO: 11195 - protein, 401 aa, Glycine max
MATKRSVGTLKEGDLKGKRVFVRVDLNVPLDDNLNITDDTRVRAAVPTIKYLTGYGAKVILSSHLGRPKGVTPKYSLKPLVPRLSQLLGIEVTMANDSIGEEVEKLVTQLPEGGVLLLENVRFYKEEEKNDPEFAKKLASLADLYVNDAFGTAHRAHASTEGVAKYLKPSVAGFLMQKELDYLVGAVSNPKRPFAAIVGGSKVSSKIGVIESLLEKVNVLLLGGGMIFTFYKAQGYSVGSSLVEEDKLSLATTLLEKAKAKGVSLLLPTDVVIADKFAADANSKTVPASSIPDGWMGLDIGPDSIKTFGEALDTTQTIIWNGPMGVFEFDKFATGTEAIAKKLAELSGKGVTTIIGGGDSVAAVEKVGLADKMSHISTGGGASLELLEGKQLPGVLALDDA

SEQ ID NO: 11196 - protein, 192 aa, Lolium perenne
SRSAEKMYKIDSHLACAVAGIMSDANILINTARLHAQRYSLSYQEPIPVEQLVQSLCDTKQGYTQFGGLRPFGVSFLFAGWDKKHGFQLYMSDPSGNYSGWKASAVGANSQAAQSMLKQDYRDGMTREEAVALALKVLSKTMDSTSLTAEKLELAEVFLHPGTGEVQYQVCTPDAMGKLLAKAGLTQPAPEA

SEQ ID NO: 11197 - protein, 298 aa, Enterococcus faecalis V583
MKVKKAVIPAAGLGTRFLPATKAMAKEMLPIVDKPTIQFIVEEALASGIEDILIVTGKAKRPIEDHFDSNVELENNLKEKNKTDLLKLVEETTDVNLHFIRQSHPKGLGHAVLQAKAFVGNEPFVVMLGDDLMEDKVPLTKQLMDDYEQTHASTIAVMKVPHEDTSKYGIINPEKEIEKGLYNVENFVEKPKPEEAPSDLAIIGRYLLTPEIFDVLENQKPGAGNEIQLTDAIDTLNKTQRVFAREFKGERYDVGDKFGFMKTSIEYGLTHPEVKDNLREYIINLGAQLAKKEQPKEK

SEQ ID NO: 11198 - protein, 385 aa, Escherichia coli
  unsure (1)..(385): unsure at all Xaa locations
APAVADKADNAFXXICTALVLFXTIPGIALFYGGLIRGKNVLSXLTQVTVTFALVCILWVVYGYSLASGEGNNFFGNINWLXLKNIELTAVXGSIYQYIHVAFQGSFACITVGLIVGALAERIRFPAVLIFVVVWLTLSYIPIAHXVWGGGLLASHGALDFAGGTVVHINAAIAGLVGAYLIGKRVGFGKEAFKPHNLPXVFTGTAILYIGWFGFNAGSAGTANEIAALAFVNTVVATAAAILGWIFGEWALRGLPSLLGACSGAIAGLVGVTPACGYIGVGGALIIGVVAGLAGLWGVTXLKRLLRVDDPCDVFGVHGVCGIVGCIXTGIFAASSLGGVGFAEGVTXGHQLLVQLESIAITIVWSGVVAFIGYKLADLTVGLRV

SEQ ID NO: 11199 - protein, 123 aa, Triticum aestivum
  unsure (1)..(123): unsure at all Xaa locations
MAPTVMASSATSVAPFQGLKSTAGLPVSRRSNGASLGSVSNGGRIRCMQVWPIEGIKKFXTLSYLPPLKHGXLLKQVRLXLXRSKWVPCLEFNKLGSXSRXAQRTPGVXNGRYXTMWXLPXXR

SEQ ID NO: 11200 - protein, 243 aa, Lycopersicon esculentum
KRLMTDVPFGVLLSGGLDSSLVASVTARYLAGTKAAKQWGAQLHSFCVGLEGSPDLKAAKEVADFLGTVHHEFHFTVQDGIDAIEDVIYHIETYDVTTIRASTPMFLMSRKIKSLGVKMVISGEGADEIFGGYLYFHKAPNKEEFHRETCRKIKALHQYDCLRANKATSAWGLEARVPFLDKEFINVAMSIDPEWKMIKHDQGRIEKWVLRKAFDDEEQPYLPKHILYRQKEQFSDGVGYSWI

SEQ ID NO: 11201 - protein, 438 aa, Candidatus Blochmannia floridanus
MSDSSKLDILVPNLPESVIDATVSVWHKKEGDKIKQGEILLEIETDKIMLEVPALQSGILLEILEKSGSIVIAGQILGRLECNNFSNQIKPLNFSDNQNSIKSTIAKKIEDNLVIQEEDKHSPISPVIRKLITKYNLNIDNIKGSGIKGRLTRQDIETYIQKNTLSQTYNVAINTDFKQSIYDNAQQKNDFTHDNRVNTIRNDVNNRTDTRVIMSRLRKKISERLLKVTNSTAILTTFNEVNMQCIINIRNKYQESFEKNHNIKLGFMSFFVKAVVEGLRRFPEINAYIDGEEIIYHNYFDISIAVSTPRGLVTPVLRNADKLRFVDIEKNIKLLANKGKTGKLTLDDLNGGNFTITNGGIFGSLLSTPIINPPQSAILGMHAIKDRPMALNGNIVILPMMYLALSYDHRLIDGKDSVNFLITVKNLIEDPMSLLLEN

SEQ ID NO: 11202 - protein, 348 aa, Rhodococcus erythropolis
MKAIQYTRIGAEPELTEIPKPEPGPGEVLLEVTAAGVCHSDDFIMSLPEEQYTYGLPLTLGHEGAGKVAAVGEGVEGLDIGTNVVVYGPWGCGNCWHCSQGLENYCSRAQELGINPPGLGAPGALAEFMIVDSPRHLVPIGDLDPVKTVPLTDAGLTPYHAIKRSLPKLRGGSYAVVIGTGGLGHVAIQLLRHLSAATVIALDVSADKLELATKVGAHEVVLSDKDAAENVRKITGSQGAALVLDFVGYQPTIDTAMAVAGVGSDVTIVGIGDGQAHAKVGFFQSPYEASVTVPYWGARNELIELIDLAHAGIFDIAVETFSLDNGAEAYRRLAAGTLSGRAVVVPGL

SEQ ID NO: 11203 - protein, 745 aa, Cladosporium fulvum
MATEKISSGLGKLQDQLNGAAEGQKVAHVKNDPLYKDYHEPSNRITTDYGVKQHNTDDWLKIASEDKTGPMLLEDHAAREKINRFDHERIPERVVHARGSAAFGTFKLHKSLEQYTTAGVLTDTSRTTPTFLRFSTVLGSRGSADTVRDVRGFAIKHYTPEGNWDVVGNNIPVFFIQDAIKFPDVIHAGKPEPDNEVPQAQTAHNNFWDFQFMHTEATHMFMWTQSDRAIPRSYRMMQGFGVNTFTLTNAKGERFFVKFHWTPHLGVHSFVWDEALKLAGQDPDFHRKDLWEAIEAKAYPKWDFGVQVISEGEEDNFEFDILDATKVWPEELVPIQYVGELELNRNPDEFFPQTEQVAFCTGHVVPGIGFSDDPLLQGRNFSYQDTQISRLGVNFQELPINRPVCPVMNNNRDGALRHTVTKGKVNYWPNRFEATPPAAAEEKPYLDYPQKVAGMKTRLRSKKFSEHFNQAQLFYNSMSEPEKEHIKFALAFELDHCEDPVVYDRVSQRLADIDLSLAQSVADLVGGQIPQQQGRPNHGKKSKGLSQTEFPGKTPTIETRRIAIIIADGYDLVAYNGIVAAAKACQALPFTIAPRRSPIYAAGESKENSKGVKPDHHLEGMRSTMFDSVFVPGGADSVATLRKNGRALHWVREAFAHLKAIGAVGEAVDFVRNACQLPGMTFSASEEVTDSYGVVTAAKVKPESLSEAVKIGKDAADFVSKYFYEISQHKNFERELKGFPLMVAY

SEQ ID NO: 11204 - protein, 191 aa, Lycopersicon esculentum
GDSMSTWTRDDDKLFEHGLVLYPENSADRWQLIADHVPGKTADDIMAHYDDLVHDVYEIDSGRIDLPSYTDDPVELEGDCQITSGSNKKSNEIERKKGTPWTEDEHRLFLIGLDKYGKGDWRSISRNVVVSRTPTQVASHAQKYFIRQQAMKKERKRSSIHDITTAVDTNPVPPQSSFQNQSGSQNFNFAM

SEQ ID NO: 11205 - protein, 200 aa, Thermoanaerobacter tengcongensis
MLRLIVATHNPNKAKEIKDFFKGYPVEVVSMKELGIEEDIEEYGNTIEENALIKARFLRDKVKEGIVISDDTGLFVEYLGGQPGVYSARFAGENATYEENNRKLLKLLEGVPYEKRKAYFKTIIAVIEGEKEVLLEGVLEGHILDHLQGENGFGYDPVFFVDGIGKTLAELSLEEKNKISHRGKALLKLKEYILKRLEEN

SEQ ID NO: 11206 - protein, 600 aa, Ustilago maydis 521
MADPAGQGVDVSDAANGPTRKRKPDQLANLDRYNFLRPSRGGNDDDDAAEEEDELLPLDHSELSSASYLARLTGVACLGGLQFGWDTGIASGMLVAIHSDLGHELNEGEQELIVSATTVGAILGSIVAGRMADWLGRKKVMIGSGVLFLLGALEQAASQVVRELVLGRVLVGLGVGMASMVVPTYLAEVAPTKVRGRIVGINSLLVTGGQVIAYLIDAAFYNLPHGWRWMVLAGGVPAVLQLVGMIYLDESPRWLVARGRIIRARRVLQRIYPHASVHTIDNEIDRISRSMQGATQHDSVDPDACHTAVQQAEEVQHDLSATLGRVTAAPAQLTSTARQTTTRVKSKLDMLLQDRTHRRALLIACVLQFFQQATGANSLLYYSSRLLMMAGFVVNPNAAAIGIAIANFGGTVIAVRYIDSWGRRKLLLYTTAAMTLCLALVAIGFSQIDLGPVTGTSEQGEPVSTSWPYWTLVFMIMFTLSYALGLGIVPWLVQSEIFSGQVRGVGAGLATATNWSTNLLISSTFLHLVKLIHPQGCFALFSAVSALSCAFTYWLLPETAGVSLNDVSGALPSTDRPGTHAHAAQAYQAIPSTEDADALE

SEQ ID NO: 11207 - protein, 485 aa, Xylella fastidiosa Dixon
MHHNVHQSEILADPCDLQRAERWRQRDLRVLWHPCTQMREHPDTLPLVPIVRGEGAWLVGHDGRRYLDAVSSWWTNLFGHADPRISAAIAAQARTLEHVMLAGFSHEPAVRLAEALLRLAPRQDGREPLSKVFYADNGSAGVEVALKMAFHYFRNRGEEQRTRFIALHNGYHGETIGALAVGDIPLYRRVYAPLLTEVLFAPSPDAYLAEPGQSAAEYALQAAEALEALFKRYSGQICALILEPLLQCAGGMRMHHPVYLHRVRELCDAHGALLICDEIATGFGRTGTLFACEQACPAISTDTDDKELGIMPDLLCLSKGLTGGFLPLAAVLTTQQLYEEFLDDSRERAFLHSHSYTGNPLACIAALTTLDIFENDCIIERNQVTAARMTQLAASLSGHPHVADVRQTGMVVAFELTRDGNKRTPFPPQARLGLHVYRAALARGVILRPLGDVVYWMPPYCVDEEQLHLLAETTRVAIDEAIACV

SEQ ID NO: 11208 - protein, 246 aa, Glycine max
  unsure (1)..(246): unsure at all Xaa locations
YDSRTTIFSPEGRLYQVEYAMEAIGNAGTAIGILSKDGVVLVGEKKVTSKLLQTSTSTEKMYKIDDHVACAVAGIMSDANILINTARVQAQRYAYAYQEPMPVEQLVQSLCDTKQGYTQFGGLRPFGVSFLXAGWDKNFGFQLYTSDPSGNYGAWKAAAIGANNQAAQSILKQDYKDDITREEAVQLALKVLSKTMDSTSLTSEKLELAEVFLSPSGKVKYEVCSPEALTKMLVKSGVTQPATDTA

SEQ ID NO: 11209 - protein, 505 aa, Hordeum vulgare
MAAPPAIPRRGLFIGGGWREPTLGRHIPVINPATEDTIGDIPAATAEDVELAVAAGGPVLARRREPWARASGATRAKYLNAIAAKITGKIAYLALLETVDSGKPKDEAVADMDDVAACFEYYAALAEALDGKQHAPISLPMEEFKTYVLKEPIGVVGLITPWNYPLLMATWKVAPALAAGCTAVLKPSELASLTCLELGAICEEIGLPSGVLNIITGLGPDAGAPIASHPHVDKIAFTGSTATGKTIMTAAAQMVKPVSLELGGKSPLVTFDDVADIDKAVEWPMLGCFFNGGQVCSATSRLLLHEKIAEPFLDRLVEWAKNIKISDPLEEGCRLGSVISKGQYEQIKKFISTARSEGATILHGGDRPKHLGKGFFIEPTINTGVSTSMQIWREEVFGPVICVKVFKTESEAVELANDTHYGLAGGVISDDLERCERIAKVIHSGIVWKNCSQPTLVQAPWGGNKRSGFGRELGEWGLENYLSVKQVTRYCKDELYGWYQRPSKL

SEQ ID NO: 11210 - protein, 409 aa, Glycine max
  unsure (1)..(409): unsure at all Xaa locations
MDPPPKSWSIHTRSEIIAKYEVMERVGSGAYADVYRGRRLSDNLTVALKEIHDYQSAFREIDALQLLQGSPNVVVLHEYFWREDEDAVLVLEFLRTDLATVVADAAKANQPLPAGELKRWMIQILSGLDACHRHMVLHRDLKPSNLLISELGLLKIADFGQARILTEPGIDASNNHEEYSRVLDDADNKDTITSTHDGKATCTTSGVDREEEEKELGCLTSCVGTRWFRAPELLYGSRDYGLEVDLWSLGCIFAELLTLQPLFPGTADIDQLSRIIGVLGSLDESAWAGCSKLPDYAIISFSKVENPAGLEACLPNRSPDEVALVKKLVCYDPAKRATAMELLHDKYFSEEPLPVPVSELRVPMTRKGQDEDSPXGWGDIDEMDCDSDFDEFGPLNITRTGTGFSIQFP

SEQ ID NO: 11211 - protein, 213 aa, Populus tremula
CDLLRINTDRGVMLTDGKSRFSINGKPIYHFLGGSTFSEYTVCHIGTVAKINPAAPLDKVCILSCGISTGLGAALNVAKPQKGHTVAVFGLGAVGLAAAEGARLSGASRIIGVDLNPSRFKEAKKFGVTELINPKDHDKPVQQVIIEMTDGGVDRSIECTGNIQAMISAFECVHDGWGVAVLVGVPSKDDEFKTHPMNLLNERTLKGTFFGNY

SEQ ID NO: 11212 - protein, 296 aa, Deinococcus radiodurans R1
MTAPRKGIILAGGSGTRLYPATLAVSKQLLPIYDKPMIYYPLTTLMLGGMREILIISTPEDTPRFKQLLGDGSQWGIALEYAVQPKPEGLAQAFLIGEDFVQGHPSSLILGDNIFYGNDLSDLMQAANAKENGATVFAYQVRDPERYGVVDFDRSGRALSIEEKPAQPKSDFAVTGLYFYDERVSEIARSIKPSPRGELEITDLNNVYLEEGALDVQLMRRGFAWLDTGTHESMLDASLFIQTIEQRQGLKVASPEEIAWRSGWISTQALLEQAERLKKNQYGKYLIKIAQEKVHG

SEQ ID NO: 11213 - protein, 121 aa, Helicosporidium sp. ex Simulium jonesii
FTPQYAELEQLQQEFGAQGFDVLGFPCNQFMNQEPGDSCSIRDAARAKHGATFPMFAKIKVNGSEADPLYKWLKEQKGGILTSAIKWNFAKFLVDRQGKVVGRYAPTTSPKDIANDIKKFL

SEQ ID NO: 11214 - protein, 254 aa, Ralstonia metallidurans CH34
MAIITDRIDLHRHPAYSVLGGYVRAVSEIAGAQPLLLPACADAIDADTLIDTLDGIVLTGSPSNIAAERYGATPLPAMTCQDPHRDAAVFGLLPALIDAGVPILGICRGFQELNVLHGGTLERAVHAQPGRLDHREGDHDRPIQQWYDDSHDIHIVPGGWLAGIAGRSAAVNSLHHQGVERLGAGLRIEATAPDGLVEAFSLANAAQFTLAVQWHPEMRIDDCGLAKAIFSEFGRACGERRATRTRASRPTFPA

SEQ ID NO: 11215 - protein, 226 aa, Helicosporidium sp. ex Simulium jonesii
QAHVLGKAKHTFTSAEEAVKALRAGPNGDVISDQWLEPFVIVDSDTQHPVGPIQDGDAVVIFNFRADRVIEISKAFEYAEFSSFDRERWPCTRFAGLMQYDGDLKLPANYLVAPPAITGTSGEIPSDKVPFNQLPLMKAREIAEAGKEALRSGKFDVVRINFANPDMVGHTGDLAATIKAVEVVDVCVKELLDVVDELGGRFLLTSDHGNADDMVQRAKKTLKPLF

SEQ ID NO: 11216 - protein, 473 aa, Deinococcus radiodurans R1
MPIKFGTDGWRDIIAEDFTFENVRTVARAHAQVLRSSGARSVAVGFDTRFQGQAFARVVAEVMAAQGLDVWLAQDYLPTPALSFAVVHHGAGGGVMITASHNPPQYSGYKIKGSYGGSATPAVVAQVEAALATAESYDGPRGEIRPLDIRQAYYEQLDRQLDLETLREYRGKVIHDPMGGAACGWLTGYAQHAGLQLELEEMHGRPDPLFYGVNPEPIPQNLGELTERLTRESAPTLGVITDGDADRVGAITAGGHFFNSHQIFAVLIKHLYGRGVRGRVVKTVSGSRVIELLAETLGLELLETPVGFKYITDAFLEGQQDESKAVLMGGEESGGLSSRGHIPERDGLLNSLLMIEAVAASGQSLDELFAEIEREVGFRHVYDRADLHLSEAFDKSALMQAAQGYREVAGQAVTGIKTTDGVKLALAGDASVMFRASGTEPVVRVYVEAQTPEMVQAVLTEAVQRVRSFDPMS

SEQ ID NO: 11217 - protein, 357 aa, Synechocystis sp. PCC 6803
MSALSSHSQVLSMLRTTPINFNHWYVVAQAGELGQGPLGIVLWEKAIAIYRDQDGQVRAVEDRCPHRQVKLSEGKVLGNNLECAYHGWQFDAQGHCAKIPYFSEDQKLPPCRLRTYPVQEKDGFIWLYPGDLDHLASHGPEPLAIPEWHHLNHIGSFAAFDCPGHFSYLIENLMDMYHGHLHDNYQAWASASLREIETNGDQVVVDYNAQSYYKIDKIWSISQLFFPTLRRLHPENLRVSYIYPHWSSTLGADFKIYCLFCPISANKTKAYLVHFTSLEAFPKLHKLPVAFRSFLKNWLSGTARPLLEGLIDQDIRMISQEQAAFEQNPDRQNVEVNPALAKVQQLIRQQALASENA

SEQ ID NO: 11218 - protein, 583 aa, Glycine max
  unsure (1)..(583): unsure at all Xaa locations
MVLFNVSRVETTPFDGQKXPGTSGLRKKVKVFVQPHYLHNFVQSTFNALTVEKVRGATLVVSGDGRYFSKEAIQIITKMSAANGVRRVWIGQNGLLSTPAVSAVIRERVGADGSRATGAFILTASHNPGGPHEDFGIKYNMENGGPAPEGITDKIYENTTTINEYLIASDLPDVDITTTGVTSFTGPEGPFDVEVFDSASDYIKLMKSIFDFESIRKLLSSPKFTFCYDALHGVGGAYAKSIFVDELGAQESSLLNCTPKEDFGGGHPDPNLTYAKELVARMGLGKSEPQDDPPEFGAASDGDADRNMILGKRFFVTPSDSVAIIAANAVEAIPYFSAGLKGVARSMPTSAALDVVAKHLNLKFFEVPTGWKFFGNLMDAGLCSVCGEESFGTGSDHIREKDGIWAVLAWLSILAYKNKDKLEDKLVTVEDIVRQHWATYGRHYYTRYDYENVDAGAAKELMAYLVKLQSSLSEVNQIIKGIRSDVSNVVHGDEFEYNDPVDGSISSHQGIRYLFEDGSRLIFRLSGTGSEGATIRLYIEQYEKDPSKIGRLSNEALAPLVEVALKLSKMEEFTGRSAPTVIT

SEQ ID NO: 11219 - protein, 176 aa, Triticum aestivum
  unsure (1)..(176): unsure at all Xaa locations
MAPTVMASSATSVAPFQGLKSTAGLPVSRRSNGASLGSVSNGGRIRCMQVWPIRGHQEFETLSYLPPLKHGGLLKQVXDYLDPSKWVPCLRFSKLGSSSRXAQPSPGYYDGRYWAMWXLPISGSPTPPRRLEGGQEGYPYPISHHFTNRKSCVTYPTGARSRLNITTAFKSCICPT

SEQ ID NO: 11220 - protein, 468 aa, Glycine max
MFSSAISPKPFLRSLVIDRYAQSTTTATRWECLGFNKSENFSTKRELCAEGFKLNCLVENREMDVESSSSSSLVDDASLSLSEEDLGEPSISTLVMNFESKFDPFGAISTPLYQTATFKQPSAIENGPYDYTRSGNPTRDALESLLAKLDKADRALCFTSGMAALSAVGRLGGPGEEIVAGDDVYGGSDRLLSQVVPRTGIVVRRANTCDLNEVAAAIGPKTKLVWLESPTNPRLQISDIQKISEIAHSHGALVLVDNSIMSPVLSRPLELGADIVMHSATKFIAGHSDIMAGVLAVKGEKLGKELYFLQNAEGSGLAPFDCWLCLRGIKTMALRIEKQQDNAQKIAEFLASHPRVKKVNYAGLPGHPGRDLHYSQAKGAGSVLSFLTGSLELSKHIVETTKYFSITVSFGSVKSLISMPCFMSHASIPAAVREARGLTEDLVRISVGIEDVNDLIADLDNALRTGPL

SEQ ID NO: 11221 - protein, 104 aa, Bdellovibrio bacteriovorus HD100
MGKKIYVGNLSYNVDQDQLGGLFADFGTVDSVNIITDRDTGRSKGFAFVEMSSDSEATAAIDKLNGMDLGGRAMNISEAKPQEPRSGGGPRRNGGGFGGSRRSY

SEQ ID NO: 11222 - protein, 218 aa, Lycopersicon esculentum
MAGYRGDDEYDYLFKLVLIGDSGVGKSNLLSRFTKNEFNLESKSTIGVEFATKSLNIDGKVIKAQIWDTAGQERYRAITIAYYRGAVGALLVYDVTRHVTFENVNRWLKELRDHTDPNIVVMLLGNKSDLRHLVAVSTEEAKSLAEREALYFMETSALEATNVENAFTEALTQIYRIVSKKAVEAGDEGATSTAPPKGQTINIKDEGSAWKKFGCCSS

SEQ ID NO: 11223 - protein, 359 aa, Prunus armeniaca
ETTFPRLAEPLGYVPKEDILYAIKAIVVTQRENGRRDDRKYSRMKYLISSWGIEKFRSVVEQYYGKKFEQFRELPEWEFKSHLGWNKQGDGSYYCGLHVDNGRIGGVMKKALREVIEKYNLSIRLTPNQNIILCDIRTAWKRPITTILAKAGLLHPRFVDPLNLTAMACPAFPLCPLAITEAERGIPDILKRVRSVFEKVGLKYNESVVIRVTGCANGCARPYMAELGLVGDGPNSYQIWLGGTPNQTSIARSFMNKVKIQDLEKVLEPLFYYWRRKRQSKESFGGYTNRMGFEKLHELVDKWEGPKVAPARYNLKLFADKETYEAVDELAKQQDKTAHQLAMEVIRNFVGSQRNGKSE

SEQ ID NO: 11224 - protein, 182 aa, Bdellovibrio bacteriovorus HD100
MSTLNHIEFNTADGKKATLADYSGKVLLVVNVASECGLTPQYEGLEKIHQKYESQGLRVLAFPANEFGAQEPGSNEQIQEFCRTQFGVKFPVFAKMVVKGEGQHPLYQQLTTLQPAAQQVPGGKLKSVLEEHGLLSGGPSDIMWNFEKFLIGKSGNVVARFAPDMTPEDPTIVKAIEAELAR

SEQ ID NO: 11225 - protein, 280 aa, Prunus armeniaca
EKSAKRKRKNQYRGIRQRPWGKWAAEIRDPRKGVRVWLGTFNTAEEAARAYDSEARRIRGKKAKVNFPDETPRSSAKRSVKANPQKMQPKTNMNAIQPNLNQNINFVNDPNQDYYNAMGFLDEKPPTNNFGFMSTFPANDVALKSSTPSDAVPLYFGSDQGSNSFDCSDFGWGEQGSKTPEISSVLSSVMEESDDSLFLEDASPTKKLRSNPEDLVPVQDNAGKTLTDELSAFEMKYFQTPYLDGSWDASVDAFLSGDATQDGGNSVDLWCFDDLVGGGF

SEQ ID NO: 11226 - protein, 524 aa, Trifolium pratense
MLLEIAVALLVIALFIYLRPTPTAKSKALRHLPNPPSPKPRLPFIGHLHLLDHPLLHISLIRLGERYGPLYSLYFGSMPTVVASTPDLFKLFLQTHEATSFNTRFQTSAIRRLTYDNSVAMVPFGPYWKFVRKLIMNDLLNATTVNKLRPLRSKEIRKVLNVMANSAETQQPLNITVELLKWTNSTISTMMLGEAEEVRDIARDVLKIFGEYSVTDFIGPLKIFKKFGNYEQRIDAIFNKYDPIIERVIKKRQGIVNKRKNGEVLVGEEENVVFLDTLLEFAQDETMEIKITKEQIKGLVDFFSAGTDSTAVATEWTLAELINNPRVLKKAREEVESVVGKDRLVDESDIQNLPYIRAMVKEVFRLHPPLPVVKRKCTEECEINGYVIPEGALILFNVWQVGRDPKYWEKPLEFRPERFLENAGVGEGEASSIDLRGQHFTLLPFGSGRRMCPGVNLATAGMATLLSSIIQCFDLQVPGPNGQILKGSDAKVTMDERPGLSVPRAQNLVCVPLARAGAAKLLSS

SEQ ID NO: 11227 - protein, 755 aa, Deinococcus radiodurans
MSRDPLPFFPPLYLGGPEITTENCEREPIHIPGSIQPHGALLTADGHSGEVLQMSLNAATFLGQEPTVLRGQTLAALLPEQWPALQAALPPGCPDALQYRATLDWPAAGHLSLTVHRVGELLILEFEPTEAWDSTGPHALRNAMFALESAPNLRALAEVATQTVRELTGFDRVMLYKFAPDATGEVIAEARREGLHAFLGHRFPASDIPAQARALYTRHLLRLTADTRAAAVPLDPVLNPQTNAPTPLGGAVLRATSPMHMQYLRNMGVGSSLSVSVVVGGQLWGLIACHHQTPYVLPPDLRTTLEYLGRLLSLQVQVKEAADVAAFRQSLREHHARVALAAAHSLSPHDTLSDPALDLLGLMRAGGLILRFEGRWQTLGEVPPAPAVDALLAWLETQPGALVQTDALGQLWPAGADLAPSAAGLLAISVGEGWSECLVWLRPELRLEVAWGGATPDQAKDDLGPRHSFDTYLEEKRGYAEPWHPGEIEEAQDLRDTLTGALGERLSVIRDLNRALTQSNAEWRQYGFVISHHMQEPVRLISQFAELLTRQPRAQDGSPDSPQTERITGFLLRETSRLRSLTQDLHTYTALLSAPPPVRRPTPLGRVVDDVLQDLEPRIADTGASIEVAPELPVIAADAGLLRDLLLHLIGNALTFGGPEPRIAVRTERQGAGWSIAVSDQGAGIAPEYQERIFLLFQRLGSLDEALGNGLGLPLCRKIAELHGGTLTVESAPGEGSTFRCWLPDAGPLPGAADA

SEQ ID NO: 11228 - protein, 485 aa, Saccharomyces cerevisiae
MNTLLFKRKGGNCGNESNIVSQGSPSSSNLPESPGTLDEKNLQIAYSFARSLSTIPSYEQMKRTNKLPDYHLKIVVVGDGAVGKTCLLISYVQGTFPTDYIPTIFENYVTNIEGPNGQIIELALWDTAGQEEYSRLRPLSYRNADVLMVCYSVGSKTSLKNVEDLWFPEVKHFCPSTPIMLVGLKSDLYEADNLSDLVEQVQQNPWPSVWGHLHIFKCSARLKENIDEVFETAIHTLLSDSLYAPREPTHTIKNPFKRNTTSQYRFFYWRYQRLYFRNEKIKKKQVYYNVRIMMKIILLPILYALTTFEKWQEKIHTFYEQFEFSFFFFENSDNKVKYKAYLISSIKRWSIITCMRCFWTVQKSIFKARFFACRNFVKKHNYKLISTMTGSTEMVPPTMKHTVDNKRLSSPLTDSGNRRTKKPKLRKYKAKKVETTSPMGVLEFEVNDLLKSQNLSREQVLNDVTSILNDKSSTDGPIVLQYHRE

SEQ ID NO: 11229 - protein, 295 aa, Bacteroides fragilis
MKGIVLAGGSGTRLYPITKGVSKQLLPIFDKPMIYYPISVLMLAGIREILIISTPDDLPGFQRLLGDGSDFGVRFEYAEQPSPDGLAQAFIIGEKFIGDDSVCLVLGDNIFYGQGFTRMLNEAVRIAESESKATVFGYWVSDPERYGVAEFDENGNVFSIEEKPQKPKSNYAVVGLYFYPNKVVEVAKSIRPSSRGELEITTVNQNFLSDKELRVQLLGRGFAWLDTGTHDSLSEASTFIEVIEKRQGLKVACLEGIALRKGWISPEKMKALAQPMLKNQYGQYLLKVIDELYVK

SEQ ID NO: 11230 - protein, 398 aa, Triticum aestivum
MQRAAASLASSRSAAAWACSSTSRHAIASCSATARRDAVVPLRIRGQQQVPLHSMSLSLLSRRRPARTAKAAAAAAELAPASDEVAAGGGIAGTVQLGAMIVAWYLLNIYFNIYNKQVLQVLPLPLPYTITAFQLAFGSLVIFFMWATKLHPVPKLSAAQLAKIAPLAAGHMLGTVFTNMSLGKVAVSFTHTVKASEPFFTVLLSAFFLGEVPSPLVLGSLVPIVGGVALASLTEVSFNWVGFWSAMASNLLNQTRNVLSKRLLGGEEEEFMDDINLFSVITVLSFLLSLPLMIFAEGVSFSPAFLQSTGLNLQELCVRAALAGLCFHGYQKLSYMILARVSPVTHSVANCVKRVVVIVSSVLFFRTPISPVNALGTGAALAGVYLYSRLKKTKPKSS

SEQ ID NO: 11231 - protein, 93 aa, Glycine max
RTSSQVVTTVNRAGAGLVVQLTGLKSMVGFPTRKTNIAFTSIVGTGGGVHCLQGWPPIGKKKLGTFSYLPDLDDAQLAKEVDSLLRKGWIPCL

SEQ ID NO: 11232 - protein, 729 aa, Zea mays
MAMAAIASPSSRTLIPPRHHGAAPSPSTSGDSSLRLLRAHPRHGRRGRAVSVSTPAARSRPFVFSPRAVSDSKSSQTCLDHDASKCESLPPHNPQPASSDNSQSRLRRATPQFSSCKPWTWLWRLKPPLRHGMPPPPSSQFQSVTKPLQMIQHTSILKLMIVFLESFWEVVLGLECPPCSSETPRAGRGTPLRSVSHCPPITPPALSRPLPRARSDPPPMATAMGAMAATCMASIPAAATFPGDLGVGRRRAVVPGWRAGGRRLRATPPARRPFLFSPKGVSDSRSSQTCLDPDASTSVLGIILGGGAGTRLYPLTKKRAKPAVPLGANYRLIDIPVSNCLNSNVSKIYVLTQFNSASLNRHLSRAYGNNIAGYKNEGFVEVLAAQQSPENPNWFQGTADAVRQYMWLFEEHNIMEFLILAGDHLYRMDYQKFIQAHRETDADITVAALPMDEKRATAFGLMKIDDEGRIVEFAEKPKGEKLRAMMVDTTILGLDHERAKEMPYIASMGIYVFSKDVMLRLLRENFPAANDFGSEVIPGATEIGLRVQAYLYDGYWEDIGTIEAFYNANLGITKKPVPDFSFYDRSAPIYTQPRYLPPSKVLDADVTDSVIGEGCVIKHCTINHSVVGLRSCISEGAVIEDSLLMGADYYETENDKNVLSETGGIPIGIGKNSHIRKAIIDKNARIGENVKIINFDNVQEAVRETEGYFIKSGIVTVIKDALIPSGTII

SEQ ID NO: 11233 - protein, 213 aa, Populus tremula
CDLLRINTDRGVMLTDGKSRFSINGKPIYHFLGGSTFSEYTVCHIGTVAKINPAAPLDKVCILSCGISTGLGAALNVAKPQKGHTVAVFGLGAVGLAAAEGARLSGASRIIGVDLNPSRFKEAKKFGVTELIAPKDHDKPVQQVIIEMTDGGVDRSIECTGNVQAMISAFECVHDGWGVAVLVGVPSKDDEFKTHPMNLLNERTLKGTFFGNY

SEQ ID NO: 11234 - protein, 421 aa, Thermus thermophilus HB27
MRFETLQLHAGYEPEPTTLSRQVPIYPTTSYVFKSPEHAANLFALKEFGNIYSRIMNPTVDVLEKRLAALEGGKAALATASGHAAQFLALTTLAQAGDNIVSTPNLYGGTFNQFKVTLKRLGIEVRFTSREERPEEFLALTDERTRAWWVESIGNPALNIPDLEALAQAAREKGVALIVDNTFGMGGYLLRPLAWGAALVTHSLTKWVGGHGAVIAGAIVDGGSFPWEGGRYPLLTEPQPGYHGLRLTEAFGELAFIVKARVDGLRDQGQALGPFEAWVVLLGMETLSLRAERHVENTLHLAHWLLEQPQVAWVNYPGLPHHPHHDRAQKYFKGKPGAVLTFGLKGGYEAAKRFISRLKLISHLANVGDTRTLAIHPASTTHSQLSPEEQAQAGVSPEMVRLSVGLEHVEDLKAELKEALA

SEQ ID NO: 11235 - protein, 507 aa, Agrobacterium tumefaciens str. C58
METGMQTTAEAIKGKRLGLFIDGRFVEPRSGKFVDSYDPTTGEAWYQFAEGGADDVDLAISSAQRAFRDPSWRRMTQTARGKLVRRLADLVLEHAEDLALLETRDNGKLIKEMRAQMRAIPDSYLYFAGMADKLQGDTIPVNKLDQLNFNMREPLGVIGMVTPWNSPLMLLTGTLAPCLAIGNTVVIKPSEHATASTLALAELIVEAGFPAGVVNVVTGGGAVTGEALTRHNGIAKFVFTGSTATGRRIAANAAANLVPCQMELGGKSPHVVFSDVDIEKTVNGVVSGVFAAAGQTCVAGSRCFVEANIYDRFIEALVERTRNIKLGDPMDDATDIGPLALESQLSKLEGYVASGVREGSRIAIGGKRPQSEELSRGWYFEPTVMADATNDMSFMRHELFGPMVGVMPFSSEEEMISLANDTNYGLASGIWTQNIDRAMRFANQIDAGTVWINTYRSAAYMSANGGFKESGYGRRGGFDVMREFSRAKNVVIDYSGAMQDPFVIRLR

SEQ ID NO: 11236 - protein, 276 aa, Glycine max
APPPQPPHFRLTHPTHKANLELTHSLMASSALISDTQQWKDLKAHVEDINKTHLRDLLSDDKRCQSMLVEFDDILLDYSRQQATPETIQKLFELAEAASLKEKIIRMYSGEHINSTENRSVLHVALRASRDAVIQSDGQNVVPEVWKVLDKIQEFSEQIRNGSWVGATGKALKDVVAIGIGGSFLGPLFVHTALQTDPEAVESARGRQLRFLANVDPIDVARNITGLNPETTLVVVVSKTFTTAETMLNARTLREWISSALGIENGQYSKWTLMMN

SEQ ID NO: 11237 - protein, 686 aa, Bacillus subtilis
MSDDQNKRVNEHSKDEQLEQYRTDNSGKKMTTNQGLRVSEDEHSLKAGVRGPTLMEDFHFREKMTHFDHERIPERVVHARGFGVHGFFQVYEPMTEYTRAKFLQDPSVKTPVFVRFSTVAGSKGSADTVRDARGFATKFYTEEGNYDLVGNNIPVFFIQDAIKFPDLVHAFKPEPHNEMPQAATAHDTFWDFVANNPESAHMVMWTMSDRGIPRSYRMMEGFGVHTFRFVNEQGKARFVKFHWKPVLGVHSLVWDEAQKIAGKDPDFHRRDLWETIENGGKVEYELGVQMIDEEDEFKFDFDILDPTKLWPEELVPVKIIGKMTLNRNQDNVFAETEQVAFHPGNVVPGIDFTNDPLLQGRLFSYTDTQLIRLGGPNFHEIPINRPVCPFHNNQYDGYHRMTINKGPVAYHKNSLQNNDPSPATAEEGGYVHYQEKVEGKKIRQRSDSFNDYYSQAKLFWNSMSPVEKQHIISAFCFEVGKVKSKDVQRQVVDVFSNVDADLAEEIAKGVGVAAPAKRKASKENLTSPALSQARTVKTASTRKVAVLAGNGFHEKELQTVLEALKQEGITVDIISQNLGYMTSGSGQQLEASGTFLTVDSVLYDAVYAAGGLELKDNKQAMAFIREAYNHYKAIGAANEGIDLLQSSVGTTEGLGIVTAKDEPDYTAFSKAFIDAVAAHRHWDRRI

SEQ ID NO: 11238 - protein, 419 aa, Oryza sativa
MYWCWCWSALRPFYLGRALSCGDESAAGDLPQLPARKPLIRVFDLQCLFLNDACSCKYGAQCRYLHASPHQQQQQQQAKPNPFGFGTGSRQQQQQQQQQQKPNPFGFGVQGANAQSRNPFQNKWVRDPSAPTKQTEAVQPPQAQSPTCLFSSSCEDPQSCRQQISEDFKNEAPIWKLTCYAHLRNGPCNIKGDISFEELRAKAYEEGKQGHSLQSIVEGERNLQNAKLMEFTNLLNSARPSQTPSFPTMSSFPEVKNNSSFGASQTNGPPVFSSFSQIGAATNIGPGPGTTTPGMPASSPFGHPSSAPLAAPTFGSSQMKFGVSSVFGNQGSGQPFGSFQAPRFPSSMSPASSVQHRDIDRQSQELLNGMVTPPSVMFEESVGNNKNENQDDSIWLKEKWAIGEIPLDAPPQRHVSHVF

SEQ ID NO: 11239 - protein, 237 aa, Mycobacterium bovis AF2122/97
MLNAPTQALLGRPLVGNGANGAPGTGANGGDGGILFGSGGAGGSGAAGMAGGNGGAAGLFGNGGAGGAGGSATAGAAGAGGNGGAGGLLFGTAGAGGNGGLSLGLGVAGGAGGAGGSGGSDTAGHGGTGGAGGLLFGAGGAGGAGGLGGFRGAGGTGGAGGDGGNAGLFGDGGAGGAGGAGEDGTTPGGNGGAGGVAGLFGDGGNGGNAGVGTPAGNVGAGGTGGLLLGQDGMTGLT

SEQ ID NO: 11240 - protein, 325 aa, Myxococcus xanthus
MRALQLQRLDGPDGLQLVDVPEPEAGDSVLIDVVAAGVSFPDLLLTRGQYQLKPALPFIPGVEVAGVVRQAPAGAGVKPGQRVMAFSFGLGGFAEVAAIQPEMVFPIPADWSFEAAAGVVMNYHTAHFALHRRGRLKAEESVVVHGAAGGVGTAAVQVARGAKARVIAVVSDERKADVARRAGAHEVLLSTGDWVAQVREKTGGLGANVVVDPVGGDIFDKSLKCLAPEGRLLVVGFASGRIPEVQVNRLLLRNIDVVGVAWGGFLLHEPSLTPTIAKDLEAMADRGVLTPVVGPVFPLEQGAQALRELDARRATGKVVLRMREG

SEQ ID NO: 11241 - protein, 103 aa, Oryza sativa
  unsure (1)..(103): unsure at all Xaa locations
PAGNKQLVFPVPAFNVINGGSHAGNSLQXRKFMIFYWAALFKEAXMKMGVEGVXNNLKSVIKKKYGQXDATNVGDEGGFSPNIQENKEXLXLEEAIEKAGYTG

SEQ ID NO: 11242 - protein, 483 aa, Triticum aestivum
  unsure (1)..(483): unsure at all Xaa locations
MAATVAVDNLNPKVLKCEYAVRGEIVIHAQRLQQQLQTQPGSLPFDEILYCNIGNPQSLGQQPVTFFREVLALCDHPDLLKKEEIKTLFSADSISRAKQILALIPGRATGAYSHSQGIKGLRDAIASGIASRDGFPANADDIFLTDGASPGVHLMMQLLIRNEKDGILVPIPQYPLYSASIALHGGSLVPYYLNESTGWGFXISDVKKQLEDARSRGIDVRALVVINPGNPTGQVLAEENQYDIVKFCKNEGLVLLADEVYQENIYADNKKFHSFKKIVRSLXGYGEEDLPLVSYQSVSKGYYGECGKRGGYMEITGFSAPVREQIYKIASVNLCSNITGQILASLVMNPPKASDESYASYKAEKDGILASLARRAKALEIAFSKLEGITCNKAEGAMYLFPQICLPQKAIEAAKAANKAPDAFYALRLLESTGIVVVPGSGFGQVPGTWHFRCTILPQEEKIPAIISRFTVFHETFMAEYRD

SEQ ID NO: 11243 - protein, 295 aa, Bacillus subtilis
MRKKVRKAVIPAAGLGTRFLPATKAHKEMLPVVDKPAIQYIVEEAVESGIEDILIITGRKQRCIEDHFDRSAELEFNLREKGKTETLKEMQQIADLANIHYIRQKEPLGLGHAVLCAEHFIGDEPFAVLLGDDIMVSEKPALRQLMDVYAAYGTEVARRTACSPEDVSKYANIQTSGSQGHVYEVNDLVEKPSPEEAPSEIAVMGRYVLNPSIFPILKSIGRGAGNEIQLTDAFVRLRTQPIHARLLEGKRYDIADKLGCFKASTEIGLMRPEMRSQLLAYLEEVLKRETKEVLR

SEQ ID NO: 11244 - protein, 502 aa, Corynebacterium glutamicum ATCC 13032
MRPKLSGNTTRHNGAPVPSENISATAGPQGPNVLNDIHLIEKLAHFNRENVPERIPHAKGHGAFGELHITEDVSEYTKADLFQPGKVTPLAVRFSTVAGEQGSPDTWRDVHGFALRFYTEEGNYDIVGNNTPTFFLRDGMKFPDFIHSQKRLNKNGLRDADMQWDFWTRAPESAHQVTYLMGDRGTPKTSRHQDGFGSHTFQWINAEGKPVWVKYHFKTRQGWDCFTDAEAAKVAGENADYQREDLYNAIENGDFPIWDVKVQIMPFEDAENYRWNPFDLTKTWSQKDYPLIPVGYFILNRNPRNFFAQIEQLALDPGNIVPGVGLSPDRMLQARIFAYADQQRYRIGANYRDLPVNRPINEVNTYSREGSMQYIFDAEGEPSYSPNRYDKGAGYLDNGTDSSSNHTSYGQADDIYVNPDPHGTDLVRAAYVKHQDDDDFIQPGILYREVLDEGEKERLADNISNAMQGISEATEPRVYDYWNNVDENLGARVKELYLQKKA

SEQ ID NO: 11245 - protein, 446 aa, Oryza sativa (japonica cultivar-group)
MAVTIQSVKARQIFDSRGNPTVEVDVGLSDGSFARGAVPSGASTGIYEALELRDGGSDYLGKGVLKAVSNVNTIIGPALIGKDPTEQVDIDNFMVQQLDGTSNNWGWCKQKLGANAILAVSLAVCKAGAMVKKIPLYQHIANLAGNKTLVLPVPAFNVINGGSHAGNKLAMQEFMILPTGASSFKEAMKMGVEVYHHLKSIIKKKYGQDATNVGDEGGFAPNIQENKEGLELLKAAIAKAGYTGKVVIGMDVAASEFYSEKDKTYDLNFKEDNNDGSHKISGDSLKDVYKSFVSEYPIVSIEDPFDQDDWATYAKLTDEIGQQVQIVGDDLLVTNPTRVAKAISEKTCNALLLKVNQIGSVTESIEAVRMSKRAGWGVMASHRSGETEDTFIADLSVGLSTGQIKTGAPCRSERLAKYNQLLRIEEELGDAAVYAGEKFRAPVEPY

SEQ ID NO: 11246 - protein, 261 aa, GIBBERELLA ZEAE PH-1
MDHRPQAWGRPRDDVYGAYDASFMSDNGPKQNTQQPIVTGTSVIAVKFKDGVVIAADNLASYGSLARFTDVKRLRPFADSSVVGFSGDISDMQYLDRHLIELSLDEAYTSPDAPRLNAANLHRYLAKLLYRRRSKFDPLWNHILVVGLDDDDKPFLAAADLLGSTYSAPSLATGFGAMLAQPIMRRHVPDEEASQNLDKEGAINIIKECMKVLYYRDARSLDSYSMAVVTKEGVEINEGLQLEAQSWAFAERIRGYGTQTV

SEQ ID NO: 11247 - protein, 1220 aa, Ustilago maydis 521
MSSSAETSPPRAGSYILISSSTAALDAPAPAADESARVFGSRPRLFFFLPLLAALDVATTLTLGILVLNQLAKHDEPAAHILGGPLSHDPVMTSSLPGRTDPRLDDAAWERRKIVLLVIVFSIARAFSYGIVGFSIRIRQLGVTVAAISILSTLFYVSVANLLFQARPKPGIVDKRSNSWSGVLASDAWRWPDAFRHFEPTMPILVGVQMAFTLFEWILYIAIVGVKIPPGGNPVEAKRWARDLADDPQYRRGADMHSLYLSDDGHDQDITEEVRQPLEHLDAQDGGELQEVRTQLSSPISNLSCRGKSDGSDQPLLGASSSTPRGYGSTLADPKTPQGPGSVRSVRSPVALQQHGMSRSSSALSGLYSRSPGTAELGPADRYEEVLADDDDDEDEQDGEGDEDAEGSDPDDIIDITPNRAVARKEARLRLARAALPARRASGGTLSTLNLFGGGGGSTNGSSGDAVSTRTGGGGTGGAGIFSDEAGSPLGRNAREGDVSRPALLSVATSDEASRGESLAADPSIQSSNSMTLPSSSSTRTASTRASSFKDRKFKLPKWIKRGNSRSSCERQACPPTTKSRMSAQLSRADFVLHLARASLSPPIDRECEITNRESRFVISTGLARIQNPYKLTSSTVTALFKALRSAARSVKITPLALFSSVRVLRASRALGPSTTTTFTRAISVGVATIDKLRSSTTSACARLPIATASVAANRLQQTSTHLSSFSHFSTSSAVKMPPVPKPTSTHYDMVVIGGGSGAMGVSRRAAAYGKKVCVIEEDGRLGGTCVNVGCVPKKLMWHAADMAEHLKEAPEYGFGDVVNKPKVPEFAWKYFAEKRDAYVRRLNGIYDRNLDKDGVEYLSGHGKLTGKNEVEVTMRGQDGSFNAGTYKITGDRIVIATGGRPVIPSDDKIPGASLGIDSDGFFELKEQPKRVAVVGAGYIAVELAGVFNTLGSQTHLLIRHDTFLRPFDPIISETLQDYMSRTGLNVHKQTNITKVEGSKGGPLTIHTDKGDSIEVDCLLWAIGRRPNTDNLGLETVGVQLDKGGNIVVDKYQETNVRNVFAIGDIQGKALLTPVAIAAGRKLSNRLYSNHASLKDDHMDYDNIPTVIFSHPTSGTVGLSEAQAVQKFGRENVSIHTSKFTSMYYGMLDHKAPSAFKMVVAPGDKVVGLHIVGLGADEMLQGFAVAIKMGATVKDFQDTCAIHPTSAEEVVTMIPTTKHA

SEQ ID NO: 11248 - protein, 476 aa, Methanosarcina acetivorans C2A
MKNYDLIVIGTGSGMNYVNSIIDSKPEMKIAVIDKDEPGGICLTRGCIPSKLLLYPAELVREIWTAPLFGIRLEIKDIDFRMIMERMRRRIGKDIDTIRDGLNEDTYLDYYHEAAEFISPYTLRVGEETLHSEMIFLCTGSKPSIPPVKGLEETGYLTSDTVLELEERPKSLAILGGSYIGAEYGHFFSAMGAEVTVIGRNSHFLPQEEPEISELARIKMSEYMKIITNHEAIEVRKESNGQKTVVAKDRKSGEEIKITADEILVATGRTPNTDILHPEKAGIKIDSQGWIMVDKYLETSQPNIWAFGDANGKYLLKHVGNYESGIVYLNAIMKEKVRADYHAVPHAVFSYPEIAGVGMSEKEALEEYGENRVVIGFKLFEDTAKGSAMEARGYFVKVILDSLEETILGAHIIGPHASILIHQIIPLMYAPSRSAKPIIRSMDIHPSLSEVVTRAFYSRFSPEQYHHIMKHLGLED

SEQ ID NO: 11249 - protein, 213 aa, Populus tremula
CDLLRINTDRGVMLTDGKSRFSINGKPIYHFLGGSTFSEYTVCHIGTVAKINPAAPLDKVCILSCGISTGLGAALNVAKPQKGHTVAVFGLGAVGLAAAEGARLSGASRIIGVDLNPSRFKEAKKFGVAELINPKDHDKPVQQVIIEMTDGGVDRSIECTGNVQAMISAFECVHDGWDVAVLVGVPSKDDEFKTHPMNLLNERTLKGTFFGNY

SEQ ID NO: 11250 - protein, 514 aa, Zea mays
MASPRGRMSFPLRSFLMICLMAQLGASNVVLMANNTTLSFDDVEAIFTPAVKGSGVNGVLYAVEPMDACSPLRTKAIGGSVSTFALVIRGGCHFDDKVRNAQNAGFKAAVVYDTEDNGILVSMAGSSSGVHIYAVFVSKASGEELKKYSGQTDAELWIIPTYANSAWSIMAISFISLLVMSAILAACFFARRHQIRRDRARLPQTREFHGMNSRLVKAMPSLIFTKVQEDDCTSATCAICLEDYSAGEKIRVLPCRHKFHAACVDLWLTSWRTFCPVCKRDANAGTPEPPVSESTPLLSSSAIRLPEPTASVSFWSTVAAAAAASPPRPISRHPSPSRSISRKHSVSGSSIPGTPIPRFHASSSSPTCTSGSSLDLANMPSSPWPRASHLASAHSSCGGRLSPPIHIRNTSAAHVSRSAYGSPSRYVGSSHMSRGSPSCYYLGSSSGQQHPYLRHCTLSGTSLFTMVPQSPQQNQLQHGGDSEKDLSAAAPFRQLYYLQHCPDSGTSSQSLPGC

SEQ ID NO: 11251 - protein, 368 aa, Streptococcus agalactiae NEM316
MSKKTDTPDYKPSIYSLTRDELIAWAIEHGEKKFRASQIWDWLYKKRVQSFDEMTNISKDFIALLNENFVVNPLKQRIVQESADGTVKYLFELPDGMLIETVLMRQYYGLSVCVTTQVGCNIGCTFCASGLIKKQRDLNNGEITAQIMLVQKYFDERGQGERVSHIVVMGIGEPFDNYTNVLKFLRTVNDDNGLAIGARHITVSTSGLAHKIREFANEGVQVNLAVSLHAPNNELRSSIMRINRSFPLEKLFAAIEYYIETTNRRVTFEYIMLNGVNDTPENAQELADLTKKIRKLSYVNLIPYNPVSEHDQYSRSPKERVEAFYDVLKKNGVNCVVRQEHGTDIDAACGQLRSNTMKRDRQKAKVGR

SEQ ID NO: 11252 - protein, 335 aa, Agrobacterium tumefaciens str. C58
MTGANQPWEVQEVPVPKAEPGLVLVKIHASGMCYTDVWATQGAGGDIYPQTPGHEVVGEIIEVGAGVHTRKVGDRVGTTWVQSSCGRCSYCRQNRPLTGQTAMNCDSPRTTGFATQGGHAEYIAISAEGTVLLPDGLDYTDAAPMMCAGYTTWSGLRDAEPKPGDRIAVLGIGGLGHVAVQFSKALGFETIAITHSPDKHKLATDLGADIVVADGKELLEAGGADVLLVTTNDFDTAEKAMAGVRPDGRIVLCALDFSKPFSIPSDGKPFHMMRQRVVGSTHGGQHYLAEILDLAAKGKVKPIVETFALEQATEAYERLSTGKMRFRGVFLPHGA

SEQ ID NO: 11253 - protein, 216 aa, Lotus corniculatus var. japonicus
MAHRVDHEYDYLFKIVLIGDSGVGKSNILSRFTRNEFCLESKSTIGVEFATRTLQVEGKTVKAQIWDTAGQERYRAITSAYYRGAVGALLVYDITKRQTFDNVQRWLRELRDHADSNIVIMMAGNKSDLNHLRAVSEDDGGALSEKEGLSFLETSALEATNIEKAFQTILTEIYHIVSKKALAAQEATAGASVPGQGTTINVADTSGNTKKGCCST

SEQ ID NO: 11254 - protein, 267 aa, Glycine max
FGSSFHGRTLGALALTSKVQYRMPFEPVMPGVTFLEYGNAQAAVELIKQGKIAAVFVEPIQGEGGIYSATKEFLQSLRNACDETGALLVFDEVQCGLGRSGFLWAHEAYGVFPDMMTLAKPLAGGLPIGALLVTERVASAINYGDHGSTFAGSPLVCSAALAVLDKISKPDFLSSVSKKGLYFKELLREKLGENRHVKEIRGVGLIIGIDLDVPASPLVDACRSSGLLVLTAGKGNVVRLVPPLIITEKELEQAAGILCQTLPVLDN

SEQ ID NO: 11255 - protein, 120 aa, Bdellovibrio bacteriovorus HD100
MAKKLYVGNLPYSVDDEALHQHFAQFGAVDSAKVIMDRETGRSKGFGFVEMSDDSAADQAIERGNGIELGGRPINISEARPQAPREGGPRRGGGGFGGGRGGGGGERRGGFGGGGRGGPR

SEQ ID NO: 11256 - protein, 218 aa, Lotus corniculatus var. japonicus
MGGYRTDDEYDYLFKLVLIGDSGVGKSNLLSRFTKNEFNLESKSTIGVEFATKTLNVDAKVVKAQIWDTAGQERYRAITSAYYRGAVGALLVYDVTRRATFENAARWLKELRDHTDPNIVVMLIGNKSDLRHLVAVPTEDGKSFAERESLYFMETSALEATNVENAFTEVLTQIYRIVSKRAVEAGDSGSSSGLPSKGQTINVKEDSSVLKRFGCCST

SEQ ID NO: 11257 - protein, 462 aa, Arabidopsis thaliana
MSEEQPHANLAVPAFKTEKEPITQTRNGQSSVWRFGGSDKAAKASTVTLRGVIYMLFDNCGKDVNKTILPLGHGDPSVYPCFRTCIEAEDAVVDVLRSGKGNSYGPGAGILPARRAVADYMNRDLPHKLTPEDIFLTAGCNQGIEIVFESLARPNANILLPRPGFPHYDARAAYSGLEVRKFDLLPEKEWEIDLEGIEAIADENTVAMVVINPNNPCGNVYSHDHLKKVAETARKLGIMVISDEVYDRTIFGDNPFVSMGKFASIVPVLTLAGISKGWVVPGWKIGWIALNDPEGVFETTKVLQSIKQNLDVTPDPATIIQAALPAILEKADKNFFAKKNKILKHNVDLVCDRLKDIPCVVCPKKPESCTYLLTKLELSLMDNIKDDIDFCVKLAREENLVFLPGDALGLKNWMRITIGVEAHMLEDALERLKGFCTRHAKKTETETESLQALKLSDNNLEM

SEQ ID NO: 11258 - protein, 411 aa, Dioscorea tenuipes
MYNGEKINCTENRSVLHIALRAARDKVIKSDGKNVVPDVWHALDKIKEFSERIRSGSWVGATGKALTDVVAVGIGGSFLGPLFVHTALQTDPEAAECAKGRQLRFLANVDPIDVARSIAGLNPETTLVVVVSKTFTTAETMLNARTLREWISAALGPQAVAKHMVAVSTNLTLVEKFGIDPANAFAFWDWVGGRYSVCSAVGVLPLSLQYGFSVVHKFLNGAASIDDHFHSTPFEKNIPVLLGLLSVWNVSFLRYPARAILPYSQALEKFAPHIQQVSMESNGKGVTIDGVPLPFETGEIDFGESGTNGQHSFYQLIHQGRVIPCDFIGIMRSQQPIYLKGEVVSNHDELMSNFFAQPDALAYGKVAEQLLNEKVPDHLIPHKTFPGNRPSLESSITFIKCLQRWTVTSNI

SEQ ID NO: 11259 - protein, 567 aa, Dioscorea tokoro
  unsure (1)..(567): unsure at all Xaa locations
MATSTLICETPQWKDLNDHVEEIKKTHLRDLMQDSDRCKSMITEFDGIILDYSRQRVLPATVEKLFQLAEVACLKQKIDRMYNGEKINCTENRSVLHIALRAARDKAIKSDGKNVVPDVWHVLDKIKEFSERIRSGSWVGATGKALTDVVAVGIGGSFLGPLFVHTALQTDPEAAECAKGRQLRFLANVDPIDVARSITGLNPETTLVVVVSKTFTTAETMLNARTLREWISAALGPXAVSKHMVAVSTNLTLVEKFGIDPANAFAFWDWVGGRYSVCSAVGVLPLSLQYGFSVVHKFLNGAASIDDHFHSTPFEKNIPVLLGLLSVWNVSFLRYPARAILPYSQALEKFAPHIQQVSMESNGKGVSIDGVPLPFETGEIDFGEPGTNGQHSFYQLIHQGRVIPCDFIGVMRSQQPIYLKGEVVSNHDELMSNFFAQPDALAYGKVAEQLLNEKVPDHLIPHKTFPGNRPSLSLLLPSLNAYNVGQLLAIYEHRIAVEGFVWGINSFDQWGVELGKSLASQVRKQLHLSRTKAEPVEGFNFSTTTLLTRYLEAETGVPSDQSQLPKL

SEQ ID NO: 11260 - protein, 1039 aa, Sorghum bicolor
FRLLAFSENAADLLDLSPHHSVPSLDSAAPPPVSLGADARLLFSPSSAVLLERAFAAREISLLNPLWIHSRVSSKPFYAILHRIDVGVVIDLEPARTEDPALSIAGAVQSQKLAVRAISRLQALPGGDIKLLCDTVVEHVRELTGYDRVMVYRFHEDEHGEVVAESRRDNLEPYLGLHYPATDIPQASRFLFRQNRVRMIADCHATPVRVIQDPGMSQPLCLVGSTLRAPHGCHAQYMANMGSIASLVMAVIISSGGDDEQTGRGGISSAMKLWGLVVCHHTSPRCIPFPLRYACEFLMQAFGLQLNMELQLAHQLSEKHILRTQTLLCDMLLRDSPTGIVTQSPSIMDLVKCDGAALYYHGKYYPLGVTPTESQIKDIIEWLTVCHGDSTGLSTDSLADAGYLGAAALGDAVCGMAVAYITPSDYLFWFRSHTAKEIKWGGAKHHPEDKDDGQRMHPRSSFKAFLEVVKSRSLPWENAEMDAIHSLQLILRDSFRDAAEGTSNSKAIVNGQVQLGELELRGINELSSVAREMVRLIETATVPIFAVDTDGCINGWNAKIAELTGLSVEEAMGKSLVNDLIFKESEEIVEKLLSRALRGEEDKNVEIKLKTFGSEQSNGAIFVIVNACSSRDYTQNIVGVCFVGQDVTGQKVVMDKFINIQGDYKAIVHNPNPLIPPIFASDENTSCSEWNTAMEKLTGWSRGEVVGKFLIGEVFGSFCRLKGPDALTKFMVVIHNAIGGQDYEKFPFSFFDKNGKYVQALLTANTRSKMDGKSIGAFCFLQIASAEIQQAFEIQRQQEKKCYARMKELAYICQEIKNPLSGIRFTNSLLQMTDLNDDQRQFLETCSACEEQMSKIVKDATLQSIEDGSLVLEKSEFSFGDVMNAVVSQAMLLLRERDLQLIRDIPDEIKDASAYGDQFRIQQVLADFLLSMVRSAPSENGWVEIQVRPNVKQNSDGTDTELFIFRFTYPGEGLPADIVQDMFSNSQWSTQEGVGLSTCRKILKLMGGEVQYIRESERSFFLIVLELPQPRPAADREIS

SEQ ID NO: 11261 - protein, 582 aa, Phaseolus vulgaris
MSSFSVRFLAPPCCPTSRSKTLLCASPTAAPAASEAVEASRLEPRVEERDGFWVLKEEYRGGISPQEKVKLEKDPMKLFMEGGIEDLAKMSLEEIESSKHTKDDIDVRLKWLGLFHRRKHHYGRFMMRLKLPNGVTTSSQTRYLASVIRKYGKDGCADVTTRQNWQIRGVVLPDVPEILKGLAEVGLTSLQSGMDNVRNSVGNPLAGIDPDEIVDTRPYNNLLSQFITANSLGNPAMSNLPRKWNVCVVGSHDLFEHPHINDLAYMPANNKDGRFGFNLLVGGFFSAKRCAEAIPLDAWVSADDVIPVCKAVLEAYRDLGFRGNRQKTRMMWLIDELGIEVFRSEVEKRMAGKQLERAQEDLVKKQWERRDYLGVHPQKQEGLSYVGIHIPVGRIQADEMDELALLADEYGSGELRLTVEQNIIIPNVDNSKLEALLQEPLLKHKFSPEPSLLMKTLVACTGNQFCGQAIIETKARALKVTEEVERQVAVTRPVRMHWTGCPNTCGQVQVADIGFMGCMARDENGKATEGVDIFLGGRIGSDSHLAELYKKGVPCKNLVPVVADILVKHFGAVQRNREEVED

SEQ ID NO: 11262 - protein, 170 aa, Lycopersicon esculentum var. cerasiforme
DASGTMGGACGYGNLYSQGYGVNNGALSTALFNNGLSCGACFEIKCDNYPQWCHPGSPSIFITATNFCPPNFALPNDNGGWCNPPRPHFDLAMPMFLHIAEYRAGIVPVVYRRVPCRKQGGIRFTINGFRYFNLVLVTNVAGAGDIVSLSIKGSKTNWISMSRNWGQNWQ

SEQ ID NO: 11263 - protein, 377 aa, Bacillus anthracis str. A2012
  unsure (1)..(377): unsure at all Xaa locations
MRAKTKLIHGIRIGEPSTGSVNVPIYQTSTYKQEAVGKHQGYEYSRTGNPTRAALEEMIAVLENGHAGFAFGSGMAAITATIMLFSKGDHVILTDDVYGGTYRVITKVLNRFGIEHTFVDTTNLEEVEEAIRPNTKAIYVETPTNPLLKITDIKKISTLAKEKGLLTIIDNTFMTPYWQSPISLGADIVLHSATKYLGGHSDVVAGLVVVNSPQLAEDLHFVQNSTGGILGPQDSFLLLRGLKTLGIRMEEHETNSRAIAEFLNNHPKVNKVYYPGLASHQNHELATEQANGFGAIISFDVDSEETLNKVLERLQYFTLAESLGAVESLISIPSQMTHASIPADRRKELGITDTLIRISVGIEDGEXLIEDLAQALA

SEQ ID NO: 11264 - protein, 399 aa, Vibrio vulnificus YJ016
MKIMFEKVVAAPADPILGLTEEFKKDPRAEKINLGVGIYKTEQGETPVLATVKKAEAALVETEKTKSYLTIEGTAEYALAVQKLLFGADAELINAQRAKTAQAPGGTGALRVAGEFIKRQLGDVKIWISNPTWANHHGVFRAAGLETVEYAYYNPETKDKDFAAMLADLEKASAGDVVLLHGCCHNPTGIDPTAQEWEALAKLVADKGLLPLFDFAYQGFAKGVEEDAQGLRTFAKFNKEILVASSFSKNFGLYNERVGAFTLVAESQEIAETAFSQVKAIIRSIYSNPPAHGSAVVTHILNDAALRAEWEAEVAEMRDRIQEMRELFVATLKEEGVAADFSFIERQNGMFSFSGLNKDQVARLKEEFAIYIVGSGRISVAGMTKSNMGPLCKAIAAVL

SEQ ID NO: 11265 - protein, 579 aa, Glycine max
MCGILAVLGCSDSSQAKRVRVLELSRRLKHRGPDWSGLHQYGDNYLAHQRLAIVDPASGDQPLFNEDKTVVVTVNGEIYNHEELRKQLPNHTFRTGSDCDVIAHLYEEHGENFMDMLDGISSFVLLDTRDNSFIVARDAIGVTSLYIGWGLDGSVWISSELKGLNDDCEHFESFPPGHLYSSKERAFRRWYNPPWLSLAIPSAPYDPLALRHAFEKLWIKRLMTDVPFGVLLSGGLDSSLVAAVTARYLAGTKAAKQWGTKLHSFCVGLEGAPDLKATKEVAEYIGTVHHEFHYTVQDGIDAIEDVIYHIETYDVTTIRASIPMFLMSRKIKSLGVKWVISGEGSDVFFGGYLYFHKAPNKEEFHQETCRTIIVLHRYDCSRANKSTFVWGLEARVPFLDKEFIRVAMNIDPECKMIKKEEGRIEKWALRRAFDDEEHPYLPKHILYRQKEQFSDGVGYGWIDGLKAHAEKHVTDRMMLNAANIFPFNTPTTKEAYHYRMIFERFFPQNSCRLTVPGGTSVACSTAKAVEWDAAWSNNLDPSGRAALGVHASAYGNQVKAVEPEKIIPKMEVSPLGVAI

SEQ ID NO: 11266 - protein, 190 aa, Xylella fastidiosa 9a5c
MHTHVSHAFASKLSLLSLDRFPMSSIYTFTFTRLDGRPQALADWRGQVLLLVNVASRCGFTPQYAGLEMLWQRYRDAGLIVIGFPCDQFAGQEPGDEAKIAEFCTLNYGVDFPMAAKIKVNGADAHPLWQWLKHRRRGLFGMAAIKWNFTKFLIGRNGQPIARYSPIKSPEQLEVHIVRALGEEGGGNTH

SEQ ID NO: 11267 - protein, 491 aa, Pseudomonas mendocina
MDTTRPAYQNLELQPLAGQWRAGSSGRPLEVFDPYNDELLLRIALASREDLDAAYRKARDSQREWATTAPAERARVLLEAVKIFDERREEIIDWIIRESGSTRIKAQIEWGAARAITLESASLPNRVHGRIIASNISGKESRVYRAPLGVIGVISPWNFPLHLTARSLAPALALGNAVVVKPASDTPITGGLLLARIFEEAGLPAGVLSVVVGSGAEIGDAFVEHPVPALISFTGSTQVGRNIGRIASGGEHLKHVALELGGNSPFVVLADADVEQAVNAAVVGKFLHQGQICMAINRIIVEQPLLEDFTRRFVERVKALPYGDPSKPGTVVGPVINARQLAGLKEKIATAKAEGATLLLGGEPQGNVMPPHVFGNVTADMEIAREEIFGPLVGIQSARDAEHALELANSSEYGLSSAVFTASLERGVQFARRIHAGMTHVNDIPVNDEPNAPFGGEKNSGLGRFNGDWAIEEFTTDHWITLQHSPRPYPF

SEQ ID NO: 11268 - protein, 348 aa, Candida boidinii
MSIPTTQKAVIFYENGGPLEYKDIPVPTPKPNEILINIKYSGVCHTDLHAWKGDWPLATKLPLVGGHEGAGVVVAKGSNVTNFEIGDYAGIKKLNGSCMSCEYCQQGAEPNCPDADLSGYTHDGSFQQYATADAVQAAKIPKDCDLATIAPILCAGVTVYKALKTADLRPGQWVCISGAGGGLGSLAIQYATAMGLRVIAIDGGDEKATFCKSLGAETFVDFTKTKDMVKAIQEATNGGPHGVINVSVSDAAISQSVEYVRPLGKVVLVGLPAHSVVKSPVFEHVVKSIEIRGSYVGNRLDTAEAIDFFSRGLVKATIKIIGLSELPKVYELMEQGAIIGRYVVDTTK

SEQ ID NO: 11269 - protein, 375 aa, Candida boidinii
MLSQTFLRRTPIIRKSPISLALRLQSTFQIPEKQMAVIFETNGGPLEYKEIPVPKPKPTEILINVKYSGVCHTDLHAWKGDWPLATKLPLVGGHEGAGVVVAKGESVTNFEIGDYAGIKWLNGSCMSCEYCEQGHESNCPDADLSGYTHDGSFQQYATADAIQAAKIPKEADLAEVAPILCAGVTVYKALKTANLQAGQWVAISGAGGGLGSLAVQYAKAMGYRVVGIDGGADKGELVKSLGGEVFIDFTKEKDLTKAIQDATNGGPHGVINVSVSEAAISQSCDYVRSTGKVVLVGLPAGAVCHSPVFQHVVKSIEIKGSYVGNRADTREAIDFFSRGLVRSPIKVVGLSELGDVYEKMEKGAILGRYVVDTSY

SEQ ID NO: 11270 - protein, 242 aa, Streptomyces coelicolor A3(2)
MADRPLIGVSTYLESGARWGVWELEAALLPAGYPRLVQRAGGLAAMLPPDAPEHAAATVARVDGVVIAGGPDVEPVRYGAEPDPRTGPPARARDTWELALIEAALAARVPLLGICRGMQLLNVALGGTLVQHIERHAEVVGVFGGHPVRPVPGTLYAGAVPEETFVPTYHHQAVDRLGSGLVASAHAADGTVEALEMPSGSGWVLGVQWHPEMGEDVRVMRALVAAARPGRPVTEDRPGPGR

SEQ ID NO: 11271 - protein, 430 aa, Xylella fastidiosa Dixon
MTAIVKIYAREILDSRGNPTLEAEVTLENAVCGRAAVPSGASTGTKEAVELRDGDKTRYLGKGVRAAVDNVNGVIAAALVGFDGADQTGLDHRLINLDGTENKGRLGANALLGVSLATAHAVAAARKQPLWMYLSTLGESKLSLPVPMMNIINGGAHADNNVDFQEFMVLPVGFASFSEALRAGAEIFHALKSVLKGRGLSTAVGDEGGFAPDFRSNVEALDAILEAIGRAGYIAGEDVLLGLDVASSEFRDNGKYNLVGENKRLTSEQFVDFLDDLVAQYPIISIEDGLAEDDWVGWKQLTERIGHKVQLVGDDLFVTNPKVFQEGITSGIANAILIKLNQIGTLTETLESIAMAHRAQYAAIVSHRSGETEDTSIADIAVATTATQIKTGSLCRSDRVAKYNQLLRIEQALGVGVRYAGRDAFVSLKS

SEQ ID NO: 11272 - protein, 371 aa, Candida boidinii
MLSQVFRRSMINRSSLMTRFQSTFTIPEKQMGVIFETNGGPLEYKEIPVPKPKPTEILINVKYSGVCHTDLHAWKGDWPLPVKLPLVGGHEGAGVVVAKGESVTNFEIGDLAGIKWLNGSCMSCEFCEEGNESNCLDADLSGYTHDGSFQQYATADAIQAAKIPEGTDLAEVAPILCAGVTVYKALKTADLAAGQWVAISGAAGGLGSLAVQYAKAMGLRVLGIDGGAAKKELFHSMGGDVFIDFKEEKDIVKAIQDATNGGPHGVINVSVSEAAISQSCDYVRPTGKVVLVGLPAGAVCKSPVFQHVVKSLEIKGSYVGNRADTREALEFFSRGQVKSPIKIVGLSELPMVYGLMEKGAILGRYVVDTSY

SEQ ID NO: 11273 - protein, 218 aa, Lotus corniculatus var. japonicus
MAGYKADDEYDYLFKLVLIGDSGVGKSNLLSRFTRNEFNLESKSTIGVEFATKSLNIDGKVIKAQIWDTAGQERYRAITSAYYRGAVGALLVYDVTRSTTFETAGRWLKELRDHTDPNIVVMLIGNKSDLRHLVTVSTEDGKAFAEKESLYFMETSALEATNVENAFSEVLTQIYRIVSKRAVEAGDRPSTSVVPSQGQTINVNEDSSVLNRYRCCSN

SEQ ID NO: 11274 - protein, 320 aa, Escherichia coli
MIKKIGVLTSGGDAPGMNAAIRGVVRSALTEGLEVMGIYDGYLGLYEDRMVQLDRYSVSDMINRGGTFLGSARCPEFRDENIRAVAIENLKKRGIDALVVIGDGGSYMGAMRLTEMGFPCIGLPGTIDNDIKGTDYTIGFFTALSTVVEAIDRLRDTSSSHQPISVVEVMGRYCGDLTLAAAIAGGCEFVVVPEVEFSREDLVNEIKAGIAKGKKHAIVAITEHMCDVDELAHFIEKETGRETRATVLGHIQRGGSPVPYDRILASRMGAYAIDLLLAGYGGRCVGIQNEQLVHHDIIDAIENMKRPFKGDWLDCAEKMY

SEQ ID NO: 11275 - protein, 276 aa, Zea mays
MSPRVVLLFLAALRPCAALVRLHSTTFSFTFLDAPARFGPRVSGDGICGSLRAADPAEACETIKDRGGRRGAGRKAFVLIARGNCSFEEKVRAAQQAGFDASIVYDDEEKASLYSMVGESDGIHIPAIFVSKMAGETLKKFARGEDEECCINSSMDETAGTVLVMSFVSLVVIMSVLASFLFARNCRLLRHGVDNHPPYVKKQVVEKFPCSAYSAPCSSEDNFQEACAICLEDYNNGDMLRHLPCKHEFHKICIDSWLTKWGIFCPICKLEVTLGG

SEQ ID NO: 11276 - protein, 602 aa, Zea mays
MPCPNPDPFRGAVPGRKSSWNYRESWCNHHSTCSASPPPGGSSRPRSPPPGPTPASPRPPSPRPRQRMAPSPRCRPSTTRRRRTTGRAPRRSRGRPGRKKPATHTPARRFCRAPTNRAGRKPPQHMQRLASSRRLLQAALAPARANSSLSAAAVAAPAPANGAFPKMPAFDYTPPPYDGPRAEEIFRKRAQFLSPSLFHFYDRPLNIVEGKMQYLFDEDGRRYLDAFGGIATVCCGHCHPDVVEAIVNQAKRIQHSTVLYLNHAIADFAEALASKMPGDLKVVFFTNSGTEANELALMIARLYTGCNDIISLRNGYHGNAAGTMGATAQSNWKFNVVQTGVHHALNPDPFRGAFGSDGEKYARDVQEIIEFGTTGRVGGFISEAIQGVGGIVELAPGYLPVAYSMVRKAGGLCIADEVQAGVARTGSHFWGFEGHGVIPDIVTMAKGIGNGIPIGAVVTTPEIAQVLTRRSYFNTFGGNPVSTAGGHAVLKVLEKEKLQENAFVVGSYLKEQLNNLKDKHEIIGDVRGKGFLLGVELVTDHEKKTPAKAEISRVMNHMKDMGVLVGKGGFYGNVFRITPPLCFTKEDSDFFIEVMDIALSKL

SEQ ID NO: 11277 - protein, 567 aa, Dioscorea tokoro
MATSTLICETPQWKDLNDHVEEIKKTHLRDLMQDSDRCKSMITEFDGIILDYSRQRVLPATVEKLFQLAEVACLKQKIDRMYNGEKINCTENRSVLHIALRAARDKAIKSDDKNVVPDVWHVLDKIKEFSERIRSGSWVGATGKALTDVVAVGIGGSFLGPLFVHTALQTDPEAAECAKGRQLRFLANVDPIDVARSITGLNPETTLVVVVSKTFTTAETMLNARTLREWISAALGPQAVSKHMVAVSTNLTLVEKFGIDPANAFAFWDWVGGRYSVCSAVGVLPLSLQYGFSVVHKFLNGAASIDDHFHSTPFEKNIPVLLGLLSVWNVSFLRYPARAILPYSQALEKFAPHIQQVSMESNGKGVSIDGVPLPFETGEIDFGEPGTNGQHSFYQLIHQGRVIPCDFIGVMRSQQPIYLKGEVVSNHDELMSNFFAQPDALAYGKVAEQLLNEKVPDHLIPHKTFPGNRPSLSLLLPSLNAYNVGQLLAIYEHRIAVEGFVWGINSFDQWGVELGKSLASQVRKQLHLSRTKAEPVEGFNFSTTTLLTRYLEAETGVPSDQSQLPKL

SEQ ID NO: 11278 - protein, 445 aa, Agrobacterium tumefaciens str. C58 (U. Washington)
MSATTKEILDLNRFDASRTEGFPAELAERVAKRQATFGASSVLFYEQPIEMVSAQGAYLYDAGGRKYLDVYNNVPSVGHCHPRVVEAIARQVGELNIHTRYLNRVVEAYTENLLSKFPAGLSNVVLTCTGSESNDLALRIARIGTGAEGFIVTEAAYHGNTALVTEVSPSSLRKRKPAAFVAIIPAPAARDGMSVASNFAASVEQAINELNSRGIKFAALIVDTIFSSDGIYADPAGFLKEAVDVVHRAGGLLIADEVQPGFGRTGGSLWGFERHGVTPDIVTMGKPMGNGFPMGGVVTRPDLLQRFCEETGYFNTFGGNPVAAAAGHAVLRVIEEEGLIERSATVGGYFKQSLQALQSRHSEIGDVRGAGLFIGLDFVDPATGEPDSTRATHAINQLRHNSILIGAAGKYGATLKIRPPLCFSNEDVDLFTGTLDIILQARRAA

SEQ ID NO: 11279 - protein, 567 aa, Dioscorea tokoro
  unsure (1)..(567): unsure at all Xaa locations
MATSTLICETPQWKDLNDHVEEIKKTHLRDLMQDSDRCKSMITEFDGIILDYSRQRVLPATVEKLFQLAEVACLKQKIDRMYNGEKINCTENRSVLHIALRAARDKAIKSDXKNVVPDVWHVLDKIKEXSERIRSGSWVGATGKALTDVVAVGIGGSFLGPLFVHTALQTDPEAAECAKGRQLRFLANVDPIDVARSITGLNPETTLVVVVSKTFTTAETMLNARTLREWISAALGPXAVSKHMVAVSTNLTLVEKFGIDPANAFAFWDWVGGRYSVCSAVGVLPLSLQYGFSVVHKFLNGAASIDDHFHSTPFEKNIPVLLGLLSVWNVSFLRYPARAILPYSQALEKFAPHIQQVSMESNGKGVSIDGVPLPFETGEIDFGEPGTNGQHSFYQLIHQGRVIPCDFIGVMRSQQPIYLKGEVVSNHDELMSNFFAQPDALAYGKVAEQLLNEKVPDHLIPHKTFPGNRPSLSLLLPSLNAYNVGQLLAIYEHRIAVEGFVWGINSFDQWGVELGKSLASQVRKQLHLSRTKAEPVEGFNFSTTTLLTRYLEAETGVPSDQSQLPKL

SEQ ID NO: 11280 - protein, 212 aa, Oryza sativa
MGFPVGYSELLLPRLLLQVLLLLGHLHRFLLWAFHAVGLGDLIDNPPGLAATEQDLMLQGRGGGMAEGWASSSALQHRRPEFRAIPPMAIEEALPVVRFDELVASAPAAVCGGGDCAVCLSGICGRDEVRRLSNCRHVFHRGCLDRWMAHEQRTCPLCRAPLIPDELLPAASGLPDPSDYDLSYYPSPLPLAPTPTLLRPHELLLNGLGGFQ

SEQ ID NO: 11281 - protein, 487 aa, Streptomyces coelicolor A3(2)
MPENNQKPLTTVAGAPVPDNQNSLTSGPRGPMLLQDVWFLEKLAHFDREVIPERRMHAKGSGAFGTFTVTHDITRYTSAKIFSEIGKKTPLFTRFSTVAGERGAADAERDIRGFAVKFYTDEGNWDLVGNNTPVFFFRDPLKFPDLNHAVKRDPRTNLRNAENNWDFWTNLPEALHQVTIVMSDRGIPASYRHMHGFGSHTYSLINAEGERFWVKFHHRTQQGIKNLTDAEAEALVGKDRESHQRDLFDAIEDGDFPKWKLFIQVMPEADAENYRFHPFDLTKVWSKKDYPLIEVGEWELNRNPDNYFADVEQAAFSPANVVPGISFSPDRMLQGRLFSYGDAQRYRLGVNHHQIPVNAPKNPVNSYHRDGAMRVDGNQGATPGVEPNSYGRWQEQPAYRDPAQAVGAVADRFNYREDDDNYFEQPGNLFRQMSPEQQQVLFENTARAIDGASAQTIERHIGNCTQADPAYGAGVRKAIEALAAGNL

SEQ ID NO: 11282 - protein, 567 aa, Dioscorea tokoro
  unsure (1)..(567): unsure at all Xaa locations
MATSTLICETPQWKDLNDHVEEIKKTHLRDLMQDSDRCKSMITEFDGIILDYSRQRVLPATVEKLFQLAEVACLKQKIDRMYNGEKINCTENRSVLHIALRAARDKAIKSDGKNVVPDVWHVLDKIKEFSERIRSGSWVGATGKALTDVVAVGIGGSFLGPLFVHTALQTDPEAAECAKGRQLRFLANVDPIDVARSITGLNPETTLVVVVSKTFTTAETMLNARTLREWISAALGPQAVSKHMVAVSTNLTLVEKFGIDPANAFAFWDWVGGRYSVCSAVGVLPLSLQYGFSVVHKFLNGAASIDDHFHSTPFEKNIPVLLGLLSVWNVSFLRYPARAILPYSQALEKFAPHIQQVSMESNGKGVSIDGVPLPFETGEIDFGEPGTNGQHSFYQLIHQGRVIPCDFIGVMRSQQPIYLKGEVVSNHDELMSNFFAQPDALAYGKVAEQLLNEKVPDHLIPHKTFPGNRPSLSLLLPSLNAYNVGQLLAIYEHRIAVEGFVWXINSFDQWGVELGKSLASQVRKQLHLSRTKAEPVEGFNFSTTTLLTRYLEAETGVPSDQSQLPKL

SEQ ID NO: 11283 - protein, 1428 aa, Shewanella oneidensis MR-1
MIELRIDNKIVSAEPSDNLLHAARKAGIAIPSLCDPTDASRQLDTQAHAEKQDCNLCLVQIENSDASLRCVKACETPAQTGMKVITQSAFLTKQRQAALNAILSDHFADCEAPCQQACPAGVDVQRYLYHIAQGDHTQAVKVIKETLPLPLSIGRVCPAFCETECRRGLIDDPIAIRQLKRHAADLDLADDEHGNSYQPPRLADTGKKIAIIGSGPAGLSAGYYLSNQGHNIEIFEAMPKAGGWLRYGIPEYRLPKAILDKEIELLCRNGLTIHTQMRLGHEIHLNQLITDFDAVCLAIGAQKAVPMHYKGSELAGCYLGVDFLKDHCLDKQLKLGKKVAVIGGGNTAIDCARTAVREGCDVTLIYRRTRAEMPAEAYEVHEAEVEGVKFHFLTNPLENHSDADGRVQSVTFSKMTLGEADASGRRAPVDTGETFTEAFDTVIAAVSQAPDLSFMQDPKGQLSHGELALSRWNTLMGCEQTMSSGVEKLFVMGDARRGPATAVAAIGDGRKAAKAIDKMLQIGLSCDLHAHEFNSVKTIPGSLKQAEVKSAEASSPLYPHTKRQPRLKMPELTALQRLLNYSEVELGFPADAAMQEAARCLECACQANTDCKLRDYATDYGVESKSLATENARYFSVDKSSPFIQFDANRCISCGKCVDVCQQQSGHCAIQFAKDSYQVLPQSISPADERRAPRVGFSASMADSHCVQCGNCVQVCPTGALVDARDKRQGDCTELTTASTICTYCGVGCRLDLKIDPSTNRIRHIEGNKDSVVNQGMLCVKGRFGFDFIHSDKRLTTPLIRKNGKLQPCSWPEAIDYVAKRLTEIKQKDGSNAFASLASAKATNEDNFVLQKFVRSVLGTNNIDHCARLCHSSTVTGLQQSIGSGAMTNDILSIKDSDVIFILGSDTTCAHPIIASKIQQAVNLYGARLIVADPKRVGIAEKAELYVAHRPGTDVMLLNAIMAEIIRNNWQDKDYIAKRTEGIEALYAELAKEDYSLEKAALITGVKAENIARIARTIGTAQKTAVYYAMGITQHTTGHDNVTAISNLQLLCGNIGVSGAGINPLRGQSNVQGACDMGALPNYFTGYQKVTDIHARMRFESHWQTPLSGEIGVTATHMMHDIAKGKINALYVMGENPVLSDPDQAHVLNALSQIEFLVVQDIFLTETAELAHVVLPAAAFVEKRGHFTNTERRVQRLEQALASPGEALPDWQIVQAIANAMGANWDYKDEAAIWAEINALTPQYRGILWERLTAGEDGQIPQGIQWPCPDEKHPGTPIMHQGQFTRGLGLFTPVSYRLPAEMPCNEYPLTLSTGRLLEQFHTGTLTRKTPGLDLLGAPKVMISVYDAEQLGINNGDKIRLTTRRGEIEIDAFVTKRAQAGVLFLPFHFVEAAANKLTINALDPVAYIPEYKVCAVRVEKVTKQMCEPT

SEQ ID NO: 11284 - protein, 544 aa, Ustilago maydis 521
MVAELKQRTTTATRDAPAAPKEEFADANIPDDYVSRVLATEKPLPPIQLKNILSEIQWVSFLALTVTPILAIYGLFTTSWNTKTALWSFIYYFMTGLGITAGYHRLWAHRSYNATYPLQYFLACMGSGAVQGSIHWWSRGHRAHHRYTDTDLDPYGAHFGLFWSHLGWMLVKPRRKPGVADISDLRKNPVIKFQHKFYIPMLLFFGFGLPTLVAGLGWNDWRGGFFFAGMLRLVFVHHSTFCVNSLAHYLGEATFDNKMTPRDHFFTALVTVGEGYHNFHHQFPMDYRNAVQWYQFDPTKWFIASMYKLGLATHLKTFPDNEVKKGRLAMQLQKAHELGQQLEWPKSSAHLPVISWDDFVEESKTRPLMVVHGFIHDVSSFLDEHPGGRHLLTGKIGKDATTAFLGGVYDHSNAAHNLLSMMRVGVLDGGYQLAKDELAKAERENRATGVSSHRPAGSPPSPVTSDDEDFAAPATPTDDTPMTTTSTVAAASEQLKAQQSADNVKSINAKAAAYVTPGEAYTIVKRGDLRENAKVGGTKFGRFL

SEQ ID NO: 11285 - protein, 644 aa, Streptomyces coelicolor A3(2)
MCGIAGTYHWPDGKAVTDRLTDVLAHRGPDGAGRYSHPAGEGEVHLGHRRLAVVDLSTTGAQPMVSEGLALSYNGELYNAPELRTELESAGVRFRGTSDTEVVLEAWRRWGTDCLPQLRGMFAFAVFDERTGELVLARDQLGIKPLFLLRRGAGLVFASELKALATATGGKLEVDHAALVASLLYYWVPDSRCALREAEKLPPGSWLRCRPDGRVERGRFWNLRDVAAEGRERARSGERPDLAAVVEESTRRHLLSDVPVATFLSGGLDSSYLTALAARDRPGISAYTIGFRAEDARFEAMPDDLRYARQVAERFGVDLHEIEIAPNVLDLLPRMTYHLDEPIGDPAAINTFLICSAAREAGVKVMLSGMGADELFAGYRKHLANVLALRYQRVPRPLRRGVSAAVGRLPVASSRRGYRSVRFAKRFLSFADLPQETAFRRSYTMYDRQELLDLIDPDLAGTVEDVLTEHADVYEDNDLDDFVNRMCLADARMFLPGLNLAYTDRSSMAASTEVRVPYVDVEVVKAAFAVPGDRKIVGRQGKAVLKEAATSVLPREIVYRPKGLFSAPLRAWMSRDLAPLVREVVNDGELVRSGFLRRDALRRLVAEDAAGQRDFSKHLWHVLTLEYWYRGATSGSGDHSSSTA

SEQ ID NO: 11286 - protein, 374 aa, Glycine max
MAISIPSRQLFIDGEWKVPLLNNRFPIINPATEDIIGHIPAATKEDVDLAVDAAKRAFSHNKGKDWSSAPGSVRARYLRAIASKITEKKDELGKLEAIDCGKPLDEALADLDDVIGCFNYYAELAEGLDAKQNAPVSLPMETFKSYVLKEPIGVVALITPWNYPLLMATWKVAPALAAGCTAILKPSELASVTCLELAEICREVGLPPGVLNIVTGLGNEAGAPLSSHPDVDKISFTGSSATGSRIMTAAAQLTKPVSLELGGKSPIIVFEDVDLDKTAEWTIFGCFFTNGQICSATSRLIVHESIATEFVNRLVQWAKNIKISDPFEEGCRLGPIVSEGQYKKVLNCISTAKSEGATILIGGSLQICEVVSVM

SEQ ID NO: 11287 - protein, 429 aa, Methanosarcina acetivorans C2A [sequence omitted]

SEQ ID NO: 11288 - protein, 615 aa, Glycine max
MASLSGICSSSPTLKKFPNQSPSLTDPLRKDHVSFPARLADRTLSLAPLRAVAREVSDGALAAAVKKGLEKDPRALWRRYVGWLYQHKELGIYLDVSRVGFSDEFVKEMEPRFQAAFRAMEELEKGAIANPDESRMVGHYWLRDPKRAPNSFLKTQIENTLDAVCKFANDVVSGKIKPPSSPEGRFTQILSVGIGGSALGPQFVAEALAPDNPPLKIRFVDNTDPAGIDHQIAQLGPELASTLVIVISKSGGTPETRNGLLEVQKAFREAGLDFPKQGVAITQENSLLDNTARIEGWLARFPMFDWVGGRTSEMSAVGLLPAALQGIDIREMLAGASLMDEANRSTVLRNNPAALLALCWYWATDGVGSKDMVILPYKDSLLLFSRYLQQLVMESLGKEFDLDGNRVNQGISVYGNKGSTDQHAYIQQLREGVHNFFVTFIEVLRDRPPGHDWELEPGVTCGDYLFGMLQGTRSALYANNRESITVTVQEVTPRTVGALIALYERAVGIYASLVNINAYHQPGVEAGKKAAGEVLALQKRVLAVLNEASCKEPVEPLTLEEVADRCHAPEDIEMIYKIIAHMAANDRALIVEGSCGSPRSIKVFLGECNIDGLYA

SEQ ID NO: 11289 - protein, 191 aa, Cucumis sativus
EFCSTSNMLKTLERYQKCSYGAVEVTKPTKELESSYREYLKLKSRFESLQRTQRNLLGEDLGPLNSKELEQLERQLESSLKQVRSTKTQYMLDQLSDLQNKEQMLIETNRALQIKLEEISSRNNIRLTWDGGDQSMSYGPQNAQTQGFFQPLECNPTLQIGYTSAVSDQITSTTTPTHAQQVNGFLPGWML

SEQ ID NO: 11290 - protein, 402 aa, Triticum aestivum
  unsure (1)..(402): unsure at all Xaa locations
MATKRSVGTLGEADLKGKKVFVRADLNVPLDDAQKITDDTRIRASIPTIKYLLEKGAKVILASHLGRPKGVTPKFSLKPLVPRLSELLGLEVVMAPDCIGEEVEKLAAALPDGGVLLLENVRFYKEEEKNDPEFAKKLASVADLYVNDAFGTAHRAHASTEGVTKFLRPSVAGFLMQKELDYLVGAVANPKKPFAAIVGGSKVSSKIGVIESLLAKVDILILGGGMIFTFYKAQGLAVGKSLVEEDKLELATSLIETAKSKGVKLLLPTDVVVADKFAADAESKIVPATAIPDGWMGLDVGPDSIKTFAEALDTTKTVIWNGPMGVFEFEKFAAGTDAIAKQLAELTGKGVTTIIGGGDSVAAVEKXAGLADKMSHISTGGGASLELLEGKPLPGVLALDEA

SEQ ID NO: 11291 - protein, 201 aa, Lotus corniculatus var. japonicus
MSNEYDYLFKLLLIGDSSVGKSCLLLRFADDSYVDSYISTIGVDFKIRTVELQGKTIKLQIWDTAGQERFRTITSSYYRGAHGIIIVYDVTEMESFNNVKQWLNEIDRYANDSVCKLLVGNKSDLVENKVVDTQTAKAFADELGIPFLETSAKDSINVEQAFLTMAAEIKKKMGSQPTGSKSAETVQMKGQPIPQKSNCCG

SEQ ID NO: 11292 - protein, 2218 aa, Stigmatella aurantiaca
MSSFLERVAELSPEKRAALAELLRLAPEPIAIVGMACRYPGGVKDSDSYWDLLKRGGDAVTEIPAARWDINAFYDPNQDSPGKTTTRWGGFLDDVEGFDPHLFGISPREAASMDPHQRLFLEVAWEALENAGQQTDRLAGSKTGVFVGLYTSDYSPVVLSDLNAINVYTGTGTANNVAAGRLSYLLDLQGPSFVVDTACSSSLVAVHLACQSLLNRECRMAVVGGVTLLLTPLTLVMASKMQLMAADGRCKTFDSRADGIAMGEGCGVVILKRLSDAQADGDRILAVIKASAINQDGRTNGLTAPSGASQQVLLRQALTRAGISPSQVTYVEAHGTGTPLGDPIEVEALAEVIGQPRPSGPPCVLGSVKANLGHTGAAAGVAGLIKVVLSMQNEAIPPQLHYRELNSNISLENTSLVIPKELHPWPAGKGPRIAGISAFGWSGTNAHVLVEEAPAAPKARAAVERPVHLLTLSARTEAALREFAERVKTYVSAHADLPIADLCYSANTGWSKFEHHLAVPAGTTAQLSERLSAFLEGQPQAGTSYGQVTGRRGPGVAFLFTGQGSQYAGMGRQLYQTQPTFRRALDRCDELLRPLLGRSILSVIYPEAGQASPIDETAFTQPALFAFEWALAELWRSWGVVPTVVMGHSVGEYVAACVAGVFTLEEGLALIVERARLMQSLPPGGEMAAVFTDGARTAQAIAPYASQVSIAAFNGPSETVISGDGKAVEAILGALSAEGVKVRRLGVSHAFHSPLMDPMLDAFERAAAKTRFMPPKITLISNLTGGPSEEFSARALRRHAREPVRFSDGMAALKARGVSVAVEIGPNATLLGIGSRCLPEGSVAWLPSLRKDKDEWEVLLATLGALSVRGVPVNWAGFDSDYPRRRVSLPNYPFQHERFALKQMDGRGVAPSGQVVGHPLLGSRLRVATVDGTLFESKFRADEPSFFSEHRVYGMSTVPATAYLEGALAAAEEIFGAGEHALESVDIQEALVLSDAPRTVQYLIGSREEGGTARFQVFSLASSGSGSEGVWTTHSSGQIRIASGAEPLSGTPLTPEQALEAIRTRCPRGLEPRAFYDWLEGQGLEYGPRFRGVQQVWRGDGEALGLVELPESAVDEAKAFKVHPGLMDACVQLFGVIEYREGAQDDTEVYLPVSIDRYRLKGRLGSKVWSHARIRPSEGTARETLKADIRLYDEAGRIVAEVEGMCIKRAPREMLARFGQAQFSNWLHEVEWKEEVRSAAAGAARPGSCRWVVFADRSGVAEALIDRLTARGEPVVRVLADDHYSREGDLVRLHPEQPEHVRSLMESAASSGGAVTRYLYLWGLDSSGPVSRGEASRVDTRAIGSNPLLHLVQELAGQQGSHQLFLVTRGAQATTREHAPIDAFQASLWGFARTIAFEHPELRPVRIDLEPSRKGGSPRETEILLGEVTRSDAASAEDAIAFRGSLRLVSRLMRQAKRASSNRKLRIPPAPAFRLEISQRGTLEDLTVRPVERRPPGPGEVEIRVRATGLNFRDVLNALGMYPGDPGLLGGECAGVISAIGPGVEGFKVGDPVVAVISLGSFATYCTVLADFVAHKPAALSFAQAAAIPIAFLTAQYGLQQLGRMAAGSRVLIHAAAGGVGMAAVQLAKRAGAEVFATASSGKWDVLEAMGVEHRMNSRTLDFADEVMARTEGQGIDIVLNSLADDFIPKSLSVLRSGGRFLEIGKRGVWTSAQVAERYPGVSYAIYDLGEVGTKDPSIIRSMFRALMAEFEQGTLVPPPLRVFALQDAVEAFRHMALAKHVGKVVITVNDGAPESAETTARAGAAVPIRGDSTYLITGGLSGLGLKTAQWMARRGARHLVLVARSEPGPEALGVIGELELSEVQVVVARGDVSRIDEVRGILDRVRDSLPPLRGIVHSAGVLDDGVLRQQTAGRFDRVLAPKAGGAWNLHLLTRDLPLDFFVLYSSIASMFGSASQGNYAAANAFLDALAHHRRALGLAGLSINWGAWSEAGMAARLSQRDMNRLSGQGIGTIAPDQGTQVLEMLLGQDAAQVGVLPIDWGTFFQRNPASKTSPFFSSLEGGTSVKKAAPTQVPSDILPRLREAAVGRREQLLSAHIREQAIKVLGLNPSHPLNPLQPLNEIGLDSLTAVELKNALGRTLGSSLHATLLFDYPTIDALTRYLAKEVMGWSAPALAPEAAEGAEDAEKARRVAEIQQLSDDEVAASINEELAALRQES

SEQ ID NO: 11293 - protein, 195 aa, Triticum aestivum
  unsure (1)..(195): unsure at all Xaa locations
MRKARPPQPQPQPSQQSPEIRYRGVRKRPSGRYAAEIRDPAKKTPIWLGTFDCAEDAARAYDSAARSLRGPTARTNFPPSSATQPPPRPPPPAAAAAAATSSQSSTVESWSRRXGPAPPPGPAAPPERARPRRGEEDCRSYCGSSSSVLLEEGADDAAASRSPLPFDLNMPPPQEGGLDAEGDQMTCRYDTLLRL

SEQ ID NO: 11294 - protein, 549 aa, Escherichia coli
MKNINPTQTAAWQALQKHFDEMKDVTIADLFAKDGDRFSKFSATFDDQMLVDYSKNRITEETLAKLQDLAKECDLAGAIKSMFSGEKINRTENRAVLHVALRNRSNTPILVDGKDVMPEVNAVLEKMKTFSEAIISGEWKGYTGKAITDVVNIGIGGSDLGPYMVTEALRPYKNHLNMHFVSNVDGTHIAEVLKKVNPETTLFLVASKTFTTQETMTNAHSARDWFLKAAGDEKHVAKHFAALSTNAKAVGEFGIDTANMFEFWDWVGGRYSLWSAIGLSIVLSIGFDNFVELLSGAHAMDKHFSTTPAEKNLPVLVALIGIWYNNFFGAETEAILPYDQYMHRFAAYFQQGNMESNGKYVDRNGNVVDYQTGPIIWGEPGTNGQHAFYQLIHQGTKMVPCDFIAPAITHNPLSDHHQKLLSNFFAQTEALAFGKSREVVEQEYRDQGKDPATLDYVVPFKVFEGNRPTNSILLREITPFSLGALIALYEHKIFTQGVILNIFTFDQWGVELGKQLANRILPELKDDKEISSHDSSTNGLINRYKAWRG

SEQ ID NO: 11295 - protein, 411 aa, Methanothermobacter thermautotrophicus str. Delta H
MMVIPVSFKFKTMDDIEVTGKTVLVRVDINSPVDPNDGTILDDTRMRLHAETIRELSDRGARTVVMAHQSRPGKNDFTTLEQHARALSGILRRPVKYVEDIFGSAARENISGLGDGEIILLENVRFYSEEVLKRDPEEQAETHLVRKLAPLLDYFINDAFAAAHRSQPSLVGFALRVPSAAGRVMERELRTLQGALENVERPCVYVLGGVKVDDSIMVMKNVLENGSADLVLTTGLVANIFLAGCGVKIGKVNMDFIKSRGYCDFIKVAKKLKKRFPERIVVPVDVAVCRDGKRVDVPVKKIPNHPIQDIGMETIKLYARRIREARTLFANGPAGVFENPDFSIGTEDILNAISSSEGFSIIGGGHLAAAAVKMGFEDSINHISSGGGASISLLAGEELPAVRVLEESRHP

SEQ ID NO: 11296 - protein, 567 aa, Dioscorea tokoro
MATSTLICETPQWKDLNDHVEEIKKTHLRDLMQDSDRCKSMITEFDGIILDYSRQRVLPATVEKLFQLAEVACLKQKIDRMYNGEKINCTENRSVLHIALRAARDKAIKSDGKNVVPDVWHVLDKIKEFSERIRSGSWVGATGKALTDVVAVGIGGSFLGPLFVHTALQTDPEAAECAKGRQLRFLANVDPIDVARSITGLNPETTLVVVVSKTFTTAETMLNARTLREWISAALGPQAVSKHMVAVSTNLTLVEKFGIDPANAFAFWDWVGGRYSVCSAVGVLPLSLQYGFSVVHKFLNGAASIDDHFHSTPFEKNIPVLLGLLSVWNVSFLRYPARAILPYSQALEKFAPHIQQVSMESNGKGVSIDGVPLPFETGEIDFGEPGTNGQHSFYQLIHQGRVIPCDFIGVMRSQQPIYLKGEVVSNHDELMSNFFAQPDALAYGKVAEQLLNEKVPDHLIPHKTFPGNRPSLSLLLPSLNAYNVGQLLAIYEHRIAVEGFVWGINSFDQWGVELGKSLASQVRKQLHLSRTKAEPVEGFNFSTTTLLTRYLEAETGVPSDQSQLPKL

SEQ ID NO: 11297 - protein, 567 aa, Dioscorea tokoro
MATSTLICETPQWKDLNDHVEEIKKTHLRDLMQDSDRCKSMITEFDGIILDYSRQRVLPATVEKLFQLAEVACLKQKIDRMYNGEKINCTENRSVLHIALRAARDKAIKSDGKNVVPDVWHVLDKIKEFSERIRSGSWVGATGKALTDVVAVGIGGSFLGPLFVHTALQTDPEAAECAKGRQLRFLANVDPIDVARSITGLNPETTLVVVVSKTFTTAETMLNARTLREWISAALGPRAVSKHMVAVSTNLTLVEKFGIDPANAFAFWDWVGGRYSVCSAVGVLPLSLQYGFSVVHKFLNGAASIDDHFHSTPFEKNIPVLLGLLSVWNVSFLRYPARAILPYSQALEKFAPHIQQVSMESNGKGVSIDGVPLPFETGEIDFGEPGTNGQHSFYQLIHQGRVIPCDFIGVMRSQQPIYLKGEVVSNHDELMSNFFAQPDALAYGKVAEQLLNEKVPDHLIPHKTFPGNRPSLSLLLPSLNAYNVGQLLAIYEHRIAVEGFVWGINSFDQWGVELGKSLASQVRKQLHLSRTKAEPVEGFNFSTTTLLTRYLEAETGVPSDQSQLPKL

SEQ ID NO: 11298 - protein, 236 aa, Pisum sativum
MASMAFSTTFFTPLRDFNQPRTNSTPSTSLPFTKSSIASSKSPFFQLGFSQQASSNFPIVPSKTRSFSVNAKAIKDKTIYDFTVKDIDKKDVSLSKFKGKVLLIVNVASRCGLTSSNYTELSHLYENFKNKGLEVLAFPCNQFGMQEPGSNEEIKQFACTKFKAEFPIFDKVDVNGPFTAPVYQFLKSSSGGFFGDIVKWNFEKFLVDKNGKVVERYPPTTSPFQIEKDIQKLLAA

SEQ ID NO: 11299 - protein, 567 aa, Dioscorea tokoro
  unsure (1)..(567): unsure at all Xaa locations
MATSTLICETPQWKDLNDHVEEIKKTHLRDLMQDSDRCKSMITEFDGIILDYSRQRVLPATVEKLFQLAEVACLKQKIDRMYNGEKINCTENRSVLHIALRAARDKAIKSDGKNVVPDVWHVLDKIKEFSERIRSGSWVGATGKALTDVVAVGIGGSFLGPLFVHTALQTDPEAAECAKGRQLRFLANVDPIDVARSITGLNPETTLVVVVSKTFTTAETMLNARTLREWISAALGPXAVSKHMVAVSTNLTLVEKFGIDPANAFAFWDWVGGRYSVCSAVGVLPLSLQYGFSVVHKFLNGAXSIDDHFHSTPFEKNIPVLLGLLSVWNVSFLRYPARAILPYSQALEKFAPHIQQVSMESNGKGVSIDGVPLPFETGEIDFGEPGTNGQHSFYQLIHQGRVIPCDFIGVMRSQQPIYLKGEVVSNHDELMSNFFAQPDALAYGKVAEQLLNEKVPXHLIPHKTFPGNRPSLSLLLPSLNAYNVGQLLAIYEHRIAVEGFVWGINSFDQWGVELGKSLASQVRKQLHLSRTKAEPVEGFNFSTTTLLTRYLEAETGVPSDQSQLPKL

SEQ ID NO: 11300 - protein, 170 aa, Triticum aestivum
  unsure (1)..(170): unsure at all Xaa locations
MAPTVMASSATSVAPFQGLKSTAGLPVSRRSNGASLGSVSNGGRIRCMQVWPIXEGIKNSETLSYLPPLNTXGLLKQVDYLIXRSKWGAFPPIQQVXSSSREXTISLGYYDGPVIGTMLELPKFGVHWTHTVITKVEEVXEXIPDPYFPSIGQIVKCMRQLIASNCKIRG

SEQ ID NO: 11301 - protein, 277 aa, Prochlorothrix hollandica
MTVATAEKRPLEWTTILFILGLHLGALCVLFPSNFSWYAVALALFMHWFTGCLGITLGWHRLISHRSFQVPKWLEYFFVFCGSLSCQSGPIEWIGLHRHHHAYSDQEEDHHNSNKGFWWSHMNWMWVDVPARKQLPRFTRDIASDPVYLFFDKYFIPLQFAVGIIFFIASDAIVGNGWSFVVWGVFLRIVLLYHCTWFVNSATHKFGYRTHETTDNSRNCWWVALLTYGEGWHNNHHAFQYSARHGWQWWEIDITWLTIRLLERLGLATKVKLISEA

SEQ ID NO: 11302 - protein, 199 aa, Theobroma cacao
QVKGSENPRSHYKCTYPNCPTKKKVERSLDGQITEIVYKGSHNHPKPQSTRRSSSHAACTNSEISDQSGGTLGNEQTDSFLVQEDTSGSIGEDEFDQASSLSNPGGDDNENEPDAKRWKGENENEGIIGSGSRTVREPRIVVQTTSDIDILDDGYRWRKYGQKVVKGNPNPRSYYKCTTIGCPVRKHVERASHDLRAVI

SEQ ID NO: 11303 - protein, 540 aa, Triglochin maritimum
MELITILPSVLPNIHSTATVLFLLLLTTALSFLFLFKQHLTKLTKSKSKSTTLPPGPRPWPIVGSLVSMYMNRPSFRWILAQMEGRRIGCIRLGGVHVVPVNCPEIAREFLKVHDADFASRPVTVVTRYSSRGFRSIAVVPLGEQWKKMRRVVASEIINAKRLQWQLGLRTEEADNIMRYITYQCNTSGDTNGAIIDVRFALRHYCANVIRRMLFGKRYFGSGGEGGGPGKEEIEHVDATFDVLGLIYAFNAADYVSWLKFLDLHGQEKKVKKAIDVVNKYHDSVIESRRERKVEGREDKDPEDLLDVLLSLKDSNGKPLLDVEEIKAQIADLTYATVDNPSNAVEWALAEMLNNPDILQKATDEVDQVVGRHRLVQESDFPNLPYIRACAREALRLHPVAAFNLPHVSLRDTHVAGFFIPKGSHVLLSRVGLGRNPKVWDNPLRFDPDRHLHGGPTAKVELAEPELRFVSFTTGRRGCMGGPLGTAMTYMLLARFVQGFTWGLRPAVEKVELEEEKCSMFLGKPLRALAKPRQELLQSF

SEQ ID NO: 11304 - protein, 799 aa, Ustilago maydis 521
MTISSTNGVSNDNGHADVLVSSGFSTKAIHVGSEPNAATGAVIPPISLSSTFAQDGIGNHKGYEYSRSGNPNRDSFERALAALEGGSRGLAFSSGSAVTATVLNSMPSGSHIVSVNDVYGGTYRYFTKVATVSQGIRTSFVEMDGPEAEVSERVNAAIRKETSLVWIETPTNPTLRVIDVPLIVKLVRNHPNASKDIKIVVDNTFMSPWFQNPLAHGADLVMHSVTKYLNGHSDVVMGAAVTNDEAWADRLAFLQNSIGAIPSPFDCWLALRGLKTLALRMKAHGASALAIAQFLENHPSVETVIYPGLPSHPGHEVARRQISKRAAAAGPSNSNGAFAYGGMISFRIKSNPADDEPADKLLSNLNVFTLAESLGGVESLIELPSKMTHGSVALEDRIKIGIGHNLIRVSVGIEETADLIQDLERGLKAAGFILPLQAVTVILDAFVSTPSCVAEKHNFAADIGDAIASHLESLDSCPKTRQKLRLCSLETLSHHFAQPGLASSETCTSRRSISEAFGLLAGSTASSRTGLRRRNISTWSHPSRSFSSTSSNRDLKQDTKDKLVEEGKKFAKDKLDSKLNATETREQAKNLSSSVSKILFTLLAVAGVAYQFVGGKTHAEEACTSLKPAPKYTKHQVSLLCLVGPSLSGKSTQAKRLSNHFPELDAVVQPKSIDELSSIIASRATGKKRTSLILDDFPTTLEDAQRIEDEIVPIFCFSFYDLPLGDFEKRLSEKDEKKKREKVDEFNKYSERLEPLVKKYRHQGNIYEISADWNSADEVWEQVEAKTQQILELRERGDL

SEQ ID NO: 11305 - protein, 120 aa, Theobroma cacao
  unsure (1)..(120): unsure at all Xaa locations
NPEFSSTLASHDDDNDDRATQGSISLCDDAANDDESESKRRKTESCLTEMNATSGALREPRVVVQIESDVDILDDGYRWRKYGQKVVKGNPNPRSYYKCTTPGCPVRKHVEXASHNLKCV

SEQ ID NO: 11306 - protein, 794 aa, Rhodobacter capsulatus
MFGPSLLAKGARAEALANGTVMSGSHWGVFTATVENGRATAFTPWEKDPHPTPMLEGVLDSIYSPTRIKYPMVRREFLEKGVNADRSTRGNGDFVRVSWDQALDLVAAEVKRVEETYGPQGVFGGSYGWKSPGRLHNCTTLLRRMLTLAGGYVNGAGDYSTGAAQVIMPHVVGTLEVYEQQTAWPVLAENTEVMVFWAADPIKTSQIGWVIPEHGAYPGLEALKAKGTKVIVIDPVRTKTVEFFGADHVTPKPQTDVAIMLGMAHTLVAEDLYDKDFIANYTSGFDKFLPYLMGETDSTPKTAEWASDISGVPAETIKELARLFKSKRTMLAAGWSMQRMHHGEQAHWMLVTLASMLGQIGLPGGGFGLSYHYSGGGTPSSSGPALSGITDGGAATKGPEWLAASGASVIPVARVVDMLENPGAEFDFNGTRSKFPDVKMAYWVGGNPFVHHQDRNRMVKAWEKLETFIVHDFQWTPTARHADIVLPATTSYERNDIETIGDYSNTGILAMKKIVEPLYEARSDYDIFAAVAERLGKGKEFTEGKDEMGWIKSFYDDAAKQGKAGGVEMPAFDAFWAEGIVEFPVTDGADFVRYASFREDPLLNPLGTPTGLIEIYSKNIEKMGYDDCPAHPTWMEPLERLDGPGAKYPLHIAASHPFNRLHSQLNGTVLREGYAVQGHEPCLMHPDDAAARGIADGDVVRVHNDRGQILTGVKVTDAVMKGVIQIYEGGWYDPSDVTEAGTLDKYGDVNVLSADIGTSKLAQGNCGQTVLAEVEKYTGPAVTLTGFVAPKAAE

SEQ ID NO: 11307 - protein, 461 aa, Xylella fastidiosa Dixon
MLALLAGGNAIGAEAQVQTNPLPSEQITTELLMSEATPSDAVAIPKTTPTPVVDKGDVAWMLTSTLLVLLMALPGLALFYGGMLRSKNVLSMMVQIGVVFSLIAILWVVYGYSLAFADGDMFIGTFNKAFLYGVDTATLTDTFSKGFKLPEYLYVAFQLTFAGITGVLIVGAFAERVKFAAVLLFIFLWFSFGYLPLAHMVWSTPGFLLSKGALDFAGGTVVHINAGIAGLVGAYFVGKRIGFGQVAVKPHNVPMTFTGAALLWVGWFGFNAGSALEANSIAALAFINTMLATAAAILVWSLLEKMTKGKFSALGVASGMIAGLVGVTPAAGTVGPFGAIAIGAVAAVCCIWGITGLKRLLKVDDTLDVFGVHGIGGIVGAILTGVFTDKALGGQGYAEGMTMSNQVMIQAMGVGISVLWIGIVSLVGFLIVKLLFGLRVSEEAEREGLDITSHGESAYES

SEQ ID NO: 11308 - protein, 124 aa, Triticum aestivum
MGKMPVRMKAVVYALSPFQQQVMPGLWKDITTKIHHKVSENWVSATLLITPSSGPTNYAMWYKEQENFPQDTKGGFSQYATFGFHVISHQRFTFSITSNCTFCPSRLHNHCINVTLFLGNLITP

SEQ ID NO: 11309 - protein, 163 aa, Cucurbita pepo
HWKPTCGVKSMMEEEAIRIGGTNHSHATQDLYESIAAGNFPEWRLYIQTIDYEDQNKYDFEPLDTTITWPEDVVPLQPVGRLVLNKNIDNFFAENEMLAFSMSLVPGIHYSDDKMLQARSFAYADTQRHRLGPNYLQLPVNAPKCPHHNNHHEGFMNFMHRDE

SEQ ID NO: 11310 - protein, 237 aa, Sinorhizobium meliloti
MRSEMEEFHKVRRLPPYVFEQVNRLKASARAAGADIIDLGMGNPDLRTPQSIVDKLCEVVQDPRTHRYSSSKGIPGLRRAQAAYYARRFGVKLNPETQVVATLGSKEGFANMAQAITAPGDVVLCPNPTYPIHAFGFLMAGGVIRSISVEPDESFFPPLERAVRHSIPKPLALILNYPSNPTAQVATLDFYKDVIAFAKKHDIIVLSDLAYSEIYFDDAPPPSVLEVPGATDVTVEF

SEQ ID NO: 11311 - protein, 298 aa, Pennisetum glaucum
IIESVGEGVTDVAPGDHVLPVFTGECKECPHCKSAESNMCDLLRINTDRGVMIGDGKSRFSINGKPIYHFVGTSTFSEYTVMHVGCVAKINPEAPLDKVCVLSCGISTGLGASINVAKPPKGSTVAIFGLGAVGLEAAEGARIAGASRIIGVDLNPSRFEEAKKFGCTEFVNPKDHNKPVQEVLADMTNGGVDRSVECTGNINAMIQAFECVHDVGLGCRCAGGCATQGCRVQDSPNELPEREDPEGNLLWQLQATHWPAQCGGAVYEEVEKFITHSVPFSEINKAFDLMAKGGGHPL

SEQ ID NO: 11312 - protein, 282 aa, Schizosaccharomyces pombe
MSGFCVLGCGTMGKALLTGIFDSIAENGNDVSDEIIIPNKFYACVKFPKEKEDVQKLFGDRVKVVMGAKENAEMAAISNVLLLSCKPQAAEDVLNSPKMKEALKGKLILSILAGKTISSLQSMLDESTRVIRIMPNTASRIRESMSVICPGPNATEEDIKFAEWVFNGIGRSMKLPEKLIDAATAVCGSGPAFVATMIEAMTDGGVMMGIPFPQAQELAAQTMVGTGRMVLQGQHPAMIRNDVSTPAGCTISGLLALEDGKIRSTIARGIEQATKTASGLGK

SEQ ID NO: 11313 - protein, 192 aa, Saxegothaea conspicua
DEHGEVISEIRKSDLEPYLGLHYPATDIPQASKFLFMKNRVRMICDYHAPPVGVVEDNRLPRELNLCGSTLSAPHGCHEQYMSNMGSIASFVIIDIVNEKDEEEGDSEGQHQQKGRRLWGLVVCHHSSPRFVPFPLRYACEFLMQVFGIQLNKEVELAAQVREKHILCTQTLLCDMLLRDAPTGIVTQKPNI

SEQ ID NO: 11314 - protein, 317 aa, Haemophilus somnus 2336
MTTQLDALRNMTVVVADTGDIDAIKKYQPQDATTNPSLILSASSLPQYAPLIDEAIAYAKAKSADKTQQLIDAEDKLAVNIGLEILKIVPGRISTEVDARLSYDTQATVEKARKLIALYNEAGISNDRILIKIASTWQGIRAAEILEKEGINCNLTLLFSKAQARACAEAGVYLISPFVGRILDWYKANSDKKEYAPAEDPGVISVTKIYNYYKQYGYNTVVMGASFRNVGEITELAGCDRLTIAPALLKELQENSTALVRKLAFKGEVKAKPQPLTESQFYWQHNSDPMAVEKLADGIRKFAIDQEKLEKMLLEKF

SEQ ID NO: 11315 - protein, 533 aa, Triglochin maritimum
LITILPSVLPNIHSSATLFLLLLMTTALSFLFLFKQHLAKLTKPKSTTLPPGPRPWPIVGSLVSMYMNRPSFRWILAQMEGRRIGCIRLGGVHVVPVNCPEIAREFLKVHDSDFASRPVTVVTRYSSRGFRSIAVVPLGEQWKKMRRVVASEIINAKRLQWQLGLRTEEADNIVRYITYQCNTSGDTSGAIIDVRFALRHYCANVIRRMLFGKRYFGSGGVGGGPGKEEIEHVDATFDVLGLIYAFNAADYVSWLKFLDLHGQEKKVKKAIDVVNKYHDSVIDARTERKVEDKDPEDLLDVLFSLKDSNGKPLLDVEEIKAQIADLTYATVDNPSNAVEWALAEMLNNPAILQKATDELDQVVGRHRLVQESDFPNLPYIRACAREALRLHPVAAFNLPHVSLRDTHVAGFFIPKGSHVLLSRVGLGRNPKVWDNPLQFNPDRHLHGGPTAKVELAEPELRFVSFTTGRRGCMGGLLGTAMTYMLLARFVQGFTWGLHPAVEKVELQEEKCSMFLGEPLRAFAKPRLELLQSF

SEQ ID NO: 11316 - protein, 428 aa, Glycine max
MSDQQEIYAAFPNVPQAPPDSIFQLTARYVADKHPNKINLGVGAYRTDEGKPWVLPTVKKASRQLEENPNIDHEYLPITGLPQFTKAAQGLIFGKQNKAVDEGRVISVQTLSGTGANHLAALFFAKFYEFPTDKEIYISNPTWANHNAIISNVGVTPVSYRYYNKETIALDFDGYLEDLQKAPERSVILVHGCAHNPTGVDPTAEQWDKILDVFLQKKHYAFFDSAYQGFATGDLDRDAGSMRKFAEKRVPMLVCQSFAKNAGLYNERVGALHVVAADTKEAERVKSQLSVLQRSEISNPPAYGAHIVSMILTNPELFDSWKNDITTMSGRIIEMRDALFDLLNDKFKTPPPPGRKDWGHIKEQIGMFSFTGLNPDQTKKLVEEHSVYLTGNGRISMAGLNTHNVETFAKAVDEVVRSTSGTVPGSAL

SEQ ID NO: 11317 - protein, 120 aa, Theobroma cacao
NPEFSSTLASHDDDNDDRATQGSISLCDDAANDDESESKRRKTESCLTEMNATSGALREPRVVVQIESDVDILDDGYRWRKYGQKVVKGNPNPRSYYKCTTPGCPVRKHVERASHNLKCV

SEQ ID NO: 11318 - protein, 562 aa, Thiobacillus sp.
MADTITLQIEGMTCDSCAVHAQQTLERVPGVRSASVSYPQRRAEIEVDARVGLDPLVAAVAALGYRARLPDTPNKPTGLLDKSLDGQGSETRRTGDGEALHIAVIGSGGAAMAAALKAVEQGARVTLIERGTIGGTCVNVGCVPSKIMIRAAHIAHLRQESPFDGGIVAAVPVIDRGKLLAQQQARVDELRHAKYEGILDGNPAITVLHGEARFMSGHSLNVQLNDGGECEVAFDRCLIATGASPAIPPIPGLKDTAYWTSTEALISDTIPERLAVIGSSVVALELAQAFVRLGSQVTILARGTLFLREDQAIGVAITAAFRAEGIEVLEHTQASHIAYADGEFVLATGHGEVRADKLLVATGRAPNTCSLNLEAAGVTINAQRAIVIDPGMRTNRPNIYAAGDCTDQPQFVYVAAAAGTRAAINMTGGDTILNLTAMPAVVFTDPQVATVGYSEAQARHDGIETDSRTLTLDNVPRALANFDTRGFIKLIAEKGSGRLLGAQVVAPEGGEVIQVAALALRARMTVQELADQLFPYLTMVEGIKLCAQTFTRDVRELSCCAG

SEQ ID NO: 11319 - protein, 200 aa, Theobroma cacao
QVKGSEFPRSYYKCTHPNCEVKKLFERSHDGQITEIIYKGTHDHPKPQPSRRYSSGNIMPGQEERSDKVSSFTGRDGKGSSIYGQMAYSIEPNSTADLSPVTANDDNIDEVDDDDPFSKRRKMDGGVDITPVVKPIREPRVVVQTLSEVDILDDGYRWRKYGQKVVRGNPNPRSYYKCTNAGCPVRKHVERASHDPKAVI

SEQ ID NO: 11320 - protein, 234 aa, Theobroma cacao
QVKGSEYPRSYYKCTHPNCPVKKKVERSFDGQIAEIVYKGEHNHSKPQPPKRNSSGTQGLGFTSDGTGQDTNNSLWSNNPNERNEGSEGRVENQNEVGLSAPSSYQGKAVLSYEHVTTGAVNAGVTSENSIGLSGECEERSKEGEDDEPRSKRRKSENQSSEVGTSGEGIQEPRVVVQSCTDSEIMGDGFRWRKYGQKVVKGNPYPRSYYRCTSLKCNVRKHVERASDDPRAFI

SEQ ID NO: 11321 - protein, 371 aa, Malus x domestica
MGKGGMSDGDHADRCCGEAINGDVQQENMAAWLLGVKNLKIQPYKLPNLGPHDVRVRLRAVGICGSDVHHFKNMRCVDFIVKEPMVIGHECAGIIEEVGSEVEHLVPGDRVALEPGISCKRCNLCKQGRYNLCRKMKFFGSPPNNGCLANQVVHPGDLCFKLPDNVSLEEGAMCEPLSVGIHACRRANVCQETNVLVVGAGPIGLVTLLAARAFGAPRIVIADVNDERLLIAKSLGADAVVKVSTNIEDVAEEVAKIQKVLENGVDVTFDCAGFNKTITTALSATRPGGKVCLVGMGQREMTLPLATREIDVIGIFRYQNTWPLCLEFLRSGKIDVKPLITHRFGFSQKEVEEAFETSARGGNAIKVMFNL

SEQ ID NO: 11322 - protein, 399 aa, Thermoanaerobacter tengcongensis
MPYEFRMPNVVSNGIEGFVVNWFKDEGQPVQAGELLLEVQFEKAAIELQAPVSGILTKILCPQGHVVKVGQLLCLIEEKSTEVAGGSGSAVPPVHAPEETPHFHGETERTTQSTPVDSQVHSSNTGDVRATPAARKLARELGIPLEAVPGTGPGGRITEEDVKNFAQRSEKTNLTARRVPLTPTQRLVGSRMLQSLRETAQYTLGREVDISALIKVRMELKQKGSPANITDLIHKAVVQAILENPVMQAVIDGDDMVVPAEVHLGFAVARGDELLVPVIKNAHRLNLNEMAVERRRLTDAVLQGIIKPEELQGGTFTVTNLGTYGVDFFTPVLYPKQSAILGIGRIVERPVLENGNIRSAQFMTLSLTVDHQVINGAPAARFLNRLAELLSQPEVLLEL

SEQ ID NO: 11323 - protein, 479 aa, Zea mays
MDPTAAPGSGGTPADSDATSPTNTTVTLPPLTLRDVPRLASSSPAAAAAAAVPNPISRHPYFHPPANFYISPGDVSLRHAFFDLVSAAPTPLVAYRRGGPRRDLAVDPAAARAALVTCGGLCPGLNTVLRELVVGLQELYGVRHVFGVAAGYRGFYGADEDHVRLHPAAVDDWHKKGGTVLKTTRGGFDLGKIVDGIVARGYTQIYAIGGDGTMRGALAIFEEFKRRGLNISITGIPKTVDNDIGIIDRSFGFQTAVEVAQQAIDAAHVEAVSAVNGAGIVKLMGRSTGHIALHATLSSRDVDCCLIPEVDFYLEGKGGLFEFLYERIKKKGHAVVVVAEGAGQELIPRTDDQKREQDESGNTVFLDVGPWLKSELGRWWKREHPDELFTVKYIDPTYMIRAVPANASDNLYCTLLAHSAIHGVMAGFTGFVPGPINGTYSYIPLEDVAVAKNPVDVNDHKWAWVRSVTNQPDFLKSQA

SEQ ID NO: 11324 - protein, 309 aa, Medicago sativa
QPSAIENGPYDYTRSGNPTRENLESLLAELDKADRAFCFTSGMAALTTVVHLLKSGEEILAGDDIYGGADRLLSQVVPRSGVLVKRVNTSDLNEVASALGPRTKLVWLESPTNPRIQISDIRRIAEMAHAHGALVLVDNSIMSPVLSQPLELGADIVMHSATKFISGHSDIMAGVLAVNGERLAKEIYFLQNAEGSGLAPNDCWLCYRGIKTMPLRVEKQQENAQKIAEFLASHPRVKKVNYAGLPGHPGRDLHYSQAKGAGSVFSFLTGSLALSKHVVETTKYFSITVSFGSVKSLISLPCSMFHASI

SEQ ID NO: 11325 - protein, 498 aa, Bordetella parapertussis 12822
MTLHDSAYWRAQAAALAPEGRAYIDGAYCDAADGATFAAHSPIDGRKLADIAACGAADVDRAVAAARRAFEAGVWSGLAPRERKHRLLRLAALITEHQEELALLETLDMGKPIRDALAFDLPETARCYAWYGEAIDKRYDEIAPTGADALATITREPLGVVAAVVPWNYPLMMAAWKVAPALAVGNSVILKPAEQASLSALRLAALAEQAGIPPGVFSVVPGLGAQAGQALGLHPDVDCIAFTGSTATGKRFMTYSGQSNLKRVWLECGGKSPHIVFADCPDLDRAAQVAALAIFSNQGEVCIAGSRLYVQHGIYDAFMEKVAAFAATLRPGNPLDPDSALGAMVDERQTQAVMARIAAGAQEGARLRLGGRQVLTDSGGYYIEPTIFDCPGQDNSLVREEIFGPVLAAQGFADEDEAVALANDSIYGLGAGLWTADLGRAHRLSRRLRAGLVWVNCYADGDITVPFGGVKQSGFGRDKSLHAMDKYSDLKTTWISLR

SEQ ID NO: 11326 - protein, 413 aa, Mycoplasma gallisepticum R
MINYNKKTLKDVDLKDKTVIVRVDFNVPIKDNKVIDDTRIVQALDTIKYLIEQNCKIVLLSHLSRIKSLEDISSKKKSLRPVYENLKTKLNNVKFLEENVGYDVVEAVKQLKHQEVLLLENTRYNDVDNQGEVVKKESKNSPELGRFWASLADVFVNDAFGTSHRAHASNVGIAANISQSCIGFLVQKELEALSKLTNNPQRPFVVILGGAKVSDKLKVIESLLKSADQILIGGGMVNTFNKAKGYHIGKSLFEPEMLETAKKILAEDKDNKIILATDQMVTKASTITDIKTAPAGKCVFAKDEAENEDFEALDIGDESIKTFKSYIAKAKSIFWNGPLGVFENPNYERGSYEIAKAISESDSYSVIGGGDSAAAANQFKLADKFSFVSTGGGASLTFMEQTVLPGIEAIQSK

SEQ ID NO: 11327 - protein, 169 aa, SYNECHOCOCCUS SP. WH 8102
MQRRFSLSSITFVDGLAITATVVALAGVVWSPKLTNAVARATGSIKQVEVSVDVRHLQVADSDALLEAIREEGTVSIVIRNQPAGRVGLMSVEDISRPLTQLLPNGTVLEAEDTSPARGLHARFRLKAEAETGPSGVVFGGTKLKIGSPVELEGRLYRVNGFVSGVTIP

SEQ ID NO: 11328 - protein, 390 aa, Rhodococcus erythropolis
MSEQRSKADNISWQGFSTKAVHAGYEPDPLTGAVNVPIYASSTFAQDGVGGMRSGFEYARTGNPTRRPLEANLAALESGTYGRAFSSGMAATDCLLRSVLRPGDHLVIPDDAYGGTFRLIDKVFTQWGIEYTPAPVSDVDAVRAAMKSNTKLVWVETPTNPLLNIGDIELLAEVAHEGNAKIVVDNTFASPYLQQPLQLGADIALHSTTKYIGGHSDVVGGALVCNDEELDTAFAFLQNGSGGVPGPFDAFLTLRGIKTLALRMERHSDNAEKVVELLDGHPAVASVIYPGLASHPSHKVAAKQMRRFGGMISVRLKGGKAAALDLCSRTEIFTLAESLGGVESLIEFPGAMTHASTAGSALEVPDDLVRLSVGIEDASDLVGDIEQALS

SEQ ID NO: 11329 - protein, 434 aa, Mesorhizobium sp. BNC1
MLNEGNAMTERTPGFNTLAIHAGAQPDPTTGARATPIYQTTSYVFNDAEHAASLFGLKAFGNIYTRIMNPTQAVLEERVAALEGGTAALATASGHAAQLLVFHTLMQPGCNFIAARKLYGGSINQFGHAFKNFNWEVRWADPDDISSFENQIDGNTRAIFVESLANPGGTFVDLEKISEVAKRHGLPFIVDNTMASPYLLRPIEHGADIIVHSLTKFMGGHGNSIGGILVDCGTFDWSKSGNYPALSQPRPEYGGMVLHETFGNLAFAIAARVLGLRDFGPAISPQNAFLILTGIETLPLRMQRHCDNALKVAEWLQKHPAVAWVSYPGLPEDPNHALMQKYSPKGAGAVFTFGLKGGYEAGVKVVEGVELFSHLANIGDTKSLIIHPASTTHRQLSDDQKIAAGAGPDVVRLSVGIEDVEDIIADLEQALSKL

SEQ ID NO: 11330 - protein, 413 aa, Glycine max
MAAAPAATFTIGTTGSLGQRGNSLPQLKSSGLKFNSQNHLKSFCGLKAMSSVRCESESSFLVNKTGAALRASFASKAQKENDQNFNYNSQPQASYKVAVLGAAGGIGQPLALLIKMSPLISDLHLYDIANVKGVAADISHCNTPSQVRDFTGASELANCLKSVNVVVIPAGVPRKPGMTRDDLFNINAGIVRDLVSAVADNSPDAFIQIISNPVNSTVPIAAEVLKQKGVYDPKKLFGVTTLDVVRANTFVAQRKNLKLIDVDVPVVGGHAGITILPLLSKTKPSASFTDEEIEELTVRIQNAGTEVVEAKAGAGSATLSMAYAAARFVESSLRALDGDGDVYECSYVESDLTDLPFFASRVKLGRKGVEALIPSDLQGLTDYEQKALESLKPELMASIEKGIAFAQKQAVAA

SEQ ID NO: 11331 - protein, 195 aa, Saxegothaea conspicua
DDHGEVISEIRRNDLEPYLGLHYPATDIPQASRFLFMKNKIRMICDACASPVRVIEDNRLSKDLSLVGSTLRAPHDCHAQYMYNMNSVASLVMAVVVNEREEEERDSDGRLQPQEAIRRLWGLVVCHHSSPRFVPFHLRYACEFLMQVFGIQLNKEVELAAQVREKRILRTQTMLCDMLLRGDVPKGIVTTKPNI

SEQ ID NO: 11332 - protein, 437 aa, Rhodococcus erythropolis
EFGRNTADLSDRENVQFHWIEVENVPEIWKRLEAVGLKTTEACGDCPRVVLGSPLAGESLDEVLDPTPAIDEIVRRYIGDPKYSNLPRKFKTAISGQQDVVHEINDIAFIGVNHPEHGPGLDLWVGGGLSTNPMLAQRVGAWIPLDEVPDVWEGVVSIFRDYGYRRLRAKARLKFLIKDWGIEKFREVLETEYLERPLIDGPAPEKPKRPIDHVGIQKTRNGHNAVGFAPIAGRVSGDILAQVADAAEKAGSDRIRFTPYQKLIILDVADETLEPLIADLDALGLPARPSHWRKNLMACSGIEFCKLSFAETRKRSQVLVPELEQRLADINSQLDVPITININGCPNSCARSQIADIGFKGQLVDDGEGNQVEGFQVHLGGSLGFDSAFGRKLRQHKVTSVEMGDYIDRVVRQFVKNRNEGERFAEWAVRADEGDLR

SEQ ID NO: 11333 - protein, 296 aa, Pennisetum glaucum
IIESVGEGVTDVAPGDHVLPVFTGECKECPHCKSAESNMCDLLRINTVRGVMIGDGKSRFSINGKPIYHFVGTSTFSEYTVMHVGCVAKINPEAPLDKVCVLSCGISTGLGASINVAKPPKGSTVAIFGLGAVGLAAAEGARIAGASRIIGVDLNPSRFEEAKKFGCTEFVNPKDHNKPVQEVLADMTNGGVDRSVECTGNINAMIQAFECVHDVGLGCRCAGGCATQGCRVQDSPNELPEREDPEGNLLWQLQATHWPAQCGGAVYEEVEKFITHSVPFSEINKAFDLMAKGGGH

SEQ ID NO: 11334 - protein, 250 aa, Pennisetum glaucum
IIESVGEGVTDVAPGDHVLPVFTGECKECPHCKSAESNMCDLLRINTDRGVMIGDGKSRFSINGKPIYHFVGTSTFSEYTVMHVGCVAKINPEAPLDKVCVLSCGISTGLGASINVAKPPKGSTVAIFGLGAVGLEVLADMTNGGVDRSVECTGNINAMIQAFECVHDVGLGCRCAGGCATQGCRVQDSPNELPEREDPEGNLLWQLQATHWPAQCGGAVYEEVEKFITHSVPFSEINKAFDLMAKGGGH

SEQ ID NO: 11335 - protein, 188 aa, Stangeria eriopus
DEHGEVVAEIRRSDLEPYLGLHYPATDIPQASRFLFMQNRVRMICDCRAKPVRVIQAAKLRQPLCLVGSTLRAPHGCHAQYMVNMGSIASLVMAVVINVNDDAAGSGRGSSMKLWGLVVCHHTSPRAVPFPVRCACEFLMQAFGLQVNMELQLAAQLTEKHILKTQTLLCDMLLRDAPIGIVTQTPSV

SEQ ID NO: 11336 - protein, 296 aa, Pennisetum glaucum
IIESVGEGVTDVAPGNHVLPVFTGECKECPHCKSAESNMCDLLRINTDRGVMIGDGKSRFSINGKPIYHFVGTSTFSEYTVMHVGCVAKINPEAPLDKVCVLSCGISTGLGASINVAKPPKGSTVAIFGLGAVGLAAAEGARIAGASRIIGVDLNPSRFEEAKKFGCTEFVNPKDHNKPVQEVLADMTNGGVDRSVECTGNINAMIQAFECVHDVGLGCRCAGGCATQGCRVQDSPNELPEREDPEGNLLWQLQATHWPAQCGGAVYEEVEKFITHSVPFSEINKAFDLMAKGGGH

SEQ ID NO: 11337 - protein, 296 aa, Pennisetum glaucum
IIESVGEGVTDVAPGNHVLPVFTGECKECPHCKSAESNMCDLLRINTDRGVMIGDGKSRFSINGKPIYHFVGTSTFSEYTVMHVGCVAKINPEAPLDKVCVLSCGISTGLGASINVAKPPKGSTVAIFGLGAVGLAAAEGARIAGASRIIGVDLNPSRFEEAKKFGCTEFVNPKDHNKPVQEVLADMTNGGVDRSVECTGNINAMIQAFECVHDVWLGCRCAGGCATQGCRVQDSPNELPEREDPEGNLLWQLQATHWPAQCGGAVYEEVEKFITHSVPFSEINKAFDLMAKGGGH

SEQ ID NO: 11338 - protein, 188 aa, Polypodium vulgare
DEHGEVVAEIRRADLEPYMGLHYPATDIPQAARFLFMKNRVRMICDCTLPPVKIIQDKNLAQPLSLTGSTLRAPHGCHAQYMSNMNSIASLVMAVIVNDSDIDSAGHASQGMKLWGLVVCHHTSPRYVPFPVRSACEFLMQVFSLQLNMEVGMAAQVREKHILRTQTLLCDMLLRDAPIGIVSQSPNI

SEQ ID NO: 11339 - protein, 270 aa, Rhodococcus erythropolis
MGWLEDNVMIVTGGGSGLGRALVERFLGEGARVGVLEKSAEKAEKLANDFGEDVLVVEGDVRKYDDNARVVQETVRQFGRLDTFVANAAIWDFSTKMVDIPVDRLDALFDEMFHINVKGYLHGARAAVEELAATGGSIIYTVSNAGFYPGGGGPLYTASKHAVVGLIKELAFELGPKIRVNGVAPGAMPTDLRGPGSLGMGETTITSVPLGDLVKQCTVLQELPEAADYTGHYVLLASKANSRTATGAIINCDGGMGVRGLAETAGGNDL

SEQ ID NO: 11340 - protein, 1135 aa, Zea mays
MSSPSNNRGTCSRSSSARSKHSARVVAQTPVDAQLHADFEGSQRHFDYSSSVGAANRPSASTSTVSTYLQNMQRGRYIQPFGCLLAVHPDTFALLAYSENAPEMLDLTPHAVPTIDQRDALTIGADVRTLFRSQSSVALHKAATFGEVNLLNPILVHARTSGKPFYAILHRIDVGLVIDLEPFNPADVPVTAAGALKSYKLAAKAISRLQSLPSGNLSLLCDVLVREVSELTGYDRVMAYKFHEDEHGEVISECRRSDLEPYLGLHYPATDIPQASRFLFMKNKMRMICDFSATPVLIIQDGSLAQPVSLCGSTLRASHGCHAQYMANMGSVASLVMSVTINDDEEEDGDTDSDQQPKGRKLWGLVVCHHTSPRFVPFPLRYACEFLLQVFGIQLSKEVELAAQAKERHILRTQTLLCDMLLRDALVGIFTQSPNVMDLVKCDGAALYYQNQVLVLGSTPSESEIKSIATWLQENHDGSTGLSTDSLVEAGYPGAAALREVVCGMVAIKISSKNFIFWFRSHTTKEIKWSGAKHEPFDADDNGRKMHPRSSFKAFLEVVKWRSVPWEDVEMDAIHSLQLILRDSLQGEDANRNNIRSIVKAPSDDMKKLQGLLELRTVTNEMVRLIETATAPVLAVDIAGNINGWNKKAAELTGLPVMEAIGRPLIDLVVADSVEVVKQILDSALQGIEEQNLEIKLKTFHEQECCGPVILMINSCCSRDLSEKVIGVCFVAQDLTRQKMIMDKYTRIQGDYVAIIKNPSELIPPIFMINDLGSCLEWNKAMQKITGMKREDAINKLLIGEVFTLHDYGCRVKDHATLTKLSILMNAVISGQDPEKLLFGFFGTGGKYIESLLTVNKRTNAEGKITGALCFLHVASPELQHALEVQKMSEQAATNSFKELTYIRQELRNPLNGMQFTYNLLKPSELTEDQRQLVSSNVLCQDQLKKILHDTDLESIEQCYMETNTVEFNLEEALNTVLMQGIPLGKEKRISIERDWPVEVSHMYIYGDNIRLQQVLADYLACALQFTQPAEGHIVLQVIPKKENIGSGMQIAHLEFRIVHPAPGVPEALIQEMFQHNPGVSREGLGLYISQKLVKTMSGTLQYLREADTSSFIILIEFPVAQLSSKRSKPSPSKF

SEQ ID NO: 11341 - protein, 304 aa, Arabidopsis thaliana
MYSLLKKTKICQVCKKSFSNGKALGGHMRAHTLKFFPGSSSSTGSITPSLRSCNNLGASFRRPNETVLARFVHTSEVVGGPKPDLNKEAEQRTTVKKKIVVDLEEENSIESESDITIEESALCLLQMKDDNMSEYLQNLKSIDSLVSTRKRKDTENYIEIDSDENHEDSDDEYVVEDEDEDNEDDDVKSLTSDVENLIGDSDEDDDDYGDENAYYGGKRKRGKKQSKYTCDTCGKVLRSYQALGGHRTSHKYKRLKISDKNYFGEDGPIVRRQYECQICNRMFASGQALGGHKKIHYMFLAPAK

SEQ ID NO: 11342 - protein, 296 aa, Pennisetum glaucum
IIESVGEGVTDVAPGDHVLPVFTGECKECPHCKSAESNMCDLLRINTDRGVMIGDGKSRFSINGKPIYHFVGTSTFSEYTVMHVGCVAKINPEAPLDKVCVLSCGISTGLGASINVAKPPKGSTVAIFGLGAVGLEAAEGARIAGASRIIGVDLNPSRFEEAKKFGCTEFVNPKDHNKPVQEVLADMTNGGVDRSVECTGNINAMIQAFECVHDVGLGCRCAGGCATQGCRVQDSPNELPEREDPEGNLLWQLQATHWPAQCGGAVYEEVEKFITHSVPFSEINKAFDLMAKGGGH

SEQ ID NO: 11343 - protein, 371 aa, Coxiella burnetii RSA 493
MKQISKINWLNVSFIILTGLVGITGTILFIVFGLVHWPTWVLAGAMLIACGLSITAGYHRLAAHKSYKAAWPIRLFFALFGAAAFEGSIVEWATDHRKHHRYTDTDQDPYSIKKGFWYAHIGWLFTLDPSKRDFSNVQDLLDDPIYRFQHRFFPIIAILMGFGLPMAIGALWGDPLSALVIAGALRITVVYQMTFFINSLCHMIGKQTYKNSSARDNWVTALLTMGEGFHNFHHQFPIDYRNGVRFFHFDPTKWLIYLLSRMGLVSGLKRVEQRRIIKYRLQTDTQRLALLSAERVEVVKPLYERIHHLLGRLEELEKSYLALKEAQFKAYKNRLREIRQKLKATERELRTFLTLWSKVARPLQTCQLSGS

SEQ ID NO: 11344 - protein, 84 aa, Dioscorea tokoro
INCTENRSVLHIALRAARDKAIKSDDKNVVPDVWHVLDKIKEFSERIRSGSWVGATGKALTDVVAVGIGGSFLGPLFVHTALQT

SEQ ID NO: 11345 - protein, 436 aa, Achromobacter obae
MTKALYDRDGAAIGNLQKLRFFPLAISGGRGARLIEENGRELIDLSGAWGAASLGYGHPAIVAAVSAAAANPAGATILSASNAPAVTLAERLLASFPGEGTHKIWFGHSGSDANEAAYRAIVKATGRSGVIAFAGAYHGCTVGSMAFSGHSVQADAAKADGLILLPYPDPYRPYRNDPTGDAILTLLTEKLAAVPAGSIGAAFIEPIQSDGGLIVPPDGFLRKFADICRAHGILVVCDEVKVGLARSGRLHCFEHEGFVPDILVLGKGLGGGLPLSAVIAPAEILDCASAFAMQTLHGNPISAAAGLAVLETIDRDDLPAMAERKGRLLRDGLSELAKRHPLIGDIRGRGLACGMELVCDRQSREPARAETAKLIYRAYQLGLVVYYVGMNGNVLEFTPPLTITETDIHKALDLLDRAFSELSAVSNEEIAQFAGW

SEQ ID NO: 11346 - protein, 497 aa, Legionella pneumophila
MIRNSMKSHTELLSWNLLQKEADRVRLNSDSLTCVVPDSNNYESSKQINCIEYDYSRQRVNRTIIDLLIDLANEVKLQEKIDNLINGKKINISENRPALHTALRDLGNKSIMIDGLDIMSAVINTREKIKVISNQIREKKWLGHSGLPITDIVNIGIGGSDLGPRVCINALSNYISKEFNYHFISDVDPASFNDVIAKINPQTTLFIVSSKSFTTKETLLNARKAFALYEDTASIDQHFIAVTAHPERAYQMGIKTVLPIWDWVGGRFSFCSAVNLITAIAIGYEQFVELLAGAHDIDTHVQFTDFKNNIPVLMALIGIWNNNFLNIHYDLIGYNFKEYFVPYVQQLDMESNGKSIDVNGRMVDYATGPIVWGGLGNQAQHSYFQLLCQGTHRCVGDFITLKTNDEHEINSMCHYKMKVLSEGIQTIENPYGYIPGNMPMNHLILSDCSPYTLGALVALYEHKIFEQSVIWNINPFDQPGIESAKSAHREITLSSES

SEQ ID NO: 11347 - protein, 352 aa, Thermoanaerobacter tengcongensis
MKGFAMLSIGKVGWIEKEKPTPGPFDAIVRPLAVAPCTSDVHTVFEGAIGERHNMILGHEAVGEVVEVGSEVKDFKPGDRVVVPAITPDWRTSEVQRGYHQHSGGMLAGWKFSNIKDGVFGEFFHVNDADMNLAHLPKEIPLEAAVMIPDMMTTGFHGAELADIELGATVAVLGIGPVGLMAVAGAKLRGAGRIIAVGSRPVCVDAAKYYGATDIVNYKDGPIDSQIMDLTEGKGVDAAIIAGGNVDIMATAVKIVKPGGTIANVNYFGEGDVLPVPRLEWGCGMAHKTIKGGLCPGGRLRMERLIDLVVYKRVDPSKLVTHVFRGFDNIEKAFMLMKDKPKDLIKPVVILA

SEQ ID NO: 11348 - protein, 356 aa, Ustilago maydis 521
MSLPSSHLAAVVPEAGAQHKVVDRSLGSLAADEIAVKITATAINPVDWKIRDYRIFITEFPAVLGSDAAGEVVAVGSSVKSHTVGERVFFQGILGNYDSSTFQQYAKIPASLAAKTPKKVSDDQAATFWVAGMAAATGLYHNSGLSLAAPWDKNGDSVGKGKTAIILGGSSSVGQYVIQFAKLSGFDHIITSSSASHFDYLKNLGATQVLDRSQATTASEFIAAIDSNSEATWVYDSISSASTQLLAVQILQALQGGKVITVTPADEKAAAQSKVDGKPNVEVSNILGIGSNPAYRYVSEPLAAHLGGEDGYVATGKVSLNRTQVVQGGLNSVEEALKINKQGVSGLKVVILPNEA

SEQ ID NO: 11349 - protein, 387 aa, Glycine max
MEHKVATTTEGQSIRCKAAICRKAGEPLCIEEIIVAPPMPGEARIRIICSSLCQTDISFRNMQDHPAIYPRILGHEAIGVVESVGEDVTEVTKGDVVVPIFLPDCGECIDCKSSKSNLCSKFPFEVSPWMPRYATSRFTDLKGEIIHHFLSVSSFSEYTVVDIAHLTKIDPEVPPSKACLLSCGVSTGVGAAWRTAGVEPGSTVAIFGLGSIGLAVAEGARLCGATRIIGVDINSEKYEIGKKFGITDFVHSGECENKSASQVIIEMTDGGADYCFECVGNASLMHEAYASCRKGWGKTIVLGSDKPGSKLSLSCSEILVSGKSLVGCMFGGLKPKSHVPILIKRYLDKELNLDGFVTHEVEFKDINKAFDLMIKGQCLRCVIWMDK

SEQ ID NO: 11350 - protein, 226 aa, Arabidopsis lyrata subsp. lyrata
CKAAVAWEAGKPLVMEEVEVAPPQKHEVRIKILFTSLCHTDVYFWEAKGHTPLFPRIFGHEAGGIVESVGEGVTDLQPGDHVLPIFTGECGDCPHCHSEESNMCDLLRINTERGGMIHDGESRFSINGKPIHHFLGTSTFSEYTVVHSGQVAKINPDAPLDKVCIVSCGLSTGLGATLNVAKPKKGQSVAIFGLGAVGLAAAEGARIAGASRIIGVDLNSQRFDQA

SEQ ID NO: 11351 - protein, 551 aa, SYNECHOCOCCUS SP. WH 8102
MGKPGRSSIPSVGVHHQGPMSFPDFSASDAQIQWQRFCDLLWYHEDLGIWLDISRMHVNPSHLEQLQPGFDKAFAAMAELEAGAIANPDEQRQVGHYWLRTPQLAPNEAVRDQIATEIDQIDQFGRDVISGVIKAPGGQPFTDVLWIGIGGSGLGPLLMIRALQGHGSGLPFHFFDNVDPNGMSAVLAELDDRLATTLVVTVSKSGGTPEPHLGMEQARHRVESRGGRWADQAVAITMVDSKLDREAQQDGWLKSFSMFDWVGGRTSITSAVGLLPGALIGADIRDFLAGAAQMDDATRLADLRRNPAALMAASWFVAGDGKGRRDMVVLPYRDRLEVFSRYLQQLVMESLGKRLDRDGNEVNQGIAVYGNKGSTDQHAYVQQLRDGVDNFFATFIEVLEDVSDIPVIKDECPGDFLDGFLQGTRSALTEGGRQSLSISMRRFDARRLGALIALFERAVGFYGDLVNINAYHQPGVEAGKKAAAAILDLQSRVEAVLKDGAPRTVSEIRQAVGDGSDEAIFWIMRHLAGNDRGYRAEGDWANPASIRFSCS

SEQ ID NO: 11352 - protein, 238 aa, Arabidopsis lyrata subsp. lyrata
CKAAVAWEAGKPLVMEEVEVAPPQKHEVRIKILFTSLCHTDVYFWEAKGHTPLFPRIFGHEAGGIVESVGEGVTDLQPGDHVLPIFTGECGDCPHCHSEESNMCDLLRINTERGGMIHDGESRFSINGKPIHHFLGTSTFSEYTVVHSGQVAKINPDAPLDKVCIVSCGLSTGLGATLNVAKPKKGQSVAIFGLGAVGLAAAEGARIAGASRIIGVDLNSQRFDQAKEFGVTEFVNPR

SEQ ID NO: 11353 - protein, 357 aa, Arabidopsis lyrata subsp. lyrata
AVAWEAGKPLVMEEVEVAPPQKHEVRIKILFTSLCHTDVYFWEAKGHTPLFPRIFGHEAGGIVESVGEGVTDLQPGDHVLPIFTGECGDCPHCHSEESNMCDLLRINTERGGMIHDGESRFSINGKPIHHFLGTSTFSEYTVVHSGQVAKINPDAPLDKVCIVSCGLSTGLGATLNVAKPKKGQSVAIFGLGAVGLAAAEGARIAGASRIIGVDLNSQRFDQAKEFGVTEFVNPRDHDKPVQQVIAEMTNGGVDRSVECTGSVQAMIQAFECVHDGWGVAVLVGVPSKDDAFKTHPMNLLNERTLKGTFFGNYKPKTDIPGVVEKYMNKELELEKFITHTLPFSEINKAFDYMLKGE

SEQ ID NO: 11354 - protein, 547 aa, Mesorhizobium loti MAFF303099
MDKSAFQKQLAALRDHRSAAPASMRQAFAADPQRFQAFTATDGDLLLDWSKCAVDATTMDLLEKLAAAADLEGRRAAMFAGKKINITEDRAVLHTALRNLSGTGVTVDGQDVKADVLSVLDAMGAFADAIRSGKALGATGKKITDIVNIGIGGSDLGPAMATLALAPYHDGPRAHYVSNIDGAHIHDTLKGLSAETTLFIVASKTFTTVETMTNAQTARDWVQKALGKQAVGKHFAAVSTALDLVAKFGIEADRVFGFWDWVGGRYSVWGAIGLPVMIAVGPRNFRAFLDGAHEMDQHFRTAPLAGNLPALLGLVGWWHRVICGYPARAVIPYDQRLSRLPAYLQQLDMESNGKGVTLDGTPVATPTGPLVWGEPGTNGQHAFFQLLHQGTDFIPVEFLAAAVGHEPELKHQHDLLLANCLAQSEALMKGRTLDEARAQMLAKGMKPADVDKIAPHRVFSGNRPSLTILYRKLDPRTFGRLIALYEHRVFVEGTLFNINSFDQWGVELGKELATGLLPVVEGKESAANRDASTRGLVERIHQLRGSE

SEQ ID NO: 11355 - protein, 97 aa, Lycopersicon esculentum
IRSFRKNTLATKKNDDEGRTGSSCLYVKVSMDGAPYLRKVDIKTYSNYAALSSALEKMFSCFSIGQCASDKIPGQEKLSESHLMDLLNGSEYVLTYE

SEQ ID NO: 11356 - protein, 509 aa, Glycine max
  unsure (1)..(509): unsure at all Xaa locations
MSLPACPAEQLAQXLLGPNTTDASAAASLICGQFAAVDSKFVDTAFAVDNTYLLFSAYLVFSMQLGFAMLCAGSVRAKNTMNIMLTNVLDAAAGGLFYYLFGFAFAFGSPSNGFIGKHFFGLKDIPSSSYDYSYFLYQWAFAIAAAGITSGXIAERTQFVAYLIYSSFLTGFVYPVXVSHWFWSPDGWASAISSADHVFSPGDRLFSTGVIDFAGSGVVHMVGGIAGLWGALIEGPRMGRFDHAGRAVALRGHSASLVVLGTFLLWFGWYGFNPGSFNKILLTYGNSGNYYGQWSAVGRTAVTTTLAGSTAALTTLFGKRVISGHWNVTDVCNGLLGGFAAITAGCSVVEPWAAIVCGFVASIVLIACNKLAEKVKFDDPLEAAQLHGGCGTWGVIFTALFAKKEYVKEVYGLGRAHGLLMGGGGKLLAAHVIQILVIAGWVSATMGPLFWGLNKLKLLRISSEDELAGMDMTRHGGFAYAYEDDETHKHGMQLRRVGPNASSTPTTDE

SEQ ID NO: 11357 - protein, 288 aa, Zea mays
GSHLNKQVLGALPLPLPYTITAFQLAFGSLLIFLMWATRLHPAPRLSAAQLGKIAPLAVGHMLGTVFTNMSLGKVAVSFTHTIKASEPFFTVVLSALFLGEVPSLPVLGSLVPIVGGVALASFTEVSFNWTGFWSAMASNLTNQSRNVLSKKLLAGDKDVMDDINLFSVITVLSFLLSCPLMIFAEGIKFTPGYLQSTGLNLQELCVRAALAGLCFHGYQKLSYLILSRVSPVTHSVANCVKRVVVIVSSVLFFSTPISPVNALGTGAALAGVFLYSRLTRTKKPKDA

SEQ ID NO: 11358 - protein, 102 aa, Lycopersicon esculentum
VRSFRKNMLSQKGNNNNNNNEEISEKDEKTIAFVKVSMDGAPYLRKVDLKMYKSYQQLSHSLTNMFSSFTMGNYGSQGMIDFMNERKLMDVLNSSDYVPTYE

SEQ ID NO: 11359 - protein, 75 aa, Lycopersicon esculentum
VRSYRKNVIEKCKYVKVAVDGAPYLRKVDLEMYDSYQKLLNALENMFTCLTICNSQSESKLMDLTNGVEYVPTYE

SEQ ID NO: 11360 - protein, 99 aa, Lycopersicon esculentum
  unsure (1)..(99): unsure at all Xaa locations
VRSFRKNVMTVQKNTTGAGEISGTGTGAAFVKVSVDGAPYLRKVDLKMYKSYQQLSDALGKMFSSFTIGNCGTQGXXDFMNESKLIDLLNGSDYVPTYE

SEQ ID NO: 11361 - protein, 297 aa, Xanthomonas axonopodis pv. citri str. 306
MSQRIRKAVFPVAGLGTRFLPATKTVPKEMLPIIDKPLIQYAVDEAIQAGCDTLIFVTNRYKHSIADYFDKAYELEQKLERAGKLEQLELVRHALPDGVRAIFVTQAEALGLGHAVLCAKAVVGNEPFAVLLPDDLMWNRGDAALTQMANVAEASGGSVIAVEDVPHDKTASYGIVSTDAFDGRKGRINAIVEKPKPEVAPSNLAVVGRYVLSPKIFDLLEATGAGAGGEIQLTDAIAELLKEEQVDAFRFEGRRFDCGAHIGLIEATVHFALEHEKHGGPAKEILREALAQADVRG

SEQ ID NO: 11362 - protein, 1129 aa, Avena sativa
MSSSRPASSSSSRNRQSSQARVLAQTTLDAELNAEYEESGDSFDYSKLVEAQRDGPPVQQGRSEKVIAYLQHIQKGKLIQTFGCLLALDEKSFNVIAFSENAPEMLTTVSHAVPSVDDPPRLGIGTNVRSLFSDQGATALHKALGFADVSLLNPILVQCKTSGKPFYAIVHRATGCLVVDFEPVKPTEFPATAAGALQSYKLAAKAISKIQSLPGGSMEVLCNTVVKEVFDLTGYDRVMAYKFHEDDHGEVFSEITKPGLEPYLGLHYPATDIPQAARFLFMKNKVRMICDCRARSIKVIEAEALPFDISLCGSALRAPHSCHLQYMENMNSIASLVMAVVVNENEEDDEAESEQPAQQQKKKKLWGLLVCHHESPRYVPFPLRYACEFLAQVFAVHVNREFELEKQLREKNILKMQTMLSDMLFREASPLTIVSGTPNIMDLVKCDGAALLYGGKVWRLRNAPTESQIHDIAFWLSDVHRDSTGLSTDSLHDAGYPGAAALGDMICGMAVAKINSKDILFWFRSHTAAEIRWGGAKNDPSDMDDSRRMHPRLSFKAFLEVVKMKSLPWSDYEMDAIHSLQLILRGTLNDASKPKREASLDNQIGDLKLDGLAELQAVTSEMVRLMETATVPILAVDGNGLVNGWNQKAAELTGLRVDDAIGRHILTLVEDSSVPVVQRMLYLALQGKEEKEVRFEVKTHGPKRDDGPVILVVNACASRDLHDHVVGVCFVAQDMTVHKLVMDKFTRVEGDYKAIIHNPNPLIPPIFGADEFGWCSEWNAAMTKLTGWNRDEVLDKMLLGEVFDSSNASCPLKNRDAFVSLCVLINSALAGEETEKAPFGFFDRSGKYIECLLSANRKENEGGLITGVFCFIHVASHELQHALQVQQASEQTSLKRLKAFSYMRHAINNPLSGMLYSRKALKNTDLNEEQMKQIHVGDNCHHQINKILADLDQDSITEKSSCLDLEMAEFLLQDVVVAAVSQVLITCQGKGIRISCNLPERFMKQSVYGDGVRLQQILSDFLFISVKFSPVGGSVEISSKLTKNSIGENLHLIDLELRIKHQGLGVPAELMAQMFEEDNKEQSEEGLSLLVSRNLLRLMNGDVRHLREAGVSTFIITAELASAPTAMGQ

SEQ ID NO: 11363 - protein, 263 aa, Treponema pallidum subsp. pallidum str. Nichols
MNVGFLGFGAMGRALAEGLVHAGALQAAQVYACALNQEKLRAQCTSLGIGACASVQELVQKSEWIFLAVKPSQISTVLRDRQSFQGKVLISLAAGMSCAAYEALFAADPHQGIRHLSLLPNLPCQVARGVIIAEARHTLHHDEHAALLAVLRTVAQVEVVDTAYFAIAGVIAGCAPAFAAQFIEALADAGVRYGLARDQAYRLAAHMLEGTAALIQHSGVHPAQLKDRVCSPAGSTIRGVLALEEQGLRRAVIHAVRAALSSS

SEQ ID NO: 11364 - protein, 513 aa, Apium graveolens var. dulce
MITGEVSVDSYDTNKPKPKRNKYAFACALLASMNSILLGYDTGVLSGASIYIKEDLHFSDVQIEIIIGIINIYSLLGSAIAGRTSDWIGRRYTMVLAGIIFFLGAIFMGLATNFAFLMFGRFVAGIGVGYAMMIAPVYTAEVAPSSSRGFLTSFPEVFINSGVLLGYVSNFAFAKCPLWLGWRIMLGIGAFPSVALAIIVLYMPESPRWLVMQGRLGEARTVLEKTSTSKEEAHQRLSDIKEAAGIDKDCNDDVVQVPKRTKDEAVWKELILHPTKPVRHAAITGIGIHFFQQACGIDAVVLYSPRIFEKAGIKSNSKKLLATIAVGVCKTVFILISTFQLDKIGRRPLMLTSMGGMVIALFVLAGSLTVINKSHHTGHWAGGLAIFTVYAFVSIFSSGMGPIAWVYSSEVFPLRLRAQGCSIGVAVNRGMSGIIGMTFISMYKAMTIGGAFLLFAVVASIGWVFMYTMFPETQGRNLEEIELLFGSYFGWRKTLKDLKAKEAAEAKSRESEV

SEQ ID NO: 11365 - protein, 305 aa, Zea mays
MAMQAARRLASLKLQRPLLLPSQAESPSISIPTAAAAAAFLHSHATSFGYKQVREEDKSKLVGNVFSSVASSYDLMNDLMSVGLHRLWKDRLISKLNPFSGMKHLDVAGGTGDVAFRVLERVKSVGHRAMQGTLTETEEGTHIYVCDINPNMLNVGKKRAAERGYSEEHCLSWIQGDAEALSFEDGSMDGYTIAFGIRNVTHIEKALSEAYRVLKQGGRFLCLELSHVDVPIFKEIYDVYSFSMVPAIGELVAGDRQSYQYLVESIRRFPNQEKFAQMIQEAGFQRVEYENLVGGVVAIHSGLKL

SEQ ID NO: 11366 - protein, 175 aa, Triticum aestivum
MAPTVMASSATSVAPFQGLKSTAGLPVSRRSNGASLGSVSNGGRIRCMQVWPIEGIKKFETLSYLPPLSTEALLKQVDYLIRSKWVPCLEFSKVGFIFREHNASPGYYDGRYWTMWKLPMFGCTDATQVINEVEEVKKEYPDAYVRIIGFDNMRQVQWVSFFAFKPPGCEESGKA

SEQ ID NO: 11367 - protein, 222 aa, Candida albicans SC5314
MADNSDDYSYDYEYLYKIVLIGDSGVGKSNLLSRFTRDEFNLESRSTIGVEFATRTLEIDGKRVKAQIWDTAGQERYRAITSAYYRGAVGALIVYDIAKTESYESVSRWLKELKEHADANIIIELVGNKSDLDHLRAVPTEEAKNFAMENNLLFTEASALSSDNVDLSFHQLLKNIYEMISKHQLENNDSKQTNTAGGPTISLTPAPQEKKNKNNGWLLLRH

SEQ ID NO: 11368 - protein, 389 aa, Methanosarcina acetivorans C2A
MTFPMYSDRINALPPYLFAAIDEAKDEMIAKGVDVIDLGVGDPDLPTHPHIVEAMREAVCDPKTHQYPSYAGMPEFREAAAEWCKKYKGIELDPATEVLSLIGSKEAVAHIPLAFVNPGDVVLYTDPGYPVYKIGTLFAGGEPYSLPLKAENSFLPDLDSIPADILKRAKLFFFNYPNNPTSATADMKFFEKVVEFCKKNDIIAVHDNAYSQMVYDGYDAPSFLAAEGAMDIGIELYSHSKTYNMTGWRLGFAVGSKALIKGLGKVKSNVDSGVFDAIQIAGIAALSSSQACVDDTNKIYEERRNVLIEGLTAMGLEVKPPKATFYVWAPVPTGFTSIEFAKLLLEEAGIVATPGVGFGDAGEGYVRFALTKPVERIKEAVERMKKLQF

SEQ ID NO: 11369 - protein, 407 aa, Oryza sativa (japonica cultivar-group)
MQSAAAAFGLVRPCPARPPLQLGPGSSSCRPILLHARPLAAGIASSSRGPAAVAARSLGRLLLLPPPPPISPDRAGRGRARHVACGAAAGDAKAEEEESGLAKTLQLGALFGLWYLFNIYFNIYNKQVLKVFPYPINITTVQFAVGTVVALFMWITGILRRPKISGAQLFAILPLAVVHTMGNLFTNMSLGKVAVSFTHTIKAMEPFFSVLLSAIFLGELPTVWVILSLLPIVGGVALASLTEASFNWAGFWSAMASNVTFQSRNVLSKKLMVKKEESLDNINLFSIITVMSFFLLAPVAFLTEGIKITPTVLQSAGLNVKQVLTRSLLAALCFHAYQQVSYMILARVSPVTHSVGNCVKRVVVIVTSVLFFRTPVSPINSLGTAIALAGVFLYSQLKRLKPKPKAA

SEQ ID NO: 11370 - protein, 234 aa, Streptococcus pneumoniae R6
MMNELFGEFLGTLILILLGNGVVAGVVLPKTKSNSSGWIVITMGWGIAVAVAVFVSGKLSPAHLNPAVTIGVALKGGLPWASVLPYILAQFAGAMLGQILVWLQFKPHYEAEENAGNILATFSTGPAIKDTVSNLISEILGTFVLVLTIFALGLYDFQAGIGTFAVGTLIVGIGLSLGGTTGYALNPARDLGPRIMHSILPIPNKGDGDWSYAWIPVVGPVIGAALAVLVFSLF

SEQ ID NO: 11371 - protein, 468 aa, Bartonella henselae
MSYDVVVIGAGPGGYVAAIKAAQLGLKTAIIEKRMTLGGTCLNVGCIPSKALLHASEVFAETQHGFETLGISIAKSKLNLEQMMAHKKAVVTANTSGVSFLMKKNKIDTFFGTAKILNAGQIEVVARDGNKQTIETKNIIIATGSESSGIPGVNVEIDEKVIVSSTGALALEKVPTRMIVVGAGVIGSELGSVWSRLGAKVTIIEYLNKVLGSMDGEVSRQFQKIMEKQGIEFKIGAKVTAITQSGSVAQVTFEAVKGGPSETLEADVVLIATGRFPYTEGLGLEEAGVQLDERGFITIDAHWQTNIPGVYAIGDVVKGPMLAHKAEEEGVAVAEILAGQKGHVNFDVIPSVVYTQPEIASVGKTEEELKAAGIDYNVGKFPFMANGRARAMQKSDGFVKILADKKTDRVLGGHILGFGAGEMIHEIAVLMEFGGSSEDLGRCCHAHPTLSEAVREAALATFAKPLHI

SEQ ID NO: 11372 - protein, 495 aa, Deinococcus radiodurans
MTAEPQVSPAPTPPPAAPLLVRDRLFIGGEWVTPCGQGTLEVVNSATEEVMGTVPEGTPEDAERAILAARAAFDSWSQTPAEERAALLERISRGLNERQSEIAALVAQEVGMPFVLSNVIQVGLPAVTFMSMAEEIRQLPAEETLASSLLLREPVGVVAAITPWNYPLHQIAAKVAPALAAGCTVVLKPSEVAPLNAFVLAEIIEAAGAPAGVFNLVTGTGPVVGEVLAAHPEVDMVSFTGSTAAGKRVSELAARTVKRVALELGGKSPYLILDDADLSGEALVQAVMNGIQGCYLNSGQTCSALTRMLVPRSRLPEVEAVAQAVVSQVKVGSPFDAATTLGPLVSDVQRERVRGHIRQGVAEGARLIAGGAESPEGLERGYYVQPTIFSDVTPEMTIAREEIFGPVLVIQPYEDEEDAVRIANATHYGLAGGVWSSDRERAVRVARRLRTGQVSINGGAFNPVAPFGGYKQSGNGREFGRLGLEEFMEVKALQF

SEQ ID NO: 11373 - protein, 95 aa, Triticum aestivum
  unsure (1)..(95): unsure at all Xaa locations
MALRAAAARLASSSLRRRHGHLLPAAATASQSAFLHSHATSFGFKQVREDEKSKLVGNVXSSVASSYDVMNDLMSAGLHRLWKDRLISKLNPFPG

SEQ ID NO: 11374 - protein, 138 aa, Oryza sativa
MFSGEWTPPCGSCCTKKYASLVQIPWRVFCKKGCDADGDTWDECISKCTEICYKDPVLEDHQWSAYIDRSPGQDSYSLECFNACVSGCGYRFDIPAEKVEQIKPNRPSKPPPPPPPAVERATNSEPAVKGEDVPCTSA

SEQ ID NO: 11375 - protein, 87 aa, Lycopersicon esculentum
VRSFRKNILTSQKLDRENDNILVKVSMDGAPYLRKVDLNMYKSYQELFDALTKMFNSFTIVQGMKDFMHEGRLMDLLNSSDYVPTYE

SEQ ID NO: 11376 - protein, 402 aa, Streptomyces anulatus
MEFRQSSKLSEVCYEIRGPVIEHANALEEAGHSVLRLNTGNPALFGFEAPEEIVQDMIRMLPQAHGYTDSRGVLSARRAVAQRYQALGLDEVSVDDVFLGNGVSELVTMAVQALLEDGDEILIPAPDFPLWTAVTTLSGGKAVHYVCDEAADWYPDLDDMASKITDQTKAVEIINPTGAVYPKEILEGILDLARRHGLMVFADEIYDQILYDDAVHHSVAALAPDLVVLTFCGLSKTYRVAGFRSGWLVITGPRQHARDYLEGLTMLASMRLCPNAPAQFAIQAALGGRQSIRELTAPGGALHEQRDRAWEKLNEIPGVSCVKPKGALYAFPRLDPKVHPIHDDEKFVLDLLLQEKIQVVQGTGFNWPRPDHFRILTLPHADDLDAAISRIGRFLSGYRQGR

SEQ ID NO: 11377 - protein, 469 aa, Methanothermobacter thermautotrophicus str. Delta H
MTAMCAIAGFRGDDAPVKVQEMLDVLRHRGPDATGIYHDSRIVIRTATGEDVKEAPQSAEIAVGHNLLSIVGGPQPVSGDGVLVFNGEIYNQEELNWTGSDSELILDLIEGHGGDLEDALRFTVNKIDGDYAFAYTDGENLASRQDPVGVKPLYHSGEAFASEKKALWRIGLRNVETLPPGHAMINGVKVKLRGLPRAEPSDAEPEELRENLKSALRESVERRVRGLDEAALVFSGGVDSTLLAVLLDEHIDVRLYTVGLPGSSDPQFASRAAADLGMELEVLEVTEDTIREALPHVLGAIEEYNLMKIGVAMPLYLASEAASADGYRVMFSGQGADELFAGYHRYRRLLAEGRLEDALRHDLENIHHVNLERDDAVTMANSVELRVPFLDLQLIGVALTIPADLKIRGPEDELRKRILREAALEMGVPEYIAMRPKKAAQYGSGIDKVLRRKVLPGFDHETFLRRLMF

SEQ ID NO: 11378 - protein, 232 aa, Glycine max
  unsure (1)..(232): unsure at all Xaa locations
RLERLERLERLEVESGFNAPQENPPPYEDDTSNAESSTQHSESISQLVNLNQTAYENPNLGTLSHEEYFRVLDEMKTKSYSYDTDKDTNIYDGNTSCLATCTTSDIDDDLCKGSFTYEAEEVGGNELGCLTSCVGTRWFQAPXLLYGSTDYGLEGXDFWSWRCVFAELLTLKPLFPGTSDVXSXAELVSVLGNIDEETWPGCHKLPDXGINLIWWRGKILSGLEACMPKMHP

SEQ ID NO: 11379 - protein, 435 aa, Agrobacterium tumefaciens str. C58
MSLNNEQSFWNQANRHLTRYGPSFESIIVERASGSYVYDANDRPILDFTSGQMSALLGHTHPDIVATVDRQMRSVAHLFSGMLSRPVVELASRLAALAPGLDRVQLLTTGAESNEAAIRMAKLVTGGHEVVAFAQSWHGMTGAAAAATYSAGRRGYGPVAAGSLVIPAPNSYRPRFAKPDGTNDWQTELDDAFALIDNQSTGSLAAFIAEPILSSGGILELPAGYLAALKLKCEERGMLLILDEAQTGVGRTGHMFAFQRDGVTPDILTLSKTLGAGLPLAAVMTTEAIEQKAFEKGYLFYTTHVSDPLLAAVGVTVLDVVEREGLLAAAIGRGARLRAGLVSLQQRFECVGDVRGRGLLMGLEIVADRQTKAPGFALGAKIMEEAMRRGLSMNIVKLPGMGGVFRIAPPLTVSDEEIDHGIEIMSDSIQAASGA

SEQ ID NO: 11380 - protein, 258 aa, Glycine max
  unsure (1)..(258): unsure at all Xaa locations
IRHQLIFTAVLEDNCTSRTCAICLEDYCVGEKLRILPCCHKFHAACVDSWLTSWRTFCPVCKRDARSGLTDPPPSESTPLLSSTPASMASSVLSSARSSLASSSAIQIARTASMASSALPSARSSLASSSAIQIARAASQTPSVSRNHSIASTPYVQPSLRSSYHQSPSLSISRSSVDLRNASQRSLASHLNSPRSMGYPSLSSLNSRYMSPHIPSPSNASVSYMGSSQSSTNHLXPPYSESAASFSPFASTHSLPEC

SEQ ID NO: 11381 - protein, 585 aa, Triticum aestivum
MCGILAVLGCADDTQGKRVRVLELSRRLKHRGPDWSGMHQVGDCYLSHQRLAIIDPASGDQPLYNEDKSIVVTVNGEIYNHEQLRAQLSSHTFRTGSDCEVIAHLYEEHGENFIDMLDGVFSFVLLDTRDNSFIAARDAIGVTPLYIGWGIDGSVWISSEMKGLNDDCEHFEIFPPGHLYSSKQGGFKRWYNPPWFSEVIPSVPYDPLALRKAFEKAVIKRLMTDVPFGVLLSGGLDSSLVAAVTVRHLAGTKAAKRWGTKLHSFCVGLEGSPDLKAAKEVANYLGTMHHEFTFTVQDGIDAIEDVIYHTETYDVTTIRASTPMFLMSRKIKSLGVKMVISGEGSDEIFGGYLYFHKAPNKEELHRETCQKIKALHQYDCLRANKATSAWGLEARVPFLDKEFINEAMSIDPEWKMIRPDLGRIEKWVLRKAFDDEEQPFLPKHILYRQKEQFSDGVGYSWIDGLKAHAESNVTDKMMSNAKFIYPHNTPTTKEAYCYRMIFERFFPQNSAILTVPGGPSVACSTAKAVEWDAQWSGNLDPSGRAALGVHLSAYEQEHLPATILTGTSKKPRMIEVAAPGVAIES

SEQ ID NO: 11382 - protein, 133 aa, Triticum aestivum
  unsure (1)..(133): unsure at all Xaa locations
MAPTVMASSATSVAPFQGLKSTAGLPVSRRSSSAGLGSVSNGGRIRCMQVWPIEGIKNSETLSYLPPSPXGGLXLKQVDYLIXRSNWVPCLXFNKLVPFPXRXHSPGYMAILAWNCYFGSTKVSVRRYLSVTA

SEQ ID NO: 11383 - protein, 688 aa, Ustilago maydis 521
MSASQSRTSTRPSSEVERNTYANGSTTSRGNGHARQRSNTASSVRSNGTVRAPRVSMEDNTSPLARFGIKGDGLMLFVTCFASLGVFLFGYDQGVMSGIITGPYFKAYFKHPTAYEIGTLVASLELGALVTSLACGRLADIFGRKNTLFWGAVIFSVGGAIQTFTSGYDTMLIGRVISGLGVGVLSMIVPTYQSEISPAENRGKLACIEFTGNIIGYASSVWVDYFSSFIESDLSWRLPLSLQVVIGATLAFGSVLLPESPRWLLDKDMDEQGMRVLADLHGAGDPNEPRAKLEFREIKENVLYLRKQGDNSYKRMLTQYRYRTMIAMSSQMFAQLVGINSVCYYLPMILESAGWIGRDALLMTGVNGIIYTLATVPTWFLIDLWGRRIILLSGAIGCGAALTACSYFMYLDQSYTPQAVVGCIIVFNAWFGYSWGPVPWLYPPEILPLAFRAKGASLATATNWSFNWLVGELTPILMEKIAWRLYLILAFFAGLAFVTVYFGYPETSGVPLEEIGALFGDEINVPQDEEDDDDDDDQQDEDGQGGSGERIRPRVSVDGSQDGAEYTPRPIRRSISSHPRLQSEEERAARAAAARVAAEERQVAQSFFRLGGGGPFGWVSRLLRGGKREGPPDRSLGSSMGEAASSGKQVLPKREVLLLQQLGPRDDHHVLILDEDEQDGVTERELPR

SEQ ID NO: 11384 - protein, 473 aa, Sinorhizobium meliloti 1021
MAKILTPDICVIGGGAAGLSVAAGAAAFGVPVVLVEHGRMGGDCLNYGCVPSKALIAAAKHADAIRKAAEFGIASAEPIVDHEHLTARIQSVIEAIAPHDSAERFTSLGVEVIKETARFVDDRTVAAGDRMIRARRFVVATGSSPAIPPIPGLAETPFLTNETLFGLKRLPRHLLVIGAGAVGLEMAGAHRRLGADVTVVDSAAALSGQDPELAAIVLDGLRAEGMLLHERTVIRSAEQTETGIRLICENESGPFEIEGSDLLVAAGRAPNHGSLDLDAAGIRHCPKHVEVGADLRTSNRRVYAVGDAAGGLFTHQASYHARLVLQQILFRLPGRERTTIVPQVIFTAPELAQVGLTEERARESARGARTVRLDFSASDRARTDGLDRGLIKIVVGRRGRVLGAGIAGPGAGEMIGLWAFAVANRLTLRHFQTYVAPYPTLSEIGKQAAISYYSPMARNRLLRTAIRFLRNFG

SEQ ID NO: 11385 - protein, 496 aa, Triticum aestivum
MARKMLKDGEAPLVADDGGTYDYDLFVIGAGSGGVRGSRTAAGFGAKVAICELPFHPISSEWLGGHGGTCVIRGCVPKKILVYGASFRGEFDDAKQFGWEINGDINYNWKKLLENKTQEIVRLNGVYKRILGGSGVTMIEGAGSIVDAHTVEVTQPDGSKQRHTTKHILIATGSRATLVDIPGKELAITSDEALSLEELPKRAVILGGGYIAVEFASIWKGLGAEVDLFYRKELPLRGFDDEMRTVVASNLEGRGIRLHPGTNLTELSKTADGIKVVTDKGDELIADVVLFATGRAPNSNRLNLEAVGVEVDQIGAIKVDEYSRTSVPSIWAVGDVTNRINLTPVALMEATCFAKTVFGGQTVKPDYKDVPCAVFCIPPLSVVGLSEQEALAETKNDLLIYTSSFNPMKNSISKRVEKSTMKLVVDAETDKVLGAAMCGPDAAEIMQGIAVALKAGATKATFDSTVGIHPSAAEEFVTMRTLTRRVSPPSKPKTNL

SEQ ID NO: 11386 - protein, 1722 aa, Ustilago maydis 521
MPDPRLYPDKHASTSSASSVNRSNDASARCSSLSPSHNILPSSRSTLRFPSQTPPASSSAAFVNAPPKPLDTHPRPSPSHADVAASSVYDERRRQSLAPDKAQRKSSGARSQPSSDHMPTSRQNIPPSHPSPKPNNIATRPPDTSTSKSAATLGNYQLGDCLGRGAFGSVYRGLNYMNGETVAVKQIQLGNIPKAELGEIMSEIDLLKNLHHPNIVKYKGSEKTKDYLYIILEYCENGSLHHICKRFGKFPEGLVSVYISQVLQGLIYLHDQGVIHRDIKGANILTTKDGSVKLADFGVATKTGAMIENAVVGSPYWMAPEVIDQSGATTASDIWSVGCVVVELLEGKPPYHFLAPMPALFRIVQDDCPPLPESASPIVKDFLLHCFQKDANLRVSARKLLRHPWMASARKQLEQLKSGGSLRAGGGVTLNTPHEEAVKSVQEWNQALNEPPKQTLQRLQEPETVRAPMKSSLRRVNAIAAELGTAKPLGGRRTRHTSRPTLPVDFSPPSAVPRKESATAYAPRISTKLLSPSFEPASASSDQLSLATNSKQPPSPVNGSGFRTPIAGAAPATSLMNHRVKLADLQQPESVDDNWDDDFEDNITTTKIAAALERSSSSEGTEAAAAGKDAAGKIGTAAVCRLASHSTAGHSSSSRSPTRLVGSEAEFDQRTIRPVAGPFLRSVASSSQVRNSPDLTADSSSPPSSRSFDDETGDDYSDLVGDGQEDVLNKRIRDLQMKNSVGKRLFHPNDLVRLASPAAGDKVSASAHGDLSPASPSKPSDRRTKASSDAMRSSLAASTARPPSDPVSPQTTLRLEKEGKWKQMRRTLGKYSEDHSTEDYSDLFGKADEGSNSKDDSVGSGNTLQLTARLSNRSWLRDDDADEDDPFAEIDEGFNAEADLEANVARDQHARMCAFVTELVESLDTHAGVDELLQVCEDIDQVLTDMPEMKAQLLASHGALALIQLLEAAADRELATRLLGILNLVIFEDPEAQESLCLIGAIPVVMTFTTKKWPHDLRLEAAHFVFAMCSTSRLTLQFVLSCRGLRTLVNLIDEDYLEQKDLVWIGVGCVSSVLELQSPASRNDFCRMLAQEGLLEPLSSALQSVIDDDQDEYASQARANILQILLIYSQSDNFLKRQVATRSVLRRILRSASRLEPESLTLMLKIVKNLSMSPTILDEMQNANTIEILTSILAQHHSGPHGTEMSNQVLNTMYNLCRLSKSRQEEAAQAGIIPQLLRVARTNSPLRQFALPILCDFAHAGKATRKMFWQHKGLNFYLKLLEDPYWQVSALESILVWLQDETARVEEVLLQPTSIESMLCVFATSKANSFENLLEPFAKVCRLSSGIVAAMARNTLFVKRLIERLAHPKAVVRLNLLRITKMICDLKGDVHSPLVDQLKVYDVVEKLSSTDNAVLVKELARDILSQRHIQWEASRTVRRTLSDTHMGEGARVSSNTGSMLPQGSAALGQLVGMRASAPYRRKMSNGTSGDAGDISSSSVAKSTIHERSISGSLIGSSPSSSSSMVGTPSTARSTAMRNLVGRLSQPRRAVTPNRDLMMNQSHTKFGSRGTSPLMVLEPLPQGEAVRLRQNSQPQMDSARGANDGSPDSLSSSRDAMEIKMADNSSGSHLGLSRGMSPRVRSISNEIKRAAAYANLGNSEDVQAQRISRHASVDVGARRGNLEELENEDAGQMQLHSADKDRTMRPPSRRPIPLLPSSPGFSP

SEQ ID NO: 11387 - protein, 214 aa, Bordetella bronchiseptica
NSLSKYIAGHGHALGGAVTDTGLYDWSGYANIYESYRKGAPTGWGLTQIKKKGLRDMGGTLAAEPAHRIAIGTETLALRMARHCSNALALATFLQGHPGVARVHYPGLSSHAQHQRASELFDGRYGGLLGVELAEGIDCFDFLNRLRIVLMATHLGDTRSLALPAAHTIYYEMGAEKRAQMGIADSLIRVSVGIEDEADLLFDFDQALRGCLQS

SEQ ID NO: 11388 - protein, 605 aa, Bacillus cereus ATCC 10987
MIFHRGPDDEGYFRDEHVQFGFRRLSIIDLEAGHQPLTYENDRYVIIFNGEIYNYVELREMLLEKGATFATQSDTEVIIALYAHMKEKCVDYLRGMFAFMIWDREEKKLFGARDHFGIKPLYIAQQGDTTFFASEKKSIMHVMEDKGVNPTSLQHYFTYQYGPEPETLTIDVNKIEPGHYFVKEIGKEMEIHRYWKPYFNASSATKEEHIQAIRDVLYDSVKVHMRSDVPVGSFLSGGIDSSIIASIAREMNPNLLTFSVGFEQRGFSEVDVAKETAEKLGVKNHNVFISAKEFMDEFPKIIWHMDDPLADPAAVPLYFVAKEARKHVTVVLSGEGADELFGGYNIYREPNSLKMFSYIPSPGKSVLKALSGALKEGFKGKSFLERGCTPIEERYYGNAKIFREEEKAELMKYYNESVNYMDITKPLYNEIKDYDDVSKMQYIDMFTWLRGDILLKADKMTMANSLELRVPFLDKEVFDVASKIPTEFKIANGTTKAILREAARGIVPDHVLDRKKLGFPVPIRHWLKDEMHDWAINIINESKTEHLIDKQYVLNLLEAHCADKGDYSRKIWTVLAFMVWHQIYVEHKYDTNKFHEETKRAYSLV

SEQ ID NO: 11389 - protein, 386 aa, Lycopersicon esculentum
MASTKQYFSAAGKPIRCKAAVARKAGEPLVIEEVIVAPPKAHEVRRKIICTSLCHTDITLWKLKGCFPRILGHEAFGVVESVGEDVDELKEGDSVVPIFLPDCMDCVDCKSKKSNLCSKFPIQVSPLLHRNDTSRFSNAAGETLHHFLYISSFSEYTVVDVVNVTKIDPEIPPNRACLLSCGVSTGVGAAWKTANVEPGSTVVIFGLGSIGLAVAEGARLCGATRIIGVDINSNKFEIGKQFGITEFVNSKSCVDKPISQVIIEMTDGGADYCFECVGLATLVQEAFTCCRKGWGKTVVLGVDKPDAHLNLNSFEVLQSQKTLTGALFGGLKPKSDVPILVKRYLDKELQLNKFVTHEVNFEDINKAFDLLIQGKSLRCVIWMDKL

SEQ ID NO: 11390 - protein, 102 aa, Triticum aestivum
MNRRPELCRNYQRGSCKYGAQCRFVHANSNQQQQQQAKPNPFGFGAGSRQQPQQQSFGVQSQQFQQQQQQQQQKPNQFGFGVQGGAAQQRNEPGPAKPFQNK

SEQ ID NO: 11391 - protein, 465 aa, Medicago sativa
MASSSLLSSVPSHSASLSILDTNIKGKLKLGTNGLRFNNEGINNFSNLRSSGRICMAVATNVSRFEGIPMAPPDPILGVSEAFKADTSDVKLNLGVGAYRTEELQPYVLNVVKKAENLMLERGENKEYLPIEGLAAFNKATAELLLGADNPAIKQQRVATVQGLSGTGSLRLGAALIERYFPGAKVLISNPTWGNHRNIFNDARVPWSEYRYYDPKTVGLDFEGMIEDIKSAPEGTFVLLHGCAHNPTGIDPTPEQWEKIADVIQQKNHFPFFDVAYQGFASGSLDEDAASVRLFVSRGMEVLVAQSYSKNLGLYAERVGAINVISSSPESATRVKSQLKRLARPMYSNPPVHGARIVANIVGTPALFDEWKAEMEMMAGRIKTVRQALYDSISSKDKSGKDWSFILKQIGMFSFTGLNKSQSDNMTNKWHIYMTKDGRISLAGLSLAKCEYLADAIIDSYHNVS

SEQ ID NO: 11392 - protein, 1164 aa, Oryza sativa
  unsure (1)..(1164): unsure at all Xaa locations
MASGSRATPTRSPSSARPAAPRHQHHHSQSSGGSTSRAGGGGGGGGGGGGGAAAAESVSKAVAQYTLDARLHAVFEQSGASGRSFDYTQSLRASPTPSSEQQIAAYLSRIQRGGHIQPFGCTLAVADDSSFRLLAYSENTADLLDLSPHHSVPSLDSSAVPPPVSLGADARLLFAPSSAVLLERAFAAREISLLNPLWIHSRVSSKPFYAILHRIDVGVVIDLEPARTEDPALSIAGAVQSQKLAVRAISRLQALPGGDVKLLCDTVVEYVRELTGYDRVMVYRFHEDEHGEVVAESRRNNLEPYIGLHYPATDIPQASRFLFRQNRVRMIADCHAAPVRVIQDPALTQPLCLVGSTLRSPHGCHAQYMANMGSIASLVMAVIISSGGDDDHNISRGSIPSAMKLWGLVVCHHTSPRCIPFPLRYACEFLMQAFGLQLNMELQLAHQLSEKHILRTQTLLCDMLLRDSPTGIVTQSPSIMDLVKCDGAALYYHGKYYPLGVTPTEVQIKDIIEWLTMCHGDSTGLSTDSLADAGYPGAAALGDAVSGMAVAYITPSDYLFWFRSHTAKEIKWGGAKHHPEDKDDGQRMHPRSSFKAFLEVVKSRSLPWENAEMDAIHSLQLILRDSFRDSAEGTSNSKAIVNGQVQLGELELRGIDELSSVAREMVRLIETATVPIFAVDTDGCINGWNAKVAELTGLSVEEAMGKSLVNDLIFKESEETVNKLLSRALRGDEDKNVEIKLKTFGPEQSKGPIFVIVNACSSRDYTKNIVGVCFVGQDVTGQKVVMDKFINIQGDYKAIVHNPNPLIPPIFASDENTCCSEWNTAMEKLTGWSRGEVVGKLLVGEVFGNCCRLKGPDALTKFMIVLHNAIGGQDCEKFPFSFFDKNGKYVQALLTANTRSRMDGEAIGAFCFLQIASPELQQAFEIQRHHEKKCYARMKELAYIYQEIKNPLNGIRFTNSLLEMTDLKDDQRQFLETSTACEKQMSKIVKDASLQSIEDGSLVLEKGEFSLGSVMNAVVSQVMIQLRERDLQLIRDIPDEIKEASAYGDQYRIQQVLCDFLLSMVRFAPAENGWVEIQVSYLSSFSIPEGNTYSHAGISCVEFGRGQVKYLVKFIFVGHICCSTXRFACPGEGLPPEIVQDMFSNSRWTTQEGDLGSSDGEPSL

SEQ ID NO: 11393 - protein, 426 aa, Glycine max
  unsure (1)..(426): unsure at all Xaa locations
MSTDLSVILPRVLIVSRRSVRKNKFVDFVGEYHLDLIVGYGAVPVIVPRVSGVHMLLDSFEPIHGVLLCEGEDIDPSCYEQDTAGLSEEELEEIRRLHASDTAIDKEKDSIELSLAKLCLERNIPYLXGICRGSQILNVACGGTLYQDIGKELSIKCLDSQRVMHINYDDYDGHRHDVEVVENTPLHHWFKDSLEEGKMNICVNSYHHQGVKRLAQRFVPMVFAPDGLIEGFYDPDAYNPEEGKFIMGLQFHPERMRKPDSDEFDYPGCPFAYKEFVKAVVAHQKKLNSLTSVQKPIKLNKEMEIKRKIIVRSFSLAKNLYIAGRGTNSPKETELEAGAEFLESNTALSVQQENRLKQMGATVRNAGSYIERLKLNEEREKMARNVMAKMTVEQLSDLLSFYHTMGQICSEVLDIKIHGLVNDLGS

SEQ ID NO: 11394 - protein, 513 aa, Pseudomonas aeruginosa PAO1
MKIRSQVGMVLNLDKCIGCHTCSITCKNVWTSREGMEYAWFNNVETKPGIGYPKEWENQEKWKGGWVRAADGSIRPRIGGKFRVLANIFANPDLPEIDDYYEPFDFDYQHLHTAPKAEHQPVARPRSLVSGQRMEKIEWGPNWEEILGTEFAKRRKDKNFDQVQADIYGEYENTFMMYLPRLCEHCLNPACVASCPSGAIYKREEDGIVLIDQDKCRGWRMCISGCPYKKIYFNWKSGKSEKCIFCYPRIEAGQPTVCSETCVGRIRYLGVLLYDADRIHEVASCENERELYEKQLEIFLDPFDPAVIAQARKDGVADSVIEAAQKSPVYKLAMDWKLALPLHPEYRTLPMVWYVPPLSPIQNAAAEGHIGSDGVIPDVESLRIPVQYLANLLTAGDTAPVLLALKRLLAMRAYKRAEHVEGRQDLEVLAKVGLSVEQVEEMYRYLAIANYEDRFVIPSAHREEALSDAFAERSGCGFSFGNGCSGGSNSAVNLFGGKPTNRRDVIQVVQIQE

SEQ ID NO: 11395 - protein, 181 aa, Zea mays
MASSIVSSAAAATRSNVAQASMVAPFTGLKSAASFPVTKKNNNVDITSLASNGGRVRCMQVWPPINMKKYETLSYLPDLSDEQLLSEIEYLLKNGWVPCLEFETERGFVYRENNSSPGYYDGRYWTMWKLPMFGCTDATQVLAEVQEAKKAYPQAWVRIIGFDNVRQVQCISFIAYKPEGF

SEQ ID NO: 11396 - protein, 461 aa, Xylella fastidiosa 9a5c
MGPELFCESRYRDDNPMVLWYCSLLWLLTGPMTAIAKIYAREILDSRGNPTLEAEVTLENAVCGRAAVPSGASTGTKEAVELRDGDKTRYLGKGVRAAVDNVNGVIAAALVGFDGADQTGLDHRLINLDGTENKGRLGANALLGVSLATAHAVAAARKQPLWMYLSTLGESKVSLPVPMMNIINGGAHADNNVDFQEFMVLPVGFASFSEALRAGTEIFHALKSVLKGQGLSTAVGDEGGFAPDLRSNVEALDAILEAIGRAGYIAGEDVLLGLDVASSEFRDNGKYNLVGENKRLTSEQFVDFLDDWVTQYPIISIEDGLAEDDWAGWKQLTERIGHKVQLVGDDLFVTNPKVFQEGITSGIANAILIKLNQIGTLTETLESIAMAHRAQYAAIVSHRSGETEDTSIADIAVATTATQIKTGSLCRSDRVAKYNQLLRIEQALGVGARYAGRDAFVSLKS

SEQ ID NO: 11397 - protein, 582 aa, Arabidopsis thaliana
MVFKVSTVSTSPIDGQKPGTSGLRKKVKVFKQPNYLENFVQATFNALTAEKVKGATLVVSGDGRYYSKDAVQIIIKMAAANGVRRVWVGKNTLLSTPAVSAVIRERSGADGSKATGAFILTASHNPGGPTEDFGIKYNMENGGPAPESITDKIYENTKTIKEYPIAQDLPNVDISAVGVTSFEGPEGKFDVEVFDPADDYVKLMKSIFDFEAIRKLLSSPKFTFCYDALHGVAGAYAHRIFVEELGAQESALLNCTPKEDFGGGHPDPNLTYAKELVARMGLGKSDTGGEPPEFGAAADGDADRNMILGKRFFVTPSDSVAIIAANAIGAIPYFSSGLKGVASMPTSAALDVVAKSLNLKFFEVPTGWKFFGNLMDAGMCSVCGEESFGTGSDHIREKDGIWAVLAWMSILAHKNKGNIDGNAKLVSVEDIVRQHWATYGRHYYTRYDYENVDAGKAKELMEHLVKLQSSIPEVNKIVKGIRSDVASVASADEFEYKDPVDGSISKHQGIRYLFEDGSRLVFRLSGTGSEGATIRLYIEQYEKDASKTGRESQEALSPLVDLALKLSKMEEFTGRSAPTVIT

SEQ ID NO: 11398 - protein, 390 aa, Lycopersicon esculentum
MASTVQSGISKTAGKPIRCRAAVARKAGEPLVIEEVIVAPPKAHEVRLKIICTSLCHTDITLWKLKEFPGCFPRILGHEAFGVVESVGEDVDHLKEGDSVVPIFLPDCMDCVDCKSKKSNLCSKFPIQSSLLLHRDDTSRFTNADGETLHHYLYISSFSEYTVVDVVNVTKIDPEIPPNRACLLSCGVSTGVGAAWKTANVEPGSTVVIFGLGSVGLAVAEGARLCGATRIIGVGRNSDKFEIGKQFGVTEFVNSKSCGDKPVSQVIIEMTNGGADYCNECVGLGRVVQEAFACCRKGWGKTIVLGVDKPDARLNLNSFEVLQSNKTLMGSFFGGLKPKSDVHTSLKRYLDKELELDKFVTHEVNLEDINKGFDLLIQLKSLRCVIWMEK

SEQ ID NO: 11399 - protein, 405 aa, Daucus carota
MSSVFANVVRAPEDPILGVTVAYHKDQSPNKLNLGVGAYRTEEGKPLVLNVVKKAEQMLVNDQSRVKEYLPIVGLADFNKLSAKLIFGADSPAIQENRVATVQCLSGTGSLRVGGEFLARHYHEHTVYIPQPTWGNHPKIFTLAGLSVKTYRYYNPETRGLDFEGMLEDLGSAPLGAIVLLHACAHNPTGVDPTIEQWEQIRQLMRSKSLLPFFDSAYQGFASGSLDADAQSVRIFVADGGECLAAQSYAKNMGLYGERVGALSIVCKTADVASKVESQLKLVIRPMYSSPPLHGASIVAAILKDGDLYNEWTLELKAMADRIISMRQELFNALQAKGTPGDWSHIVKQIGMFTFTGLNSEQVTFMTNEYHIYLTSDGRISMAGLSSRTVPHLADAIHAAVTGKA

SEQ ID NO: 11400 - protein, 320 aa, Erwinia carotovora subsp. atroseptica SCRI1043
MIRRIGVLTSGGDAPGMNAAIRGVVRAALSEGLEIYGIYDGYQGLYEDRMEQLDRYSVSDVINRGGTFLGSARFPQFRDEAVRQVCVENMQRRGLDALVVIGGDGSYMGAKRLTEMGFPCIGLPGTIDNDVAGTDYTIGYFTALETVLEAIDRLRDTSSSHQRISIVEVMGRHCGDLTLAAAIAGGCEFIVLPEVPFSPEDLVSEIKAGIEKGKKHAIVAITELVCDVDELAKYIEKETGRETRSTVLGHIQRGGSPVAYDRILASRMGAYSIELLQQGYGGRCVGIQNEKMVHHDIVDAIENMKRPFKGDWLETAKKLF

SEQ ID NO: 11401 - protein, 503 aa, Triticum aestivum
MVAPAAIPQRQLFIDGDWRAPALGRRLPVINPTTEVTIGEIPAGTSEDVDAAVAAARAALKRNRGRDWSRAPGAVRAKYLRAIAAKMIERKSDLARLEALDCGKPLDEAAWDMDDVAGCFEFFAGHAEALDKRQNAAVALPENFKCHLKKEPIGVVALITPWNYPLLMAVWKVAPALAAGCTAVLKPSELASVTCLELGDVCKEIGLPSGVLNIVTGLGHEAGAPLSSHPDVDKVAFTGSYATGQKIMVAAAPTVKPVTLELGGKSPIVVFDDVDIDKAVEWTLFGCFWTNGQICSATSRLLIHKNIAKEFVDRMVAWSKNIKVSDPLEEGCRLGPVVSEGQYEKIKKFVANAKSEGATILTGGVRPKHLEKGFFIEPTIITDINTSMEIWREEVFGPVLCVKEFSTEEEAIELANDTHYGLAGAVISGDRERCQRLAEEIDAGCIWVNCSQPCFCQAPWGGNKRSGFGRELGEGGIDNYLSIKQVTEYTSDAPWGWYKAPAN

SEQ ID NO: 11402 - protein, 305 aa, Miscanthus condensatus
IESVGEGVTDVAPGDHVLPVFTGECKECAHCRSAESNMCDLLRINTDRGVMIGDGKSRFSINGKPIYHFVGTSTFSEYTVMHVGCVAKINPEAPLDKVCVLSCGISTGLGASINVAKPPKGSTVAIFGLGAVGLAAAEGARIAGASRIIGVDLNPSRFEEARKFGCTEFLNPKDHKKPVQEVLAEMTNGGVDRSVECTGNINAMIQAFECVHDGWGVAVLVGVPHKDAEFKTHPMNFLNERTLKGTFFGNFKPRTDLPNVVELYMKKELEVEKFITHSVPFAEINKAFDLMAKGEGIRCIIRMEN

SEQ ID NO: 11403 - protein, 305 aa, Miscanthus condensatus
IESVGEGVTDVAPGDHVLPVFTGECKECAHCRSAESNMCDLLRINTDRGVMIGDGKSRFSINGKPIYHLVGTSTFSEYTVMHVGCVAKINPEAPLDKVCVLSCGISTGLGASINVAKPPKGSTVAIFGLGAVGLAAAEGARIAGASRIIGVDLNPSRFEEARKFGCTEFLNPKDHKKPVQEVLAEMTNGGVDRSVECTGNINAMIQAFECVHDGWGVAVLVGVPHKDAEFKTHPMNFLNERTLKGTFFGNFKPRTDLPNVVELYMKKELEVEKFITHSVPFAEINKAFDLMAKGEGIRCIIRMEN

SEQ ID NO: 11404 - protein, 112 aa, Glycine max
MILLLGGSQLPNCSASAIITYSSSPSMSGFYIVMQTASSIISFSAVVAVFRAAPGMVTPFSDIKTMVGFPSKKTNNDITSIPSTGGRVQCMQVWPPVGKKKFETLSYLPDLM

SEQ ID NO: 11405 - protein, 215 aa, Zea mays
MAHRVDNEYDYLFKIVLIGDSGVGKSNILSRFTRNEFCLESKSTIGVEFATRTLQIEGKTIKAQIWDTAGQERYRAITSAYYRGAVGALLVYDITKKQTFENIQRWLRELRDHADSNIVIMMVGNKSDLNHLRSVPEEDGQALAEKEGLSFLETSALEALNVEKAFQTVLSDIHQIISKKALAAQEAAGSGPPGQGTTINVADSSANTKGGCCSS

SEQ ID NO: 11406 - protein, 432 aa, Treponema pallidum subsp. pallidum str. Nichols [sequence omitted]

SEQ ID NO: 11407 - protein, 398 aa, Streptococcus pyogenes MGAS8232
MAKLTVKDVDLKGKKVLVRVDFNVPLKDGVITNDNRITAALPTIKYIIEQGGRAILFSHLGRVKEEADKEGKSLAPVAADLAAKLGQDVVFPGVTRGSKLEEAINALEDGQVLLVENTRFEDVDGKKESKNDEELGKYWASLGDGIFVNDAFGTAHRAHASNVGISANVEKAVAGFLLENEIAYIQEAVETPERPFVAILGGSKVSDKIGVIENLLEKADKVLIGGGMTYTFYKAQGIEIGNSLVEEDKLDVAKDLLEKSNGKLILPVDSKEANAFAGYTEVRDTEGEAVSKGFLGLDIGPKSIAEFDQALTGAKTVVWNGPMGVFENPDFQAGTIGVMDAIVKQPGVKSIIGGGDSAAAAINLGRADKFSWISTGGGASMELLEGKVLPGLAALTEK

SEQ ID NO: 11408 - protein, 520 aa, Aspergillus oryzae
MAKVDQKVVLVVIDGWGVAGPDSRKDGDAILAAETPFMSGFAEADSKTAQGYSELDASSLAVGLPEGLMGNSEVGHLNIGAGRVVWQDSVRIDQTLKKGELNKVDNVVASFKRAKEGNGRLHLLGLVSDGGVHSNITHLIGLLKVAKEMEIPKVFIHFFGDGRDTEPKSATKYMQQLLDQTKEIGIGEIATVVGRYWAMDRDKRWDRVEIAMKGIVSGEGEESSDPVKTINERYEKDETDEFLKPIIVGGEERRVKDDDTLFFFNYRSDRVREITQLLGDYDRSPKPDFPYPKNIHITTMTQYKTDYTFPVAFPPQHMGNVLAEWLSKKDVQQCHVAETEKYAHVTFFFNGGIEKQFAGEVRDMIPSPKVATYDLDPKMSAEAVGQKMADRIAEGKFEFVMNNFAPPDMVGHTGKYEAAIQGVAATDKAIGVIYEACKKQGYVLFITADHGNAEEMLTEKGTPKTSHTTNKVPFIMANAPEGWSLKKEGGVLGDVAPTVLAAMGIEQPEEMSGQNLLVKA

SEQ ID NO: 11409 - protein, 479 aa, Oryza sativa (japonica cultivar-group)
MNVLASKIFPSRSNVASEQQQSKREKATIDDAKNSSKNKNLDRSVDESVLGIILGGGAGTRLYPLTKKRAKPAVPLGANYRLIDIPVSNCLNSNISKIYVLTQFNSASLNRHLSRAYGNNIGGYKNEGFVEVLAAQQSPDNPNWFQGTADAVRQYLWLFEEHNVMEFLILAGDHLYRMDYEKFIQAHRETDSDITVAALPMDEKRATAFGLMKIDEEGRIVEFAEKPKGEQLKAMMVDTTILGLDDVRAKEMPYIASMGIYVISKNVMLQLLREQFPGANDFGSEVIPGATNIGMRVQAYLYDGYWEDIGTIEAFYNANLGITKKPVPDFSFYDRSAPIYTQPRHLPPSKVLDADVTDSVIGEGCVIKNCKIHHSVVGLRSCISEGAIIEDSLLMGADYYETEADKKLLGEKGGIPIGIGKNCHIRRAIIDKNARIGDNVKIINVDNVQEAARETDGYFIKSGIVTVIKDALLPSGTVI

SEQ ID NO: 11410 - protein, 514 aa, Oryza sativa (japonica cultivar-group)
MAMAAAMGVASPYHAAHAAASTSCDSLRLLVAEGRPRRPRGVASSSSSSSSAGRRRRPLVFSPRAVSDSKSSQTCLDPDASTSVLGIILGGGAGTRLYPLTKKRAKPAVPLGANYRLIDIPVSNCLNSNISKIYVLTQFNSASLNRHLSRAYGNNIGGYKNEGFVEVLAAQQSPDNPNWFQGTADAVRQYLWLFEEHNVMEFLILAGDHLYRMDYEKFIQAHRETDSDITVAALPMDEKRATAFGLMKIDEEGRIVEFAEKPKGEQLKAMMVDTTILGLDDVRAKEMPYIASMGIYVISKNVMLQLLREQFPGANDFGSEVIPGATNIGMRVQAYLYDGYWEDIGTIEAFYNANLGITKKPVPDFSFYDRSAPIYTQPRHLPPSKVLDADVTDSVIGEGCVIKNCKIHHSVVGLRSCISEGAIIEDSLLMGADYYETEADKKLLGEKGGIPIGIGKNCHIRRAIIDKNARIGDNVKIINVDNVQEAARETDGYFIKSGIVTVIKDALLPSGTVI

SEQ ID NO: 11411 - protein, 341 aa, Streptomyces avermitilis MA-4680
MRIGVLTAGGDCPGLNAVIRSVVHRAVTMYGDEVIGFEDGYAGLLDGRYRALDLNAVSGILARGGTILGSSRLQRDRLREACENAQDMAREFGIDALIPIGGEGTLTAARMLSDAGLPVVGVPKTIDNDISATDRTFGFDTAVGVATEAMDRLKTTAESHQRVMVVEVMGRHAGWIALESGMAAGAHGICLPERPFDPAHLVKMVEERFARGKKFAVLCVAEGAHPVVGSMDYSHGAIDQFGHERFQGIGTALAAELEHRLGKEAKPVILGHIQRGGTPTAYDRVLATRFGWHAVEAAHRGDFGRMTALRGTDVQMVPLAEAVTELKTVPKDRMDEAESVF

SEQ ID NO: 11412 - protein, 666 aa, Chloroflexus aurantiacus
MRDGRAVAFYADPEHPITQGWLCAKVRPYLERVYSPDRLLYPLRRVGPKGSGRWERISWDEAITTIAERWQAIIAEYGAAAILPYSYSGTLGLLQTAIVDARLWNRMGASGLDRTICCAAAHAAVYATLGARRSPDYDDLRHSRLIILWGHNPASAGPHAMPFIRQAQRAGAYVVVIDPRRTATARSADLHLAIRPATDGALALGMMNVIFAENLHDEAWLEAHTVGWRELRARAAEYDPERVATITGLPVSTIIELARRYATTKPAIIKTADGIQRHQNGGQTFRALLCLPAVVGQYGVRGGGLAYSTGGYATWDAEAVGHASECPPVPRTVNMNRLGAALTGEVTDPPIMSLFVYCANPLASSPNAGLIEQGLRREDLFTVVHELFMTDTARYADIVLPATSQLEHLDLHRAYGHRYLTLNQPAIAPLGEAKSNWDVTRLLAQAMGYSEPWLHESAEEAIRGVLDASRARNPFLAGITFERLQQEGTIRLTLSPENEVPFADGHFPTPSGKVELWSATMAAQGLDPLPHYEPPAEYVAHPPEEGWLTLISAAAHHFVSSSMANQPSLRAKEGEPTIEINPVDAAARNIRDGDVVVVSNQRGQCHLRAVVSTNVPPGVVSAVKGHWPSLSPDGRNVNWTTPDALADLGGQSTFHSNRVQVWPSRI

SEQ ID NO: 11413 - protein, 85 aa, Zea mays
  unsure (1)..(85): unsure at all Xaa locations
LEEEVVXAXSMLSSXAXXVPXRSQXXMXXXFXGLKSXAXFPVTRKAXNDITSIASNGGRASCMKVCPPVXXXKXXIFLPAPPLPS

SEQ ID NO: 11414 - protein, 178 aa, Brucella suis 1330
MPEVGGKTIEVLFSPDEIAKRNLELATIIAERKFHNLLTISILKGSFIFAADLIRAMHDAGVEPDVEFITVSSYGKGTTSTEVRLLRDIDSDVRDRDVLLIDDILESGKTLKFVRELMLERGARSVSIAVLLDKSMRRKVDLDADFVAFECPDYFVVGYGMDVGHAFRQLPYVGRVME

SEQ ID NO: 11415 - protein, 84 aa, Dioscorea tokoro
INCTENRSVLHIALRAARDKAIKSDDKNVVPDVWHVLDKTKEFSERIRSGSWVGATGKALTDVVAVGIGGSFLGPLFVHTALQT

SEQ ID NO: 11416 - protein, 131 aa, Zea mays
ASGQCSFPKLESCLEENGLRQDSIVMRMTGCPNGCARPWLAEVAFVGKAYGAYNMYLGGGYHGQRLNKLYRQSIKEDEILAIMKPLLKRYALERNEGERFGDFCVRSGIIVATTDGQNFHDNVAEEEEDEE

SEQ ID NO: 11417 - protein, 84 aa, Dioscorea tokoro
INCTENRSVLHIALRAARDKAIKSDGKNVVPDVWHVLDKIKEFSERIRSGSWVGATGKALTDVVAVGIGGSFLGPLFVHTALQT

SEQ ID NO: 11418 - protein, 305 aa, Miscanthus condensatus
IESVGEGVTDVAPGDHVLPVFTGECKECAHCRSAESNMCDLLRINTDRGVMIGDGKSRFSINGKPIYHFVGTSTFSEYTVMHVGCVAKINPEAPLDKVCVLSCGISTGLGASINVAKPPKGSTVAIFGLGAVGLAAAEGARIAGASRIIGVDLNPSRFEEARKFGCTEFLNPKDHKKPVQEVLAEMTNGGVDRSVECTGNINAMIQAFECVHDGWGVAVLVGVPHKDAEFKTHPMSFLNERTLKGTFFGNFKPRTDLPNVVELYMKKELEVEKFITHSVPFAEINKAFDLMAKGEGIRCIIRMEN

SEQ ID NO: 11419 - protein, 382 aa, Xanthomonas axonopodis pv. citri str. 306
MPLTTKLPKVGTTIFTVMSQLAAEHGAVNLGQGFPDFAVPQRLVDELSKAMAAGHNQYPPMTGVATLRQAIAGKAQRCYGAQVDADTEITVTSGATEAIFNAIHAVVRAGEEVIVLDPAYDCYEPAIDLAGARAVHVALHPQTFAVDWDALRAAITPKTRLLMINSPHNPSGAMLSAEDMQTLTELLRGTEIFLLSDEVYEHIVFDGRRHESVLRWPALRERAFVISSFGKTYHCTGWKIGYAIAPPALTAEFRKVHQYNTFTSFGPAQHAFAAMIRDEPEHDEQLGAFYQAKRDRFREQLLATRLKPLPVPGGYFQLVDYSAISDLPDTEFVKWLTIENGVAAIPLSPFYENAPAGQRLARLCFAKNDATLDAAIERLRRL

SEQ ID NO: 11420 - protein, 305 aa, Miscanthus condensatus
IESVGEGVTDVAPGDHVLPVFTGECKECAHCRSAESNMCDLLRINTDRGVTIGDGKSRFSINGKPIYHFVGTSTFSEYTVMHVGCVAKINPEAPLDKVCVLSCGISTGLGASINVAKPPKGSTVAIFGLGAVGLAAAEGARIAGASRIIGVDLNPSRFEEARKFGCTEFLNPKDHKKPVQEVLAEMTNGGVDRSVECTGNINAMIQAFECVHDGWGVAVLVGVPHKDAEFKTHPMNFLNERTLKGTFFGNFKPRTDLPNVVELYVKKELEVEKFITHSVPFAEINKAFDLMAKGEGIRCIIRMEN

SEQ ID NO: 11421 - protein, 305 aa, Miscanthus condensatus
IESVGEGVTDVAPGDHVLPVFTGECKECAHCRSAESNMCDLLRINTDRGVKIGDGKSRFSINGKPIYHFVGTSTFSEYTVMHVGCVAKINPEAPLDKVCVLSCGISTGLGASINVAKPPKGSTVAIFGLGAVGLAAAEGARIAGASRIIGVDLNPSRFEEARKFGCTEFLNPKDHKKPVQEVLAEMTNGGVDRSVECTGNINAMIQAFECVHDGWGVAVLVGVPHKDAEFKTHPMSFLNERTLKGTFFGNFKPRTDLPNVVELYMKKELEVEKFITHSVPFAEINKAFDLMAKGEGIRCIIRMEN

SEQ ID NO: 11422 - protein, 250 aa, Oryza sativa
MSRRYDSRTTIFSPEGRLYQVEYAMEAIGNAGSALGVLAADGVVLVGEKKVTSKLLQTSRSAEKMYKIDSHLACAVAGIMSDANILLNTARLHAQRYALSYQEPIPVEQLVQSLCDTKQGYTQFGGLRPFGVSFLFAGWDKHHGFQLYMSDPSGNYSGWKAAAVGANSQAAQSMLKQDYRDGMTREEAVALALKVLSKTMDSTSLTAEKLELAEVFLQPGTGEVQYQVCSPEAMGKLLAKAGLSQPAPEA

SEQ ID NO: 11423 - protein, 347 aa, Bacillus cereus ATCC 10987
MKAVVVNKNSKANIEIIEKELRPLHSGEALVDVEYCGVCHTDLHVANHDFGNTDGRILGHEGIGIVTKIADDVTSLKVGDRVSIAWMFQSCGRCEYCITGRETFCREVKNAGYSVDGGMAEQCIVTADYAVKVPEGLDPAQASSITCAGVTTYKAIKVSDIKPGQPIVIYGCGGLGNLAIQYAKNVFGAKVIAVDINDDKLALAKEVGADMTINPISQGPADKIVQEEFGGAYAAVVTAVSKVAFNSAVDAVRACGKVVAVGLPVETMDLNIPRLVLDGIEVVGSLVGTRKDLEEAFMFGAEGKVVPVVQTCSLDKVQHVFEEMEQGRIQGRMVIDFKHNNCDCNSL

SEQ ID NO: 11424 - protein, 305 aa, Miscanthus condensatus
IESVGEGVTDVAPGDHVLPVFTGECKECAHCRSAESIMCDLLRINTDRGVMIGDGKSRFSINGKPIYHFVGTSTFSEYTVMHVGCVAKINPEAPLDKVCVLSCGISTGLGASINVAKPPKGSTVAIFGLGAVGLAAAEGARIAGASRIIGVDLNPSRFEEARKFGCTEFLNPKDHKKPVQEVLAEMTNGGVDRSVECTGNINAMIQAFECVHDGWGVAVLVGVPHKDAEFKTHPMNLLNERTLKGTFFGNFKPRTDLPNVVELYMKKELEVEKFITHSVPFAEINKAFDLMAKGEGIRCIIRMEN

SEQ ID NO: 11425 - protein, 305 aa, Miscanthus condensatus
IESVGEGVTDVAPGDHVLPVFTGECKECAHCRSAESNMCDLLRTNTDRGVMIGDGKSRFSINGKPIYHFVGTSTFSEYTVMHVGCVAKINPEAPLDKVCVLSWGISTGLGASINVAKPPKGSTVAIFGLGAVGLAAAEGARIAGASRIIGVDLNPSGFEEARKFGCTEFLNPKDHKKPVQEVLAEMTNGGVDRSVECTGNINAMIQAFECVHDGWGVAVLVGVPHKDAEFKTHPMNLLNERTLKGTFFGNFKPRTDLPNVVELYMKKELEVEKFITHSVPFAEINKAFDLMAKGEGIRCIIRMEN

SEQ ID NO: 11426 - protein, 547 aa, Glycine max
MASHLLNHSSKMRNASKLLHHERALLVRWFSGDAHSSLNRNRDVWKTQFHESSARSSVFEPASCFNKHSFGMQKRNIFMATIKRGSIIGSEFNGEISRSSQVLSRRCYASASDLPPHQEIGMPSLSPTMTEGNIARWLKKEGDKISPGEVLCEVETDKATVEMECMEEGYLAKIIRGDGAKEIKVGEVIAVTVEDEGDIAKFKDYQPSASEPSAVPAKEISAPPTPKKEEEVEEPGREPEPKVSKPSAPPSSGDRTFASPLARKLGEEKNVPLSSIKGTGPEGLIVKADIDDYLASGAKEVSASSKAKVATDAALDYTDIPVSQIRKVTASRLLLSKQTIPHYYLTVDTCVDKLTSLRTQLNSLQEASGGSRISVNDLVIKAAALALRKVPQCNSSWANDYIRQYNNVNINVAVQTDNGLFVPVIRDADKKGLSTIGEEVKQLAKKAKENSLKPQDYEGGTFTVSNLGGPFGVRQFCAIINPPQAGILAVGSSERRVVPGSGAEEFKFASFMSVTLSCDHRVIDGAIGAEWLKAFKGYIENPETMLL

SEQ ID NO: 11427 - protein, 170 aa, Glycine max
  unsure (1)..(170): unsure at all Xaa locations
AASLIASPPVCTDHRAGAGLDAPFIRLTSMHGCPPRKTNHDFPSLACYGGRVRCMHACAPIGWKKYETLSYLPDLAHARLVEEGKYLPSKGWMPCLLVILDHGLVHRARARPPACYHGRYXPMRELAIYGCTDASHAWEELPXARTDCPPGCLRINGCNCLRSAQGMSFI

SEQ ID NO: 11428 - protein, 208 aa, Pseudomonas putida KT2440
MMLADLSPEAYHEAAQHLAALDPDWSRHIAAIGPCLHQATPGREPYEALVRAIAYQQLHARAAEAILGRLLALFPADDFPQPEQLLAVSPETLRACGFSASKLVTVQGIAQATLEGLVPTREQALTMADEALIERLVALRGVGRWTVEMLLIYSLGRSDILPVDDFGVREGYRRLKGLETAPTPAQMRSLGGAWRPFRTVAAWYLWRA

SEQ ID NO: 11429 - protein, 279 aa, Oryza sativa
  unsure (1)..(279): unsure at all Xaa locations
MDGRKDVGILAMDIYFPPTCVLQESLEAHDGASKGKYTIGLGQDCMAFCSEVEDVISMSMTVVTSLLKKYKVDPKLIGRLEVGSETVIDKSKSIKTWLMQIFEECGNTDIEGVDSSNACYGGTAALLNCVNWVESNSWDGRYGLVVCTDSAVYAEGPARPTGGAAAIAMLIGPNAPIAFESKYKASHMAHVYDFYKPDLASEYPXVVDGKLSQTCYLMALDSCYRQFCKKYEKLAGKQFSISDADYFVFHSPYNKLVQKSFARLYYNDFTRDCSFCDND

SEQ ID NO: 11430 - protein, 74 aa, Salmonella typhi
MFENITAAPADPILGLADLFRADDRPGKINLGIGVYKDETGKTPVLTSVKKAEQYLLENETTKNYLGIDGIPEF

SEQ ID NO: 11431 - protein, 460 aa, Phaseolus vulgaris
MGSRSRTVNVTSKDTNKVVNGMPSYAPPLPSSSSMGIEATNVHPSRISEFGTLEQSLGFRVEDTINLSRNPVFSQMKSNSQALGADIQFGALNKSIVTSDINLSAAIAGSQTLALQKDAQPTLASTSGHRENWGETNMADASPRTDTSTDDTEDKNQLPERGESSDRSKDKSDQKTLRRLAQNREAARKSRLRKKAYVQQLESSRLKLTQLEQELQRARQQGIFISSTGDQAQSMSGNGAMAFDVEYARWLEEHNRQTNELRAAINSHAGDIELRTIVDNFMAQFDDIFRLKGIAAKADVFHILSGMWKTPAERCFMWIGGFRSSELLKLLVSHLEPLTEQQLMGIYNLQQSSQQAEDALSQGMDALQQSLSETLANGSPSSSGSSGNVANYMGQMAMAMGKLGTLEGFLRQADNLRQQTLQQMLRILTTRQSARALLAISDYFSRLRALSSLWLARPRE

SEQ ID NO: 11432 - protein, 476 aa, Pseudomonas putida KT2440
MTTSHYIAGHWVEGQGSDCISVNDPALGQPFAELMAASVSQVDQAVAAARSALPAWKSTCASERAAFLRGFAEQLGQRREALVTVQMRNNGKPRHEAEIDLDDAIATFGYYAELAEQLPSKNRTVPLAAPGFTARTRLEPVGVVGLIVPWNFPLVTSAWKLAPALAAGCTVVLKPSEVTPLIEQAYGQIADALGLPAGVLNIVNGKAETGAALSNHNGLDKLSFTGSNSVGSQVMRSASAQCRPVTLELGGKSAIVVFDDCDVDQAVEWIVAGISWNAGQMCSATSRLLVQDGIADALLPRLQAALENLRVGNPLTEEVDMGPLTSQAQWLKVASYFATAREEGLQCLAGGHALDREGWFVSPTLYTDVPKDSRLWTEEIFGPVLCARRFATEEQAIAEANDSRFGLVATVCSADLERAERVADALEVGHVWINSVQAVFVETSWGGTKGSGIGRELGPWGLSAYQSIKHVTRCLG

SEQ ID NO: 11433 - protein, 468 aa, Archaeoglobus fulgidus DSM 4304
MVGRMCVAVLIVLLLVATAGADPNGAETLKENPELPVDFVWALICGFLVMFMQAGFAMLEAGFSRAKNVANVMMKNLMDFAVGSLAFFAVGFALMMGADWQGIAGTTGWFLAGESYDVSTIELWFFMLVFAATAATIVSGSIAERPKFSVYLVYSAVVSAVIYPIYGHWLWGGGWLSSSEFMVKLGGGYGALDFAGSGVVHALGGYIALAAVMLLGPRLGKYDSDGNPRAIPGHNLAFAVIGTFILWFGWFGFNAGSTLSAHELRVSIIASNTNLAAAAGAVTAMAITWLRNGKPDVGMTCNGAVAGLVAITAPCAWVQPWSSVVIGTIAGFIATYGYWWLEKRGLDDVVGAIPVHGFSGTWGLIALGIFADGSYGLYATESPLVTGLLYGNWGFFIVQLISAIVNFAWAFGTGFALFWILKKVIGIRVSPEEEMLGLDIAEHAAVAYPNFVCTETELPLAMKQGGGR

SEQ ID NO: 11434 - protein, 388 aa, Archaeoglobus fulgidus DSM 4304
MQSGDISWLLISTALVVLMTPALGLFYGGMVRAKNVLSTITMCFVALAIVSVQWILLGYTIAFGDDVSGLTGNLVFIGLRNVSMSDYGFVAFQMAFAAITLAIIVSALAERVKLSAFLLFGILWTTFVYDPIAHWVWGGGWLAGIGALDFAGGTVVHISSGFSALALALLVGRRTGYGEYNIEPHNIPMTLLGTALLWFGWFGFNAGSALEANDVALNAFLVTNTSAAMGALSWMFASWLKGKPGSLGVASGAIAGLVAITPAAGYVDPLSALVIGGVAGVVCYAAMLLRVRAGVDESLDAWAVHGVGGLWGAIATGIFASVGATGLVAGNAQQLLLQIIAALVATAYAFLVTLILAKAVDAAVGLRVSSQEEYVGLDLSQHEEVAYT

SEQ ID NO: 11435 - protein, 391 aa, Lactobacillus plantarum WCFS1
MKFEESKILQQLPKQFFANLVKKVNAKAAAGADVINLGQGNPDQPTPEFVVKAMQTATANPADHKYSLFRGLPRFKQAAADFYEREYGVKLDPETEIAVLGGSKIGLVELPFALLNPGDTMILPDPGYPDYLSGITLAQVKLALLRLTAANHFLPDYQQVDPQVAAAAKLLYLNYPNNPTGAVATSQFFQDTVDFANEHQIGIVHDFAYGAIGFDGQRPVSFLQTPGAKDVGIEMYTLSKSFNMAGWRVGFAAGNADMIEALNLIQDHLFVSVFPAIQDAAIAALNSDQQTVHELVRLYERRRNQFFTTARKIGWEPYPSGGSFYAWMPVPEGYTSEAFADLLLDKAAVAVAPGNGFGAGGEGYVRVGLLIDEPRFTEACQRIAKLHLFDR

SEQ ID NO: 11436 - protein, 181 aa, Coxiella burnetii RSA 493
MTKKQKPSQNEDLNLTTAQGTPISDDQNSLKIGDRGPLLLEDFPFREKLFHFDHERIPERVVHARGFGVHGYFETDVSLSEITMAHLFQKKGEKTPVFVRFSTVVGSQGSPDLARDVRGFAVKFYTKEGNWDLVGNNIPVFFIQDPIKFPDLIHAAKAEPDRGFPQAQTANDNFWENFRYQ

SEQ ID NO: 11437 - protein, 536 aa, Aspergillus niger
MPSFSQATELSAWKELQEHHNSVGRNIVLKDCFQKDPQRFEKFSRTFKNTVDNSEVLFDFSKNFLTEETLALLVKLAKEANVEELRDAMFKGEHINFTEDRAVYHAALRNVSNEPMQVNGKSVVEDVNAVLEHMKEFTEQVRSGEWKGYTGKKIDTVINIGIGGSDLGPVMVTEALKPYGAPDMKLHFVSNIDGTHIAEALKNSNPETTLFLIASWFLETAKEDSHIAKHFVALSTNEEEVTKFGIDKKNMFGFESWVGGRYSVWSAIGLSVALYIGYDNFHQFLAGAHAMDKHFREAPLEQNIPVLGGLLSVWYSDFFGAQTHLVAPFDQYLHRFPAYLQQLSMESNGKAITRTGEYVKYTTGPILFGEPATNAQHSFFQLLHQGTKLIPSDFIMAAESHNPVEGGKHQRMLASNFLAQSEALMVGKTPEQVKAEGAPENLVSHKTFLGNRPTTSILAQKITPSTLGALITYYEHLTFTEGAIWNINSFDQWGVELGKVLAKKIQKELETADAGSDHDASTSGLLLAFKKKANLA

SEQ ID NO: 11438 - protein, 228 aa, Brucella suis 1330
MLNKLSAEFFGTFWLVFGGCGSAILAAAFPELGIGFLGVALAFGLTVLTMAYAVGGISGGHFNPAVSLSLTVAGRLPAKDLIPYWVAQVLGAIATAAILYVIASGKDGFSAGGLASNGYGELSPGGYSMMAGLLIEIILTAFFIIIILGSTSSLAPAGFAPIAIGFGLTLIHLVSIPVTNTSVNPARSTGVALFADTAALSQLWLFWVAPLVGAVIGAIIWKGLLGRD

SEQ ID NO: 11439 - protein, 231 aa, Shigella flexneri 2a str. 2457T
MFRKLAAECFGTFWLVFGGCGSAVLAAGFPELGIGFAGVALAFGLTVLTMAFAVGHISGGHFNPAVTIGLWAGGRFPAKEVVGYVIAQVVGGIVAAALLYLIASGKTGFDAAASGFASNGYGEHSPGGYSMLSALVVELVLSAGFLLVIHGATDKFAPAGFAPIAIGLALTLIHLISIPVTNTSVNPARSTAVAIFQGGWALEQLWFFWVVPIVGGIIGGLIYRTLLEKRD

SEQ ID NO: 11440 - protein, 500 aa, Arabidopsis thaliana
MVNFLLVLCYCRLILIHCKTIQLTQWLSKSFLTDVLVTKVPNCVLWQYFVDADDSVPQKIVVHKDGPRGIHFRRAGPRQKVYFESDEVHACIVTCGGLCPGLNTVIREIVSSLSYMYGVKRILGIDVSFCDCNLLLTKTNTGGYRGFYAKNTVSLDSKVVNDIHKRGGTILGTSRGGHDTTKIVDSIQDRGINQVYIIGGDGTQRGASVIFEEIRRRGLKVAVIGIPKTIDNDIPVIDKSFGFDTAVEEAQRAINAAHVEAESIENGIGVVKLMGRYSGFIAMYATLASRDVDCCLIPESPFYLEGEGGLFEYIEKRLKESGHMVLVIAEGAGQDLMSKSMESMTLKDASGNKLLKDVGLWLSQSIKDHFNQKKMVMNLKYIDPTYMIRAVPSNASDNVYCTLLAQSAVHGAMAGYTGYISGLVNGRQTYIPFYRITEKQNHVVITDRMWARLLSSTNQPSFLGPKDVFDNKEKPMSALLDDGNCNGVVDVPPVTKEITK

SEQ ID NO: 11441 - protein, 305 aa, Miscanthus condensatus
IESVGEGVTDVAPGDHVLPVFTGECKECAHCRSAESNMCDLLRINTDRGVMIGDGKSRFSINGKPIYHFVGTSTFSEYTVMHVGCVAKIDPEAPLDKVCVLSCGISTGLGASINVAKPPKGSTVAIFGLGAVGLAAAEGARIAGASRIIGVDLNPSRFEEARKFGCTEFLNPKDHKKPVQEVLAEMTNGGVDRSVECTGNINAMIQAFECVHDGWGVAVLVGVPHKDAEFKTHPMNFLNERTLKGTFFGNFKPRTDLPNVVELYMKKELEVEKFITHSVPFAEINKAFDLMAKGEGIRCIIRMEN

SEQ ID NO: 11442 - protein, 305 aa, Miscanthus condensatus
IESVGEGVTDVAPGDHVLPVFTGECKECAHCRSAESNMCDLLRINTDRGVMIGDGKSRFSINGKPIYHFVGTSTFSEYTVMHVGCVAKIDPEAPLDKVCVLSCGISTGLGASINVAKPPKGSTVAIFGLGAVGLAAAEGARIAGASRIIGVDLNPSRFEEARKFGCTEFLNPKDHKKPVQEVLAEMTNGGVDRSVECTGNINAMIQAFECVHDGWGVAVLVGVPRKDAEFKTHPMNFLNERTLKGTFFGNFKPRTDLPNVVELYMKKELEVEKFITHSVPFAEINKAFDLMAKGEGIRCIIRMEN

SEQ ID NO: 11443 - protein, 337 aa, Shewanella oneidensis MR-1
MRAVGYQTAGAINALENITLAKPTPTGFDLLVEVKAISVNPVDTKIRASSSAPAGEYKILGWDAVGVVKAIGDKVSLFKVGDEVWYAGDISRSGSYAEYQLVDERIVAHKPQTLSYAQAAALPLTSITAWELLFDRLGLPQDGSATDARILIIGAAGGVGSIITQLAVKLTGAEVIGTASRPESATWVQTLGADVVINHNQPLSQELAKLDIADVTHVISLTQTDKHFDEIVKVLRPQGKLALIDDPVGPLDVMKLKRKSLSLHWELMFTRSLYQTEDMIAQHHLLNRIAELIDTGKVKSTFGEHYGTINAQNLLKAHAQIESGKAIGKIVLEGFSQ

SEQ ID NO: 11444 - protein, 305 aa, Miscanthus condensatus
IESVGEGVTDVAPGDHVLPVFTGECKECAHCRSAESNMCDLLRINTDRGVMIGDGKSRFSINGKPIYHFVGTSTFSEYTVMHVGCVAKINPEAPLDKVCVLSCGISTGLGASINVAKPPKGSTVAIFGLGAVGLAAAEGARIAGASRIIGVDLNPSRFEEARKFGCTEFLNPKDHKKPVQEVLAEMTNGGVDRSVECTGNINAMIQAFECVHDGWGVAVLVGVPHKDAEFKTHPMNFLNERTLKGTFFGNFKPRTDLPNVVELYMKKELEVEKFITHSIPFAEINKAFDLMAKGEGIRCIIRMEN

SEQ ID NO: 11445 - protein, 237 aa, Bacillus cereus ATCC 10987
MQQSKEERVHDVFEKISDKYDVMNSVISFQRHKAWRKETMRIMDVKPGSKALDVCCGTADWTIALAEAVGEQGKVVGLDFSENMLSVGKQKVEALQLKQVELLHGNAMELPFEDNTFDYVTIGFGLRNVPDYMHVLKEMTRVVKPGGKVICLETSQPTMIGFRQGYILYFKYIMPLFGKLFAKSYKEYSWLQESASTFPGMKELANMFEKAGLERVQVKPFTFGVAAMHLGMKPESK

SEQ ID NO: 11446 - protein, 305 aa, Miscanthus floridulus
IESVGEGVTDVAPGDHVLPVFTGECKECAHCRSAESNMCDLLRINTDRGVMIGDGKSRFSINGKPIYHFVGTSTFSEYTVMHVGCVAKINPEAPLDKVCVLSCGISTGLGASINVAKPPKGSTVAIFGLGAVGLAAAEGARTAGASRIIGVDLNPSRFEEARKFGCTEFLNPKDHKKPVQEVLAEMTNGGVDRSVECTGNINAMIQAFECVHDGWGVAVLVGVPHKDAEFKTHPMNFLNERTLKGTFFGNFKPRTDLPNVVELYMKKELEVEKFITHSVPFAEINKAFELMAKGEGIRCIIRMEN

SEQ ID NO: 11447 - protein, 429 aa, Pseudomonas fluorescens PfO-1
MPGLAMAADEVAAPVLNSGDTAWMLTSTALVLFMTIPGLALFYGGMVRSKNILSVMMQCFAITGLISVLWVIYGYSIAFDTTGMEQGVVNFNSFVGGFGKAFLAGVTPASLTGPAALFPEAVFITFQMTFAIITPALIVGAFAERMKFSAMLIFMGIWFTLVYAPIAHMVWSGNGGLMWDWGVLDFAGGTVVHINAGVAGLIACLVLGKRKGFPTTPMAPHNLGYTLMGAAMLWVGWFGFNAGSAAAANGTAGMAMLVTQIATAAAALGWMFAEWITHGKPSALGIASGVVAGLVAITPAAGTVGPMGALVIGLAAGVVCFFCATTLKRKLGYDDSLDAFGVHGIGGILGAILTGVFAAPSLGGFGTVTDIAAQVWIQCKGVGFTVIYTAIVTFIILKVLDAVMGLRVTEEEESVGLDLAQHNERGYNL

SEQ ID NO: 11448 - protein, 283 aa, Eremothecium gossypii
MFVSFSYRPSMALALLEAIFNDSGSETQWISKSSRPMGVINQPSGQIKLTNVSLVRLKKGKKRFEVACYQNKVQDYRRGVETDLDEVLQINQVFLNVSKGQVASNEDLNGAFGTKEQEVVIKEILSRGEIQLSEKERQQMHGKITNELLTLVSAKCVNPNSKKRYPPTMIHKALAELKFNVVTNKPAKLQALEAIKLLVQRQIIPIARAKMRVKAVLPREGNAEAIAQAASLIAATEAAPESATTWMCTGLIDPMNYRELVTLCGKCGTLQVLDMAVLDDANQ

SEQ ID NO: 11449 - protein, 541 aa, Sinorhizobium meliloti 1021
MKALVENLKATARETDATDIRAAFAADPNRFSRFSTAFDDLLFDYSKCAVNDRIIDGLEALAKAAKVEEKRDAMFRGDIINITEERAVLHTALRNRSNRPVLVDGKDVMPDVNAVLEAMGKFADDIRSGALKGATGKKITDVVNIGIGGSDLGPVMATLALAPFHDGPRLHFVSNVDGAHIADTLTLLDPETSLFIVASKTFTTIETMTNAATARAFIAGKLGEAAVGHHFAAVSTALDKVGAFGIDAARVFGFWDWVGGRYSIWSAIGLPLMIAIGKENFGRFLDGGHAIDEHFRSAPLRQNIPMLLGLIGFYNRNVLGYPSRAILPYDQRLTRFPAYLQQLDMESNGKGVTLDSQPVEFSTGPVVWGEPGTNGQHAFYQLIHQGTDVIPAEFMIAANGHEKDLRHQHQLLMANCLAQSEALMKGRTLAEAKAQLTSKGMDDAKADKIAPHRVFTGNRPSLTIVYDQLDPFALGRLIALYEHRVFVEGALFNINSFDQWGVELGKELATGLLPVIEGKESAEGHDSSTAGLVAALLKAAR

SEQ ID NO: 11450 - protein, 347 aa, Pyrobaculum aerophilum str. IM2
MKFLLRCKPDTKKPPTGKKVAIIGAGPAGLGAAGILLCNGHEVHIYDALPEPGGLLMFGIPPFRIPRENVREGIRELVDAGAKFFTSTFVYCGEKPHEHEALLLAKDYVSLEELVGKYDAVIITTGTWKSRSLGVPGENLPGVYKALDYLFRIYAHQLGYLPKEKVYPTGRKVLVVGAGLTAVDAALEAREQGAEKIIVAYRRTINEAPAGRKTIETELIAKGIEFRELINPVAFLGRDRVERVRFVKMRLGPPDKSGRPAPEPIPGSEFEEEFVTVLIAAGEIATPPGKCLGMELNPDGTIKVNEKMMTTRRGVFAAGDVVTGPSLIGKALGSGMRAAQFVDEFLR

SEQ ID NO: 11451 - protein, 456 aa, Saccharopolyspora erythraea
MTDTSADLVILGGGSGGYACAFRAAELGLSVVLIEKDKLGGTCLHRGCIPTKALLHAAEVADSARDGDQFGVKTSLEGIDIAGVNSYKDGVVSKLYKGVQGLFKAHKITVVEGAGTLVDAKTVRVDGTRYTGRNVVLATGSYSKSLPGLELGGRVIASEQALNLDFVPEKVVVLGGGVIGVEFASVWRSFGAEVTIVEALPHLVPNEDEFISKRLEREFRKRGIKFKTEVKFTGAQQSAEGVSVRLENGDQYDADLLLVAVGRGPNTAALGFEEAGVTMERGFVRTDDRLRTSVDGVYAVGDIVPGLQLAHRGFQQGIFVAEEIAGLNPQAIDESGIPRVTYSHPEVASVGLTEAAAKEQYGSVETFNYDLAGNGKSQILKTSGAVKLVRPTDGPVVGLHMVGDRVGELIGEAQLIYNWEALPEDVAPLVHAHPTQTEALGEAHLAQAGKPLHVHG

SEQ ID NO: 11452 - protein, 561 aa, Acinetobacter calcoaceticus
MTTLKITGMTCDSCAAHVKEALEKVPGVQSALVSYPKGTAQLAIEAGTSSDALTTAVAGLGYEATLADAPPTDNRAGLLDKMRGWIGAADKPSGNERPLQVVVIGSGGAAMAAALKAVEQGAHVSLIERGTIGGTCVNVGCVPSKIMIRAAHIAHLRRESPFDGGIAATVPAIDRSKLLAQQQARVEELRHAKYEGILDGNPAITVVHGEARFKDEQSLVVRLNDGGERVVAFDRCLVATGASPAVPPIPGLKESPYWTSTEALVSDTLPERLAVIGSSVVALELAQAFARLGSQVTILARNTLFFRDDPAIGEAVTAAFRAEGIKVLEHTQASQVAHVDGEFVLTTGYGEIRADQLLVATGRAPNTRSLALEAAGVAANAQGAIVIDKGMRTSTPHIYAAGDCTDQPQFVYVAAAAGTRAAINMTGGDAALDLTAMPAVVFTDPQVATVGYSEAEAHHDGIETDSRTLTLDNVPRALANFDTRGFIKLVIEEGSGRLIGVQAVAPEAGELIQTAVLAIRNRMTVQELADQLFPYLTMVEGLKLAAQTFSKDVKQLSCCAG

SEQ ID NO: 11453 - protein, 509 aa, Prunus cerasus
MTDRRAQDNAVSGQPLLKKKPKRNLYAIGCAILASMTSILLGYDIGVMSGASIYIQKDLKISDVEVEILIGILNLYSLIGSAAAGRTSDWIGRRYTIVFAGAIFFTGALLMGLATNYAFLMVGRFVAGIGVGYALMIAPVYNAEVSPASSRGALTSFPEVFVNIGILLGYVANYAFSGLPIDLGWRLMLGVGVFPSVILAVGVLSMPESPRWLVMQGRLGEAKQVLDKTSDSLEEAQLRLADIKEAAGIPEHCVEDVVQVPKHSHGEEVWKELLLHPTPPVRHILIAAIGFHFFQQLSGIDALVLYSPRIFEKAGITDSSTLLLATVAVGFSKTIFTLVAIGFLDRVGRRPLLLTSVAGMIASLLCLGTSLTIVDHETEKMMWASVLCLTMVLAYVGFFSIGMGPIAWVYSSEIFPLKLRAQGCSMGTAVNRIMSGVLSMSFISLYKAITMGGTFFLYAGIATVGWVFFYTMLPETQGRTLEDMEVLFGKFWRWREGYALLRNKRAVVC

SEQ ID NO: 11454 - protein, 506 aa, Glycine max
  unsure (1)..(506): unsure at all Xaa locations
MATPLAYQEHLPAAPSWLNKGDNAWQLTAATLVGLQSMPGLVILYASIVKKKWAVNSAFMALYAFAAVLICWVLVCYRMAFGEELLPFWGKGAPALGQKFLTKRAVVNETIHHFDNGTVESPPEEPFYPMASLVYFQFTFAAITLILLAGSVLGRMNIKAWMAFVPLWLIFSYTVGAFSLWGGGFLYQWGVIDYSGGYVIHLSSGIAGLTAAYWVGPRLKSDRERFPPNNVLLMLAGAGLLWMGWSGFNGGAPYAANIASSIAVLNTNICAATCLLVWTTLGVIFFGKPSVIGAVQGMMTGLVCITPGAGLVQSWAAIVMGILSGSIPWVTMMILHKKSTLLQKVDDTLGVFHTHAVAGLLGGLLTGLLAEPALCRLLLPVTNSRGAFYGGGGGMQFFKQLVAAMFVIGWNLVSTTIILLVIKLFIPLRMPDEQLEIGDDAVHGEEAYALWGDGEKYDPTRHGSLQSGNTTVSPYVNGARGXDYKLMSQEIRLCLAHTCMCINLYD

SEQ ID NO: 11455 - protein, 553 aa, Pisum sativum
MALALASANSFLLPTKTHFALHVSPPPSKKTLLCTNPSSNFSFNKALSSRRRKQAWCVAAAADVKDATLLDGEEDQKVLVGPSSEQERKGEREVADYDWTEEWYPLYLTKNVPHDAPLGLKVYDKNIVLFRDGNDQFQCYEDRCPHRLAKLSEGQLIDGRLECLYHGWQFEGEGKCVKIPQLPADAKIPKSACVKTYEVRDSQGVLWVWMSRKTPPNVSKIPWFENFARPGFQDISTTHELPYDHSILLENLMDPAHVPISHDRTDWSAKREDAQALGFEVTERTDRGFAGWWGREKDGSKPNFLRFEAPCVLQNNREIVDKNGEINHFSGLFLCRPTGQGKSMLIVRFGATKRSPLIKLFPEWYFHQNASKVFEQDMGFLSSQNEILLKEKVPTKELYLNLKSSDTWVAEYRKWMDKVGHGMPYHFGHSTISLPEEPAVVEHAPAGLVAGLSASSPAKGGIGTMHAPNLANRYFRHVIHCKGCSSAIKAFQIWKNVLSGVVVALAALAILVSGRQWKVLLLASASLCSVGVYACSTAIAMNTTNFIRVHRRL

SEQ ID NO: 11456 - protein, 438 aa, Lactobacillus plantarum WCFS1
MNAANSTFLVLSSILVLFMTPGLAFFYGGLVSKRNVVNTMLSVFMICGLAILLWLAFGYSLSFSGDLGGFVGNLKATWLHGVDLTALTATKIPNGLYLIFQMMFAIITPALFVGAVVGRIRFKFLLTFIIFWSLLIYYPMVHMVWDNGLLAKLGVIDFAGGTVVHINAGITALVLSAFLGARHKYGKDMTQHYNILWVLLGTAILWIGWYGFNAGSALAMNDIAIQAFLTTTVATATSMMTWMVVDMLTKGKPTLVGVCTGTLCGLVAITPACGYVTISGAFWIGLIATLTSYGFITFIKPRLGIDDALDAFGCHGVSGMVGSIMTGLFASKAVNRTISLNGLFYGGGFKLFGLQLLATIFTIGFTTIVCIVIIVLLKRVIRMRVDEREEELGLDQGEHGEVADYTVQMSHDLTNIQHHSDEFRGQLAQLLDKQQRFR

SEQ ID NO: 11457 - protein, 430 aa, Oryza sativa (japonica cultivar-group)
MESGGAGGEGETAGWRFGAANPALAVAGSQSIRAAVTRIYRCLDGSGDARPVAPLAHGDPSAFACFRAAPAATDAVAAAAASGKYNYYSPAVGIAPACSAVAAHLSRELPYAVSPADVVLTAGCNHAVEIMMSVLASPGANVLLPRPGYPLYASRAALSGLEFRHFDLLPDSEWEVDLAGVEALADANTVAMVIVNPNNPCGCVYSRDHLAKIAETARKLGIMVISDEVYDHFAFGSKPFVPMGVFGDVAPVMTLGGISKRWMVPGWRLGWIAATDPNGILRNKKIIDSVIDYRAISVDPVTFVQGALPDILAKTDDAFFTNALGVVKKAAEICYEKLKEIDCITCPHKPEGSMFVMAKLDLSSLDGIEDDVDFCSKLAKEESVVICPGSGLGMKNWLRITFAVDPQLLEDGLERTKCFCKRHGKIKEAS

SEQ ID NO: 11458 - protein, 361 aa, Medicago sativa
MKALILVGGFGTRLRPLTLSVPKPLVDFANKPMILHQIEALKATGVTEVVLAINYQPEVMLNFLKDFEAKLGITISCSQETEPLGTAGPLALARDKLIDDSGEPFFVLNSDVISDYPLKEMIEFHKSHGGEASIMVTKVDEPSKYGVVVMEETTGQVEKFVEKPKLFVGNKINAGIYLLNPSVLDRIELRPTSIEKEIFPKIAAEKKLYAMVLPGFWMDIGQPRDYITGLRLYLDSLRKKSSSKLAGGSNIVGNVIVDETAKIGEGCLIGPDVAIGPGCIVESGVRLSRCTVMRGVRIKKHACISSSIIGWHSTVGQWARVENMTILGEDVHVCDEIYSNGGVVLPHKEIKTNILKPEIVM

SEQ ID NO: 11459 - protein, 305 aa, Miscanthus sinensis var. formosanus
IESVGEGVTDVAPGDHVLPVSTGECKECPHCKSAESNMCDLLRINTDRGVMIGDGKSRFSINGKPIYHFVGTSTFSEYTVMHVGCVAKINPQAPLDKVCVLSCGISTGLGASINVAKPPKGSTVAIFGLGAVGLAAAEGARIAGASRIIGVDLNPSRFEEARKFGCTEFVNPKDHKKPVQEVLAEMTNGGVDRSVECTGNINAMIQAFECVHDGWGVAVLVGVPHKDAEFKTHPMNFLNERTLKGTFFGNFKPRTDLPNVVELYMKKELEVEKFITHSVPFAEINKAFDLMAKGEGIRCIIRMEN

SEQ ID NO: 11460 - protein, 439 aa, Oryza sativa (japonica cultivar-group)
MEGVGGGKRRGDDGAEATPRWRFSRPSSQGGPLAAAGLTSIRAVLNRVNSSVDAAAAGGPRPVLRLGNGDPTASACYRTAPAAEDAVVDALRSGAHNGYSLTVGVLSARRAIAEYLSRDLPYELSANDIYLTSGCVQAIEVMISVLAQPGSNILLPKPGFPLYESRTTFSNLEVRHFDLIPERGWEVDLEGVQAIADENTVAIVVINPSNPCGSVYSYDHLAKIAETARKLGLLIIADEVYDHLAFGNNPFIPIGVFGKTVPVITLGSISKRWLVPGWRLGWIATCDPNGILKEAKVNQSIENYINISTDPATFVQGAIPQIIANTKEDYFNKILDQLRNAADLCYDKIKDIKGITCPHKPEGSMFVMVKLDLSYLDGFHDDMDFCCRLAKEESVIVLPGSALGLKNWVRITFAIDIPSLVDAFERIKSFCQRHGKLET

SEQ ID NO: 11461 - protein, 481 aa, Oryza sativa
  unsure (1)..(481): unsure at all Xaa locations
MDPYKHRPSSGSNSTFWTTNSGAPVWNNNSALTVGERGPILLEDYHLIEKLAQFDRERIPERVVHARGASAKGFFEVTHDISHLTCADFLRAPGVQTPVIVRFSTVVHERGSPETLRDPRGFAVKFYTREGNFDLVGNNMPVFFIRDGMKFPDMVHAFKPSAEFFXHHPESLHMFSFLFDDVGIPLNYRHMEGFGVNTYTLINKDGKPHLVKFHWKPTCGVKCLLDDEAVTVGGTCHSHATKDLTDSIAAGNYPEWKLYIQTIDPDHEDRFDFDPLDVTKTWPEDIIPLQPVGRMVLNKNIDNFFAENEQLAFCPAIIVPGIHYSDDKLLQTRIFSYADTQRHRLGPNYLMLPVNAPKCAYHNNHHDGSMNFMHRDEEVNYFPSRFDAARHAEKVPIPPRVLTGCREKCVIDKENNFQQAGERYRSFDPARQDRFLQRWVDALSDPRITHELRGIWISYWSQCDASLGQKLASRLNLKPNM

SEQ ID NO: 11462 - protein, 305 aa, Miscanthus sinensis var. formosanus
IESVGEGVTDVAPGDHVLPVFTGECKECAHCRSAESNMCDLLMINTDRGVMIGDGKSRFSINGKPIYHFVGTSTFSEYTVMHVGCVAKINPEAPLDKVCVLSCGISTGLGASINVAKPPKGSTVAIFGLGAVGLAAAEGARIAGASRIIGVDLNPSRFEEARKFGCTEFVNPKDHKKPVQEVLAEMTNGGVDRSVECTGNINAMIQAFVCVHDGWGVAVLVGVPHKDAEFKTHPMNFLNERTLKGTFFGNFKPRTDLPNVVELYMKKELEVEKFITHSVPFAEINKAFDLMAKGEGIRCIIRMEN

SEQ ID NO: 11463 - protein, 305 aa, Miscanthus sinensis var. formosanus
IESVGEGVTDVAPGDHVLPVFTGECKECPHCKSAESNMYDLLRINTDRGVMIGDGKSRFSINGKPIYHFVGTSTFSEYTVMHVGCVAKINPQAPLDKVCVLSCGISTGLGASINVAKPPKGSTVAIFGLGAAGLAAAEGARIAGASRIIGVDLNPSRFEEARKFGCTEFVNPKDHKKPVQEVLAEMTNGGVDRNVECTGNINAMIQAFECVHDGWGVAVLVGVPHKDAEFKTHPMNFLNERTLKGTFFGNFKPRTDLPNVVELYMKKELEVEKFITHSVPFAEINKAFDLMAKGEGIRCIIRMEN

SEQ ID NO: 11464 - protein, 405 aa, Vibrio cholerae O1 biovar eltor str. N16961
MAGVLGMILAGGEGSRLKPLTETRTKPAVPFGGSYRLIDFALNNFVNADLMRIYVLTQFKSQSLYIHMKKGWNLSGITDRFIDIIPAQMRDGKRWYEGTADAIYQNLRFVEIVAPDQVCIFGSDHIYKMDIRQMLDFHRRMEAELTVSALRMPISQASQFGVIEVDENGKMVGFEEKPSNPKSIPGEPEWALVSMGNYIFEAETLSKELREDAENNQSSHDFGKDIIPKMFPRGKVYVYDFTTNKIKGEKESTYWRDVGTIESYWSAHMDLLDKDPEFSLYNRSWPLHTYYPPLPPATFVDVKDKKVKITDSLISGGSYIQGSTIYKSVLGFRSNIAAGSFISESVILGDVKIGAGCTIKRAIIDKDVEIAAGTIIGEDLEMDRKRFHVSDEGIVVIAKGSKVGF

SEQ ID NO: 11465 - protein, 951 aa, Arabidopsis thaliana
MTRDDKFPIVYSLLLIVLLFVSPIYGDGDADALLKFKSSLVNASSLGGWDSGEPPCSGDKGSDSKWKGVMCSNGSVFALRLENMSLSGELDVQALGSIRGLKSISFMRNHFEGKIPRGIDGLVSLAHLYLAHNQFTGEIDGDLFSGMKALLKVHLEGNRFSGEIPESLGKLPKLTELNLEDNMFTGKIPAFKQKNLVTVNVANNQLEGRIPLTLGLMNITFFSGNKGLCGAPLLPCRYTRPPFFTVFLLALTILAVVVLITVFLSVCILSRRQGKGQDQIQNHGVGHFHGQVYGQPEQQQHSEKSSQDSKVYRKLANETVQRDSTATSGAISVGGLSPDEDKRGDQRKLHFVRNDQERFTLQDMLRASAEVLGSGGFGSSYKAALSSGRAVVVKRFRFMSNIGREEFYDHMKKIGRLSHPNLLPLIAFYYRKEEKLLVTNYISNGSLANLLHGNIMELSKSNRTPGQVVLDWPIRLKIVRGVTRGLAYLYRVFPDLNLPHGHLKSSNVLLDPNFEPLLTDYALVPVVNRDQSQQFMVAYKAPEFTQQDRTSRRSDVWSLGILILEILTGKFPANYLRQGKGADDELAAWVESVARTEWTADVFDKEMKAGKEHEAQMLKLLKIGLRCCDWDIEKRIELHEAVDRIEEVDRDAGGGQESVRSSYVTASDGDHRSSRAMTEEFSLMVIYSHSVFFPLVLTDMIDDYFPILETSIKFKFISFFFLFIFPCPHFPRIKGYTTISLVSVSADYQVKFPESGDLYSILAAEGIEFLLSHSGEVLLLLSRYYIALYFGIIVWSFILCKLTSIRPCKDFTPELIKLYENLQNRGEELEIIFVSFDHDMTSFYEHFWCMPWLAVPFNLSLLNKLRDKYGISRIPSLVPLYSDEISVAEDVIGLIEDYGSEAFPFTKKRKEELKAIDDSKRLGGQLEKLLTHESRNYVVARNGSKVKRTHL

SEQ ID NO: 11466 - protein, 305 aa, Miscanthus sinensis var. formosanus
IESVGEGVTDVAPGDHVLPVFTGECKECAHCRLAESNMCDLLRINTDRGVMIGDGKSRFSINGKPIYHFVGTSTFSEYTVMHVGCVAKINPQAPLDKVCVLSCGISTGLGASINVAKPPKGSTVAIFGLGAVGLAAAEGARIAGASRIIGVDLNPSRFEEARKFGCTGFVNPKDHKKPVQEVLAEMTNGGVDRSVECTGNINAMIQAFECVHDGWGVAVLVGVPHKDAEFKTHPMNFLNERTLKGTFFGNFKPRTDLPNVVELYMKKELEVEKFITHSVPFAEINKAFDLMAKGEGIRCIIRMEN

SEQ ID NO: 11467 - protein, 144 aa, Oryza sativa
  unsure (1)..(144): unsure at all Xaa locations
SVRLGSCVNHLETGSHLTVSSSCCVVEHPKPSSLFTFQGAQIVGMVAEALNVPATAKLFXKANDVLGINLLDLXINGPKEKLDSIRFVDESRGSTSLAAVEALRARDXDQNVIDSVDVACSLSLXEYTALAFAGVFRYRDGLKL

SEQ ID NO: 11468 - protein, 305 aa, Miscanthus sinensis var. formosanus
IESVGEGVTDVAPGDHVLPVFTGECKECAHCRSAESNMCDLPRINTDRGVMIGDGKSRFSINGKPIYHFVGTSTFSEYTVMHVGCVAKINPQAPLDKVCVLSCGISTGLGASINVAKPPKGSTVAIFGLGAVGLAAAEGARIAGASRIIGVDLNPSRFEEARKFGCTEFVNPKDHKKPVQEVLAEMTNGGVDRGVECTGNINAMIQAFECVHDGWGVAVLVGVPHKDAEFKTHPMNFLNERTLKGTFFGNFKPRTDLPNVVELYMKKELEVEKFITHSIPFAEINKAFDLMAKGEGIRCIIRMEN

SEQ ID NO: 11469 - protein, 564 aa, Zea mays
  unsure (1)..(564): unsure at all Xaa locations
MASSHIILPKEEEEEAAAAAVAEVGLGAAVEADHDHRPYQEQGPGKAALPFSATCVRISRDSYPNLRALRNASTMTLHDDDAAFVKLEEGDYGYVLDDVPHLTDYLPDLPTFPNPLQDHPAYSTVKQYFVNADDTVPEKVVVQKNSPRGVHFRRAGPRQRVYFESEEAKACIVTCGGLCPGLNTVIRELVCGLSHMYNVSNVFGIQNGYKGFYSSNYLPMTPKSVNDIHKRGGTVLGTSRGGHDTKKXVDNIQDRGINQVFIIGGDGTQKGAYEIYKEIRRRGLQVAVAGIPKTIDNDIAVIDKSFGFDSAVEEAQRAINAAHVEASSAENGIGLVKLMGRYSGFIAMYATLASRDVDCCLIPESPFYLEGEGGLFEYIDRRLKENNHMVIVVAEGAGQDLIAQSIPAADQQDASGNKLLLDVGLWLTHKIKDYCKSKKMEMTIKYIDPTYMIRAIPSNASDNVYCTLLAHSAIHGAMAGYSFTVGMVNGRHAYIPFHRVTSTRNKVRITDRMWARLLSSTNQPSFLSQKDIDAAREADKAANRTKSREDAKKQSTPVLANGEK

SEQ ID NO: 11470 - protein, 671 aa, Yersinia pestis biovar Medievalis str. 91001
MNPFIVADAESCIGCRSCEVACVVAHHEGQFPDKPEYFTPRVKVFKGDQCATAVFCHHCEDAPCASTCPNGAIVELNNRVQVIQEKCIGCKTCMIACPFGMMTVVTETVQPASHRLADVYRRTEAQKCDLCLDQPDGPACIKTCPTQALTLVDQQYLLHQQQQKRQHMALNEHNGRLFSRAVVQAASASSNKSIRDATPVNLLQRPRAPRLEPKKIPLAERKTGFAEIYLPFTESQIHEQAERCLECGDKTICQWTCPLHNAIPKWISLAHQGRIHEAAELSHQTSSLPEVCGRVCPQDRLCEQSCTLNDHDGAVTIGQIERHITETALATGWRPDLSQVKPSGKRVAIIGAGPAGLGCADILVRNGITPVVFDRYPEIGGLLTFGIPAFKLEKSVMTRRREIFTEMGVEFCLNTEIGRDITMENLLHDFDALFLGVGTYRSMRSGLENEDAQGVYDALPFLIGNTQHLMGYTANGAHPYVSMQDQRVVVLGGGDTAMDCVRTSLRQGASRVVCAYRRDEKNMPGSKREVKNAREEGAEFMFNLQPMSIVVDESGQVTGIKMVRTEMGQADAQGRRQALPITGSEHLIPADAVIMAFGFSPHRMSWLAEHNVVLDKQGRVVAPTISGYPYQTSNPKIFAGGDIVRGADLIVTAIAEGRKAAESIAYYLNVL

SEQ ID NO: 11471 - protein, 464 aa, Pseudomonas fluorescens PfO-1
MQRPVRTELWAILRLAGPLIASQLAHMLMVLTDTLMMARLSPEALAGGGLGAASYSFVSIFCIGVIAAVGTLVAIRQGAGDIIGAARLTQAGLWLAWLMALGAGLLLWNLKPVLLLFGQTETNVNAAGQFLIALPFALPGYLSFMALRGFTSAIGRATPVMVISLAGTVANFLLNYALITGMFGLPKLGLTGIGLVTAIVANCMALALAWHIRRHPAYDAYPLREGLSRPNRQYLKELWRLGLPIGGTYAVEVGLFAFAALCMGTMGSTQLAAHQIALQIVSVAFMVPAGMSYAITMRVGQHYGAGQLSDARMSGRVGIVFGAVVMLGFAMVFWLLPNQLVGLFLDHNDPAFAEVIRLAVSLLAVAAWFELFDGTQTIAMGCIRGLKDAKTTFLVGLVCYWLIGAPAAWLMAFHLHWGPTGVWWGLALGLACAAVSLTLAFEWKMKRMIRLEPQSQGFKIAQPE

SEQ ID NO: 11472 - protein, 715 aa, Yersinia pestis biovar Medievalis str. 91001
MKKILTVCPYCGSGCKLNLLVEDGEIVGAEPADGVTNQGALCLKGYYGWDFLNDTRLLTPRLTTPLLRRQRGEAFQPVSWEAAIAFITAKLSAIKERHGPDAIMMTGSSRGPGNEANYVMQKFARAAIGTNNIDCCARLCHGPSVAGLQQTLGNGAMSNSIGEIENTDCILVFGYNAADSHPIVARRILKAKNKGAKLIVCDPRHIETARIADQWLPLKNGANMALVNAFIHVLIEEKLYDANYVRDHTRGFDELKAGVAAYRPEDVEPITGLSAKAVRQAMRTYAAAPAATLLWGMGVTQWGQAVDVVKGLSSLALLTGNLGRPNVGVGPVRGQNNVQGACDMGVLPNTFPGYEKVTDSEARARFAHAWGVAELPAHVGYSITDVPHKVAEGKLKAYYVFGEDPIQTEPDLAAMRAAFAALDLVVVQDIFMTKTAELADVVLPATSWGEHEGVYTSADRGFQHFNKAIEPKGDVKPDWEIISLISTAMGYPMAYQNTQQIWDEMRGLCPPFAGVTYEKLAGLGYVQWPCPTEDHPGTPYLYTDNQFATADGKGLLSCAPWQPPHEQTDSDYPLALCTVREVGHYSCRSMTGNCGTLKILADEPGYVQIHPEDASYLGVIDQALIWISSRRGKVIARASVTERANRGAVYMTYQWWIGACNELTVDHVDPVSKTPEFKHCAVKVEAISDQTAAEQYVEQQYSQLKKRLSDAAVVP

SEQ ID NO: 11473 - protein, 120 aa, Lactobacillus delbrueckii subsp. lactis
MKVGFIGLGNMGSAIARAVAKCDDVSLLLSSHNPEKAGKLQAEIGGQLLDNAQVAAEATVVFLGVKPYQVASTIKEIGENSNNGSIWISMATGVSLETLAKLLPGHDLVRMMPNTPVAIG

SEQ ID NO: 11474 - protein, 539 aa, Schizosaccharomyces pombe
MWGNEAVSVEKTDSTTKPSTVKNAISSSQIKNEKFSQEVLLQFNDPSFTSEVGESPQWQSFGDANILEPLKNELVKNEESTMSELLLCPICGITLESLTVDANIHVNDCLDGRTTEAVSKKLKKDSVVKADPSNSSTFPISDSCKQALLPLPGKQINVRSVVPFYKLMPYNIPFAVDAFAYGAIDGVEAYFLSHFHSDHYGGLTPKWKHGPIYCSEVTGNLLINVMHVDEQYVKRLKLNQPYNIMGITVYVLDANHCPGSAMFVFETLQSNQTRRVLHCGDFRASKDHVMHPVLREKTIHKVYLDTTYLNPKYTFPPQADVVQACADKAISIKKSTDSRLLVVVSTYSIGKEKVAVAIAKSLSSRIYVVPRKMHIIKQLENQDLIDLLTDDPTQASVHMVTMMGIHPNSLLDYLEQYNSSFDKIIGYKVTGWTFQPLENRAQLSSSLDSIISRPPKFVEYDLRAIRGSTDKVAAFVAPYSEHSSFYDLTMFCLSMNIGHIIPTVNVGSQRSREKMNVWLDRWAWRRKKQGLLSLENVDW

SEQ ID NO: 11475 - protein, 266 aa, Escherichia coli
VDKPMIQYIVDEIVAAGIKEILLVTHASKNAVENHFDTSYELESLLEQRVKRQLLAEVQSICPPGVTIMNVRQGEPLGLGHSILCARPAIGDNPFVVVLPDVVIDDASADPLRYNLAAMIARFNETGRSQVLAKRMPGDLSEYSVIQTKEPLDREGKVSRIVEFIEKPDQPQTLDSDIMAVGRYVLSADIWPELERTQPGAWGRIQLTDAIAELAKKQSVDAMLMTGDSYDCGKKMGYMQAFVKYGLRNLKEGAKFRKGIEKLLSE

SEQ ID NO: 11476 - protein, 1123 aa, Lycopersicon esculentum
MSSSRPSQSSTTSSRSKHSARIVAQTSIDAKLHADFEESGDSFDYSSSVRVTSVAGDEEKPKSDKVTTAYLHQIQKGKFIQPFGCLLALDEKTLKVIAFSENAPEMLTMVSHAVPSVGEHPVLGIGTDIRTIFTGPSGAALQKALGFGEVSLLNPVLVHCKNSGKPFYAIVHRVTGSLILDFEPVKPYEVPMTAAGALQSYKLAAKAITRLQSLPSGSMERLCDTMVQEVFELTGYDRVMGYKFHEDDHGEVVSEITKPGLEPYLGLHYPATDIPQAARFLFMKNKVRMICDCRAKHVKVVQDEKLPFDLTLCGSTLRAPHYCHLQYMENMNSIASLVMAVVVNDGDEEGESSDSSQSQKRKRLWGLVVCHNTTPRFVPFPLRYACEFLAQVFAIHVNKELELENQFLEKNILRTQTLLCDMLMRDAPLGIVSQSPNIMDLVKCDGAALLYKNKIHRLGMNPSDFQLQDIVSWLCEYHTDSTGLSTDSLYDAGFPGALALGDAVCGMAAVRISDKDWLFWFRSHTAAEVRWGGAKHEPGEKDDGRKMHPRSSFKAFLEVVKTRSIPWKDYEMDAIHSLQLILRNAFKDAEVVNSNTNSIYKKLNDLKIDGMQELESVTAEMVRLIETALVPILAVDVDGQVNGWNTKIAELTGLPVDEAIGKHLLTLVEDSSVDTVNKMLELALQGKEEKNVEFEIKTHGPSRDSSPISLIVNACASKDVRDNVVGVCFMAHDITGQKSIMDKFTRIEGDYRAIIQNPHPLIPPIFGTDQFGWCSEWNTAMTKLTGWRRDDVMDKMLLGEVFGTQAACCRLKNQEAFVNFGVVLNNAITGQESEKIPFGFFARYGKYVECLLCVSKRLDKEGAVTGLFCFLQLASHELQQALYVQRLSEQTALKRLKVLAYIRRQIRNPLSGIIFSRKMLEGTSLGEEQKNILHTSAQCQRQLNKILDDTDLDSIIDGYLDLEMLEFKLHEVLVASISQVMMKSNGKNIMISNDMVEDLLNETLYGDSPRLQQVLANFLLVSVNATPSGGQLSISGRLTKDRIGESVQLALLEFRIRHTGGGVPEELLGQMFGSEADASEEGISLLVSRKLVKLMNGEVQYLREAGQSTFIISVELAVATNSS

SEQ ID NO: 11477 - protein, 192 aa, Sequoiadendron giganteum
DDHGEVISEIRRSDLEPYLGLHYPATDLPQASRFLFMKNKVRMICDCYATPVKVVEDNRLPRELILCGSTLRAPHGCHAEYMSNMGSIASLAIAVTINAKEEDGDTDGQQQQQKGRRLWGLVVCHHTSPRFVPFPMRYACEFLMQVFAIQLNKEVELADQLREKHILRTQTLLCDMLLRDAPMGIIRQKPNI

SEQ ID NO: 11478 - protein, 198 aa, Streptococcus gordonii
GIEDILVVTGKSKRSIEDHFDSNFELEYNLKEKGKDDLLKLVDETTGIGLHFIRQSHPRGLGDAVLQAKAFVGNEPFVVMLGDDLMDITNDKAMPLTKQLMNDYEATHASTIAVMQVPHEEVSSYGVIAPQGEGLNGLYSVEKFVEKPSPEEAPSDLAIIGRYLLTPEIFKILENQAPGAGNEIQLTDAIDTLNKTQR

SEQ ID NO: 11479 - protein, 785 aa, Shigella flexneri 2a str. 2457T
MASSALTLPFSRIAHAVDSAIPTKSDEKVIWSACTVNCGSRCPLRMHVVDGEIKYVETDNTGDDNYDGLHQVRACLRGRSMRRRVYNPDRLKYPMKRVGARGEGKFERISWEEAYDIIATNMQRLIKEYGNESIYLNYGTGTLGGTMTRSWPPGNTLVARLMNCCGGYLNHYGDYSSAQIAEGLNHTYGGWADGNSPSDIENSKLVVLFGNNPGETRMSGGGVTYYLEQARQKSNARMIIIDPRYTDTGAGREDEWIPIRPGTDAALVNGLAYVMITKNLVDQAFLDKYCVGYDEKTLPASAPKNGHYKAYILGEGPDGVAKTPEWASQITGVPADKIIKLAREIGSTKPAFISQGWGPQRHANGEIATRAISMLAILTGNVGINGGNSGAREGSYSLPFVRMPTLENPIQTSISMFMWTDAIERGPEMTALRDGVRGKDKLDVPIKMIWNYAGNCLINQHSEINRTHEILQDDKKCELIVVIDCHMTSSAKYADILLPDCTASEQMDFALDASCGNMSYVIFNDQVIKPRFECKTIYEMTSELAKRLGVEQQFTEGRTQEEWMRHLYAQSREAIPELPTFEEFRKQGIFKKRDPQGHHVAYKAFREDPQANPLTTPSGKIEIYSQALADIAATWELPEGDVIDPLPIYTPGFESYQDPLNKQYPLQLTGFHYKSRVHSTYGNVDVLKAACRQEMWINPLDAQKRGIHNGDKVRIFNDRGEVHIEAKVTPRMMPGVVALGEGAWYDPDAKRVDKGGCINVLTTQRPSPLAKGNPSHTNLVQVEKV

SEQ ID NO: 11480 - protein, 305 aa, Miscanthus sinensis f. glaber
IESVGEGVTDVAPGDHVLPVFTGECKECPHCKSAESNMCDLLRINTDRGVMIGDGKSLFSINGKPIYHFVGTSTFSEYTVMHVGCVAKINPQAPLDKVCVLSCGISTGLGASINVAKPPKGSTVAIFGLGAVGLAAAEGARIAGASRIIGVDLNPSRFEEARKFGCTEFVNPKDHKKPVQEVLAEMTNGGVDRSVECTGNISAMIQAFECVHDGWGVAVLVGVPHKDAELKTHPMNFLNERTLKGTFFGDFKPRTDLPNVVELYMKKELEVEKFITHSVPFAEINKAFDLMAKGEGIRCIIRMEN

SEQ ID NO: 11481 - protein, 305 aa, Miscanthus sinensis f. glaber
IESVGEGVTVVAPGDHVLPVFTGECKECPHCKSAESNMCDLLRINTDRGVMIGDGKSRFSINGKPIYHFVGTSTFSEYTVMHVGCVAKINPQAPLDKVCVLSCGISTGLGASINVAKPPKGSTVAIFGLGAVGLTAAEGARIAGGSRIIGVDLNPSRFEEARKFGCTEFVNPKDHKKPVQEVLAEMTNGGVDRSVECTGNINAMVQAFECVHDGWGVAVLVGVPHKDAELKTHPMNFLNERTLKGTFFGDFKPRTDLPNVVELYMKKELEVEKFITHSVPFAEINKAFDLMAKGEGIRCIIRMEN

SEQ ID NO: 11482 - protein, 77 aa, Glycine max
  unsure (1)..(77): unsure at all Xaa locations
TTVNRAGAGMVAPFTGLKSMAGLLTKKTNXDITCIATNRGRVQCMHVWPRVXQEELETLSYLTTMDDTQYQTEAEYL

SEQ ID NO: 11483 - protein, 364 aa, Streptococcus pneumoniae R6
MSKELHINTILAQAGIKSDEATGALVTPLHFSTTYQHPEFGRSTGFDYTRTKNPTRSKAEEVLAAIESADYALATSSGMSAIVLAFSVFPVGSKVLAVRDLYGGSFRWFNQVEQEGRFHFTYANTEEELIAELEKDVDVLYIETPTNPLMLEFDIEKLAKLAHAKGAKVVVDNTFYSPIYQRPIEDGADIVLHSATKYLAGHNDVLAGVVVTNSLELYEKLFYNLNTTGAVLSPFDSYQLLRGLKTLSLRMERSTANAQEVVAFLKDSPAVKEVLYTGRGGMISFKVADETRIPHILNSLKVFSFAESLGGVESLITYPTTQTHADIPAEVRHSYGLTDDLLRLSIGIEDARDLIADLRQALEG

SEQ ID NO: 11484 - protein, 305 aa, Miscanthus sinensis f. glaber
IESVGEGVTDVAPGDHVLPVLTGECKECAHCRSAESNMCDLLRINTDRGVMIGDGKSRFSINGKPIYHFVGTSTFSEYTVMHVGCVAKINPQAPLDKVCVLSCGISTGLGASINVAKPPKGSTVAIFGLGAVGLAAAEGARIAGASRIIGVDLNPSRFEEARKFGCTEFVNPKDHKKPVQEVLAEMTNGGVDRNVECTGNINAMIQAFECVHDGWGVAVLVGVPHKDAEFKTHPMNFLNERTLKGTFFGNFKPRTDLPNVVELCMKKELEVEKFITHSVPFAEISKAFDLMAKGEGIRCIIRIEN

SEQ ID NO: 11485 - protein, 305 aa, Miscanthus sinensis f. glaber
IESVGEDVTDVAPGDHVLPVFTGECKERAHCRSAESNMCDLLRINTDRGVMIGDGKSRFSINGKPIYHFVGTSTFSEYTVMHVGCVAKINPQAPLDKVCVLSCGISTGLGASINVAKPPKGSTVAIFGLGAVGLAAAEGARIAGASRIIGVDLNPSRFEEARKFGCTEFVNPKDHKKPVQEVLAEMTNGGVDRSVECTGNINAMIQAFECVHDGWGVAVLVGVPHKDAEFKTHPMNFLNERTLKGTFFGNFKPRTDLPNVVELYMKKELEVEKFITHSILFAEISKAFDLMAKGEGIRCIIRMEN

SEQ ID NO: 11486 - protein, 349 aa, Thermoanaerobacter tengcongensis
MKALLLAGGLGTRLRPLTDDLPKPMVPIMGKPLLERIILNLKKSGVDEVVISTHYKSDYIENYFKGKSKELGVKIHYVTEETPLGTGGAIKNAEKFFDDTFLILNSDIVSDIDYADLVKYHKRRRAQVTIASIEVRDTSQYGVIEFDSKGFITAFKEKPKPGESNSKYINAGVYVFEPEVLKEIPANTQVSVERETYPLLLSKGYKMAIYKFTGYWMDIGTVDKYKKVHEDILKGKSRFVAGLSTRGIILGENVKIHPTASVIGPAYIGDNTEVDAYATVGPYTVIGSNCRIGQESKVSNSVLWDNIKVRRFARLENSVVTSECVVEVNMEIKNTVFTANKLADITLTP

SEQ ID NO: 11487 - protein, 305 aa, Miscanthus sinensis var. sinensis
IESVGEGVTDVAPGDHVLPVFTGECKECPHCKSAESNMCDLLRINTDRGVMIGDGKSRFSINGKPICHFVGTSTFSEYTVMHVGCVAKINPQAPLDKVCVLSCGISTGLGASINVAKPPKGSTVAIFSLGAVGLAAAEGARIAGASRIIGVDLNPSRFEEARKFGCTEFVNPKDHKKPVQEVLAEMTNGGVDRSVECTGNINAMIQAFECVHDGWGVAVLVGVPHKDAEFKTHPMNFLNERTLKGTFFGNFKPRTDLPNVVELYMKKELEVEKFITHSIPFAEINKAFDLMAKGEGIRCIIRMEN

SEQ ID NO: 11488 - protein, 179 aa, Oryza sativa
MYGVGGGGAGLKPRWTGWRRRRNHEDDDDEEEEESGEGRVLEAWERAYADDRSWEALQEDESGLLRPIDTKTLVHAQYRRRLLLRSAASAAARIQKGLIRYLYIVIDLSRVRSPVPSPKLVLGLLMIVLAASEMDYRPSRMAVVAKYAEIKALMGKLECSGEPSLQNALELVHGYLDQS

SEQ ID NO: 11489 - protein, 501 aa, Ustilago maydis 521
MPHMPQGIVKGGKEDVKLNNQSLWQTKAYINGVWTDADNKSTLKVFNKATGAEIGQVPDMGANETAAAISAADEAFKSWSKTTAKHRHDLLMKLYYAHQENAEDLAKIIVAENGKALPEAKGEISYSNGFLEWFAEEATRTYGHTVPSPLPGVRNVVQMQPVGVAGLITPWNFPAAMITRKAAPALAAGCTVVVKAPAETPFSALAFAHLAEKVGFPKGTINVVTCAKGDNEIAVGKQLCENPAVRKISFTGSTRVGKILMSQSASTLKKLSMELGGNAPFIVFEDADLDKAVEGAIACKFRGSGQTCICANRIYVHASIKDEFLQKLAAKVNDFKVGYGMDKGTTHGPLVSEAGLSKVEEHVNDSVKKGAKVIVGGKRGEGLFFEPTIITDLPEDVPTDREETFGPLAAVYTFTSEQEVVRKANNVDVGLAGYFFSKDTARCWRVAEELQVGMVGINTGLISQHAVPFGGVHESGFGREGGRTGIDEYLVQKLMVFGGVN

SEQ ID NO: 11490 - protein, 369 aa, Oryza sativa
MLRRNSPSSSISTKNGFDGEEDCNWSLGRWVYDNASRPLYSGLKCSFIFDEVACDKYGRNDTKYQHWRWQPHGCNLPRFNATKFLEKLRNKRLVFVGDSVNRNQWVSMVCMVEHFIPDGRKMRVYNGSLISFKAFEYNATIDFYWSPLLLESNSDNPIIHRVEYRIIRADRIEKHANVWKDADFIVFNSYLWWRIIMQKCRYGSFEDGDAKLDEVQMVDGYEIALKKLTEYLGANINKNKTRIFFAGSSPAHSWASNWGGDDNNKCLNETEPIQIEDYRSATTDYGMMDKAKEIFGTLEPKGIHVQILNITQLFEYRKDAHPTIFRRQYVPLTKEQIANPSIYADCTHWCLPGVPDVWNEFLYAYIMHK

SEQ ID NO: 11491 - protein, 348 aa, Zea mays
MYAAAVLAAVSAVSVVAAQSPEPRDNQTVADVMSISIFMAVFFPVFVVLLAFACLHLFRAPDDDDPQAPDAASAPEWPRGGGSRKGGLDAAAIAALPLVFFREVRQHRIVDGREDALECSVCLLEFDDDDALRILPTCPHAFHPECIGLWLERHATCPLCRASVLDDAPPPAPAAQLELHTAPPLTPDSSPVHAAIVLIGGAGASEVGEEEDRTTIQRLARNRRAAGRQALPRSNSTGHSASDGGMERFALRLPEHVRLELLMSHRLRHVTSAVASVRVMEGSARDTSTVGGSARSTMARLLSLFTPGAGWKGDGDDKSGKAEATAASSLRRRENSSRGAVGEEKRSV

SEQ ID NO: 11492 - protein, 443 aa, Lactobacillus plantarum WCFS1
MAEQYDVVVIGGGPAGNAMASGLKAQGKTVLIVEADLWGGTCPNRGCDPKKILLSAVEARQAAQHLQGQGLIGAPKIDWPALMAHKRGYTDGINDGTLNGLTGQDIATLHGQAHFQSDNQLAVGDRVVSATDYVIATGQRPAILPITGHEYFKTSTDFLDLDQMPKRVTFVGGGYVGFELATIANAAGADVHVIHHNDRPLKAFDADLVKDLMAAMTADGITFDLNTDVQAITKTATGLQLTADNFELTTDLVISSAGRIPNADQLGLANVGVTFDRHGIQVNDHLQTANPHIYAIGDVSDTPVPKLTPVAGFEARYLVGELTHPGAAIKYPVVPTQVFAAPKLAQVGISAAVATEHPDEYRVNTLDMTKWFTYYRFGAQQAQAKVVVAKASGQVVGATLLSDVADEMINYFTLLIEKHVTLPDLQRLVLAYPTPASDLQYLY

SEQ ID NO: 11493 - protein, 240 aa, Lactobacillus plantarum WCFS1
MMKDPLALQLLGEFLGTFILILLGDGVVAGVTLNKSKAQNAGWVAITLGWGFAVTMGVYASSFMSPAHLNPAVSLGMAVAGKFPWAYVIPYSAAQIAGGVIGGLVVWLHYYPHWQATKDAGAILGIFATGPGIRRYFWNFISEVIGTFVLVFGLLAFTKGQFTAGLNPIVVGILIIAIGLSLGGTTGYAINPARDLGPRIAHAVLPIANKGTSDWAYSWVPIAGPLVGGALGALLFNVLP

SEQ ID NO: 11494 - protein, 126 aa, Glycine max
  unsure (1)..(126): unsure at all Xaa locations
SSMICSPAGATVXRGGGGMVAPFAXLXSMGGLPTGETRADITCVASXGGRAPCFFFWPPXGAKKGEILSYLPEVGDAQLAKEVESLLRKGWIPCLEFELEPGFVSRAPGRAPRIYDGRSRSLGKLA

SEQ ID NO: 11495 - protein, 293 aa, Methylobacillus flagellatus KT
MMQGFGDLAVIKDTFVEASDVLGVDFWRMATEPNDALNQTANTQPLMLAAGVATWRAWQSQGGPLPTVLAGHSLGEYTALVAAGIVSYEAALPLVRFRADVMQRAVAEGVGAMAAVLGLGDDAVRAACIEAAQGEVLEAVNLNSPGQVVIAGHKAAVERGIEAAKAKGAKRALLLPVSVPSHCALMKPAADELAEYLKDVDFASAQIPVLHNADVAAYDDATKVKDALVRQLYSPVRWVETVQAVHATGVTASAECGPGKVLAGLVKRTVAELPCIALVNQEALAEAMAQFNQ

SEQ ID NO: 11496 - protein, 305 aa, Miscanthus sinensis var. sinensis
IESVGEGVTGVAPGDHVLPVFTGECKECPHCKSAESNMCDLLRINTDRGVMIGDGKSRFSINGKPIYHFVGTSTFSEYTVMHVGRVAKINPQAPLDKVCVLSCGISTGLGASINAAKPPKGSTVAIFGLGAVGLAAAEGARIAGASRIIGVDLNPSRFEEARKFGCTEFVNPKDHKKPVQEVLAEMTNGGVDRSVECTGNINAMIQAFECVHDGWGVAVLVGVPHKDAEFKTHPMNFLNERTLKGTFFGNFKPRTDLPNVVELYMKKELEVEKFITHSIPFAEINKAFDLMAKGEGIRCIIRMEN

SEQ ID NO: 11497 - protein, 305 aa, Miscanthus sinensis var. sinensis
IESVGEGVTDVAPGDHVLPVFTGECKECPHCKSAESNMCDLLRINTDRGVMIGDGKSRFSINGKPICHFVGTSTFSEYTVMHVGCVAKINPQAPLDKVCVLSCGISTGLGASINVAKPPKGSTVAIFSLGAVGLAAAEGARIAGASRIIGVDLNPSRFEEARKFGCTEFLNPKDHKKPVQEVLAEMTNGGVDRSVECTGNIYAMIQAFECVYDGWGVAVLVGVPHKDAEFKTHPMNFLNERTLKGTFFGNFKPRTDLPNVVELYMKKELEVEKFITHSIPFAEINKAFDLMAKGEGIRCIIRMEN

SEQ ID NO: 11498 - protein, 268 aa, Glycine max
MKKSSSASKGAAANDGVIKGGSIDWELRPGGMLVQKRQPLDSSSSSMIKIKVSHGSYHHEVTVPAQSTFGHLKMVLTSETGLEPKEQRLLFRGKEKEDEECLHMVGVKDMSKVILLEDPASKERKLEEMHKSEDISKACEAISKVRTEVDKLYQKVVALETTVCGGAKVEDKEFAILTELLMVQLLKLDSIAAEGEAKGQRRVEVRRVQSYVDTIDNLKARNFAAFSNAGNNAVPVIWEALESGVGSLKSPTSFPTSTVITQNWEHFE

SEQ ID NO: 11499 - protein, 267 aa, Clostridium sordellii
MNKLENKVALVTSATRGIGLASAIKLAQNGAIVYMGVRRLEATQEICDKYKEEGLILKPVFFDAYNIDIYKEMIDTIIKNEGKIDILVNNFGTGRPEKDLDLVNGDEDTFFELFNYNVGSVYRLSKLIIPHMIENKGGSIVNISSVGGSIPDISRIGYGVSKSGVNNITKQIAIQYAKYGIRCNAVLPGLIATDAAMNSMPDEFRKSFLSHVPLNRIGNPEDIANSVLFFVPSEDSSYITGSILEVSGGYNLGTPQYAEFVGSKVVE

SEQ ID NO: 11500 - protein, 305 aa, Miscanthus sinensis var. sinensis
IESVGEGVTDVAPGDHVLPVFTGECKECPHCKSAESNMCDLLRINTDRGVMIGDGKSRFSINGKPIYHFVGTSTFSEYTVMHVGCVAKINPQAPLDKVCVLSCGISTGLGASINVAKPLKGSTVAIFGLGAVGLAAAEGARIAGASRIIGVDLNPSRFEEARKFGCTEFLNPKDHKKPVQEVLAEMTNGGVDRSVECTGNINAMIQAFECVHDGWGVAVLVGVPHKDAEFKTHPMNFLNERTLKGTFFGNFKPRTDLPNVVELYMKKELEVEKFITHSIPFAEINKAFDLMAKGEGIRCIIRMEN

SEQ ID NO: 11501 - protein, 488 aa, Vibrio cholerae O1 biovar eltor str. N16961
MRSLAMLPTDFPFFHQSAFINGQWILGEPQARQTVTNPFDGSLIGSVPLLSAAQVQEAIAGAQAAQILWCQQPAENKAKILRRWYELIEQHHESLAKLLTIEQGKPLAEARGEIHYAASFVEWYAEEAKRAYGELIPSHKPDARIMVSRQPVGVVAAITPWNFPAAMITRKCAPAFAAGCAVVLKPAPDTPFTALALADLAQQAGIPDGLLQVVTGDAIEIGRVLTESKTVRKLSFTGSTGVGKLLMAQSANNVKKLSLELGGNAPFIVFEDADINAAIDGVMVAKFRNAGQTCVCANRIYVHDAVYDQFAAKLVDRVSRLNVGYGLDAGVNIGPLINDAAVAKVTSHIVDAQSKGAKVMFGALPEAGSRLFQPHVLTEVTDEMRVADEETFGPLAALFRFSSEQEVIERANATDSGLAAYCYTQSLRRAWHMSEALEAGIVGINEGLISTTLAPFGGIKESGLGREGAKHGLEEYLEVKYTLMGGLA

SEQ ID NO: 11502 - protein, 305 aa, Miscanthus sinensis var. sinensis
IESVGEGVTDVAPGDHVLPVFTGECKECPHCKSAESNMCDLLRINTDRGVMIGDGKSRFSINGKPIYHFVGTSTFSEYTVMHVGCVAKINPQAPLDKVCVLSCGISTGLGASINVAKPLKGSTVAIFGLGAVGLAAAEGARIAGASRIIGVDLNPSRFEEARKFGCTEFANPKDHKKPVQEVLAEMTNGGVDRSVECTGNINAMIQAFECVHDGWGVAVLVGVPHKDAEFKTHPMNFLNERTLKGTFFGNFKPHTDLPNVVELYMKKELEVEKFITHSIPFAEINKAFDLMAKGEGIRCIIRMEN

SEQ ID NO: 11503 - protein, 305 aa, Miscanthus sinensis var. sinensis
IESVGEGVTDVAPGDHVLPVFTGECKECAHCRSAESNMCDLRRINTDRGVMIGDGKSRFSINGKPIYHFVGTSTFSEYTVMHVGCVAKINPEAPLDKVCVLSCGISTGLGASINVAKPPKGSTVAIFGLGAVGLAAAEGARIAGASRIIGVDLDPSRFEIARKFGCTEFLNPKDHKKPVQEVLAEMTNGGVDRSVECTGNINAMIQAFECVHDGWGVAVLVGVPHKDAEFKTHPMNFLNERTLKGTFFGNFKPRTDLPNVVELYMKKELEVEKFITHSIPFAEINKAFDLMAKGEGIRCIIRMEN

SEQ ID NO: 11504 - protein, 497 aa, Pseudomonas fluorescens PfO-1
MTTLTRADWEQRARDLKIEGRAYLNGEYTDAVSGETFECISPVDGRLLGKIASCDADDAQRAVENARATFNSGVWSRLAPTKRKATMIRFAGLLKQHAEELALLETLDMGKPISDSLYIDVPGAAQALSWSGEAIDKIYDEVAATPHDQLGLVTREPVGVVGAIVPWNFPLMMACWKLGPALSTGNSVILKPSEKSPLTAIRIAELAVEAGIPKGVLNVLPGYGHTVGKALALHNDVDTLVFTGSTKIAKQLMIYSGESNMKRVWLEAGGKSPNIVFADAPDLQAAAESAASAIAFNQGEVCTAGSRLLVERSIKDKFLPMVIEALKAWKPGNPLDPATNVGALVDTQQMNTVLSYIESGHSDGAKLVAGGKRILQETGGTYVEPTIFDGVSNAMKIAQEEIFGPVLSVIAFDTAEEAINIANDTPYGLAAAVWTQDISKAHLTAKALRAGSVWVNQYDGGDMTAPFGGFKQSGNGRDKSLHAFDKYTELKATWIKL

SEQ ID NO: 11505 - protein, 395 aa, Bacillus cereus ATCC 10987
MKLAKRVAALTPSATLEITAKAQALKAEGHDVIGLGAGEPDFNTPEHIMDAAHKAMLEGHTKYTPTGGLQALKQEIVKKFTRDQGIAYDPSEIIVCNGAKHALYTLFQVLLDEGDEVIIPTPYWVSYPEQVKLAGGKPVYVEGLEDNEYKITAKQLREAITEKTKAVIINSPSNPTGMIYSKEELQQLGEVCLEHDILIVSDEIYEKLIYGGAEYTSVAQLSNALKEQTLIINGVSKSHSMTGWRIGYAAGNKQLIKAMTNLASHSTSNPTSIAQYGAIAAYAGSQEPVETMRQAFEERLNIIYDKLIQIPGFTCIKPQGAFYLFPNVKEAVALSGYETVDDWAKALLEEEKVALVPGTGFGAPNNVRLSYATSLEQVEKALERIHTFMKSKVQA

SEQ ID NO: 11506 - protein, 164 aa, Lupinus polyphyllus
MARPQQRYRGFRQRHWGSWVSEIRHSILKTRIWQGTFESAEDAARAYDEAARLMCGTRARTNFPYNPNASQSSSSKLLSATLIAKLHRCYMASLQMTRPSSLPEAPRIIASPNNAVKGIGADAMLLPKKREQEEQETGGNLDFKKVKVECSQQFKPLEEDHIAQ

SEQ ID NO: 11507 - protein, 366 aa, Prochlorothrix hollandica
MNNSLNVSATLDLANGLRNFWYPVEFSKNLGMADPLGFELFDQCWVLFRDDQGTAACILDECAHRACPLSLGKVIQGRIQCPYHGWEYDRQGECVHMPSCQAISNPILTLPVMEQGGMIWVWPGTDEPGALPSLAPTLPDNFTLQAELVMDLEVEHGLMLENLLDLAHAPFTHTGTFAKGWPVPPFVRFANAATTPWTGHWDPYPIHMTFEPPCFVISTIGLRGKDCGRHLHQVHACLPRGQGRTRLLYRLALDFGHWLRWVPGTHCLWQHLANRVIQEDLRLVQGQQERLKGGANVWNQPVGYDKLGVAYRHWRNQVERHGSDWPESPADEGREPALNAIVTGSDAPITGSVVSLPPSQAPPTGH

SEQ ID NO: 11508 - protein, 937 aa, Helicobacter hepaticus ATCC 51449
MTSKIQGKKPTLSRRDFIKSAAAASAAASVGLSIPSVMSAEAQNAQKLWKWDKSVCRFCGTGCGIMVATQKDNTGQAKIVAIKGDPEAPVNRGLNCIKGYFCAKIMYGADRLTTPLLRVNSNGEFDKKGKFAPVSWKRAFDEMEKQFKKAYNELGPTGIAVFGSGQYTIQEGYAAVKLVKGGFRSNNIDPNARHCMASAVVGFMETFGIDEPAGCYDDIELTDTIVTWGANMAEMHPVLWSRVTDRKLSSSNVKVINLSTYTNRTSDLADIEIIFKPHTDLAIWNFLAREIINRNAVDEAFVKENCVFSTGFVNIGYGMRNNPQHPKFKPEERDIVAKEVSKIVSNDEGITLQYLGIKAGEEMKMDKAGAAGNHWGISFEDFKKGLEPYTLDFVANLAKGNPDESIESFKQKLQSLADYYIDKNRKIVSFWTMGMNQHQRGTWVNEQSYMVHMLLGKQAKPGSGAFSLTGQPSACGTAREVGTFSHRLPADMVVANPKHREITEKIWHLPSGTLNSKIGAPYLKIMRDLEDGNIKWAWVQVNNPWQNTANANHWIAAAREQDNFIVVSECYPGISAKVADLILPTAMIYEKWGAYGNAERRTQHWKQQVVAPGEAMPDIWQMAEFAKRFKLSEVWDKGYEALDIKPVLESAKAMGYTEEDTLFDVLFANKNAKNFSAQDALLKNEFNTEVLGDSRNVEDGNGEAFKGYGFFIQKYLWEEYRQFGLGHAHDLADFDTYHRVRGLRWPVVNGKETQWRFNAKYDFYAQKLGNGKAFAFYGNKGKDMPAGSLNAPSEEKVSIDNKAKIFLRPYMDPCEMPDKEYPMWLCTGRVLEHWHSGTMTMRVPELYRAVPEALCYMHPDDANAQNLEQNQVVWVESRRGKVKAKLDLRGRNRPPKGLIYVPWFDENVFINKVCLDATCPISKQTDFKKCAVKVYKA

SEQ ID NO: 11509 - protein, 245 aa, Zea mays
  unsure (1)..(245): unsure at all Xaa locations
MPPPQPPTMDPKMTEVTQMFARFKTAYARNDLNTCVTLLSQLKVHLTQFPSLPALFQQTPNIVEELKLARDIYEHAVVLSVKFEDQDAFERDFCQLKPYYMDTWLVLXTQFVDFIFLYYFDFYFFRLNSCDASGNKMFKADCERHIFLMHTQIQNGVQCICLLGYFPSYAYFQLLEAFTSLSTPLPDLWVPRXSTASPEEHPEWEIKNGAVFFQKAKESQPCKEIPSLQLINQTLSYARELERIV

SEQ ID NO: 11510 - protein, 264 aa, Salmonella typhimurium LT2
MNDSLKAQCGAEFLGTGLFLFFGIGCLSALKVAGASLGLWEICIIWGLGISLAVYLTAGISGGHLNPAVTIALWLFACFPKQKVLPYIIAQFAGAFGGALLAYVLYSSLFTEFETAHHMVRGSVESLQLASIFSTYPAAALNVWQAALVEVVITSILMGMIMALTDDGNGIPKGPLAPLLIGILVAVIGASTGPLTGFAMNPARDFGPKLFTWLAGWGNMAMSGGREIPYFIVPIVAPVIGACAGAAIYRYFIGKNLPCNRCEL

SEQ ID NO: 11511 - protein, 402 aa, Desulfovibrio vulgaris subsp. vulgaris (strain Hildenborough)
MNAADTAFILICAALVMLMTPGLALFYGGLVRAKNVLSTTMHSFVLVGVASVVWAIIGYTLAFGPDVAGVIGGLDHLFLKGVGMEPSEAAKTIPHLAFMVFQCMFAVITPALISGAYAERISFRAMLLFSVLWLVLVYAPMAHWVWGGGWMFKMGALDFAGGAVVHMSSAAAALAAAHVLGRREGYGREPFVPHNLPMTVLGAGILWFGWFGFNAGSALAANGLAAMAFVTTHLATAAGVMGWLAVEWMHSGKPTTLGAASGAVAGLVAITPAAGFVEPMPAMIIGFGGGMLCYGGVLMKKVFKYDDALDVVGVHGVGGTWGALATGLFASEAVNGVNGLFYGNPGQLWTQFLSVVATWLFCYLMSRGIFHAVDALMGLRVTVDAERAGLDVSEHNERAYEQ

SEQ ID NO: 11512 - protein, 254 aa, Ustilago maydis 521
MPVFQPANQIKLTNVSIVRLRKAGKRFEIACYKNKVREWRSGVETDLDEVVQIENVFVNVSKGQVAPSDDLQKAFGTTEIPKILQEILKKGELQVGEKERQHELTNTWKDIATQVAEKCVDPSSQRPYTVGMIEKAMHDVHYSVKTARSAKQQALDVIRLLQEKKTIPIERARMRIRITMPNKDGKKIKDKILPLTDKVDDEDWSDQWELIASIDPGALKTINELIQSEIKGRGNVETLNFTTIHEGDGDERLE

SEQ ID NO: 11513 - protein, 426 aa, Methanocaldococcus jannaschii
MALKMDKSKELFEEAKKYLVGGVNSPVRYFKPYPFFVEKAKDCYLFDVDGNCYIDYCLAYGPMVLGHANDAVIKAVKEQLELGSAYGCPTEKEIILAKEVVKRVPCAEMVRFVNSGTEATMSAIRLARGVTGRKKIIKFDGAYHGAHDYVLVKSGSGALTHGHPNSPGIPEETTKNTILIPFNDEDAVKKAINENKDEIACIIVEPIMGNVGCILPKEGYLEFLREITEENDILLIFDEVITGFRLAKGGAQEYFGVVPDIATLGKILGGGFPIGAIVGRRELMEQFSPLGAIYQAGTFNGNPISITAGIATLKQLDDRFYKETARTAKILADTLRELADKHNIKAKVYNIASMFQIYFNDKEVVNYEIAKQSDTEKFMKYFWRLLEKGVFVPPSQFECCFTSIKHDDEVVDKTIKAMEDVFEGLE

SEQ ID NO: 11514 - protein, 154 aa, Solanum tuberosum
KFRSHSTGHSLVVPGENLDRYTLRLPEKVRKDVMDRALLNRTRSCAVTLPRHGSTTRGYRAGPGEGSNRGTRSFKRIDRFDPEAKSDRWFLKIAPPFFTRGSSMKSPKLRADNEEASTSRSNVKVAVKMPSFKCLEPKGDEPGLLANDSARSPV

SEQ ID NO: 11515 - protein, 185 aa, Pseudomonas putida KT2440
MSADLEHIRQVMHEADCLYTEAEVEAAIAKVGEQICKDLHDKNPVVFCVMNGGLIFSGKLLTHLQFPLEASYLHATRYRNQTSGGELFWKAKPEVSFIDRDVLIVDDILDEGHTLSAIIEFCKHAGARSVYTAVLIDKDHDRKASPDLKANYVGLPCVDRYIFGYGMDYKGYWRNANGIFAVKGL

SEQ ID NO: 11516 - protein, 575 aa, Glycine max
MEVLLLCGQERHTKRAFVSFPVFLPRLSLCLCYLLRSSLLLSNMALVNPFLCTTRTSLPLRVSGPPNQVLPRWTLCSQYSFKTSSLRSKQLRCGATADIKADHAVLVGPTSEEERKGDYDWTQEWYPLYLTQNVPEDAPLGLRVFDKQLVLFKDGNGQFRCYEDRCPHRLAKLSEGQLIDGRLECLYHGWQFEGEGKCVKIPQLPADAKIPRAACVKTYEVRDSQGVIWVWMSLKTPPNVSKLPWFENFARPGFQDVSTIHELPYDHSILLENLMDPAHIPISHDRTDWTAKREDAQPLCFEVTERTDRGFAGWWGREKDGSMPNFLRFEAPCVLQNNREIVDKNGEINYFSGLFLCRPTGQGKSMLIVRFGGTKRSPLAKVFPKWYFHQNASKVFEQDMGFLSSQNEILLREKVPTKELYLNLKSSDTWVAEYRKWMDKAGHGMPYHFGHSTISLPKEPAVVEHAPAGLVAGQSASSPTKGGIGTMHAPNFANRYFRHVIHCKGCRTVVKAFEAWKNALSAVAIALTALAILLSGRQWKVLLLASAALCSVGVYACSTAIAMNTTNFIRTHRRL

SEQ ID NO: 11517 - protein, 172 aa, Solanum tuberosum
MENYATIFPSASSSSSHHDEYISLMNSKSSISDDAKEELLFQGKNKAGFLGLMASMETPRDIITKKDEVIKSCKKKIKKPRYAFQTRSQVDILDDGYRWRKYGQKAVKNNKFPRSYYRCTHQGCNVKKQVQRLSKDEEVVVTTYEGMHSHPIDKSTDNFEHILSQMQIYTSF

SEQ ID NO: 11518 - protein, 110 aa, Zea mays
MNYADIEKGINALAKKATEGALSIDEMAGGTFTISNGGVYGSLISTPIINPPQSAILGMHSIVQRPVVVDGNILARPMMYLALTYDHRLIDGREAVYFLRRIKDVGDDSR

SEQ ID NO: 11519 - protein, 305 aa, Miscanthus sinensis var. sinensis
IESVGEGVTDVAPGDHVLPVFTGECKECAHCRSAESNMCDLLRINTDRGVMIGDGKSRFSINGKPIYHFVGTSTFSEYTVMHVGCVAKINPQAPLDKVCVLSCGISTGLGASINVAKPPKGSTVAIFGLGAVGLAAAEGARIAGASRIIGVDLNPSRFEEARKFGCTEFLNPKDHKKPVQEVLAEMTNGGVDRSVECTGNINAMIQAFECVHDGWGVAVLVGVPHKDAEFKTHPMNFLNERTLKGTFFGNFKPRADLPNVVELYMKKELEVEKFITHSIPFAEINKAFDLMAKGEGIRCIIRMEN

SEQ ID NO: 11520 - protein, 305 aa, Miscanthus sinensis var. sinensis
IESVGEGVTDVAPGDHVLPVFTGECKECPHCRSAESNMCDLLRINTDRGVMIGDGKSRFSINGKPIYHFVGTSTFSEYTVMHVGCVAKINPQAPLDKVCVLSCGISTGLGASINVAKPPKGSTVAIFGLGAVGLAAAEGARIAGASRILGVDLNPSRFEEARKFGCTEFLNPKDHKKPVQEVLAEMTNGGVDRSVECTGNINAMIQAFECVHDGWGVAVLVGVPHKDAEFKTHPMNFLNERTLKGTFFDNFKPRTDLPNVVELYMKKELEVEKFITHSIPFAEINKAFDLMAKGEGIRCIIRMEN

SEQ ID NO: 11521 - protein, 305 aa, Miscanthus sinensis var. sinensis
IESVGEGVTDVAPGDHVLPVFTGECKECPHCRSAESNMCDLLRINTDRGVMIGDGKSRFSINGKPIYHFVGTSTFSEYTVMHVGCVAKINPQAPLDKVCVLSCGISTGLGASINVAKPPKGSTVAIFGLGAVGLAAAEGARIAGASRILGVDLNPSRFEEARKFGCTEFLNPKDHKKPVQEVLAEMTNGGVDRSVECTGNINAMIQAFECVHDGWGVAVLVGVPHKDAEFKTHPMNFLNERTLKGTFFGNFKPRTDLPNVVELYMKKELEVEKFITHSIPFAEINKAFDLMAKGEGIRCIIRMEN

SEQ ID NO: 11522 - protein, 305 aa, Miscanthus sinensis var. sinensis
IESVGEGVTDVAPGDHVLPVFTGECKECPHCKSAESNMCDLLRINTDRGVMIGDGKSRFSINGKPIYHFVGTSTFSEYTVMHVGCVAKINPQAPLDKVCVLSCGISTGLGASINVAKPPKGSTVAIFGLGAVGLAAAEGARIAGASRIIGVDLNPSRFEEARKFGCTEFLNPKDHKKPVQEVLAEMTNGGVDRSVECTGNISAMIQAFECVHDGWGVAVLVGVPHKDAEFKTHPMNFLNERTLKGTFFGNFKPRTDLPNVVELYMKKELEVEKFITHSIPFAEINKAFDLMAKGEGIRCIIRMEN

SEQ ID NO: 11523 - protein, 324 aa, Arabidopsis thaliana
MAVDLMRFPKIDDQTAIQEAASQGLQSMEHLIRVLSNRPEQQHNVDCSEITDFTVSKFKTVISLLNRTGHARFRRGPVHSTSSAASQKLQSQIVKNTQPEAPIVRTTTNHPQIVPPPSSVTLDFSKPSIFGTKAKSAELEFSKENFSVSLNSSFMSSAITGDGSVSNGKIFLASAPLQPVNSSGKPPLAGHPYRKRCLEHEHSESFSGKVSGSAYGKCHCKKRKNRMKRTVRVPAISAKIADIPPDEYSWRKYGQKPIKGSPHPRGYYKCSTFRGCPARKHVERALDDPAMLIVTYEGEHRHNQSAMQENISSSGINDLVFASA

SEQ ID NO: 11524 - protein, 192 aa, Triticum aestivum
  unsure (1)..(192): unsure at all Xaa locations
MAATIQSVKARQIFDSRGNPTVEVDVCCSDGTFARAAVPSGASTGVYEALELRDGGSDYLGKGVSKAVNNVNSIIAPALVGKDPTAQTELDNFMVQQLDGTKNEWGWCKQKLGANAILAVSLAVCKAGASVKKIPLYQHIANLAGNKQLVXPVPAFNVINGGSHAGNKLAMPEFMILSTGAASFKEAMEKWG

SEQ ID NO: 11525 - protein, 305 aa, Miscanthus sinensis var. sinensis
IESVGEGVTDVAPGDHVLPVFTGECKECPHCKSAESNMCDLLRINTDRGVMIGDGKSRFSINGKPIYHFVGTSTFSEYTVMHVGCVAKINPQAPLDKVCVLSCGISTGLGASINVAKPPKGSTVAIFGLGAVGLAAAEGARIAGASRIIGVDLNPSRFEEARKFGCTEFVNPKDHKKPVQEVLAEMTNGGVDRSVECTGNINAMIQAFECVHDGWGVAVLVGVPHKDAEFKTHPMDFLNERALKGTFFGNFKPRTDLPNVVELYMKKELEVEKFITHSIPFAEINKAFDLMAKGEGIRCIIRMEN

SEQ ID NO: 11526 - protein, 250 aa, Triticum aestivum
  unsure (1)..(250): unsure at all Xaa locations
MASANALLLLFSAAFCFLARRAAGDYGSWQSAHATFYGGGDASGTMGGACGYGNLYSTGYGTNTAALSTALFNDGAACGSCYELKCQDVSSSCLPGSITITATNLCPPNYALPNDDGGWCNPPRAHFDMAEPAYLQIGIYRAGIVAVAYRRVPCVKKGGIRFTINGHSYFNLVLVTNVAGAGDVQSVAIKGSSTGWQAMARNWXNWQSNAYLDGQCLSFRVTSSDGRTVTSNAAAPAGWHFGQTFEGAEF

SEQ ID NO: 11527 - protein, 281 aa, uncultured bacterium
MSQTSTLKGQCIAEFLGTGLLIFFGVGCVAALKVAGATFGQWEISIIWGLGVAMAIYLTAGVSGAHLNPAVTIALWLFACFDKRKVVPFIISQIAGAFCAAALVYGLYYNLFIDFEQTNHIVRGSTESLGLAGTFSTYPNPHINFVQAFAVEMVITAILMGLILALTDDGNGVPRGPLAPLLIGLLIAVIGASMGPLTGFAMNPARDFGPKLFAWMAGWGEIAFTGGRDIPYFLVPVFGPITGAILGAWAYRKLIGRHLPCDVCAIEEKDAAANTQQKASL

SEQ ID NO: 11528 - protein, 275 aa, Escherichia coli
IGQALALLLKTQLPSGSELSLYDIAPVTPGVAVDLSHIPTAVKIKGFSGEDATPALEGADVVLISAGVARKPGMDRSDLFNVNAGIVKNLVQQVSKTCPKACIGIITNPVNTTVAIAAEVLKKAGVYDKNKLFGVTTLDIIRSNTFVAELKGKQPGEVEVPVIGGHSGVTILPLLSQVPGVSFTEQEVADLTKRIQNAGTEVVEAKAGGGSATLSMGQAAARFGLSLVRALQGEQGVVECAYVEGDGQYGRFFSQPLLLGKNGVEERKSIGTLSA

SEQ ID NO: 11529 - protein, 264 aa, Dechloromonas aromatica RCB
MDFQIKSKTAVVSGSTVGIGFAIATELAREGARVVINGRSQKSVDAALGRLRSLVAGADVQGVVADLSTAEGCQFLFDACPQADILVNNLGIFDPVPFDAIPDSEWQRFFDVNVMSGVRLARHYLPAMKAANWGRIVFISSESGINTPGEMVHYGMTKSAQLAVSRGLAQSCAGTGVTVNAVLPGPTRSEGVGEFFGKLAAESGISLDEMERRFFAEGRPTSIIKRMIDPAEVAALVAYVCSARAAATTGAALRVEGGIVSTIC

SEQ ID NO: 11530 - protein, 418 aa, Pseudomonas aeruginosa PAO1
MGYQKIQVPATGDKITVNADMSLSVPKNPIIPFIEGDGIGVDISPVMIKVVDAAVEKAYKGERKIAWMEVYAGEKATQVYDQDTWLPQETLDAVRDYVVSIKGPLTTPVGGGIRSLNVALRQQLDLYVCQRPVRWFEGVPSPVKKPGDVDMVIFRENSEDIYAGVEWKAGSPEAEKVIKFLTEEMGVKKIRFTENCGIGIKPVSQEGTKRLVRKALQYAVDNDRSSVTLVHKGNIMKFTEGAFKDWGYEVARDEFGAELLDGGPWMQFKNPKTGKNVVVKDVIADAMLQQILLRPAEYDVIATLNLNGDYLSDALAAEVGGIGIAPGANLSDSVAMFEATHGTAPKYAGQDKVNPGSLILSAEMMLRHMGWTEAADLIIKGTNGAIAAKTVTYDFERLMDGATLLSCSEFGDAMIAKM

SEQ ID NO: 11531 - protein, 506 aa, Brucella suis 1330
MVMSTIVKPQPLTGLEVREFSMLIDGKWVGSDSGKSIERVAPGHGVTVSRYPAGNKADVERAVSAARKAFDDGRWSSTTASQRSLVLLKAADLIEARAEELAYLDAIEAGKPISQVRGEISGSVDIWRYAAALARDLHGESYNTLGDGTLGVVLREAIGVVSIITPWNFPFLIVGQKLPFALAAGCTAVVKPSELTSGSTLLLGEILAEAGVPDGVVNIVTGTGADVGQHMSTHPHVDMVSFTGSTGVGKLTMANAAQTLKKVSLELGGKNPQILFPDADMDAFIDAAVFGAWFNAGECCNAGSRLIVHRSVVDAIVGRVADLSKKVIVGDPLDASTQVGAIITPQHLTKVGAYVDQARKAGAAIAHGGEVLDLGLGQYMGPTILAGVKADMAVAREEVFGPVLSVLSFDTVEEAISIANAVDYGLSAGVWSRDFDTCMTIGRKVRAGTVWMNTFMDGTPELPFGGYRQSGLGRELGRHAVEDYTETKTLNMHIGARTGWWMPQAK

SEQ ID NO: 11532 - protein, 187 aa, Neisseria meningitidis MC58
MTDLETKRLETQAMLENADLLFDQGQCRAALQKVADEITRDLGGKYPLLLPVMGGAVVFTGQLLPLLRFPLDFDYVHVSRYGDKLEGGAFNWKRMPDAEQIRGRHVVVLDDILDEGHTMSAIQAKLLEMGAASCRAAVFANKLIDKPKPIRADYVGLDVPNRYVFGYGMDAAGCWRNLGEIYALGGK

SEQ ID NO: 11533 - protein, 507 aa, Oceanobacillus iheyensis HTE831
MSGNQEVDVLSGKHEELANKLDDIKLYINGEFMDAEDRGTFDNISPFSNEKINSVASGQAADIDKAVQSAKKAFKGEWGNLKQVERLEYVYKIGDLIEQHTDEIAILESLDTGLPISQTRKQVSRSANNFRFYADTVKSQMYGEVYQVDDEFINYTVRSAVGVAGLITPWNAPFMLETWKIAPALATGNTVILKPAEWSPLTANRMAEIIDQAGLPDGVFNIVHGFGETAGDALVKHPDVQLISFTGETTTGSTIMRNGADALKRFSMELGGKSPIIVFEDADLERALDAATWGIFSFNGERCTANSRLYLHESIADEFIEKLKQRVWNIRVGDPLENNTQIGPLIKTEHYNNVKKYLKIAEEEGCEIISGVIPKELNRGNYVAPTILLNASNEMRVVQEEIFGPVIAVMTFNDETEVIEKANDVRYGLAGYVWTNDMKRGHRVAHAIDSGMLWVNSQNVRDLRTPFGGSKDSGIGREGGHYAFEFYTEQKIIHVAIGDHHIPQFGK

SEQ ID NO: 11534 - protein, 197 aa, Raphanus sativus
MGRKKLEIKRIEKKSSRQVTFSKRRSGLIEKARQLSVLCDASVALLVVSSSGKLYSFSSGDNLVRILHRYEKQHADDLKALLDLQSKSLSYGSHNELLELVESKLVESNVGVSVDALVQLEGHLETALSLTRARKTELMLKLVDSLKEKEKLLKEENKVLASQMEKNNLAGAEADNMEIARAQISDINLPVTLPLLN

SEQ ID NO: 11535 - protein, 305 aa, Nostoc punctiforme PCC 73102
MRNEWSSIISTVYPIVPGHEIVGRVTEVGSAVTKYKPGDLAAVGCLVDSDGTCLNCKAGLENFCPNQILTFNSPDKHLGGVTYGGYSDSIVVDERFVLRVPSNLDLAGAAPLLCAGITTYSPMRHWGVTEGKKVGLVGLGGLGHMGVKFAHAFGAHVVVFTTSPDKKEDALRLGADEVVVSRNADEMQKHAGSFDFILDTVSAKHDINAYLNLLRLDGNITLVGAPEKPLDVAAFSLIMARRSLSGSNIGGIPETQEMLDFCGKHNITADVEVIPIQKVNEAYDRLLKSDVKYRFVIDMASLKSE

SEQ ID NO: 11536 - protein, 197 aa, Brassica oleracea var. capitata
MGRKKLEIKRIENKSSRQVTFSKRRSGLVEKARQLSVLCDASIALLVVSSSGKLYSFSAGDNLVRILDRYGKQHADDLKALDLQSKALSYGSHNELLELVDSKLVESNVGGVSVDTLVQLEGVLENALSLTRARKTELMLKLVDSLKEKEKLLKEENQALASQKEKKNLAGAEADNMEMSPGQISDINLPVTLPLLN

SEQ ID NO: 11537 - protein, 169 aa, Hordeum vulgare
MAAAASSASSVHDFTVKDASGKDVDLSTYKGKVLLIVNVASQCGLTNSNYTELAQLYEKYKDQGFEILAFPCNQFGGQEPGTNEEIVQFACTRFKAEYPIFDKVDVNGDNVAPVYKFLKSSKGSLFGDNIKWNFSKFLVDKDGNVVDRYAPTTSPLSIEKDIKKLLASS

SEQ ID NO: 11538 - protein, 131 aa, Glycine max
  unsure (1)..(131): unsure at all Xaa locations
MAPLMISSPAATTGNRALAYVGAPFTDLKYMAGLRTRNTNTDITSIASNGGRVQCMQAWPPIGKKKFETLSYLPDLDDAQLTKEVAYLLRNGWIPCLAFELXTGSLYREHITSPGYYDRRYWTCXKLSMFG

SEQ ID NO: 11539 - protein, 485 aa, uncultured bacterium 582
MREVKGYWQNYIDGAWVDGGAGRIDVINPGTGEKIAEQALADARDVDLAVQAAKRVHSTGVLTDMRPVERGRIVQAMGRYLLEHLEEIAALLSLEQGKPIWEARIEVTGAARYFEYYGNQAETLEGRSIPLGAGYFDFTTDEPYGVSAQIIPWNFPVEMTARSLSAALTTGNTVVVKPPEMTPLSNAWFAHAAEAVGLPKGAVNLVCGYGHQAGAALSAHPDINQVVFTGSVATGIAIASAAAKNVVPCVLELGGKSAAIVHSDADLVAMETDIRKGIFINAGQVCSAMSRIIVHESRHDELVQRAVSIAESLSVGPGADRQTFGANMGPMVSVKQRDRAAGLVSEAVSQGAKLVTGGRAMNIPGAFLQPTVLAEVTPEMTIAQTEVFGPVLSVLRFREDAEAIEIANGTDYGLVGGVFTRDLDRATQVARKIRAGQVFVNEWFAGGVETPFGGYGKSGYGREKGREALWNYVQTKNIAIKLKRT

SEQ ID NO: 11540 - protein, 464 aa, Arabidopsis thaliana
MMMRAVIRRAASNGSSPSLFAKSLQSSRVAASSPSLLSGSETGAYLHRGNHAHSFHNLALPAGNSGISRSASLVSSTLQRWVRPFSAETGDTVEAVVPHMGESITDGTLATFLKKPGERVQADEAIAQIETDKVTIDIASPASGVIQEFLVNEGDTVEPGTKVAIISKSEDTASQVTPSQKIPETTDTKPSPPAEDKQKPRVESAPVAEKPKAPSSPPPPKQSAKEPQLPPKERERRVPMTRLRKRVATRLKDSQNTFALLTTFNEVDMTNLMKLRSQYKDAFYEKHGVKLGLMSGFIKAAVSALQHQPVVNAVIDGDDIIYRDYVDISIAVGTSKGLVVPVIRGADKMNFAEIEKTINSLAKKANEGTISIDEMAGGSFTVSNGGVYGSLISTPIINPPQSAILGMHSIVSRPMVVGGSVVPRPMMYVALTYDHRLIDGREAVYFLRRVKDVVEDPQRLLLDI

SEQ ID NO: 11541 - protein, 379 aa, Ustilago maydis 521
METAAAQNLLIANSYAKVEKVGEGTYASVFLARSINTGQKVAIKKIKIVSNENGMDVTAIREVKFLKELNHPNVIKLVDVFSSGSRSPSLNLVLEFLDTNLEALIKDRTLIFTQADIKSWMAMLCRGLEYCHRYWVLHRDLKPNNLLISPQGELKIADFGLAREHGDPGARMTHQVVTRWYRPPELLLGSRAYSSAVDMWSVGCIFAELMLRVPYLPGESDADQLITIFKALGTPTDKDWPGHKSLPEYTAFEQYPKSNLADLFLAASPEALDFLQKMLLFDPLKRLSANQALHHAYFKQGPPPTPFKQLPRHPTKALDSGDPAAHPLLSDSKEKNEVREKQQNQAHGNGNVNGNSRKRPFDAKEIEERRRLARKLAFA

SEQ ID NO: 11542 - protein, 484 aa, Dechloromonas aromatica RCB
MKQILNFINGEFVATGKQFEKRTPLDNSLIGMVHEAGKAEVDAAVKAAHDALEGPWGKMTVVERTDILNKVADEITRRFDEFLEAECADTGKPKSLASHIDIPRGAANFKIFADVIKNAPTEFFEMATPDGKGALNYAIRRPVGVVGVVCPWNLPLLLMTWKVGPALACGNTVVVKPSEETPSTATLLGEVMNACGVPKGVYNVVHGFGPNSAGEFLTTNQNVNAITFTGETRTGAAIMKAAADGARPVSLEMGGKNPAIVFADANLDVAIEATLRSCFSNCGQVCLGTERVYVERPFFETFVAALKAGAEKLKLGVPSDPSANMGPLVSQEHRNKVLSYYKKAVEEGATVVTGGGIPDMPGELANGAWVQPTIWTGLDDNAAVVREEIFGPCTTVMPFDSEDEVIKRANNTTYGLAASVFTQDVNRAHRVAGRIEAGLVWVNSWFLRDLRTPFGGAKQSGIGREGGVHSLEFYTELKNVCIKL

SEQ ID NO: 11543 - protein, 317 aa, Desulfovibrio vulgaris subsp. vulgaris str. Hildenborough
MYHDTTTAVLFPGQGSQEPGMGRDLAEASAEAMALWKKAENISGLPLREIYWDGDDAAMADTRNLQPALTVVNLALWQHVAGRLRPACMAGHSLGEYSALAAAGAIAADAAIELVSLRGRLMAEADPSGEGGMAAVLKLSLADVEDVVREAREATGACLIVANYNTPAQFVVSGAKSAVTDAAARVKERKGRAVPLAVSGAFHSPLMDEAARELARALARVTWNRPRYAVYCNVTATAQTDGASLADIMPRQMTSSVRWIETISSQWTDGIRSWVEVGPKGVLTKMVKPILSTCGVTDDAYMVAGIANLEQAQTFFA

SEQ ID NO: 11544 - protein, 470 aa, Chloroflexus aurantiacus
MSEQVYDLVVLGSGPGGYVAAIRAAQLGMKTAIVEVNALGGVCLNIGCIPTKALLHSADLLEEVKEAKRFGITVENVAFELAGAMKHKDTVVKQSTDGVAFLMKKNKIEVVAGRGRLIGRGQVHVQLNEGGERVLAAKHIIVATGGRPRPFPGIPFDGERVLSSTDMLTLKTVPSSLLAIGAGAIGVEFASMFRSFGSDVTIVEALPRIVPNEDEEVSAELTKAFQRRGIKTLAGAKVEGVDVGGEKVVVTVVDSSGKPQQIAVEKLLVSIGIAPNTENIGLEEVGVKVNNRGFIETDGFLRTSAEGVYAIGDCTANTPWLAHKASAEGILAAEHIAGHHVTPIDYGKIAACTYCNPEIASVGLTEAKARERGYQVKVGKFPFSANGKARVLGQTRFGFIKLVADAQYDEILGVHMIGPRVTEMIAEGGIALSHEATGESMMQTIHAHPTLYEAIGEAAHALVHGAPIHL

SEQ ID NO: 11545 - protein, 75 aa, Archaeoglobus fulgidus DSM 4304
MGIKVKFPFEYTRFEKARIIGARALQIAMGAPVLIETDKTEPLEIALEEFNRGVIPITVRRRRNEFVWLERYDLF

SEQ ID NO: 11546 - protein, 366 aa, Archaeoglobus fulgidus DSM 4304
MAPSGASTGSGEAVVVSPYRYEEIEEEVSKAIIGMSVFDQESVDEALRELDGTDNFSRIGGNFAITASLAVAKAAAEILGLPLYAYVGGVFAKELPYPLGNVIGGGRHAEGSTSIQEFLVIPVGAKTFFEAQRANAAVHKQLKKIFKERGIFAAKGDEGAWAAQISDEQAFEILSEAIQRVEDELGVKVRMGIDVAATELWDGERYVYSDRKLTTEEQIAYMAELADRYDLLYIEDPLHEKDFEGFAELTKQVKCMVCGDDIFVTNPEIIKKGIEVGAANTVLIKPNQNGTLSGTAKAVKIAKDNGYSVVVSHRSGETEDETLAHLAVAFNAKLIKTGVVGGERISKLNELIRIEELMDKPRMVMI

SEQ ID NO: 11547 - protein, 194 aa, Suillus bovinus
MHNIKCVVVGDGAVGKTCLLISYTTNAFPGEYVPTVFDNYSANVMVDGKTISLGLWDTAGQEDYDRLRPLSYPQTDVFLICFSLVSPPSYENVRTKWWPEISHHAPSTSVVLVGTKLDLREDPATIEKLRDRRMQPIQYTQGVSMARDIGAVKYLECSALSQKGLKTVFDEVIRAVLNPPPKEKKRSGRGCVIV

SEQ ID NO: 11548 - protein, 543 aa, Magnetococcus sp. MC-1
MSIQTKITTPFDDQKPGTSGLRKKVKVFQQPNYLENFVQSIFDTLEEFQGKTLVLGGDGRYHNREAIHTILHMAAANGFGKVLVGRGGVLSTPAVSHLIRKYDAFGGIVLSASHNPAGPDGDFGIKYNVSNGGPAPESITNAIFTHSKAITQYRIWSDTEVDLDYLGDSEIGNMVVRVIDPVYDYAQLMEELFDFEAIRALLKGGFRILFDAMHAVTGPYAREILENRLGAPAGTVLNGVVKDDFGGGHPDPNLTYAADLVARMWADDAPDFGAASDGDGDRNMILGRKFFVTPSDSLAVLAENGTCAPGYARGIVGVARSMPTSQSVDRVAEKKNFACFETPTGWKFFGSLLDAGKATLCGEESFGTGSDHVREKDGLWAVLFWLNILAHRKTSVEAVVKDLWAIYGRTYYARHDYEDVDSAAASTLMSELRANFATLTGQVHEGLTIKLADEFGYTDPVNGESTIKQGVRILFVDGSRIVFRLSGTGTSGATLRIYLERFEPNPSLQHKDAQEALADLIRIADTLAGIKQHTGRQAPTVIT

SEQ ID NO: 11549 - protein, 300 aa, Triticum aestivum
GGPRSQSPPNLAVGAGYIGLEMGSVWNRLGSEVTVVEFAPDIVPSMDGEIRKQFQRMLEKQKFKFMLKTKVVGVDTSGSGVKLTVEPAAGGEQTVIEADVVLVSAGRVPYTAGIGLDAIGVETDKGGRVLVDNRFMTNVKGVYAIGDAIPGPMLAHKAEEDGVACVEFIAGKEGHVDYDTVPGVVYTHPEVASVGKTEEQVKASGVAYQVGKFPLLANSRAKAIDDAEGMVKVISEKETDRILGVHIMSPGAGEIIHEAVLALQYGASSEDIARTCHAHPTVSEALKEACMNTYDKAIHM

SEQ ID NO: 11550 - protein, 420 aa, Oceanobacillus iheyensis HTE831
MVEVKLHDIGEGMTEGDILTYFIQEGDQVEEDQPIVEMQTEKMVAEITAPAKGTVKEIFIAEGTTISVGTTIMTIESEDAMEKTKSSEIQRAEGNQATQLSASDNQHTETKQKNGPKRIKASPYTRKVARELDVDIELVEGTGKDGRIMIEDVQQFSQNRESAATKVKPEVEQLQNQFFQETEEQVDAKEEEAEIIPFKGRRKQIAKKMTTSIYTIPHVHHMEEVDMTELLEFRKEIKSDADISVAAFFIKALTIALKEYPIFNAKLHEEKEEIRLEKGIHMGIATDTEEGLIVPVIQSADIKSIRTIHREMKELMKKAKENTLSLKEMTGSTFTISNVGPMGSIGATPIINYPEVALMAFHKTKKAPVVNDNDEIVIRSMMNVTLTFDHRVTDGGNAIAFTNKFKALIENPRLLLIELR

SEQ ID NO: 11551 - protein, 154 aa, Zea mays
MLMGFPVGYSETPKLLLHLLFLLDHLRRLSSWLLRLAGAADADADTDAGHPRHPCAAAQRLEEHSPALRFDSLSCGSGGGVTAPRPLPEGCCVCLGDFHAAAEVRRARGCRHVFHRACLDRWAAHGHRTCPLCRTPLLPPLPLPLPLPLPLPPS

SEQ ID NO: 11552 - protein, 275 aa, Escherichia coli
IGQALALLLKTQLPSGSELSLYDIAPVTPGVAVDLSHIPTAVKIKGFSGEDATPALEGADVVLISAGVARKPGMDRSDLFNVNAGIVKNLVQQVAKNCPKACIGIITNPVNTTVAIAAEVLKKAGVYDKNKLFGVTTLDIIRSNTFVAELKGKQPGEVEVPVIGGHSGVTILPLLSQVPGVSFTEQEVADLTKRIQNAGTEVVEAKAGGGSATLSMGQAAARFGLSLVRALQGEQGVVECAYVEGDGQYARFFSQPLLLGKNGVEERKSIGTLSA

SEQ ID NO: 11553 - protein, 326 aa, Coxiella burnetii RSA 493
MTEIKKLIVLTSGGDAPGMNAAIRAVVRTALHYQFEVYGATAGFAGLVNGQVVPLNSRAVANCIQRGGTILKTGRFENFRFKAVRDKAREFLKKLQIDAMIVLGGNGSFAGASKLYQEGGPQMIGIPCTIDNDIQGTDYCIGFDTACNTALQAIDKIRDTAFSHERNFLIEVMGRSSGFIAVNVGIAGGAEIIALPEFHVDIDTLTQKIKKQHGKKSASIIVAAEANQPGHSFEVAKQIKEKTGIEYRVCVLGHTQRGGTPTVKDRVLASLMGAQAIEALKKGLTEKMIAYQNGKIAVAPLPDPDNGTRYFADEALLRVNNIICAM

SEQ ID NO: 11554 - protein, 273 aa, Bacillus anthracis str. Ames 0581
MSAFLGELIGTALLIVLGGGVCAGVSLKKSFAKDSGWIVITMGWGLAVAVAAYVVGSISGAHLNPALTIGLAFKGAFPWGDVPGYIAAQMIGAIIGAVIVYLHYLPHWKETEDPGTKLGVFATGPAIPNTFANLLSEMIGTFVLVFGILAIGANKFADGLNPFIVGFLIVSIGLSLGGTTGYAINPARDLGPRIAHFFLPIAGKGGSNWKYAWIPVVGPILGGSLAGLFHQVVFEGKQNAALIYVIIATVIVLAISYMTSKKSGSNTNSRKVA

SEQ ID NO: 11555 - protein, 559 aa, Mesembryanthemum crystallinum
MGSTEFSWKLADHPKLPKGKTLAMVVLDGWGEASANQYNCIHVAETPTMDSLKQGAPEKWRLIRAHGKAVGLPTEDDMGNSEVGHNALGAGRIYAQGAKLVDLALESGKIYDGEGFNYIKESFETNTLHLIGLLSDGGVHSRLDQLQLLLKGSAERGAKRIRVHILTDGRDVLDGSSVGFVETLENDLAQLRAKGVDAQIASGGGRMYVTMDRYENDWSVVKRGWDAQVLGEAPYKFKNAVEAVKTLRQEPKANDQYLPPFVVVDESGKAVGPIVDGDAVVTLNFRADRMVMLAKALEYEDFDKFDRVRFPKIRYAGMLQYDGELKLPNRYLVSPPEIERTSGEYLVHNGVRTFACSETVKFGHVTFFWNGNRSGYFKPEMEEYVEIPSDSGITFNVQPKMKALEIAEKARDAILSGKFDQVRVNLPNSDMVGHTGDIEATVVACKAADEAVKMIIDAIEQVGGIYVITADHGNAEDMVKRDKKGQPAMDKNGNIQILTSHTLEPVPIAIGGPGLTPGVRFRNDIPTGGLANVAATVMNLHGFEAPSDYEPTLIEVVSN

SEQ ID NO: 11556 - protein, 430 aa, Xanthomonas axonopodis pv. citri str. 306 [sequence omitted]

SEQ ID NO: 11557 - protein, 409 aa, Coxiella burnetii RSA 493
MNGFVVSAVLIGAFLGALFSGHLADYIGRKRLLIIDALIFIVGTAISSMTVSISWLVIGRIIVGIAIGIASYSAPLYISEISPPHRRGALVSLNQLAVTIGIFLSYVVDYYFARHDAWRSMFAAGVIPAALLLLGMIVLPYSPRWIFSRGHEEKALWILRKLRGHGPHAEQELEHIRASLQQQKGDWRTLFSKIIRPTLFIAIGLAVFQQVTGINTVLYYAPTILKMTGFQASQTAILATMGIGAVLVIITIISLPLIDSLGRRPLLFIGVGAMTVSLLVLSWSFKVHGHMDYMRWIAFGSLLVFISGFSISLGPIMWLMFSEIFPLRVRGLGASIGACTNWASNWLVTITFLTLIEYLGPSGTFFIYFIISVITLIFIYTSVPETKGVTLEQIEENLYAGKDMRYLGK

SEQ ID NO: 11558 - protein, 187 aa, Zea mays
  unsure (1)..(187): unsure at all Xaa locations
MDMPVASHIHYHPSWQATIRSSPSNREAAMATRRSRATRLEADLTGKNVYXRADLNXPLDDAQDITGDTRIRSSVPTIRLLLXKGAKVILARHLGRXNGVPPRTDLKPLDPRLCDLLGVRFQMLDDCLGQEQVNCADALPQRXSSVPIESTWLPEDENNQSVCAPKLSSVADLDATEAIGTMHRAHT

SEQ ID NO: 11559 - protein, 417 aa, Streptococcus mutans UA159
MATEIVMPKLGLTMTEGLINQWLVKEGDTVAAGDPVLEISSEKLTSEVEAPEAGVILKIVKGEGETVPCKQIIAWIGQEGEAVPDAAGDAPEVDTEAESEVASAGQTVVPEESRTVSAAPVAEKHEDGRIFITPLARKIAKEKGLDITYIKGTGGNGRITRRDVEAFNPASIPTAEPVTALSAPTNVNYGVGLTGIRKVIAERMMSSIHSSAQLTLHRKADVTPLMAFRQDIKTKVNAPLENGEIGITTLLTKAVTKALKDYPEANAWYAGGQYEEKEDIHIGMATALSDGLVVPVIRHADKLTLSDLGRTIKEEAEQVRKGTLDPSLYSGSTFSITNLGAQGIEYFTPILNAPEVAILGVGAIQKALTLDENGQVAEKQFLPLSLTFDHQVLDGAPAAEFLGAVISYLEDAYSLVF

SEQ ID NO: 11560 - protein, 274 aa, uncultured bacterium 582
MKAIIRKAVFPVAGFGTRFLPVTKAMPKELLPVVNKPLIQYAAEEAIAAGCDTLIFVTGRNKRAVEDHFDSNLELEAALRAKGKHAEAESLRNIVPPHVKCIFVRQPEQLGLGHAVLCAERAVGDEPFAVLLADDFLIGAVPGVMTDLIEAYTLSGKSQISVMQVDGPQISQYGVVRPGAGVNEVAGLVEKPALQDATSNLASIGRYLLTPDVFDILRDQSPGYVGEVQLVDAIDTMAAGAAVCQVPLTGLRFDCGSLQGYLDAIKYVTDHKLY

SEQ ID NO: 11561 - protein, 445 aa, Streptococcus mutans UA159
MAKYDLLIIGAGPGGYIAAEEAARLGKKVAVVEKKDIGGTCLNVGCIPSKAYLQHSHWLLSMQEANKYGISTNLESVDFAKLVNRKDQVVSTLQGGIHTTFKSLKIDYYEGQAQFLKDKSFMVNGEKISGKDVILATGSHPFIPQIHGINSVNYLTTDSFFNLKVLPEKLVIIGGGVIAIELAFAMQPLGVNVTVIEIAPQILLTEDKAARAIIRKKLKTMGAHIFEAAKIEEVHAQSVILEGDGAQEFDQLLVATGRKPNTELAQEMGLKLTERGFVKVDDYYETSTPHVYAIGDLTESYMLAHVASMEGIKAVRAICRQAQDPVDAQGVPRSLYTNPEVASFGLSEEEAKEQGYDVLVEQLPFSFNGRAIASTETQGFVKLISERRYHQILGAVIVGEHGTDLLQQLILLRQAEGTFDQVVDAVYAHPTISELIQEVAKRIVQ

SEQ ID NO: 11562 - protein, 437 aa, Ustilago maydis 521
MAESNNTDLPTATATSYKPGEATMLALTFHGTQDVRLTEVRTPTITDPTDVVVRSTGVTICGSDLHLYHNKIPDLKKGDILGHEGTGVVEHVGAQITKFKVGDRVVASFSIACGTCEQCKAKLFTMCDRTNTSAKMDELYGQKLGGILGYSHLLGGYAGTQAEYFRVPFGDVNCFHVPDSVSDETALLMADVTLTAYHSVVDIKFQEGETAAIWGAGPIGQLIAQWLLKVFGARKVMLIDNVAPRLHWAQERLNGLETINFDQTPQVAEEVMHKVAGGVDVSFDAAGFRYAKSLKHQTMQTLGVETDTPEIINEAIRATRKFGRISVIADYVGQCNEFLIGAMMEKGILLKGNGQAPVQAYMEQVFEDYIVPGKFDPTLILTHRFKLEDIAKVYKAFDEKRIDEHKGGIPIIKTFIETKASKPRAASTPELSSVPGF

SEQ ID NO: 11563 - protein, 447 aa, Agrobacterium tumefaciens str. C58
MGLFSGTRPRRACPRRRHGGLIMAEFVITMPDVGEGVAEAELVEWNVKPGDIVHEDMVLAAVMTDKATVEIPSPVAGIITWLAVTVGNTVPVKAPLVRIETDVAAAAPNGSAPEAEAPSRMTEEEAPADMTEAPPPVETQPAARQTEEAPSAPVAEPHHKPLASPAVRQRADDLDIDLIKVKGTGPDGHITHADLDGFLTVRARPERPEPMTPHDSAVEEVKVTGLRRKIAEKMVLSVSRIPHITYVEEIDVTELEDLRATMNGNRRSGQPKLTILPFLMRALVKAVADHPGMNAIFDDEKGVVSHYEAVHIGIATQTPAGLTVPVVRHAETLGLWDCAEEVARVAEAARTGTAHREELMGSTITISSLGALGGVVSTPIINHPEVAIIGVNKIMTRPVWDGNRFVPRKMMNLSSSFDHRVVDGWDAAVFIQAVKALLEKPALIFIE

SEQ ID NO: 11564 - protein, 758 aa, Salmonella typhimurium LT2
MSISRRSFLQGVGIGCSACALGAFPPGALARNPIAGINGKTTLTPSLCEMCSFRCPIQAQVVNNKTVFIQGNPSAPQQGTRICARGGSGVSLVNDPQRIVKPMKRTGPRGDGEWQVISWQQAYQEIAAKMNAIKAQHGPESVAFSSKSGSLSSHLFHLATAFGSPNTFTHASTCPAGKAIAAKVMMGGDLAMDIANTRYLVSFGHNLYEGIEVADTHELMTAQEKGAKMVSFDPRLSIFSSKADEWHAIRPGGDLAVLLAMCHVMIDEQLYDASFVERYTSGFEQLAQAVKETTPEWAAAQADVPADVIVRVTRELAACAPHAIVSPGHRATFSQEEIDMRRMIFTLNVLLGNIEREGGLYQKKNASVYNKLAGEKVAPTLAKLNIKNMPKPTAQRIDLVAPQFKYIAAGGGVVQSIIDSALTQKPYPIKAWIMSRHNPFQTVTCRSDLVKTVEQLDLVVSCDVYLSESAAYADYLLPECTYLERDEEVSDMSGLHPAYALRQQVVEPIGEARPSWQIWKELGEQLGLGQYYPWQDMQTRQLYQLNGDHALAKELRQKGYLEWGVPLLLREPESVRQFTARYPGAIATDSDNTYGEQLRFKSPSGKIELYSATLEELLPGYGVPRVRDFALKKENELYFIQGKVAVHTNGATQYVPLLSELMWDNAVWVHPQTAQEKGIKTGDEIWLENATGKEKGKALVTPGIRPDTLFVYMGFGAKAGAKTAATTHGIHCGNLLPHVTSPVSGTVVHTAGVTLSRA

SEQ ID NO: 11565 - protein, 808 aa, ASPERGILLUS NIDULANS FGSC A4
MATPPPEAPSVLKEGKPQLPPSPNGDSSSDFDRAGVQPPVTDSIPIPPTDGAKTTEKDAKNISMNGHASGQENGIVNTASPPKSPAPPATTTSIAQDGPVAGNSAVDDKPATPGNVPKQPTNGAGADDNSSKATPLSQSIPQDSSATPAGVQSPQSTAAVKTELPHHPHAAVQPEKPSTVDVSSAANAQPSPAIDQEMRDAPASPTKLSREREVEPNDEPSAKRTKIDTQGSAELKAPELPTPVTDTPMTTGNGDGPLTRVQHRFLVKAIQSLKRLHDARFYKEPVDPVKMAIPTYFDVIKEPMDLGTIEQKLKNNVYTSPQSVFNDFELMVRNAHVFNGPDHIVSVEGKRLQATFEKQMLNLPKADEVEEKKPKKAASSKTSNARRDPRPSAGSNAVRPTGGSPQATTFALGPEGLPLIRRDSTNADGRPKRSIHPPKRDLPYSTKPKKKKFQWELKFCREVLDELHKTKHYSYAFPFYYPVDPVALNIPTYHSIIKKPMDLSTVSSKLNTGQYENAKEFEMDIRQIMKNCFKFNLKGDPIYMAGEKLEEVFNAKWAQKESYLAAHEPPPEQHSAASSSEESDEDEEGSDDEEDEAINRLKQQIADMSQQLEAMTQKKKKTPPKKAKSKKKDSKKVGATGAGRKDKKGGGKSSKPEKPRYVSYHDKQIISNGISSLPDKKMQEALKIIQSNVPALKGTQETEIELDIDELPNDVLWMLLKFVKKNAPHVVEEDEASSPVAPNAAPPKPKKNKPMSKYEQEAQINMLESNLSRFQGGGHGRSPEPVPSLEANDSSGDSEDDSEESEEE

SEQ ID NO: 11566 - protein, 290 aa, Escherichia coli
MKGIILAGGSGTRLYPITMGVSKQLLPIYDKPMIYYPLSVLMLAGIQDILIITTPEDQQGFMRLLGDGSQFGINLTYAIQPSPDGLAQAFIIGENFIGNDTVCLMLGDNIFFGQGFTPKLRDAAERTSGATVFGYQVMDPERFGVVEFDRNFKALSIEEKPANPKSNWAVTGLYFYDNNVIDIAKCIKPSKRGELEITAVNEVYLRNNNLTVELLGRGFAWLDTGTHDSLIEAGSFVETVQKRQGMMVACPEEIAWRNGWLNHDELQAKGEFLKKNHYGQYLLRLIKSHE

SEQ ID NO: 11567 - protein, 485 aa, Glycine max
MASAASPTTFSLLHSATPSSSSTATSASPSPSRVQLTSSLRARPLRRLGFAAADPLLAASVAARVAAVRGGGKGARGVVSMAKKSVGDLSAADLKGKKVFVRADLNVPLDDNQNITDDTRIRAAIPTIKHLIQNGAKVILSSHLGRPKGVTPKYSLAPLVPRLSELIGIQIVKAEDSIGPEVEKLVASLPDGGVLLLENVRFYKEEEKNDPEHAKKLASLADLYVNDAFGTAHRAHASTEGVTKYLKPSVAGFLLQKELDYLVGAVSNPKRPFAAIVGGSKVSSKIGVIESLLEKVDILLLGGGMIFTFYKAQGLSVGSSLVEEDKLDLATSLLAKAKEKGVSLLLPSDVVIADKFAPDANSKVVPASAIPDGWMGLDIGPDSVKSFSEALDTTQTIIWNGPMGVFEFDKFAVGTEAIAKKLADLSGKGVTTIIGGGDSVAAVEKVGVASVMSHISTGGGASLELLEGKELPGVLALDEAVPVAV

SEQ ID NO: 11568 - protein, 407 aa, Archaeoglobus fulgidus DSM 4304
MMIDGLPTLDDIPYRGKHVLLRVDINAPIVNSTILDTSRFESHIPTIEALEDSKLVLLAHQSRPGKKDFTSLESHASTLSKLLGKRVEYIDEIFSKGVLRRIKEMENGEVILLENVRFYSEEQLNRSAEEHAECHMVRKLSTAFDLFVNDAFSASHRSHASLVGFVPVLPSVVGRLVENEVTALSKPLKGEGRKIFVLGGAKIKDSVKVLKNVLENNIAEKVVLTGVVANYFLMLKGYDIGEVNRKVVEDNKEDVSDEEMINILKKYSDKIILPIDLGIEKDGVRVDIPLEKFDGKYRIMDIGLETVNQLSEIIPKYDYVVLNGPAGVFEDERFSLGTYEILRAATRAGYSVVGGGHIASAARLFGLSDKFSHISTAGGACIRFLSGEKLVALEVIKEYWAKKWGKS

SEQ ID NO: 11569 - protein, 349 aa, Trichodesmium erythraeum IMS101
MSSSKITFYHSIRNLGINQNHWYAVARSIELQSQPLSITLWHQTIVLYRGCSGKVYGLEDICPHRFVKLSSGRVIADELECTYHGWRFESNGKCSHIPYLASNQKLPSCQIRTFPVQELHGFIWLFPGDKSLANLISPLEIPEWDHLNYIATISVIKCRAHYSYLVENLMDMYHGHLHQNWQAWAAAKLIDLSENDHRVDAYYEAQSYYKIDKIWSISQLIFPSLRQLHPEPLNVSYIYPNWVSNLGKDFKIYCLLLPINERETQAYLIHFTSLQAFWRLHKLPEWFRRFVKRILFGSAQKLLDGLVQQDVEMIEEEQQAYLKNPQQRNYELNRALVSTQRLIRKQAIK

SEQ ID NO: 11570 - protein, 937 aa, Ralstonia eutropha JMP134
MNALTRAERALVESTEPSVTFTLNGREVSAQPGESLLKVAQREGFDVPHLCYKDGLDTAGNCRACMVEIQGERVLAPSCCRYPSQGMTVQTESERALRAQRTVLELLQSDMPETDYTRHNELDQWSARLDVGKPRFAPRERLAADLSHPAIAVNLDACIQCTRCVRACRDEQVNDVIGLALRGDAARIVFDMDDPLGASTCVACGECVQACPTGALMPARDAALAVPDQQVDSVCPYCGVGCQLTYNVKDNRILYVEGRDGPANHERLCVKGRYGFDYVQHPQRLTMPLIRREGVPKRGDFVMDPDHVMDVFREATWEEALALASGKLAQIRDTHGKRALAGFGSAKGSNEEAYLFQKLVRTGFGSNNVDHCTRLCHASSVAALLEGIGSGAVSNPVMDVDRAELVIVIGANPTVNHPVAASWIKNAVKNGTKLVVADPRRSDLARFAWRFLQFTPDADVALLNAMMHVIVSDGLVDQHFIDSRTIGFEELQRNVAAFSPELMAPICGIDAQTIREVARAYATSKASMILWGMGVSQHVHGTDNARCLIALALMTGQIGRPGTGLHPLRGQNNVQGASDAGLIPMMYPDYRRVDDPDAIASFEALWGMPLDRQPGLTVVEIMDAIGRGEVRGMYIMGENPAMSDPDAEHAREALAALDHLVVQDIFLTETAYLADVVLPASAFPEKTGTFTNTDRTVQLGRQALLPPGQARQDLWIIQQMAQGLGLDWHYGNVAEVFDEMRQAMPSIGGVTWERLEQDGAVTYPCHAEGDPGEPVIFTDRFPTPTGRGRFVPADIIPADERPDTDYPMVLITGRQLEHWHTGSMTRRAGVLDAIEPDAVALVHPLDLGLLGGQPGDVITLASRRGEVSLYARADAGTPRGAVFVPFCYYEAAINKLTNAALDPFGKIPEFKYCAIRMTLGGVAPAQSSYGGGKVLGA

SEQ ID NO: 11571 - protein, 475 aa, Zea mays
MDMALASKASPPPWNATAAEQPIPKRDKAAANDSTYLNPQAHDSVLGIILGGGAGTRLYPLTKKRAKPAVPLGANYRLIDIPVSNCLNSNISKIYVLTQFNSASLNRHLSRAYGSNIGGYKNEGFVEVLAAQQSPDNPNWFQGTADAVRQYLWLFEEHNVMEFLILAGDHLYRMDYEKFIQAHRETNADITVAALPMDEKRATAFGLMKIDEEGRIIEFAEKPKGEQLKAMMVDTTILGLDDVRAKEMPYIASMGIYVFSKDVMLQLLREQFPEANDFGSEVIPGATSIGKRVQAYLYDGYWEDIGTIAAFYNANLGITKKPMPDFSFYDRFAPIYTQPRHLPPSKVLDADVTDSVIGEGCVIKNCKINHSVVGLRSCISEGAIIEDSLLMGADYYETEADKKLLAEKGGIPIGIGKNSCIRRAIIDKNARIGDNVKILNADNVQEAAMETDGYFIKGGIVTVIKDALLPSGTVI

SEQ ID NO: 11572 - protein, 295 aa, Oceanobacillus iheyensis HTE831
MRTIKKAIIPAAGLGTRFLPATKAMPKEMLPIVDKPTIQYIVEEAIESGIEDIIIVTGKGKRAIEDHFDHNFELEDNLVKKEKFDLLDKVNHASSVDLHYIRQKEPKGLGHAVWCARKFIGNEPFAVLLGDDIVRADTPGLRQLIEQYEETQSSVVGVQQVPDTETHRYGIVDPSMIEGRRYKVNHFVEKPAQGTAPSNLAIMGRYVFNPEIFQFLDKQQIGAGGEIQLTDAIQMLNEIQPVYAYDFLGKRYDVGEKLGFVKTTIDLALENAEIKDELFSYLEEKVTEKAIKTNY

SEQ ID NO: 11573 - protein, 498 aa, Triticum aestivum
MAMATAMAATYGAPITAPAPAAFSPRRAAGGRRVRAVTARPRPLFSPRAVSDSRNSQTCLDPDASTSVLGIILGGGAGTRLYPLTKKRAKPAVPLGANYRLIDIPVSNCLNSNVSKIYVLTQFNSASLNRHLSRAYGNNIGGYKNDGFVEVLAAQQSPESPDWFQGTADAVRQYLWLFEEHNVMEFLILAGDHLYRMDYQKFIQAHRETDADITVAALPMDEERATASGLMKIDDEGRIVEFSEKPKGEKLKAMMVDTTILGLDSERAKELPYIASMGIYVFSKDAMLRLLRDNFPSANDFGSEVIPGATEIGMRVQAYLYDGYWEDIGTIEAFYNANLGITKKPVPDFSFYDRSAPIYTQSRYLPPSKVLNADVTDSVIGEGCVINHCTINHSVVGLRSCISEGAVIEDSLLMGADYYETENDKKVLSESGGIPIGIGKNAHIRKAIIDKNARIGENVKIINVDDIQEASRESDGYFIKSGIVTVIKDALIPSGTVI

SEQ ID NO: 11574 - protein, 579 aa, Agrobacterium tumefaciens str. C58
MTAGVFYMPRPGNRLKETISALRRRSANFFPTASIGTYLVVMATVITLPLILFVGYLMLRLEAEKRDDLQRETIEDVRVVSRNIDRRLQEIATSLNLLSQFPELENGNLAAFQGRVAESLKREGLYALLATKDGQQRLNTRVPYGQPLGKIPAEANLAKAIESRRITVSDLFFGSTSKEWVFNITMPLDPELGSAGDALILTQNASDLSRLIPTENLPRHWAVAIIDGTNRVVVSSAQDEAEVGKPFVNPAILSEMQAFSGNFFDGKGNLYAYAQLPGWQWKTVMWGPLAASQAALIDTWRQMMIGSLVLVLIAIGGAYLVGRQLRSSIRDLTHMAERIGEGEIVAPVDTKIKEANQVAIALSNASFDRSQSEERLQLLLHELVHRSKNILTLVQAMIRQLGRENKSIPEFQKEVDHRLRGLGMSIRALAEVQWQGLPIRKLIETHLDVFGTVVERFRLEGDDFMLSPEAAQNFGLVVHELTTNSIKYGALSVPPGKITVSWKALEKDGRQMLHLVWTETGGPPATEPSRKGFGTTVIKRHAEGAFGGNVTTEYRETGFEWSLEAPMRYFIPKRTEQTH

SEQ ID NO: 11575 - protein, 329 aa, Agrobacterium tumefaciens str. C58
MNLHRLAWHNAERDESELHDSLVLALLDSGETVMLQDWNRDYIFVANLPDVWKLPADSHPTDENLFGNDLSVRLAELKRDMNTAGSRGMLEVNAGNDRVFQFQVHSTFNQSNQVVMKTTIREVTAERRREQLLRSLLREVSHRSKNLLAIIQSLAGQTARFSLTKDDFLRKFRGRLHALAQSQDLITDSDWRGARIFELLRQQFDLYVPEYPNLIHIEGENLLLNPNGALYIGLAFHELVVNTVSHSGNLAYHPPISLQCRQDGDFYIVEWNEPMMPSKEPAEARRGSFGSVVLEKVVPSALGGVAEYKLTPERIVYSLKFPSGDAAVA

SEQ ID NO: 11576 - protein, 457 aa, Ustilago maydis 521
MVKATVIGAAGGIGQPLSLLLKQSSLVTDLALYDVVNAPGVAADLSHINTPSIVTGYLPADGGLGKALKGADIVVIPAGVPRKPGMTRDDLFNLISKIEHAYRESRESREMLRVSKLDFWEANYLVGPSAESRIVALSKKPAVGQRTQLANLEQAATRQRKQLLTTWLAIFIPPSHSATLVRTRMLHDRHGAIFDSTDAAPPTFLDTLASTCIRQTTTTINAGIVRDIAVGIAEHSPKAFVLVISNPVNSTVPIVAEVLKKKGVYDAKRLFGVTTLDVVRASTFISEAAGKPTESLNYRIPVVGGHSGVTIVPLISQSQPPISVDQAKIEQLTNRIQFGGDEVVKAKDGAGSATLSMAYAGARFAIAVLEAASGKSLAHPEMGYVDLTSDAAGAKQITAVIGNDTPFFSVPLQLGPSGVEKILPLGKLNDYESELIKKAVVDLNGNISKGVQFTANL

SEQ ID NO: 11577 - protein, 630 aa, Candida albicans SC5314
MILKIVFKLTSGPPNTNADGTDNGGGGGEEKSFKLTFTNRPTMNTIKDSLQTIVARSRTRVEGTSTPTPAPAPASTFGSAPQADSTRDSTSSSTPIPPTTSGTSTSSSLLSLAASQSLSDANLLKNFELQQKLLLEDRQLRDVFTKSVMQFKLSPQVFWSSRLNQLRTFALTISQHKGPYNVLSTIKPVATSDNQVNVNVTRDTINEIFTIYPIIKKAFDDLVPNKFNEGEFWSRFFNSKLFRRLRGDKISISNSRGDVVLDKYLYIDQNYQEKLQKSSTLENNGSGSGGGGGGGGSGNSEQGIQTLESPHVKKFLDLMGNQQDNSQKLGNRPDFTMRYDEDTNLDDDNKKPTLGNENEMIILMKNMNRLSSKMMSMSSTNGPEKPSETTIDGLSAAELNEYEEELDLHDLNDSENLQYIKLNINTDIAKGTKLDSYEGSNTNNKISQDELHKYLQSQTFQGQIELTETYTCKSEEIEKTSMEIAMLIKQNFRTFKLINKENDIAGTNIVPNSLIQEIITYNITIVEFLSHFWKIFLHGNNPGQLKKIFTSLKNCQSGLIELENKAIDQFKSMDILQKNQKLQDKVLKDFASCLQPMKIALDKACNEYVEAVKKAKPELNENGKRPLPEE

SEQ ID NO: 11578 - protein, 350 aa, Pseudomonas fluorescens PfO-1
MYTAIGYAAQTATTPLAPMKFERRSPRADDVAIEILYCGVCHSDIHQARNEWGIAVYPLMPGHEIVGKVTAVGANVTKHKVGDLVGVGCMVDSCRTCEACQSNLEQYCLEGPTMTYATPDRVDGSNTMGGYSDSIVVSEHFVVRIPEKLDLAAAAPILCAGITTYSPLKHYGVKAGDKVGILGMGGLGHMGIKFAKAMGAEVTLFTRSASKAEEGRRQGADHVIVSTDEEQMKAAAGRFDFLLDTIPVQHDLNPYLDTLRFDGVHILVGLIEPIDPPVHAAKLVLGRRVLAGSLIGGVAETQEVLDFCAEHNISCDIEMLDIRQINEAYARMIAGDVKYRFVIDMATLKL

SEQ ID NO: 11579 - protein, 251 aa, Betula pendula
MGRGRVELKRIENKINRQVTFAKRRNGLLKKAHELSVLCDAEVALIIFSNRGKLCEFCSSPSMLKTLERYQKCNFGAPEPNVSAREALELSSQQEYLKLKARYEALQRTQRNLMGEDLGPLSSKELELLERQLNMSLKQIRSIRTQCMLDQLTDLQRKEHMLNEANRTLKQRLVDGYHIDTVLQLDQSANDVGYGRQPAQTQDDCFFHPLCEPTLQIGYQHDHPMTVVTAGSGSVVTAGPSVNNYMSGWMP

SEQ ID NO: 11580 - protein, 322 aa, Ustilago maydis 521
MSKVTASGIISGNISTQRIKLNNGQEIPQVALGVYKAPNDGSTENACKWAFDAGYRHIDSAARYMNEESVGRALAEWTKENNVPRSEIFITSKLWDADHDKAAAAIEDSLKKLNVDYMDMYLMHSPGTMGAEKRLEAWKALEEAVDAGKIKTIGVSNFDVEELDHLLANCRIKPAVNQIESHPFFAHEELREACISRGIHIQAYSPMAQGQALDRPEIKTIASKHGKTPAQILLKWGLTHGNIILPKSLTKHRIESNAQLFDFELDSDDMDVLDNLDEGMKVGKLGPAGTSQPASPGGTRPGSRRSSGSGGLSGNKLQMSSS

SEQ ID NO: 11581 - protein, 172 aa, Lactobacillus delbrueckii subsp. lactis
  unsure (1)..(172): unsure at all Xaa locations
KSKRAIEDHFDSNPEXEDNLTEKHKDALLKLVRETTMSNTKVNLYFTRQPHPNGLGDAVNRARSFIAGXPFVVMLGDDLMRDKTPLTKQLIDCYDETHASTIAVMKVPHEEVNKYGVIDPIGETAPDLYNVKAFVEKPDIDKAPSDLAIIGRYLLTPEIFDMLDKQKAGAGG

SEQ ID NO: 11582 - protein, 491 aa, Mycobacterium avium subsp. paratuberculosis str. k10
MADPSGFLKYTHRELPKRRPVPLRLRDWREVYEEFDHGTLREQATRCMDCGIPFCHNGCPLGNLIPEWNDLVRTGRWRDAIERLHATNNFPDFTGRLCPAPCEPACVLGINQDPVTIKQIELEIIDNAFDEGWVQPLPPDKLTGKKVAVVGSGPAGLAAAQQLTRAGHSVTVFERSDKIGGLLRYGIPEFKMEKRVLDRRLDQMRAEGTEFRAGVNVGVDITADQLRADFDAVVLAGGATAWRDLPIPGRELDGIHQAMEFLPWGNRQASGDLDEADMDADGQPPITAKGKKVIIIGGGDTGADCLGTVHRQGATEVHQFEIMPRPPDTRAPSTPWPTYPLMYRVSSAHEEGGERVFSVNTEEFVGENGRVTALKAHEVTMEDGKFVKVEGSEFELEADLVLLAMGFVGPEKEGLLTDLGVKFTERGNVARGADFDTSIPGVFVAGDMGRGQSLIVWAIAEGRAAAAAADRFLMGATALPAPVKPTAVPLQ

SEQ ID NO: 11583 - protein, 959 aa, Vibrio vulnificus CMCP6
MSTAFEVDTNTIATIFSSQVPVVEGIYDLTPDQVLLDQAEHESEVRSYPRRLPIAIKQAYGCLVEDTRGQIFLDCLAGAGTLALGYNHPEINQALKEQLDSGLPYQTLDIATTAKTNFIKSVKAFLPEELGNNCVIQFCGPSGADAVEAAIKLAKQTTGRNTMFAFRGAYHGMTNGTMGMMGNLNTKARRTGLMSDVHFMPFPYSLRCPFGLGGDEGAKASIRYIERLLNDDEAGIMKPAAIIVEPVQGEGGVIPAPAFWLRELRRICDEHGMLLIFDEIQCGVGKSGYNFAFEEAGIVPDVLCLSKAIGGGLPMSLLVINKKHDTWRPGEHTGTFRGNQLAMVSGAKALEIITRDNLVEHANVAGQYLRHGLEKIQQRVDCIAEVRGKGLMLGVEIRKPGSELNKFGEPVSDGQLTLAIQRAALERGLMVEKGGRDGSVIRFLPPLIISFEQIDFALRILEEAILAAGGNLKAVEENAEWKKHFIHTGVNGSKEFASVMNHTTAALKNAFEEVDAPYSGMDPKALESAIYAVDLDNKNAPLKEIIDETTELVVKNSIFTQHPDCIAHLHTPPLMPAVAAEAMIAALNQSMDSWDQSSSATYVEQKVINWLCDKYELGAKADGIFTSGGTQSNQMGLMLARDWIADKLSGHSIQKLGLPDYADKLRIICSKKSHFTVQKSASWMGLGEKAVLTIDAHANGTMDVTKLEAAVEQAKAEGLIPFAVVGTAGTTDHGAIDDLNTIADVAEKHDLWMHVDGAYGGALILSSQKARLKGVERAQSVSVDFHKLFYQTISCGAVLVNDKQNFKFLLHHADYLNREHDELPNLVDKSIATTKRFDALKVFMTMQNVGPKALGAMYDHILGQTLEVADLVRNTEGFELLAEPSLSTVLFRSTLGSDLDELNKTLRLEALTRGVAVLGETIVDGKTALKFTILNPCLKMSDFESLLSKINTLAAELAQ

SEQ ID NO: 11584 - protein, 286 aa, Glycine max
REMLAGASLMDEANRSTVLRNNPAALLALCWYWATDGVGSKDMVILPYKDSLLLFSRYLQQLVMESLGKEFDLDGNRVNQGISVYGNKGSTDQHAYIQQLREGVHNFFVTFIEVLRDRPPGHDWELEPGVTCGDYLFGMLQGTRSALYANNRESITVTVQEVTPRSVGALVALYERAVGIYASLVNINAYHQPGVEAGKKAAGEVLALQKRVLAVLNEASCKEPVEPLTLEEVADRCHAPEDIEMIYKIIAHMAANDRALIAEGNCGSPRSIKVFLGECNLDELYA

SEQ ID NO: 11585 - protein, 522 aa, Triticum aestivum
MSSMQFSSVLPLEGKACVSPVRREGSACERLKVGDSSSIRHERASRRMCNGGRGPAATGAQCVLTSDASPADTLVLRTSFRRNYADPNEVAAVILGGGTGTQLFPLTSTRATPAVPIGGCYRLIDIPMSNCFNSGINKIFVMTQFNSASLNRHIHRTYLGGGINFTDGSVEVLAATQMPGEAAGWFRGTADAVRKFIWVLEDYYKNKSIEHILILSGDQLYRMDYMELVQKHVDDNADITLSCAPVGESRASEYGLVKFDSSGRVVQFSEKPKGDDLEAMKVDTSFLNFAIDDPAKYPYIASMGVYVFKRDVLLNLLKSRYAELHDFGSEILPRALHDHNVQAYVFTDYWEDIGTIRSFFDANMALCEQPPKFEFYDPKTPFFTSPRYLPPTKSDKCRIKEAIISHGCFLRECKIEHSIIGVRSRLNSGSELKNAMMMGADSYETEDEISRLMSEGKVPIGVGENTKISNCIIDMNARIGRDVVISNKEGVQEADRPEEGYYIRSGIVVIQKNATIKDGTVV

SEQ ID NO: 11586 - protein, 257 aa, Bacillus anthracis str. A2012
  unsure (1)..(257): unsure at all Xaa locations
MTKIFILASTLSLSFFSGLNIGNAATENFSPITNAIVQNNDYFVEGNSKDNNKPPGNGGSQDDSGSDGNGSDGSGSGDNGSGDNGSGGNGSGGNGSGENGSGGNGSGSSGSGDNGSGGNGSGGNGSGSSGSGENGSGGNGSGSSGSGENGSGGNGSGSSGSGENGSGGNGSGGNGSGGNSSGGSGSGGSGSQGGNRVKGDSSSQGGNGSQGGNVKDNAKKQGDKLPNTATHYPASILMGLSTFLXGMLLFIRRKNAK

SEQ ID NO: 11587 - protein, 159 aa, Medicago sativa subsp. falcata
MVLLISSEVSARDLTETTSDAKKEVVEKTNEVNDAKYGGGYNHGGGGYNGGGYNHGGGGYNNGGGYNHGGGGYNNGGGGYNHGGGGYNNGGGGYNHGGGGYNNGGGGYNHGGGGYNGGGYNHGGGGYNHGGGGCQYHCHGRCCSHAEFVAMQAKDNTQN

SEQ ID NO: 11588 - protein, 475 aa, Bordetella parapertussis 12822
MSTQYRSFVAGQWQDGGEPVALYNPSDLQEEAGVYMHAPVEMVNQAVRAAEEALDAWRGLHAMARSRLLDGIADGLVGRRDELAMAIAREQGKPLRDALAEATRAADIFRYFASETIRQKGYTYASIRPGVRVEVQRNPVGVVALVTPWNFPVVIPAWKAAAALAYGNTVVMKPSEIAPCGAWILADVMREAGLPAGVFNLVLGAGQAGAALVAHEAVAAVSFTGSVATGKRIAAAAAGKRIQLEMGGKNPLIVLDDADLDTAVACAIDGAFLYAGQRCTASSRIIVTEGIHAAFVKRLLAQTASLAVGHALDEATVIGPVVNAEQFEKNRRYADLARQEGGTVAGGRALSRPTRGHYFEPCLVTGLDNSATVCREEVFGPFACVLTARDYEHALAIANDTPFGLSSGLCTTSMKHAQHFKAHTKSGLASINTSTSGVDFHVPFGGNGASSYGPREQGEFAIEFFTTLRTVYIGD

SEQ ID NO: 11589 - protein, 368 aa, Malus x domestica
MGKGGQSCNGMVRQAKPVEQENMAAWLVDVNTIKILPFKLPSIGPNDVRIRIKAVGICGSDVHYLKTMKCADFEVKEPMVIGHECAGIVDKVGSEVKHLVPGDRVAVEPGISCARCQQCKGGRYNLCPDMKFFATPPVHGSLANQIVHPADLCFKLPENVSLEEGAMCEPLSVGVHACRRANVGPETTVLIIGAGPIGLVSVLTARAFGAPRIVIVDMDDKRLAMAKSLGADEAVKVSTKMEDLDDEVAEIKKAMISEVDVTFDCVGFNKTMSTGLNATRPGGKVCLVGMGHGVMTVPLTPAAAREVDVVGVFRYQNTWPLCLEFLRSGKIDVKPLITHRFGFTEKEVEEAFATSARGGNAIKVMFKL

SEQ ID NO: 11590 - protein, 441 aa, Streptomyces netropsis
MSHSVTLPSTKDIIELERRHRLPGGQSMTDLAGIVVDRAVNAEVWDRDGKRYIDFFTGVGVSNIGHSHPAFLEELTTQLSRCAVGTFYTDVRSRYFALLAAQLPEQLGEIHMFSTGSEAVEAAVKLARAATGKHEIVSFWGGFHGKTQGALSLHGGPRKHRSGPFPPGSHQVPYADCHHCPLQLEHPECGQRCVDLAEQSIENGSVGDLAAVIVEPVQGTNGNIIPPEGYLRTLRQLADRHGALLILDEVITGFGRTGALFAFEHDPGIAPDVVVLGKAMASGVPASAIVSRSGLVEGTSFAVPSAAASTFGGNPLASAASLATLRVLLDERLPERSHELGKSVSDRLSAWREEFPFVGNADNIGLMIGVELVDPATRLPLPKGITRRLFQELMARGVLAMAYDSRIRLYPPLSIPTHHLEEGLAAFEGAFRAMAPAISRL

SEQ ID NO: 11591 - protein, 429 aa, ASPERGILLUS NIDULANS FGSC A4
MLSTLKVASRQAASRNASVRSVFAGARCASTWSNVPQGPPDAILGITEAYKADSFKEKINLGVGAYRDDQGKPYVLPSVRAAEDKVVASRFDKEYAGITGIPSFTKAAAQLAYGADSPVLKEDRLVITQSISGTGALRIGGAFLQRFYPGAKKIYLPTPSWANHNAVFKDSGLEVEKYRYYNKDTIGLDFEGLVEDLKAAPNNSIILLHACAHNPTGVDPTQDQWRQISNVMKEKGHFAFFDMAYQGFASGNADTDAFAPRHFVEQGHNIALCQSFAKNMGLYGERVGAFSLVCESAEEKKRVDSQIKILIRPFYSNPPVHGARVASTIMNDPALNKQWLGEVKGMADRIIEMRALLKKNLEELGSKHDWTHITSQIGMFAYTGLKPEQMEALAKEHSVYATKDGRISVAGITTGNVKRLAESIYKVTG

SEQ ID NO: 11592 - protein, 539 aa, Ustilago maydis 521
MPPRIADDEYIDDGAGAYDAEDFLDDDDSGDEYRAAPSLPKLGTLRGAGAGGASRSSAAASNGRAGTLAAGSSASSSGTARAKAAANAKSKQKDQGYSWEATYKRSWDAVAEDDSGSLESTVRSMIEGSKRRRVLKDVAPVQRGIIRHLVLLIDLSASMLEKDMRPNRFDVTLQYAREFVGEYFDQNPIGQLSIIGTRSGIAERLAMMGGNTVDHTASLSNKRRLEPRGEPSLQNALEMARSSLVHLPASNSREILAIFGSLTTCDPGNIHDTIATLVKDNIRVSIVHLAAEVKVFKDVCTRTGGTFSVALNEGHFHDSLFELVPPPAVEGKPRRTRQHMVGIADGSTAMDAEDDDEDGVQAGVDLLQMAFPLRLPAHAAPTLCACHSRSRGSGYLCPRCGVKVCNVPTDCPVCGITIVMSTHLARSYHHLFPVPNWKAVPWSSVTPDSDGACFSCNVPFPSLQERKEKSAAANKALEEAGLSPSSRYRCGRCAIDFCLECDAFVHEQLHEPSDSFVCANKKLTIRTVTQEVASRCTYG

SEQ ID NO: 11593 - protein, 586 aa, Arabidopsis thaliana
MTSFSLTFTSPLLPSSSTKPKRSVLVAAAQTTAPAESTASVDADRLEPRVELKDGFFILKEKFRKGINPQEKVKIEREPMKLFMENGIEELAKKSMEELDSEKSSKDDIDVRLKWLGLFHRRKHQYGKFMMRLKLPNGVTTSAQTRYLASVIRKYGEDGCADVTTRQNWQIRGVVLPDVPEILKGLASVGLTSLQSGMDNVRNPVGNPIAGIDQEEIVDTRPYTNLLSQFITANSQGNPDFTNLPRKWNVCVVGTHDLYEHPHINDLAYMPANKDGRFGFNLLVGGFFSPKRCEEAIPLDAWVPADDVLPLCKAVLEAYRDLGTRGNRQKTRMMWLIDELGVEGFRTEVEKRMPNGKLERGSSEDLVNKQWERRDYFGVNPQKQEGLSFVGLHVPVGRLQADDMDELARLADTYGSGELRLTVEQNIIIPNVETSKTEALLQEPFLKNRFSPEPSILMKGLVACTGSQFCGQAIIETKLRALKVTEEVERLVSVPRPIRMHWTGCPNTCGQVQVADIGFMGCLTRGEEGKPVEGADVYVGGRIGSDSHIGEIYKKGVRVTELVPLVAEILIKEFGAVPREREENED

SEQ ID NO: 11594 - protein, 711 aa, Pseudomonas putida KT2440
MPSKKTDAPKHSEAAGTQTPDRANTNAKLQSLEADRSDATGQALRTNQGVRIADNQNSLKAGDRGPSLLEDFIMREKITHFDHERIPERIVHARGTGAHGFFQSYGNHAELTKAGFLQDPEKITPVFVRFSTVQGPRGSGDTVRDVRGFAVKFYTDEGNFDLVGNNMPVFFIQDAIKFPDFVHAVKPEPHNEIPTGGSAHDTFWDFVSLVPESAHMVMWAMSDRAIPRSLRMMEGFGVHTFRLINAEGVASFVKFHWKPRQGVHSLLWDEAQKLAGKDTDFQRRDLWEAIETGDYPEWELGVQIVPEADEHKFDFDLLDPTKIIPEELVPVTPLGKMVLNRNPDNFFAEVEQVAFCPGHIVQGIDFTNDPLLQGRLFSYTDTQISRLGGPNFHQIPINRPVAPNHNNQRDALHQHVVHKGRASYEPNSIDGGWPKETPPAAQDGGFESYQERIDAHKIRQRSESFGDHFSQARLFFHSMSPTEQQHIIKAYSFELGKVEREHIRAREVNEILANIDLKLAAAVAANLGLPAPKAGTVKVKGSQLAQSPALSQMNHPGSVGIKGRKIAVLVADGVDAASVDKLVKALEAHSARPMLLGPTSAPVKAADGKQLPVAASMEGMPSIMFDGIVVPAGKASTDALAASGLAKHFVLEGYKHLKALVLTKELAKALGLKEDKGLLLGDEQKAVDAFVKAVEGHRVWEREAAAEAVPA

SEQ ID NO: 11595 - protein, 586 aa, Arabidopsis thaliana
MTSFSLTFTSPLLPSSSTKPKRSVLVAAAQTTAPAESTASVDADRLEPRVELKDGFFILKEKFRKGINPQEKVKIEGEPMKLFMENGIEELAKKSMEELDSEKSSKDDIDVRLKWLGLFHRRKHQYGKFMMRLKLPNGVTTSAQTRYLASVIRKYGEDGCADVTTRQNWQIRGVVLPDVPEILKGLASVGLTSLQSGMDNVRNPVGNPIAGIDPEEIVDTRPYTNLLSQFITANSQGNPDFTNLPRKWNVCVVGTHDLYEHPHINDLAYMPANKDGRFGFNLLVGGFFSPKRCEEAIPLDAWVPADDVLPLCKAVLEAYRDLGTRGNRQKTRMMWLIDELGVEGFRTEVEKRMPNGKLERGSSEDLVNKQWERRDYFGVNPQKQEGLSFVGLHVPVGRLQADDMDELARLADTYGSGELRLTVEQNIIIPNVETSKTEALLQEPFLKNRFSPEPSILMKGLVACTGSQFCGQAIIETKLRALKVTEEVERLVSVPRPIRMHWTGCPNTCGQVQVADIGFMGCLTRGEEGKPVEGADVYVGGRIGSDSHIGEIYKKGVRVTELVPLVAEILIKEFGAVPREREENED

SEQ ID NO: 11596 - protein, 269 aa, Pimpinella brachycarpa
MGRQPCCDKLGVKKGPWTADEDNKLINFILTNGQCCWRAVPKLAGLRRCGKSCRLRWTNYLRPDLKRGLLTDAEEQLVIDLHARLGNRWSKIAGRLPGRTDNEIKNHWNTHIKKKLIKMGIDPVTHEPLHKEETNSQKEILLQPFQSPAETENHVPPIPHTNDMASSENSCTPTDQNSSGDESNSLSAICDQIDDSLISYLFEDDTPGLVDAPWENFNKVDMVLPSWDESFPWLLDCQDFGIQDFGFDCFNDIEMNMLTQLDVKNDQTG

SEQ ID NO: 11597 - protein, 125 aa, Betula pendula
LKQEPGTSEETEQFACTRYKAEYPIFQKIRCNGPDTAPLYKFLKASKTGFLGSRIKWNFSKVAFPCNQFLKQEPGTSEETEQFACTRYKAEYPIFQKIRCNGPDTAPLYKFLKASKTGFLGSRIK

SEQ ID NO: 11598 - protein, 358 aa, Betula pendula
IGSEVIGGVGGTCVIRGCVPKKILVYGATFRGELEDARNYGWELNEKIDFNWKKLLHKKTEEIVRLNGIYKRLLTNSGVKMHEGEGKIVGPNEVEVTQLDGTKLSYTAKHILIATGSRAQRPPIPGQELGITSDEALSLEELPKRVVIVGGGYIAVEFASIWNGMGVTVDLCFRKELPLRGFDDEMRAVVARNLEARGVNLHPRTSLSEIIKTGDGIKVNTDHGEELIVDVVMFATGRAPNTKRLNLEAVGVELDKTGAVKVDEYSRTNIPSIWAVGDVTNRLNLTPVALMEGTCFAKTVFGGEPSKPDHRDVPCAVFSIPALSVVGLSEEQAIEQANGDILVFTSTFNPMKNTISGR

SEQ ID NO: 11599 - protein, 513 aa, SYNECHOCOCCUS SP. WH 8102
MTIKNQVNPYFAEKKLNKIEKSKLEKDGLLVGSEIEKFAKIGWENMDETDLKLRLKWYGMFWRPKTPGKFMLRLRIPNGVLTSNQIRVVASIVERYGENGSCDITTRQNLQLRGILLCDLPEILRRLREAGLSSIQSGFDNPRNVTGNPLAGIDPNEIVDTRPYTTKLQNFLTNNCEGNSEYSNLPRKWNTAVAGSKDNFLLHNDIVFHPVENNGVMGFSIWIGGILSPQMNAYAFPMNVWVLPDEICNILDTVIRLWRDNGEREKRTKGRFRMYLDEIGHEEFRSQVEKLYGTLTPDPGSIFENSPRSHFGINQQKQAGLYFAGIHVPVGRLTAEDLQDIATASLKYGNGEIRLTEDQNIIITGLTSEKVEELKTDTLLQRFPLAPSNISAGTVSCTGNTYCSFALTNTKDQALKAAKELDEELNLPEEIKVHWTGCPNTCGQAYMGAIGLTGTKAKNAEGVMGEGYTMTIGGSQGRNPTIGQIYRKAIPAAEIKTALKEVLISKFGATEKK

SEQ ID NO: 11600 - protein, 956 aa, Ralstonia eutropha JMP134
MDCRDVIDFGTPASESTEMVTLEIDGVSVTVPAGTSVMRAAMEAEVSVPKLCATDSLKSFGSCRLCLVEIEGRRGYPASCTTPVEAGMKVKTQSDKLSDLRRGVMELYISDHPLDCLTCPTNGNCELQDMAGEVGLREVRYNDGGPIATHTDMKKDESNPYFTYDPSKCIVCNRCVRACEETQGTFALTISGRGFDSRVSPGTSQSFMESDCVSCGACVQACPTATLTETSVIKLGQAPRSVVTTCAYCGVGCSFKAEMKGNEVVRMVPYKDGKANEGHACVKGRFAWGYATHQDRILKPMIRAKITDPWREVSWEEAINYAASEFKRIQAKHGKDSIGGIVSSRCTNEEGYLVQKLVRAAFGNNNVDTCARVCHSPTGYGLKQTLGESAGTQTFKSVEKSDVIMVIGANPTDGHPVFASRMKKRLRAGAKLIVADPRKIDLVDSPHIRADFHLQLRPGTNVALVTSMAHVIVTEGLLADEFIAERCEDRAFQQWRDFVSQPENSPEAMAEVTGVPADTLRGAARLYATGGNAAIYYGLGVTEHAQGSTTVMGIANLAMATGNVGREGVGVNPLRGQNNVQGSCDMGSFPHELPGYRHVSDSTVRALFESAWNVEISPEPGLRIPNMFEAALGGSFMGMYCQGEDIVQSDPNTQHVAEALSSMECIVVQDIFLNETAKYAHVFLPGSSFLEKDGTFTNAERRISRVRKVMPPKAGYADWEATILLANALGYPMNYKNPSEIMDEIARLTPTFHGVSYKRLDELSSIQWPCNEDAPEGTPTMHIDRFVRGKGKFIITKYVPTTEKITRAYPLILTTGRILSQYNVGAQTRRTENVHWHDEDRLELHPHDAEERGIKDGDWVGVQSRAGETVLRAIVSERMQPGVVYTTFHFPESGANVITTDNSDWATNCPEYKVTAVQVMPVAQPSEWQKQYQAFNAQQLQLLEAASTDSAQAAVG

SEQ ID NO: 11601 - protein, 277 aa, Pseudomonas fluorescens PfO-1
MIRKCLFPAAGYGTRFLPATKAMPKEMLPIVNKPLIEYAVEEARDAGLQHMAIVTGRGKRALEDHFDISYELEHQIRGTEKEKFLAGTRELIDTCTFSYTRQVEMKGLGHAILSGRPLIGDEPFAVVLADDLCLNLEGDGVLTQMIELYKKFRCSIVAIQEVPRDQTHKYGVIAGEAISEGIYRVNHMVEKPAPQDAPSNLAIIGRYILTPDIFDLIADTEPGKGGEIQITDALMKQAQNGCVLAYKFKGLRFDCGDAEGYLQATNFCYENVYLKGR

SEQ ID NO: 11602 - protein, 277 aa, Sphingomonas sp. CB3
MPQLDQQSVLITGGASGLGRAIVARFLAEGAHVTILDRNADALAEMEREYEGRVAGLIGDVRSLAANEAAVSLACDRFGKLDCLIANAGIWDYDVSLVDLPASAIDAAFDELFSINTKGSLLAMKAATPALVRATGSIILTLSNAAFYPGGGGMLYTASKHANLGLMRQAAYELAPSVRVNAVAPGAIATNLRGLATLGQDKRAIGSDLPLEEYLKVGVPLARLPDVAEFTGAYVLLASRKDGAVATGAVIQIDGGIGVRGLAGVSGGTSLAERFAE

SEQ ID NO: 11603 - protein, 346 aa, Streptomyces griseus
MTTVAAYAAPRAKAPLERTTIERRPVGEFDILIDIKFAGICHSDIHQARDGWGEGIFPMVPGHEIAGIVAETGPGVTRFKVGDRVGVGCMVDSCGTCDACLMGREQHCAEGNTQTYNALDRNGEPTYGGYSTHLVVTEKFALSIPEGIALDEAAPLLCAGITTYSPLRRWGAGPGKKVAVVGLGGLGHMAVKIAHALGAEVTVLSQSLRKKDDGLKLGADHYYATGDPRTFEELAGTFDVILSTVSAPLDFGAYLALLRTEGTLVNVGAPEEPVSLNLFSLILGNRSIAGSAIGGIEETQEMLDFCAVHGLGAEIEVIGAGQVNEAYERVLASDVRYRFVIDTATI

SEQ ID NO: 11604 - protein, 438 aa, Streptococcus pneumoniae R6
MLTYDLIVIGFGKAGKTLAGKLASAGKKVALVERSKAMYGGTCINIGCIPTKTLLVAAEKDLSFEEVIATKNTITGRLNGKNYTTVAGTGVDIFDAEAHFLSNKVIEIQAGDEKQELTAETIVINTGAVSNVLPIPGLATSKNVFDSTGIQSLDKLPEKLGVLGGGNIGLEFAGLYNKLGSKVTVLDTLDTFLPRAEPSIAALAKQYLEEDGIELLQNIHTTEIKNDGDQVLVVTEDETYRFDALLYATGRKPNVEPLQLENTDIELTERGAIKVDKHCQTNVPGVFAVGDVNGGLQFTYISLDDFRVVYSYLAGDGSYTLEDRLNVPNTMFITPALSQVGLTESQAADLKLPYAVKEIPVAAMPRGHVNGDLRGAFKAVVNTETKEILGASIFSEGSQEIINIITVAMDNKIPYTYFTKQIFTHPTLAENLNDLFAI

SEQ ID NO: 11605 - protein, 79 aa, Oryza sativa
QKLGANAILAVSLAICKAGAIIKKIPLYQHIANLAGNKQLVLPVPAFNVINGGSHAGNKLAMQEFMILPTGAASFKEAM

SEQ ID NO: 11606 - protein, 561 aa, Pantoea agglomerans
MTTLKITGMTCDSCAAHVKEALEKVPGVQSALVSYPKGTAQLAIEAGTSSDALTTAVAGLGYEATLADAPPTDNRAGLLDKMRGWIGAADKPSGNERPLQVVVIGSGGAAMAAALKAVEQGAQVTLIERGTIGGTCVNVGCVPSKIMIRVAHIAHLRRESPFDGGMPPTSPTILRERLLAQQQARVEELRHAKYEGILDGNSAITVLHGEARFKDDQSLIVSLNEGGERVVMFDRCLVATGASPAVPPIPGLKESPYWTSTEALASDTIPERLAVIGSSVVALELAQAFARLGSKVTALARNTLFFREDPAIGEAVTAAFRAEGIEVLEHTQASQVAHMDGEFVLTTTHGELRADKLLVATGRTPNTRSLALEAAGVAVNAQGAIVIDKGMRTSSPNIYAAGDCTDQPQFVYVAAAAGTRAAINMTGGDAALDLTAMPAVVFTDPQVATVGYSEAEAHHDGIETDSRLLTLDNVPRALANFDTRGFIKLVIEEGSGRLIGVQAVAPEAGELIQTAVLAIRNRMTVQELADQLFPYLTMVEGLKLAAQTFSKDVKQLSCCAG

SEQ ID NO: 11607 - protein, 284 aa, Malus x domestica
ILPFKLPAIGPNDVQIRIKAVGICGSDVHYLKTMKCADFEVKEPMVIGHECAGIVDKVGSEVKHLVPGDRVAVEPGISCAHCQQCKGGRYNLCPDMKFFATPPVHGALANQIVHPADLCFKLPENVSLEEGAMCEPLSVGVHACRRANVGPETTVLIIGAGPIGLVSVLAARAFGAPRIVIVDMDDKRLAMAKSLGADDTVKVSTKMEDLDDEVAEIKKAMISEVDVTFDCVGFNKTMATGLNATRPGGKVCLVGMGHGLMTVPLTPAAAREVDVVGVFRYKNT

SEQ ID NO: 11608 - protein, 379 aa, Zea mays
MLGPLLRLLSACGGVWPTSPAPGAAASSSASSGDDSEGRDGLLWWRDLARCHAGDVSVAVAQANQVLEDQCRLDSAPSIGTVVGVFDGHGGPDAARFACDHLVPNLREASSGPRGVTADAIREAFLATEEGFLALVSSLWEAQPDIATAGTCCLVGVVHNRTLFVANLGDSRAVLGKKAGRAGQIAAEQLSSEHNANQEAVRQELMAQHPDDAQIVALKHGVWRVRGLIQVSRSIGDVYLKHAKYNTDQIKPKFRLPESFSKPLLSADPSIISRDLEPNDCFIIFASDGLWEHLSNQEAVEIVHSHQRAGSARRLIKAALQEAARKREMRYSDLTKIDKKVRRHFHDDITVIVLFINYDLLLKGAPQGQPLSIRCALDY

SEQ ID NO: 11609 - protein, 303 aa, Streptomyces netropsis
MRGILLAGGTGSRLWPVTRAVSKQLMQIFDKPMIYYPLSTLMMAGIREILIITTREDQPGFRRLLGDGSHLGIEITYAVQECPEGIAQAFLIGSDFIGAETVALALGDNIFHGQAFGRRLRAHRNLSGARVLAYPVADPSAYGVVEISETGAAVSVEEKPEKPKSRYATVGLSFYDHRVVDIARGLRPSERGELEITAVNEEYLRRGELAVTVLDRGTAWLDTGTFSAMVQASEYVRVMEERQGLKIGCVEEVAWRCAYIDDDQLRELGRPLLKSGYGDYLLALLDEPRTHHGFPLPAAEDAW

SEQ ID NO: 11610 - protein, 450 aa, Chloroflexus aurantiacus
MGEVTMPRLSDTMSEGTVGRWLKKVGDQIAVGDIIAEIETDKATMELEAFEAGVLQQILIPEGQTVPIGQPIAIIGDSAAPVAAAPAPTPAPAAAPAPEPAAAPTPAPAPALVTTAAAPGGGDENGRIKASPVARRLAEELGIDLRQVVGTGPGGRIIKENVEEFAARRGTAAPAAAPAPAPAPAAVPAPAPAPAAASAPAPTPAPAPAPTRAPAPTPAPALAGAEPLSRMRKAIARAMTDSKPGVPHIYLTIEVDADALMALREQITAGGTRVSVNDLVVKAAAKALAKVPAVNVSFSQTADGQPGIVRHNQINIGVAVALDDGLVAPVVRDADKKSISVISAEIRDMALRAREGKIKQNELEGATFQVTNLGMFGIVEFGSIISVPQAASLAVGAVRKVPVVRDDQIVIGQVMNLTLSADHRVIDGAVGAQYLQELRKLLEAPMNIIV

SEQ ID NO: 11611 - protein, 551 aa, Desulfovibrio desulfuricans G20
MTTAAKAGQLPAHDELINIARLVSDFYTVSPDRQNPDERVMFGTSGHRGTSGTASFNEAHILAVTQAVCDFRRDNGFSGPLFMGMDTHALSEPARCAALEVLAANGVTTFIEPESGYTPTPVISHAILTHNAGRTSGFADGIVITPSHNPPQDGGFKYNPPHGGPAETGVTNDIEKRANLLLASDNKAVRRIPLTKALASEYTVLHDFAAHYINDLGSVINMQAIARSGLRLAADPLGGASVTYWDRIAEKYGLNIDVPNRQVDQTFRFMPYDRDGVIRMDCSSPWAMGGLLELKDSYDLAFGNDPDADRHGIVTPAGLMNPNHYLAAAIAYLFRHRPAWKATAGIGKTLVSSSMIDRVAADMGRTVIEVPVGFKWFVPMLLDGTAGFAGEESAGASLLRQDGTVWTTDKDGIALNLLAAEITAVTGNTPDRLYKELTGRFGTPVYRRLQAHADGRQKEVLKALNPETVTITELGGDPVEKVITHAPGNGAAIGGLKVVSAGGWFAARPSGTEDIYKIYVESFRGEEHLEQLAGEAQAIVSNAFAAAGIKN

SEQ ID NO: 11612 - protein, 346 aa, Zea mays
MVRMSSSSSASGVNLTEQIENVFDQLISKIEQADPDFDPRPFLKQLNVLGRYEPIKRNVYFTKRYIEDYGISCHCKPSPGSSVVCGRDCYCSMLFSCCSSQCECDIACTNKSFQHRPLTKTKLIKTEKCGHGLVAEDEIKKGEFVIEYVGEVIDDRTCENRLWTMKRLDDTDFYLCEVSSNMVIDATNKGNLSRFINHSCEPNTAMQKWTVDGETRVGIFALRDIKIGEELTYDYNIMYRFVQFGAAQVCHCGSSKCRKMLGTTKYSGSSQNHRTKKKKRKTSCENCIQQFLRLWHPRQKMYVGCWIVDFDQGTKMHTLQFIDHHTEKFDLKEEEWHFLEVDSDED

SEQ ID NO: 11613 - protein, 292 aa, Desulfovibrio vulgaris subsp. vulgaris (strain Hildenborough)
MPVNIRKVVIPVAGWGTRSLPATKNIPKEMLPVYNKPVVQYVVEEAQKSGIGDVVFVTNRDKKIIEDHFDYNLQLESVLERAGKTEMLRQVREVAEMVNIISVRQKKQLGLGHAVLCAREIVRDEPFAVMVGDDLMFGMTPGIQQLIDVAVAEHLPVIGVMEVPADKVSRYGIIAGEETAPGIYKVSRLVEKPSIAEAPSRLAIVGRYVLTPDIFDSLEKVKPGHGGEIQLTDALQNLADDRGLLAVKIRGMRFDAGDWAEYLTANIYFALQEEGLRDDLISQLRPLLPFRC

SEQ ID NO: 11614 - protein, 219 aa, Bordetella parapertussis 12822
MTAATLSPAAYAHAERFLAGLDADWRGHVAATGPCLHRPLPAREPYEALVRAIAYQQLHARAGDAIVGRLLALFPGGAFPAPGQLLAADPAALRACGFSAAKTQTILGIAQAARDGVVPDRRAARRMSDQALVERLTTLRGVGRWTVEMLLIYTLARADILPADDFGVRDGYRRLKGAAATPTARQMRNIGQAWGPYRTLAAWYLWRVPPEARIRAQET

SEQ ID NO: 11615 - protein, 157 aa, Triticum aestivum
  unsure (1)..(157): unsure at all Xaa locations
MAPAVMASSATTVAPFQGLKSTAGLPVSRRSSASLGSVSNGGRIRCMQVWPIEGIKKFETLSYLPPLSTEALLKQVDYLIRSKWVPCLEFSKVXFVFREHNSXPGYYNGRYWTXWKLPMFGCTDAXXVLNEVXEXXKXYPDPIRFIGFKTAQVXXSV

SEQ ID NO: 11616 - protein, 266 aa, Zea mays
MGPAMVVVTTRDSGILARFLIKPAAFHPWRDRATTQPTHQRRPNKSPALRARRLATLTFLPCSAAAATVASTAMVSAEVGIDYVLWTEDEVSTRVGEVAAELAADLRALPEPAVIVGVATGAFLFLADLVRRVDVRLVVDLVRVESYGAGTESSGKPRITADLKVDVAGKHVVVVEDIVDTGNTLSYLIAHLEKKGASSISVCTFLDKPARRKVNVHLVGDGKFYRGFECPDYFVVGYGLDYAELYRNLPYVGVLKPEMYTKDSSN

SEQ ID NO: 11617 - protein, 710 aa, Methanosarcina mazei Goe1
MDKKMINEKSKEEQLEKFHEDPEREFLTTNQGVRVNNTDISLKAGERGPTLLEDFHFREKLTHFDHERIPERVVHARGSGAHGFFQVYEPMTEYTSAKFLQDPNKKTPVFVRFSTVVGFRGSADTVRDVRGFAVKFYTEDGNYDLVGNNMPVFFIQDAIKFPDLVHAIKPEQDNQIPQASAAHDTFWDFVSCHHENAHMIMWVLSDRALPRSYRMMEGFGVNTFRFVNAEGKGRFIKFHWKPMLGIHSLVWDETQKIAGKDPDFNRRDLWDAIEMGAYPEFELGVQILEEEDEFKFDFDILDPTKLWPEEDVPIKWIGKMTLDRNPDNFFAETEQVAFCPANVVPGIDFSNDPLLQGRLFSYLDTQLIRLGGPNFQEIPVNRALAPVANNQREGYNRMTINKGKTSYFPNTVGDGKPRPASAEEGGYVHYMEKVEGKIIRSRSEKFKDFFSQAKLFWNSMSQPEKEHIIEAFHFEIGKVKDKKIRQAVVDMFNNVDGDLAVEIAKGVGVSAPAQKGGSPVAKESPNLSQERSERNVKNTIKTRKIAIIVADGYDHKDLSQVMQALEAGGARADIISKFQGMLKSSDGQEIEVDKNYRTTESVLYDAVYIPGGKENVETLKKHGDAIHFVNEAFRHCKPLGATGEGVELFKAAHLPDIKLAGKSSADKVVSDKGVVTARNEGDRSSFNESFTIAIAQHRHWNREKKEQVPA

SEQ ID NO: 11618 - protein, 387 aa, Glycine max
MEHKVATTTEGQSIRCKAAICRKAGEPLSIEEIIVAPPMPGEARIRIICSSLCQTDISFRTMQDPPANFPTILGHEAIGVVESVGEDVTEVAKGDMVVPIFIPECGECIDCKSSKSNLCSKFPFKLSPWMPRHATSRFTDLKGEIIHHFLSVSSFSEYTVVDIAHLIKIDPEIPPNRACLLSCGISAGIGAAWRAAGVEPGSTVAIFGLGSIGLAVAEGARLCGATKIIGVDVNPERYEIGKRFGLTDFVHSGECENKSVSQVIIEMTGGGADYCFECVGMASLMHEAYASCRKGWGKTIVLGVDKPGSKLNLSCSEVLVSGKSLRGCLFGGLKPKSHVPILLKRYMDKELNLDEFVTHEMEFKDINKAFDLLIEGQCLRCVIWMDK

SEQ ID NO: 11619 - protein, 412 aa, Bordetella bronchiseptica RB50
MDKADISWLLVSTLLVLMMAVPGLALFYGGLVRSKNVLSVLLQVLCTFALGLLLWFAYGYSLAFTEGNAFFGGLSRTFFSGMFTPADGTYTLSGTLTELLFASFQATFAGITCALIVGSFAERARFSAVLVFTVIWFTFAYIPIAHMVWFASETAPGLLNARGALDFAGGTVVHINAGVAGLVGAYVVGRRIGYGREAMQPHNLPMTFIGAALLWVGWFGFNAGSSLAASDGATLAFFNTMIATAGAVLGWLFTEWAVKGKPSMLGAASGAVAGLVGITPAAGLVGPVGALVIGVTAGVVCVWGVNGLKRLLRADDALDVFGVHGVGGIVGALLTGVFNAKVLGGPGLDSAGAIAGQVWVQLEGVLLTIVWSAVVAWIAYKIADKLCGLRVPEDQEREGLDVTSHGESAYHS

SEQ ID NO: 11620 - protein, 353 aa, Photorhabdus luminescens subsp. laumondii TTO1
MKALKFNRVWDVQIQDVEPLRCAEPDDVVVDIAVCGVCGTDVGIITGSYPVAIPGTTLGHETTGVITQIGKSVTRFNVGDRVVINPTYSCGHCRMCQTGSPNHCEKKLGTEAGVSYDGAFAEQYLAKESSLIKLDDHVSMEEASLTEPLSCTLTGVDKLGITHTNIRAAVAGAGPMGMLYIWALHARGVKAFMVEKNESRIQFAKENLPPECELYTDFDEALIQKYGDKSALIDLCVDTTGQLTEYVFEHLAPGGKLLNVALKDKHANLDILKIADKSLSVIGSIDSLNNSFERAYTMIRDGVIPAGRLVSQVFDFNDYLQAFLTVGCDIANKSQKPLFTPNCKVLIRISDLK

SEQ ID NO: 11621 - protein, 273 aa, Triticum aestivum
MESTQSNTSVMNHFILVHGLCHGAWCWYKVVAALQAAGHRVTAVDLAASGAHPARIDEVHSFEEYSQPLLDVVAAAPEGDGERLILVGHSHGGLSLALAMERFPGKVAAAVFAAAGMPCVGKHMGVTTEEFMRRTSSEGLMDCKMLPINNNHGAGVAMIMGPNFLARKNYQQSSPEDLALAKMLVRPGNLFMEDPVMKDASLLTDTNYGSVKKVYVVAKADGSSTEEMQRWMVLLSPGTEAEEIAGADHAIMSSRPRELCDALVKIADSLNTC

SEQ ID NO: 11622 - protein, 428 aa, Gloeobacter violaceus PCC 7421
MRQVTAIILGGGRGTRLYPLTKRRAKPAVPIGGKYRLIDIPVSNCINSGIQHIYILTQFNSASLNRHVSQTYQFSRFSDGFCEILAAEQTDENPNWFQGTADAVRQYLWLLEPSGSTEYLILSGDHLYRMDYSKFVRRHRETNADVTIAVLPCDLERASDFGLIKTDADGRVVQFTEKPKGAELERMRVDTTTLGLTLEEAERRPFVASMGIYVFRHDVMLKLLRDDPSRTDFGKEILPACLDDYNVQAYLFDDYWEDIGTIEAFYKANLALTSQNAPPFSFYHPAPIYTRPRYLPPSKLIDCQIAESIITEGCIIKQARIFHSVLGLRSRIESGVRIEDSLLMGADFYETPIQREESLRRGLPPVGIGERCVLQKAIIDKNARIGNDVRILNKERPDSADHPERGFYIRHGIVIVPKDTVIPDGTVI

SEQ ID NO: 11623 - protein, 202 aa, Methylobacillus flagellatus KT
MMGMPFQKLVIASGNQGKLKEIQTLLAPLSIEVLPQSALNVPEAEEPFVTFIENALAKARHASRYTGLPALADDSGICVNALQGAPGVHSARYAGEPKSDERNNQKLLQSLDGVHDRHAYYYCVMVLVRHADDPQPLIAEGAWHGEILTAPRGSGGFGYDPLFLDAKTGQTAAELSAEIKNRISHRGHALAKLVQQLERLAS

SEQ ID NO: 11624 - protein, 108 aa, Glycine max
MHTLCVSRDFFLNSGSSDSRPRRSLFFPSLKMGFWTLLEGFLLFANALAILNEDRFLARRGWTLAEMTGPQRNSLKGQVIGLIYACQFLRLPLILFNVITIIVKLFSG

SEQ ID NO: 11625 - protein, 534 aa, Ustilago maydis 521
MAGGAVADVGYTSTGPVARPVNVRQSLPAILVAAASAFGGVLFGYDTGTISGLLVMKNFKETFGQLLPDGKVDLTTNDTSLVVSILSAGTFVGALAGAPLSDILGRRWGMQVALFVFTIGVVMQMATTNLDVFIGGRVVAGLGVGILSTIVPMYQSETAPRWIRGAVVSGYQWAITIGLLCASLATYGTKNHDNSGAWRIPVGIQLAFAIILCIFFTILPESPRWLVKKGNHERASKSLARLNSTDVDDPIVRSELSVIQTNLDIELTHSTGSYLDCFKTNDRKYLLRSLTGIFIQAFQQLTGINFIFYFGTKFFETALPGSDPFIFSVISNVVNVVSTIPGMYMMERLGRRKLLIWGAVWMCLCELIVAVVGTAVPKENTSGGKTAVAFVCIYIAGFASTWGPAAWVVCGEIFPLAIRAKALSLCTASNWLWNFGIGYATPYLVDSGRGKAGLGAKVFFIWTGTCACCAVFAYFLIYETRLLSLEEVDEMYAQTNPIKSTAANAEIRARRSDLEGAVAPVKEDELATHDEKKY

SEQ ID NO: 11626 - protein, 387 aa, Pseudomonas syringae pv. tomato str. DC3000
MTVLKMTDLDLQGKRVLIREDLNVPIKDGVVSSDARILASLPTIRLALEKGAAVMVCSHLGRPTEGEFSAENSLKPVAEYLSKALGRDVPLVADYLDGVDVKAGDIVLFENVRFNKGEKKNADELAQKYAALCDVFVMDAFGTAHRAEGSTHGVAKYAKVAAAGPLLAAELEALGKALGAPAQPMAAIVAGSKVSTKLDVLNSLSAICDQLIVGGGIANTFLAAAGHKVGKSLYEPDLLDTARAIAAKVSVPLPTDVVVAKEFAESATATVKLIADVADDDMILDIGPQTAAHFAELLKSSGTILWNGPVGVFEFDQFGEGTKTLAKAIAESKAFSIAGGGDTLAAIDKYGVADQISYISTGGGAFLEFVEGKVLPAVEMLEQRARA

SEQ ID NO: 11627 - protein, 172 aa, ASPERGILLUS NIDULANS FGSC A4
MASTTTTKTVKEEQPVQSKPRTLADMADSIDQATFEQILEMDDEDEHEFSQGIVYGFFDQAESTFDKMEKALEDKKLSELSSLGHFLKGSSATIGLTKVKDACEKIQHYGAGKDESGTNDEPDEKVSLEKIEKTLATAKKDYKEVENFFRREYYRDEETPSSPEESKKDAKA

SEQ ID NO: 11628 - protein, 289 aa, Streptococcus mutans UA159
MKGIILAGGSGTRLYPLTRAASKQLMPVYDKPMIYYPLSTLMLAGIKDILIISTPQDLPRFKELLQDGSEFGIKLSYAEQPSPDGLAQAFIIGEEFIGDDHVALILGDNIYYGPGLSRMLQKAASKESGATVFGYQVKDPERFGVVEFDNDRNAISIEEKPEHPKSHYAVTGLYFYDNSVVDIAKNIKPSPRGELEITDVNKAYLDRGDLSVEVMERGFAWLDTGTHESLLEAAQYIETVQRMQNLQVANLEEIAYRMGYITADQVRELAQPLKKNEYGQYLLRLIGEA

SEQ ID NO: 11629 - protein, 342 aa, Candida albicans SC5314
MVKVTVAGAAGGIGQPLSLLLKLNPNVDELALFDIVNAKGVAADLSHINTPAVVTGHQPANKEDKTAITEALQGTDLVIIPAGVPRKPGMTRADLFNINASIIRDLVANIARVAPTAAILIISNPVNATVPIAAEVLKKLGVFNPRKLFGVTTLDSVRAETFLGELTNTDPTKLKGKISVIGGHSGDTIVPLINYDAGVGVLSDSDYKNFVHRVQFGGDEVVKAKNGAGSATLSMAYAGYRFADYVISSLTGGATPAGRIPDSSYIYLPGVSGGKEFSAKYVDGVDFFSVPVVLSQGEIRSFVNPFEELTVTKEEKKLVEVALKGLKGSITQGTEFVNASKL

SEQ ID NO: 11630 - protein, 214 aa, uncultured bacterium
MTIEIKVPDLPESVADATIATWHKKPGDLVARDEVLVDIETDKVVLEVPAPEAGVLGDILQLEGATVLSRQLIAILKAAPVAGEETKEKPVEVAADDAADGLSPSVRRLVAEHDIDVAKLTGTGKGGRVTKEDVDAFIKNLGKPAAPAAAVAAAPVAPIAPLAGRTEKRVPMTRLRKRIAERLLEAKNTTAMLTTFNEINMAPIMKLRKQYGEI

SEQ ID NO: 11631 - protein, 404 aa, Vibrio parahaemolyticus RIMD 2210633
MQNIGMSSKLDNVCYDIRGPVLKHAKRMEEEGHKILKLNIGNPAPFGFDAPDEILVDVIRNLPTSQGYCDSKGIYSARKAVVQHYQRKGIRSLDVEDVYVGNGVSELIVMAMQALLNNGDEMLIPAPDYPLWTASVALSGGNPVHYLCDEQSDWYPDLDDIKKKITPKTRGIVLINPNNPTGAVYSRDFLLEVIEIARQHKLIIFADEIYDKVLYDGATHTSVATLTEDVLVMTFNGLSKAYRVCGFRGGWMFLTGPKHLAQGYVNGLELLSSMRLCANVPMQHAIQTALGGYQSINELILPGGRLLEQRNRAFELINQIPGVSCVKPKGAMYLFPKIDTKMYNIKNDQQMVLDFLKQEKVLLVQGSGFNWPKPDHFRIVTLPHVEDLETAIGRFERFLSTYSQ

SEQ ID NO: 11632 - protein, 505 aa, Helicobacter pylori
MVNKDVKQTTAFGAPVWDDNNVITAGPRGPVLLQSTWFLEKLAAFDRERIPERVVHAKGSGAYGTFTVTKDITKYTKAKIFSKVGKKTECFFRFSTVAGERGSADAVRDPRGFAMKYYTEEGNWDLVGNNTPVFFIRDAIKFPDFIHTQKRDPQTNLPNHDMVWDFWSNVPESLYQVTWVMSDRGIPKSFRHMDGFGSHTFSLINAKGERFWVKFHFHTMQGVKHLTNEEAAEIRKHDPDSNQRDLFDAIARGDYPKWKLSIQVMPEEDAKKYRFHPFDVTKIWYTQDYPLMEVGIVELNKNPENYFAEVEQAAFTPANVVPGIGYSPDRMLQGRLFSYGDTHRYRLGVNYPQIPVNKPRCPFHSSSRDGYMQNGYYGSLQNYTPSSLPGYKEDKSARDPKFNLAHIEKEFEVWNWDYRADDSDYYTQPGDYYRSLPADEKERLHDTIGESLAHVTHKEIVDKQLEHFKKADPKYAEGVKKALEKHQKMMKDMHGKDMHHTKKKK

SEQ ID NO: 11633 - protein, 558 aa, Bifidobacterium longum DJO10A
MVANNAGQPATPADLINVDEVIGKYYDLVPDPEVPEQRVIFGTSGHRGSSLKTSFNEAHIIAISQAIAEYRKKAGVTGPLYLGSDTHALSGPAKKTAIEVLVANGVHVRVDSRDDFVPTPVVSQAILTHNRAADGTQRFEGEGLADGIVVTPSHNPPTDGGFKYDPVTGGPAPAETTNAIAARANQLLGDFKSIKRVPYEEAIKSEYVEGFDFREHYVDDLENVIDFDVIRNSGVRLGIDPLGGASVNYWPLINEKYGLNIGVVRPEVDPTWRFMTIDHDGKIRMDPSSPYAMKGLVDELNAGAWDKYDLVGGTDPDADRHGIVCPNWGVMNPNHYIAVCVEYLFGGNRPGWPEGAAVGKTLVSSSLIDRVAASINAKVIEVPVGFKWFVDPLFSGEVAFGGEESSGMSFLRKDGRVWTTDKDGLIPDLLAAEITAKTGKNPAQLHQEQVERFGESWYKRVDTPTTLEQKAKFAALSGDDVTASTLAGEDITAKLTEAPGNHAKIGGLKVTTKDNWFAARPSGTENIYKVYAESFVSPEALDKVLDEATVVVDKALSE

SEQ ID NO: 11634 - protein, 185 aa, Betula pendula
KECRHCKSEESNLCELLRINTDRGVMLSDGKSRFSIKGKPIFHFVGTSTFSEYTVVHRGCAVKINPLAPLDKVCILSCGISTGLGATLNVAKPKKGSSVAVFGLGAVGLAAAEGARIAGASRIIGVDLHPDRIKEARKFGVTELVNPKDHKKPIQEVIADMTDGGVDRSVECTGNVDCMISAFEC

SEQ ID NO: 11635 - protein, 172 aa, Gloeobacter violaceus PCC 7421
MALIDPQGRLFGKINVIDAVVVAAVILALFAFLLSRGGSQAQIATQGGDQPVEVDMLIRSLSIGDPNVFPVGKPTSVIIRNQPAGELTIRRVRVIPHLVPVVVGSEIRNIQDPGDPYGRDYVVTLAGDASATGDGLVIGRVKAKIGTPIEIEGFKYILRGSIVDVRQLEKRS

SEQ ID NO: 11636 - protein, 280 aa, Rhodopseudomonas palustris CGA009
MGRLDGKVAVITGATSGIGWRTAEVFVAEGARIVVAGRRMAEGEALAAQLGSSCVFKQTDVTDEAQVKALIDTALDTFGRLDCLFNNAGGPAQTGGIEGLEVDRFDAAMATLVRSVMLGMKHAAPAMKKQGAGSIINNGSIAGRLAGFSSSLVYGAAKAAVNHLTKCVAMELGESGIRVNSISPGAIATGIFGKALGLTTDAAEKTAATMREIYKTAQPIPRAGIPDDIAQAAVFLASDESTFINGHDLVVDGGITGGRNWTAQQQGYVALRKAFDHGEG

SEQ ID NO: 11637 - protein, 323 aa, Burkholderia fungorum LB400
MSSMLAYRIHRFGGSEVLQSEKIDVPEPGASEVLVRVQTASVNPVDIKTRAGEYPLIREDRLPYTLGRDFAGVVERAGADVGEWKRGDEVYGFVGQGQGAYAEFVVVDAQALARRPATVDAVTAGAVPLAALTAWQGLFDHGGLEAGQRVLIHAGAGGVGHFAVQFAQRMGAEVFVTASGDGVEFVRSLGADHVIDYHAQRFEEVARDMDLVFDLVGGDTQRRSWAVVAPGAALISTLNEPSQTEAASHGAHAARYTARPDGTQLARIASLIDEGEVRVEVVGTYPFDATGDALARLAKGHVHGKIVVEVSETLGRSQSQSQS

SEQ ID NO: 11638 - protein, 335 aa, Streptococcus pneumoniae R6
MKRIAVLTSGGDAPGMNAAIRAVVRQAISEGMEVFGIYDGYAGMVAGEIHPLDAASVGDIISRGGTFLHSARYPEFAQLEGQLKGIEQLKKHGIEGVVVIGGDGSYHGAMRLTEHGFPAIGLPGTIDNDIVGTDFTIGFDTAVTTAMDAIDKIRDTSSSHRRTFVIEVMGRNAGDIALWAGIATGADEIIIPEAGFKMEDIVASIKAGYECGKKHNIIVLAEGVMSAAEFGQKLKEAGDISDLRVTELGHIQRGGSPTPRDRVLASRMGAHAVKLLKEGIGGVAVGIRNEKMVENPILGTAEEGALFSLTAEGKIVVNNPHEADIELSSLNKSLS

SEQ ID NO: 11639 - protein, 429 aa, Burkholderia fungorum LB400
MTMKNAELKSRKDAATPRGVGVMCDFYAERAENAELWDIEGRRFIDFAAGIAVCNTGHRHPKIVAAIRDQLDHFTHTAYQIVPYASYVELAEKLNERAPGDYPKKTAFFTTGAEAVENAIKIARAATGRPGVIAFTGAFHGRTLMGMALTGKVAPYKIGFGPFPSDVFHAPFPNPLHGVTTADSLKAIEFLFKADIDPKRVAAIIFEPVQGEGGFYPAPAEFVRALRKLCNEHGILLIADEVQTGFARTGKLFAMNHYDVVPDLMTVAKSLAGGMPLSGVIGRADVMDAAAPGGLGGTYAGNPLAVAAAHAVLDIIDEEKLCERATLLGDRIKAKLIALQSDVPQIADVRGPGGMVAVEFCKAGTTEPDAEFTKRVQSRALERGLLLLVCGVYSNVVRFLFPLTIQEAVFDEALAILEDVIKDSVAITV

SEQ ID NO: 11640 - protein, 417 aa, Medicago sativa
ARENITPSPTASSDSVFAHLVRAPEDPILGVTVAYNKDPSPIKLNLGVGAYRTEEGKPLVLDVVRRVERQLLNDMSRNKEYIPIVGLADFNKLSAKLIFGADSPAIQENRVTTVQGLSGTGSLRVGGEFLAKHYHQRIIYLPTPTWGNHTKVFNLAGLTVKTYRYYAPATRGLDFQGLLEDLGSAPSGSVVLLHACAHNPTGVDPTLEQWEQIRQLIRSKSLLPFFDSAYQGFASGSLDADAQPVRLFVADGGELLVAQSYAKNMGLYGERVGALSIVSKSADVSSRVESQLKLVIRPMYSSPPIHGASIVAAILKDRDLYNDWTIELKAMADRIINMRQQLFDALRARGTPGDWSHIIKQIGMFTFTGLNPEQVSILTKEYHIYLTSDGRISMAGLSSKTVPHLADAIHAVVTRVA

SEQ ID NO: 11641 - protein, 388 aa, Microbulbifer degradans 2-40
MSVSALMNTYGERKTTLTKGDGPYLWDSEGRRYLDALSGIAVCGLGYNYPSVTQAISEQAKTLIHCSNLFLIEPQQELGKLLVQASGMDKVFFSNSGAEANEAAIKLARKYAQDKGITAPHIITCDKSFHGRTMATLSATGNPKVKAGFFPMVEGFSHVPYNDIEAIKQAATENTIAIMVEPIQGEGGVNVPADDYLTNLRALCDENGWLLILDEIQTGNGRTGAYFAYQHTNIHPDVVTTAKGLGNGVPIGACLAKGKAAEVFQPGNHGSTFGGNPLACSAAVATFKALVNDGIMKSGAATGNSMIAKFKERFANNPKVVEVKGQGMMMGIQLSQDCPTLVERAKEKNLLLNVTAGNTIRLLPPLILTEEQAQTVVDTVVQLVEEIE

SEQ ID NO: 11642 - protein, 457 aa, Salmonella typhimurium LT2
MQKYTSEARQLLALRIPVILAQVAQTAMGFVDTVMAGGYSATDMAAVAIGTSIWLPAILFGHGLLLALTPVIAQLNGSGRRERIAHQVRQGFWLAGFVSVLVMIVLWNAGYIIRSMHNIDPALADKAVGYLRALLWGAPGYLFFQVARNQCEGLAKTKPGMVMGFLGLLVNIPVNYIFIYGHFGMPELGGIGCGVATAAVYWVMFIAMLSYIKHARSMRDIRNEKGFGKPDSVVMKRLIQLGLPIALALFFEVTLFAVVALLVSPLGIVDVAGHQIALNFSSLMFVLPMSLAAAVTIRVGYRLGQGSTLDAQTAARTGLGVGICMAVVTAIFTVTLRKHIALLYNDNPEVVALAAQLMLLAAVYQISDSIQVIGSGILRGYKDTRSIFFITFTAYWVLGLPSGYILALTDLVVDRMGPAGFWMGFIIGLTSAAVLMMLRMRYLQRQPSAIILQRAAR

SEQ ID NO: 11643 - protein, 182 aa, Betula pendula
MACSMISSATVAAVSRASPAQSSMVAPFTCLKSTSAFPVTQKTNNDITSIASNGGRVQCMQVWPPLGLKKFETLSYLPPLSSEQLAKEVDYLLRKNLIPCLEFELEHGFVYREHNRSPGYYDGRYWTMWKLPMFGCNDSSQVLKELEECKKAYPSAFIRIIGFDNKRQVQIISFIAYKPPGV

SEQ ID NO: 11644 - protein, 162 aa, Saccharomyces cerevisiae
MTTSFYDLECKDKKGESFKFDQLKGKVVLIVNVASKCGFTPQYKELEELYKKYQDKGFVILGFPCNQFGKQEPGSDEQITEFCQLNYGVTFPIMKKIDVNGSNADSVYNYLKSQKAGLLGFKGIKWNFEKFLVDSNGKVVQRFSSLTKPSSLDQEIQSLLSK

SEQ ID NO: 11645 - protein, 444 aa, Oryza sativa
MAPTTAAAAASSNGGGESDGSSKEWRLTAPTRGGAMAAAGDKMSIRAVRYKISASVDDRGPRPVLPLAHGDPSVFPEFRTAAEAEDAVADALRSGDFNCYPAGVGLPAARRAVADHLSRDLPYKLSSDDIFLTAGGTQAIEVVISILAQPGTNILLPRPGYPNYEARAAFNNLEVRHFDLIPEKGWEIDLNSLESIADKNTTAIVIINPNNPCGNVYTYEHLSKVAEVARKLGILVITDEVYGNLVFGSSPFVPMGCFGHIVPILTIGSLSKRWIVPGWRLGWVAICDPKKTLQETKIATLITNFLNVSTDPATFIQGALPNILKNTKEEFFKRIIDLLTETSDICYRGIKDIKCITCPHKPEGSMFVMVKLNLYLLEGIHDDVDFCCQLAKEESVILCPGSVLGMKNWVRITFAIDSSSLLDGLERIKSFCQRHKKKNPLNYI

SEQ ID NO: 11646 - protein, 447 aa, Candida albicans SC5314
MNLSLQDPFSVAKEFPETLTNTLNYGHSVAIQFNHKGDYLASGLSDGSIVIYEMVSSGVIAHLNQYCHIRPITSITWSKCGRYLLTSSQDWWVKLWDLSKVNITDAKDIDESPVIREVKFDGPIWSACMHPTNPFVFTASLFEDSPVYVDFTAKDQPPQITRLTTTPLEMNEPTEGDDEEEIARKRRKKMEKHMTLVSIFTHEGNYIFTGTSKGWLNIFDTTSSNLNLVRSIKIANSNIKNLMISQNGRKLAVNSSDRIIRQIDLPDLINVEDSNDWDFEIDHKYQDVVNRLQWNSISFNHNAEFLVASTHGQSSHDLYLWETSMASLVKILEGSNEELVDVKWNYSRCTIGSIGLDSGIIYLWSVQFPQKWSALAPDFVEIEENIEYLEKEDEFDIIDEDELHKKRLEEEDYVADVLKMDTTDARGFDITQDSFIIPINYEKNFYE

SEQ ID NO: 11647 - protein, 414 aa, Escherichia coli
SKVVVPAQGKKITLQNGKLNVPENPIIPYIEGDGIGVDVTPAMLKVVDAAVEKAYKGERKISWMEIYTGEKSTQVYGQDVWLPAETLDLIREYRVAIKGPLTTPVGGGIRSLNVALRQELDLYICLRPVRYYQGTPSPVKHPELTDMVIFRENSEDIYAGIEWKADSADAEKVIKFLREEMGVKKIRFPEHCGIGIKPCSEEGTKRLVRAAIEYAIANDRDSVTLVHKGNIMKFTEGAFKDWGYQLAREEFGGELIDGGPWLKVKNPNTGKEIVIKDVIADAFLQQILLRPAEYDVIACMNLNGDYISDALAAQVGGIGIAPGANIGDECALFEATHGTAPKYAGQDKVNPGSIILSAEMMLRHMGWTEAADLIVKGMEGAINAKTVTYDFERLMDGAKLLKCSEFGDAIIENM

SEQ ID NO: 11648 - protein, 539 aa, Triticum aestivum
  unsure (1)..(539): unsure at all Xaa locations
MDPYKVCTPPILPQPTRSRQLAGPDRRFGCPCRPAIRSSDALGFPGFLCCSQHRPTSGANSGYWTTNSGAPVWNNNNALTVGQRGPILLEDYXLIEKLAQFDRERIPERVVHARGASAKGFFEVTHDVSQLTCADFLRAPGVQTPVIVRFSTVVHERGSPETLRDPRGFAVKFYTREGNFDLVGNNMPVFFIRDGMKFPDMVHAFKPSPKTNMQENWRIVDFFSHHPESLHMFTFLFDDVGIPLNYRHMDGFGVNTYTLISRDGKAHLVKFHWKPTCGVKCLLDDEAVTVGGTCHTHATKDLTDSIAAGNYPEWKLFIQTIDADHEDKFDFDPLDVTKTWPEDIIPLQPVGRMVLNKNIDNFFAENEQLAFCPAITVPGIHYSDDKLLQTRIFSYADTQRHRLGPNYLMLPVNAPKCAHHNNHHDGLMNFMHRDEEVNYFPSRFDPTRHAEQYPIPPRVLSGCREKCIIEKENNFKQAGERYRSFDPARQDRFLQRWVDALTDARVTHEIQGIWVSYWSQCDTSLGQKLASRLKIKPSM

SEQ ID NO: 11649 - protein, 239 aa, Oryza sativa
PEVNLVTGDGGYVLQDVPHVCDYLPDLPTYSNPLQDNPAYSVVKQYFVNPDDTVCQKAIVHKDGPTGYHFRRAGPRQRVFFESDEVHACIVTCGGLCPGLNTVIREIVCGLYDMYGVSRVLGIQGGYRGFYACNTIDLSPKSVNDIPKRGGTVLGTSRGGHDTMKIVDSIQDRGINQVYVIGGDGTQRGAGVIFEEIRRRGLKVAVAGIPKTIDNDIPVIDRSFGFHTAVEEAQRAINA

SEQ ID NO: 11650 - protein, 300 aa, Magnaporthe grisea 70-15
MANVTGVASATDMPIQAVFAEVSQHFQQLTMMERLWATWYTWMQNDVLATGLLTFIIHEVVYFGRSIPWIIMDSMPIFQKYKIQQTKVPTIKEQLHCAGLVLLSHFTVELPEIWVFHPVAIYCGMAFDVPFPPAWKIALHIAVFFVLEDAWHYWTHRLMHYPPLYRSIHKLHHTYTAPFGLTAEYASPIEVLVLGLGTAGTPLLWVYLTGDLHLFTMQAWIVLRLLQAVDAHSGYEFPWSLHHILPFWAGAQHHDIHHEQFVGNYASSFRWWDYFMDTEAGAEANAKRRERKMAALKKTL

SEQ ID NO: 11651 - protein, 485 aa, Agrobacterium tumefaciens str. C58
MQNKVQFITYVDRLTRGGFRQLKELVDGKFAGLFGGVHVLPFFNPIDGADAGFDPTDHTIVDPRLGDWEDVRALSGSVEIMADLIVNHVSSQSGAFTDFIAKGSASEFADMFMTFDKVFPDGATEEDLLRIYRPRPGLPFSKVTLADGTQRMLWTTFTPEQIDIDVHSAKGTTYLETILDRFSEANVTAIRLDAAGYAIKKAGSSCFMIDDTYAFLEEVAGKARNRGMEVLVEIHSYHRDQIEIAKKVDRVYDFALPPLILHALFTGDATPLAKWLAISPRNAITVLDTHDGIGVIDVGAHSDGRAGLLEPQAIDNLVGEIHRRSDGQSRQATGAAASNLDLYQVNCTYYDALGRNDNDYLIARAIQFFAPGIPQVYYVGLLGGVNDMDLLAKTGVGRDINRHYYGNDEIGTALETPLFHRLSNLIRFRNTHPAFGGALKATIADAGALVLSWQHGDAFAELKISFADRKASIAASGQSEMQIVE

SEQ ID NO: 11652 - protein, 525 aa, Mycobacterium tuberculosis H37Rv
MSFVIAAPEFLTAAAMDLASIGSTVSAASAAASAPTVAILAAGADEVSIAVAALFGMHGQAYQALSVQASAFHQQFVQALTAGAYSYASAEAAAVTPLQQLVDVINAPFRSALGRPLIGNGANGKPGTGQDGGAGGLLYGSGGNGGSGLAGSGQKGGNGGAAGLFGNGGAGGAGASNQAGNGGAGGNGGAGGLIWGTAGTGGNGGFTTFLDAAGGAGGAGGAGGLFGAGGAGGVGGAALGGGAQAAGGNGGAGGVGGLFGAGGAGGAGGFSDTGGTGGAGGAGGLFGPGGGSGGVGGFGDTGGTGGDGGSGGLFGVGGAGGHGGFGSAAGGDGGAGGAGGTVFGSGGAGGAGGVATVAGHGGHGGNAGLLYGTGGAGGAGGFGGFGGDGGDGGIGGLVGSGGAGGSGGTGTLSGGRGGAGGNAGTFYGSGGAGGAGGESDNGDGGNGGVGGKAGLVGEGGNGGDGGATIAGKGGSGGNGGNAWLTGQGGNGGNAAFGKAGTGSVGVGGAGGLLEGQNGENGLLPS

SEQ ID NO: 11653 - protein, 410 aa, Bifidobacterium longum DJO10A
MTPGVAFFYGGMVRAKAVLNMLMLEAAALSVTMIIWTLWGWSIAYAGSDIGGIFGDPASGFLLKDSMVAQDGVFTATGLNGNNYPVSVDVAFQVAFAMITVGLICGAIAERVKYSTWMIFVALWVTFDYAPMAHMVWNGGLLSADGAISKAIGAAAHDFAGGTVVHINAAVAALIIVLIIGKRKGFGTQPFRPHNVPFVMLGAFLLWFGWFGFNAGSAFAANGTAGYAWVSTSAATAAAMLSWGFTEKIRSGHYTAMGAASGMVAGLVAITPAADVVSPLWAIVMGAIAGVLTCLACGLKFKFGYDDSLDVVGVHGVGGFTGTILIGFFGEGTGLLAGGDWRQLVVQLVIALVAILYSAVITAIIAFALEKTIGWRVTEAQEVGGIDLADQGERAYDFAGTASSVLKEVK

SEQ ID NO: 11654 - protein, 423 aa, Pseudomonas putida
MGTHVIKMPDIGEGIAQVELVEWFVKVGDIIAEDQVVADVMTDKATVEIPSPVSGKVLALGGQPGEVMAVGSELIRIEVEGSGNHVDVPQAKPAEVPAAPVAAKPEPQKDVKPAAYQASASHEAAPIVPRQPGDKPLASPAVRKRALDAGIELRYVHGSGPAGRILHEDLDAFMSKPQSAAGQTPNGYARRTDSEQVPVIGLRRKIAQRMQDAKRRVAHFSYVEEIDVTALEALRQQLNSKHGDSRGKLTLLPFLVRALVVALRDFPQINATYDDEAQIITRHGAVHVGIATQGDNGLMVPVLRHAEAGSLWANAGEISRLANAARNNKASREELSGSTITLTSLGALGGIVSTPVVNTPEVAIVGVNRMVERPVVIDGQIVVRKMMNLSSSFDHRVVDGMDAALFIQAVRGLLEQPACLFVE

SEQ ID NO: 11655 - protein, 459 aa, Pseudomonas putida
MQQTIQTTLLIIGGGPGGYVAAIRAGQLGIPTVLVEGQALGGTCLNIGCIPSKALIHVAEQFHQASRFTEPSPLGISVASPRLDIGQSVAWKDGIVDRLTTGVAALLKKHGVKVVHGWAKVLDGKQVEVDGQRIQCEHLLLATGSSSVELPMLPLGGPVISSTEALAPKALPQHLVVVGGGYIGLELGIAYRKLGAQVSVVEARERILPTYDSELTAPVAESLKKLGIALHLGHSVEGYENGCLLANDGKGGQLRLEADRVLVAVGRRPRTKGFNLECLDLKMNGAAIAIDERCQTSMHNVWAIGDVAGEPMLAHRAMAQGEMVAEIIAGKARRFEPAAIAAVCFTDPEVVVVGKTPEQASQQGLDCIVAQFPFAANGRAMSLESKSGFVRVVARRDNHLILGWQAVGVAVSELSTAFAQSLEMGACLEDVAGTIHAHPTLGEAVQEAALRALGHALHI

SEQ ID NO: 11656 - protein, 180 aa, Glycine max
MSFSTKLPLKFSDDMCGIYELAAEMVCEDLPKEVCAFSVASSGKRCLLETEKAADGGVEYQCRTSEVVVERMADYIETDQCVEACGVDRNSVGISSDAFFEPQFTGKLCSPACYQKCPNIVDLFFNLAAGEGVFLPELCEKHKTNPRRAMVELVSSGAAPGPVSDVSEAIIASAPAPSAL

SEQ ID NO: 11657 - protein, 294 aa, Oceanobacillus iheyensis HTE831
MSVKKAIIPAAGLGTRFLPATKAQPKEMLPIVDKPTIQYIVEEAVHSGIEDIIIISGRGKRAIEDHFDKSYELEEKLTEKEDYDMLQEIQQISGLANIHYIRQKEPKGLGHAIHCAHTFIGNEPFAVLLGDDIVVSDEPCLKQLINVFEENHQKSVIGVHDVPWEDVSKYGIVKPSKGLDDSSSIHFIEDLIEKPDRDKAPSNLAIMGRYVLTPEVFPILEKLPPGKDNEIQLTDALIELKKVEEMIAYNFQGKRYDVGNKLGFIEATIDFALNRNDLHNDVKHLLKKKLDSME

SEQ ID NO: 11658 - protein, 364 aa, Shigella flexneri 2a str. 301
MKINRIVNEGFMKTMLAAYLLGNSTVDLREVAVPTPGINQVLIKMKSSGICGSDVHYIYHQHCATAAAPDKPLYQGFINGHEPCGQIVAMGQGCRHFKEGDRVLVYHISGCGFCPNCRRGFPISCTGKGKAAYGWQRDGGHAEYLLAEEKDLILLPDALSYEDGAFISCGVGTAYEGILRGEVSGSDNVLVVGLGPVGMMAMMLAKGRGAKRIIGVDMLPERLAMAKQLGGMDHGYLATTEGLPQIIAELTHGGADVALDCSGNAAGRLLALQSTADWGRVVYIGETGKVEFEVSADLMHHQRRIIGSWVTSLFHMEKCAHDLTDWKLWPRNAITHRFSLEQAGDAYVLMASGKCGKVVINFPD

SEQ ID NO: 11659 - protein, 294 aa, Pseudomonas fluorescens PfO-1
MLAELGAQHPLILETFKEASDALGYDLWALTQQGPEELLNQTDKTQPAILTASVALWRLWLAEGGARPAFVAGHSLGEYSALVAAGSLSLADAVKLVERRGQLMQEAVPAGQGGMAAILGLEDADVLAACAEAAQGEVVSAVNFNSPGQVVIAGAKAAVERAIEGCKARGAKRAMPLPVSVPSHCELMRPAAERFAESIAAIDWQAPQIPVVQNVSAQVPADLETLKRDLLEQLYKPVRWVESVQTLAAKGATNLVECGPGKVLAGLNKRCAEGVSTSNLNTPDAFAAARAAAV

SEQ ID NO: 11660 - protein, 554 aa, Cytophaga hutchinsonii
MAELIKMPKMSDTMTEGVIAAWHKKVGDKVKSGDLLAEVETDKATMEMESYEDGTLLYIAAEAKSAVPIDGVIAVIGKDGENIDALIKEIKGGGAPAEAPKTEAKAEAEVPKAEKPAEAAKQAAPAVDLSSIKAEAILMPKMSDTMVEGTIVAWHKKVGDAVKSGELLAEVATDKATMEMESYEDGTLLHIEVKEGDAVQIDGLIAIIGEKGTDVTPIINAYKNGGKPSAAPAAASEPAKQETASAPASNNAPAAQASSSSDERAKISPLARKIASDKGIDIKQVKGSGDHGRVIKRDIENFKAAPAEAAPAKGSGAPAASLPNIVGQEGFDEVPVSQMRKVIVKRLSESLFTAPHFYLTMEINMDKAIEARASINEVATAKVSFNDMVIRASAAALRKHPMVNASWQGDKIRVNHHIHIGVAIAIEDGLVVPVVRFADSKSLSHISQEVKELGGKAKSKKIQPADMAGNTFTISNLGMFGIDEFTSIINSPDACILSVGGIKQTPIVKNGQIVVGNIMKVTLACDHRVVDGAVGSAFLQTLKSYLEDPVRILA

SEQ ID NO: 11661 - protein, 183 aa, Malus sp.
MASSMISSGTVATVSADRPAPAQARMVAPFTGLKSSSASPVTRKSNDITSIASNGGRVQCMQVWPPLGLKKFETLSYLPPLSTESLAKEVDYLLRKNWVPCLEFELEHGFVYRENHRSPGYYDGRYWTMWKLPMFGCTDSSQVLKELEEAKKAYPQSFIRIIGFDNVRQVQCISFIAYKPAGF

SEQ ID NO: 11662 - protein, 294 aa, Medicago sativa
MEQYEKVEKIGEGTYGVVYKARDRATNETIALKKIRLEQEDEGVPSTAIREISLLKEMQHRNIVRLQDVVHSEKRLYLVFEYLDLDLKKFMDSSPEFAKDQRQIKMFLYQILCGIAYCHSHRVLHRDLKPQNLLIDRSSNAVKLADFGLARAFGIPVRTFTHEVVTLWYRAPEILLGSRHYSTPVDVWSVGCIFAEMINQRPLFPGDSEIDELFKIFRITGTPNEETWPGVTSLPDFKSAFPKWPAKDLATQVPNLEPAGLDLLSSTCRLDPTRRITARGALEHEYFKDIKFVP

SEQ ID NO: 11663 - protein, 368 aa, Nostoc sp. GSV224
MPLAAVMTAPNQPVEVQQLPDPILEKGGIILETLYSEVCGTDVHLLHGRLEGVPYPIIPGHFSVGRVVETGGAVSDVNGKLIQPGAIATFLDVHETCYNCWYCLVAKASTRCPQRKVYGVTYSAKDGLLGGWSELIYLKPGVKVLTLPEEVSPKQFIAGGCALPTALHAIDRAQIQIGDVVVVQGCGPVGLSAAILALLSGAGKVIVIDKFESRLVVAKSFGVDETLAIKADDPRQHIERVLELTNGHGADVTIEATGIPIAVKEGLNMTRNGGRYVIVGHYTNTGEILINPHLEINLKHIDIRGTWGIDFSHFYRMIELLKRHSDSSKNIAWSSIISRSYTLKEINQALADVEQGSVLKAVIQPNLS

SEQ ID NO: 11664 - protein, 488 aa, Bacillus halodurans
MAHTVSEQRIHEVGSMKRDHYRMVINGERVDSDETFETFNPAKGEILATVAKASREHAEKAVQAARHAFDHGKWRKYPVGKRARVLNQIAAIMRERFQELVEIEVLNSGKAISAAQPQINQAIEDFEFYAGAIVGHRGTVNNVPNGFLNYTQKEPVGVCAQIIPWNYPLMMAAWKVAPALAAGCSVVVKPASLTPITAILLNEICHEAGVPEGVVNTVAGAGSVVGDYLVGHEDVNKVAFTGSTPIGKDIMEKASHTLKRVTLELGGKSPNLVFADADMEAAVAGSLFGIYFNTGQSCEARSRLFVHEEIYDEFIEEFITRAKKLQLGDPFDKGTHVGSIISRDQLEIIDSYVRSAEEEGATIALGGKERRVEGFENGHWYEPTVITNVTPDMKAVQEEIFGPVVVVETFQDEREVIKRANDTKFGLGSAIWTKDQGRATRVAHQLEAGIVMVNCPFSAFPGTPFGGYKESGFGRELCVETLDLYIGR

SEQ ID NO: 11665 - protein, 296 aa, Pseudomonas syringae pv. tomato str. DC3000
MTTINRKGIILAGGSGTRLHPLTLGVSKQMLPIYDKPMIFYPLSVLMLAGMREVLIISTPEDLPSFRKLLGDGSQYGIELTYAEQPTPDGLAQAFIIGEEFIGEDPCCLILGDNIFYGQHFSDNLRSASQQTEGATVFGYHVSDPERFGVVEFDETGRALSIEEKPAAPKSSYAVTGLYFYDNQVVEIAKSIKPSERGELEITDVNRAYLEQKSLTVEILGRGFAWLDTGTHESLLEASHFVHTIEQRQGWKVACLEEIAYTNGWITASQLGEQAQKLKKTGYGQYLQKLLDLGSF

SEQ ID NO: 11666 - protein, 182 aa, Zea mays
FGQKGRDEPSSSGPKSKACREKMRRDKLNDRFLELSSVMNPGKQAKLDKANILSDAARMVAQLRGEAEKLKESNEKLRENIKDLKEEKNELREEKVRLKVEKDRLEQQVKAMSVAPTGYVPHLPHPASYHPAAFTPFVPPQQAPANKSAPIPAPFPGMAMWQWLPPTIVDTTQDPKLWPPNA

SEQ ID NO: 11667 - protein, 273 aa, Nostoc sp. GSV224
MLEDLQIAFIGGGTMGEMIISRLLSTKIVPKADLIIVSDPVSARCLHLEREYGVRTTTSNIEAVLGVSIVILAVKPQILAEVLGMLKDKIPPNALVISIVSGASISSLCQGLNHPAVVRTMPNIAVQVGHGTTVWSASSSVTEIQRSHTQIILQALGKEFATQNEHYLDMATALSSAGTGFVFLYIEAMIDAGVQMGLTRTQAQELTLHTIAGSVELMFQTHEHPAVLRNKVTSPGGVTAAGLYELEKGGMRTVISNAVLAALSRTQQLGNIS

SEQ ID NO: 11668 - protein, 187 aa, Ginkgo biloba
DEHGEVVAEIRRSDLEPYLGLHYPATDISQASRFLFMQNRVRMICDCCATPVKVIQDEELRQPLCLVGSTLRAPHGCHAQYMANMGSIASLVMAVIINGTDEEGLSGRNSMKLWGLVVCHHTSPRAVPFPLRYACEFLMQAFGLRLNMELQLGAQLHEKHILRTQTLLCDMLLRDAPIGIVTQSPSI

SEQ ID NO: 11669 - protein, 355 aa, Chlamydia trachomatis
  unsure (1)..(355): unsure at all Xaa locations
ACLQVDSRGSPQIGIKXSELGPKAMYFAMQGSCPSDKRIFFVSNIDPDNAAEVLLEIDLEQTLVVVVSKSGTTLEPAANEELFRQAYQNKGLSIAEHFVAVTSQGSPMDDKSAYLEVFHLWDSIGGRFSATSMVGGVVLGFAFGYEAFIEFLQGAAAIDAHALTPKMRENLPLLSAMLGVWNRNLLGYPTTAVIPYSTGLKYFTAHLQQCGMESNGKSISREGKEISFRTSPIIWGDVGTNCQHSFFSLHQGTDIVPVEFIGFLHNQRGLDCVLSGTSSSQKLFANLVAQSLALAQGRDNANPNKRFKGNSPSSILVAQQLSPRIAGSLLAFYSINLHFKGFAGESILLTKKGFH

SEQ ID NO: 11670 - protein, 440 aa, Oryza sativa
MASRIASRLLRRSNATLGLIRSYSHARNYSSQLSALIPIGSQSSKLTRRRYYLPNASPYQLWSRSFASDNGDQVEAVVPFMGESVTDGTLANFLKKPGDRVEADEPIAQIETDKVTIDVASPEAGVIEKFIASEGDTVTPGTKVAIISKSAAPAETHVAPSEDSTPKETPPKAEETKPKLEEKSPKAEPPKMPLPPKTSPTEPQLPPKERERRVPMPRLRKRIANRLKDSQNTFAMLTTFNEVDMTNLMKLRSDYKDEFVTKHGVKLGLMSCFVKAAVTALQNQPIVNAVIDGDDIIYRDYVDISVAVGTSKGLVVPVIRDADNMNFADIEKGINALAKKATEGALSIDEMAGGTFTISNGGVYGSLISTPIINPPQSAILGMHSIVQRPVVVDGNILARPMMYLALTYDHRLIDGREAVYFLRRIKDVVEDPRRLLLDI

SEQ ID NO: 11671 - protein, 1111 aa, Arabidopsis thaliana
MSSNTSRSYSTRSRQNSRVSSQVLVDAKLHGNFEESERLFDYSASINLNMPSSSCEIPSSAVSTYLQKIQRGMLIQPFGCLIVVDEKNLKVIAFSENTQEMLGLIPHTVPSMEQREALTIGTDVKSLFLSPGCSALQKAVDFGEISILNPITLHCRSSSKPFYAILHRIEEGLVIDLEPVSPDEVPVTAAGALRSYKLAAKSISRLQALPSGNMLLLCDALVKEVSELTSYDRVMVYKFHEDGHGEVIAECCREDMEPYLGLHYSATDIPQASRFLFMRNKVRMICDCSAVPVKVVQDKSLSQPISLSGSTLRAPHGCHAQYMSNMGSVASLVMSVTINGSDSDEMNRDLQTGRHLWGLVVCHHASPRFVPFPLRYACEFLTQVFGVQINKEAESAVLLKEKRILQTQSVLCDMLFRNAPIGIVTQSPNIMDLVKCDGAALYYRDKLWSLGVTPTETQIRDLIDWVLKSHGGNTGFTTESLMESGYPDASVLGESICGMAAVYITEKDFLFWFRSSTAKQIKWGGARHDPNDRDGKRMHPRSSFKAFMEIVRWKSVPWDDMEMDAINSLQLIIKGSLQEEHSKTVVDVPLVDNRVQKVDELCVIVNEMVRLIDTAAVPIFAVDASGVINGWNSKAAEVTGLAVEQAIGKPVSDLVEDDSVETVKNMLALALEGSEERGAEIRIRAFGPKRKSSPVELVVNTCCSRDMTNNVLGVCFIGQDVTGQKKLTENYSRVQGDYARIMWSPSTLIPPIFMTNENGVCSEWNNAMQKLSGIKREEVVNKILLGEVFTTDDYGCCLKDHDTLTKLRIGFNAVISGQKNIKKLLFGFYHRDGSFIEALLSANKRTDIEGKVTGVLCFLQVPSPELQYALQVQQISEHAIACALNKLAYLRHEVKDPEKAISFLQDLLHSSGLSEDQKRLLRTSVLCREQLAKVISDSDIEGIEEGYVELDCSEFGLQESLEAVVKQVMELSIERKVQISCDYPQEVSSMRLYGDNLRLQQILSETLLSSIRFTPAWKGLCVSFKVIARIEAIGKRMKRVELEFRIIHPAPGLPEDLVREMFQPLRKGTSREGLGLHITQKLVKLMERGTLRYLRESEMSAFVILTEFPLI

SEQ ID NO: 11672 - protein, 808 aa, Escherichia coli
MSKNERMVGISRRTLVKSTAIGSLALAAGGFSLPFTLRSAAAAVQQAREKVVWGACSVNCGSRCALRLHVKDNEVTWVETDNTGSDEYGNHQVRACLRGRSIRRRINHPDRLNYPMKRVGKRGEGKFERISWDEALDTIASSLKKTVEQYGNEAVYIQYSSGIVGGNMTRSSPSASAVKRLMNCYGGSLNQYGSYSTAQISCAMPYTYGSNDGNSTTDIENSKLVVMFGNNPAETRMSGGGITYLLEKAREKSNAKMIVIDPRYTDTAAGREDEWLPIRPGTDAALVAGIAWVLINENLVDQPFLDKYCVGYDEKTLPADAPKNGHYKAYILGEGDDNTAKTPQWASQITGIPVDRIIKLAREIGTAKPAYICQGWGPQRQANGELTARAIAMLPILTGNVGISGGNSGARESTYTITIERLPVLDNPVKTSISCFSWTDAIDHGPQMTAIRDGVRGKDKLDVPIKFIWNYAGNTLVNQHSDINKTHEILQDESKCEMIVVIENFMTSSAKYADILLPDLMTVEQEDIIPNDYAGNMGYLIFLQPVTSEKFERKPIYWILSEVAKRLGPDVYQKFTEGRTQEQWLQHLYAKMLAKDPALPSYDELKKMGIYKRKDPNGHFVAYKAFRDDPEANPLKTPSGKIEIYSSRLAEIARTWELEKDEVISPLPVYASTFEGWNSPERRTFPLQLFGFHYKSRTHSTYGNIDVLKAACRQEVWINPIDAQKRGIANGDMVRVFNHRGEVRLPAKVTPRILPGVSAMGQGAWHEANMSGDKIDHGGCVNTLTTLRPSPLAKGNPQHTNLVEIEKI

SEQ ID NO: 11673 - protein, 68 aa, Glycine max
  unsure (1)..(68): unsure at all Xaa locations
MSTTLDHPIRQKRLTYVAVVHLKKHGMRFEIAXYANTVLSWHSGVEKDRHEALHVHTAYTNVCKGDLG

SEQ ID NO: 11674 - protein, 386 aa, Escherichia coli
  unsure (1)..(386): unsure at all Xaa locations
MTRKQATIAVRSGLNDDEQYGCVVPPIHLSSTYNFTGFNEPRAHDYSRRGNPTRDVVQRALAELEGGAGAVLTNTGMSAIHLVTTVFLKPGDLLVAPHDCYGGSYRLFDSLAKRGCYRVLFVDQGDEQALRAALAEKPKLVLVESPSNPLLRVVDIAKICHLAREVGAVSVVDNTFLSPALQNPLALGADLVLHSCTXYLNGHSDVVAGVVIAKDPDVVTELAWWANNIGVTGGAFDSYLLLRGLRTLVPRMELAQRNAQAIVKYLQTQPLVKKLYHPSLPENQGHEIAARQQKGFGAMLSFELDGDEQTLRRFLGGLSLFTLAESLGGVESLISHAATMTHAGMAPEARAAAGISETLLRISTGIEDGEDLIADLENGFRAANKG

SEQ ID NO: 11675 - protein, 281 aa, Saccharomyces cerevisiae
MSNHSEILERPETPYDITYRVGVAENKNSKFRRTMEDVHTYVKNFASRLDWGGFAVFDGHAGIQASKWCGKHLHTIIEQNILADETRDVRDVLNDSFLAIDEEINTKLVGNSGCTAAVCVLRWQLPDSVSDDSMDLAQHQRKLYTANVGDSRIVLFRNGNSIRLTYDHKASDTLEMQRVEQAGGLIMKSRVNGMLAVTRSLGDKFFDSLVVGSPFTTSVEITSEDKFLILACDGLWDVIDDQDACELIKDITEPNEAAKVLVRYALENGTTDNVTVMVVFL

SEQ ID NO: 11676 - protein, 170 aa, Triticum aestivum
  unsure (1)..(170): unsure at all Xaa locations
AARDPIGITSFYQGRSSTLPGAIFFASELKCLSSVCDEIIAFPPGHVYDSKTNETTRYFKPSWWDPHRQPAAPVDYRLLRTTLEKSVKKRLMAEVPFGVLLSGGLDSSLIASIAQRETLRLKAASLEQSSKLFDSKGTVXKQCRGKGKQLVGIDEDNNLSTLANYSAKPF

SEQ ID NO: 11677 - protein, 148 aa, Listeria monocytogenes
IMYLFSDEGTPASYREVRGSSVHAFKWINEEGKTVYVKLRWVPKAGIVNLSTEQASQIQAKEFNHASRDLYEAIENGDYPEWDLYVQVLDPKDLDSFDFNPLDATKDWFEDVFPYEHVGTMTLDRNPDNIFAETESVGFNPGVLVRGM

SEQ ID NO: 11678 - protein, 158 aa, Glycine max
MAEEHRCQAPRFCANNCGFFGSPATQNMCSKCYRDFQLKEQQSSNAKMVLNQSLVPSPPPAVISQPSSSSSAAVDPSSAVVDDAPRESEEVKAPQQNRCMTCRRRVGLTGFKCRCGMMLCGTHRYPEQHACEFDFKGMGREQIANANSVVKGEKLDKI

SEQ ID NO: 11679 - protein, 148 aa, Listeria monocytogenes
IMYLFSDEGTPASYREIRGSSVHAFKWINEEGKTVYVKLRWVPKAGIVNLSTEQASQIQAKEFNHASRDLYEAIENGDYPEWDLYVQVLDPKDLDSFDFNPLDATKDWFEDVFPYEHVGTMTLDRNPDNIFAETESVGFNPGVLVRGM

SEQ ID NO: 11680 - protein, 267 aa, Rhodopseudomonas palustris CGA009
MTGRAVIGVIGNAHLVDNRFAVQHVGERNLRAVAEVAGALPLMFGGSSEFAQIEDLLEVVDGILLTGGRANVHPTYFKTAPNPRHEPYDQPRDELALALVRTCVERGVPLFGICRGFQEMNVAYGGSLHPEIRELPGRMNHRMPRLENGEIHPDPTVVFADRHDVQLTSDGVFARLLGRDLIRVNSLHGQGILEPGPRIVIEGVAEDGTIEAIRIADAPGFALGVQWHAEYDPQVNPINRALFVAFGEAVSAYRTARKRPAALRRSG

SEQ ID NO: 11681 - protein, 267 aa, Synechocystis sp. PCC 6803
MSIQLGIIGGGVMAEAILARLIAEKTYAPEEIIVGEPHGARRDYLQKTYQVRVSPDNQEAANVSEVLLLAVKPQVLDRVLASLAGGANRPLVISILAGVSLQRIQKGFPDHAIIRAMPNTPATVGAGMTAIAANKMVEPDQLAKAKAIFSAVGNVVEVPENLMDAVTGVSGSGPAYVALMIEALADGGVLAGLPRAIAQKLALQTVLGTAELIKETEEHPAQIKDKVTSPGGTTIAGVAVLEKMGFRSAIIEAVRAAYRRSQELGKK

SEQ ID NO: 11682 - protein, 301 aa, Oryza sativa
  unsure (1)..(301): unsure at all Xaa locations
QTRKRIGGGHQGNETLCFLRSYKHVRHFSTKLLEGVHGCSLPXGNDQSEQTSLSFGRYFLSNASPYQPWTRSFASKNGDLVDAVVPFMGESITDGTLATFLKKPGDRVEADEPIAQIETDKVTMDVASPEAGIIEKAAVSALQNQPIVNAVIDGDDIIYREYIDISVAVGTSKGLVVLVIHDIDAMNFADIEKGINNLAKKATEGAQSINNMAGGTFTISNGGVYGSLISTPIINSPQSSILGMHSIVQRLVVVNGSVLARPMMYLALMYDHRLIDGREAVLFLRRIKDVVEDPRRLLLDI

SEQ ID NO: 11683 - protein, 276 aa, Zea mays
  unsure (1)..(276): unsure at all Xaa locations
MGRPPCCDKESVKKGPWTPEEDLVLVSYVQEHGPGNWRAVPANTGGYTLAVWLLRCSKSCRLRWTNYLRPGIRRGGFSDQEDRLIVHLQALLGNRWAAIASYLPDRTDNDVKNYWNTHLKKKLXLAQQQQQLRASPSPPKGQWELKLQTDINLARRALRDALSVDAGPPGMAVAGSAAPAPSAGPASAQQAYALTARSVDRMMLDGWAAAAPAAGRRSCVVGGTVVIPAPATTPGAAESASRSSSELTTAECSASISSASDQRAAPVADHQGYRAR

SEQ ID NO: 11684 - protein, 242 aa, Geobacillus stearothermophilus
AAAKPATTEGEFPETREKMSGIRRAIAKAMVHSKHTAPHVTLMDEADVTKLVAHRKKFKAIAAEKGIKLTFLPYVVKALVSALREYPVLNTSIDDETEEIIQKHYYNIGIAADTDRGLLVPVIKHADRKPIFALAQEINELAEKARDGKLTPGEMKGASCTITNIGSAGGQWFTPVINHPEVAILGIGRIAEKPIVRDGEIVAAPMLALSLSFDHRMIDGATAQKALNHIKRLLSDPELLLM

SEQ ID NO: 11685 - protein, 401 aa, Bdellovibrio bacteriovorus HD100
MANGLKGIKTVRDFELAGKVVFLRLDLNVPMENGKITDENRITASLPTIKYCMEQGAKLVMASHLGRPKTKDDTEFSLEPVAKRLQDLLNAEVILVEEPDSDAPKHLLPSLKPHQLILLENVRFEEGETKDSVEFAQKIANYSDIYINDAFGASHRAHATIHALPSVMKDKGIGFLIEKEITMLDSLLQNPKRPYIAVMGGAKVSDKIAVIERLMDVVDGFIVGGAMAYTFLKAQGLPVGKSLVENDKLKYAKEMIERIEARNKTILLPVDHVATKGITDTAHAHVTNDVAIAEDELGVDIGPKSIKNFSAALREAGTIFWNGPMGIFENPAFAKGTFGVAQAIADSEAIKIVGGGDSAAAAEASGFAGKMTHISTGGGASLEYLQGDKLPGLEILRTRIR

SEQ ID NO: 11686 - protein, 358 aa, Medicago sativa
MGSIEAAERTTVGLAAKDPSGILTPYTYTLRNTGPDDVYIKIHYCGVCHSDLHQIKNDLGMSNYPMVPGHEVVGEVLEVGSNVTRFKVGEIVGVGLLVGCCKSCRACDSEIEQYCNKKIWSYNDVYTDGKITQGGFAESTVVEQKFVVKIPEGLAPEQVAPLLCAGVTVYSPLSHFGLKTPGLRGGILGLGGVGHMGVKVAKALGHHVTVISSSDKKKKEALEDLGADNYLVSSDTVGMQEAADSLDYIIDTVPVGHPLEPYLSLLKIDGKLILMGVINTPLQFVTPMVMLGRKSITGSFVGSVKETEEMLEFWKEKGLTSMIEIVTMDYINKAFERLEKNDVRYRFVVDVKGSKFEE

SEQ ID NO: 11687 - protein, 256 aa, Pantoea endophytica
  unsure (1)..(256): unsure at all Xaa locations
GAAGGIGQALALLLKTQLPSGSELSLYDIAPVTPGVAVDLSHIPTAVKIKGFXGEDARPALQGADVVLISAGVARKPGMDRSDLFNVNAGIVKNLVQQIAEVCPKACIGIITNPVNTTXXIAAEVLKKAGVYDKNKLFGVTTLDIIRSNTFVAELKGKQPTEVEVPVIGGHSGVTILPLLSQIPGVSFTEQEVADLTKRIQNAGTEVVEAKAGGGSATLSMGQAAARFGLSLVRALQGXKGVVECAYVEGDGQYAR

SEQ ID NO: 11688 - protein, 67 aa, Glycine max
  unsure (1)..(67): unsure at all Xaa locations
RLVKAMPSLVFTSVLEDNCTSRTCAICLEDYCVGEKLRILPCRHKFKAACVDXWANLRENLCPIWKP

SEQ ID NO: 11689 - protein, 441 aa, Pseudomonas syringae pv. syringae B728a
MVNRLHGKSLTALLALGAFAPIAQAADAPVLNTGSTAWMVTAAVLVLFMCLPGLALFYGGLVRAKNMLSLFTQCFGIAGVVGVLWVIYGYSMVVDTSNMVEGQVSFNSFVGGLSRAFLAGMTPDSLVGDIPEGVFVTFQMTFAIITPALIAGAFAERMKFSAALLFMALWFTLVYAPVAHMVWGGAGALMHNWGVLDFAGGTAVHINAGVAALAACLVLGKRKGYQNTPMPAHNLSLTMAGAAMLWVGWFGFNIGSGGGLNGTSGIVMLNTQVGACAGILGWMFTEWFKVGKPSALGLASGALAGLVGITPACAYVGVGGALAIGVLCGVFCYLSVTVLKKRLGYDDSLDVFGLHGIGGMIGAILTGVFCVPALGGLVPDVSMGAQVIAQIKGVLFTTAYCFAVSWIILKAVQALIGLRAHESVEEMGLDLAEHNERAYNH

SEQ ID NO: 11690 - protein, 306 aa, Bacillus halodurans
MKALNLYGIQDLRFEETPAPSIEHDDDIIIKVKAVGICGSDLSRYKKLGPYVPGMTFGHEFAGEVVKIGRSVTGFSIGDRVAACPTYTCGQCRYCQLGEPTRCERLSVIGARHPGAYAEYVKLPAKHVIPLPNVVNYDEAALIEPASVVAHGFYRTNIKPGASVAIMGVGSIGLLAVQWAKIFGATTVFAIDIDEQKLNVANQLGADVLISSLQRPAHKQILEYTNGIGVDVAVESAGTPSTSAQVFALPKKGGEVVFLGIPYADVQIERFYFEKIVRNELHVYGSWNALSSPFPGKEWATTIQDM

SEQ ID NO: 11691 - protein, 256 aa, Pantoea endophytica
  unsure (1)..(256): unsure at all Xaa locations
GAAGGIGQALALLLKTQLPSGSELSLYDIAPVTPGVAVDLSHIPTAVKIKGFSGEDARPALQGADVVLISAGVARKPGMDRSDLFNVNAGIVKNLVQQIAEVCPKACIGIITNPVNTTVAIAAEVLKKAGVYDKNKLFGVTTLDIIRSNTFVAELKGKQPTEVEVPVIGGHSGVTILPXLSQIPGVSFTEQEVADLTKRIQNAXTEVVEAKAGGGSATLSMGQAAARFGLSLVRALQGEKGVVECAYXEGDGQYAR

SEQ ID NO: 11692 - protein, 949 aa, Methylobacillus flagellatus KT
MDKQADYGTPASRTTEQQVTLEIDGMQVTVAKGTSIMRAAMEAGVSIPKLCATDTLEPFGSCRLCLVEIEGRRGYPASCTTPVDEGLKVHTQTPKLADIRRGVMELYISDHPLDCLTCSANGDCELQDMAGAVGLREVRYGYDGSNHLHAEKDLSNPYFQFDPSKCIVCSRCVRACEETQGTFALTIQGRGFDSKVAAGNFDNFLESECVSCGACVTACPTATLMEKTVIEHGQPEHSVITTCAYCGVGCSFRAEMKGEQVVRMVPDKNGGANHGHSCVKGRFAWGYATHRDRITTPMIRKSIHDPWQEVSWEEAITYAASELKRIQAKHGRNSIGAITSSRCTNEETYLVQKLVRAAFGNNNVDTCARVCHSPTGYGLKQTLGESAGTQTFDSIMKSDVIMVIGANPTDGHPVFGSQMKRRLREGAKLIIADPRAIDLVSGPHVKADYHLKLRPGTNVALITALAHVVVTEGLVDEAFVRERCEWDSYQYWSEFVAQPEHSPEAMQDVIGVPAQDLRAAARLYATGGNAAIYYGLGVTEHSQGSTMVMGIANLAMATGNIGREGVGVNPLRGQNNVQGACDMGSFPHEFPGYRHVSDDTTRALFEAAWGRPLDKEPGLRIPNMLDFAIHGSFKALYCEGEDIAQSDPNTQHVTQALSSMECVIVQDLFLNETAMYAHVFLPGCSFLEKNGTFTNAERRISPVRRVMTPKNGYEDWQITAMLSEALGYPMPYRHASEILDEIARLTPTFHGVSFKKLEEMGSIQWPCNEEHPNGTPIMHVDEFVRGKGRFMITEYVPTSERVNEKYPLILTTGRILSQYNVGAQTRRTDNVTWHPEDMVEIHPHDAEDRGIKDGDWVGITSRAGNTVLRAKITERVQPGVIYTTFHHPESGANVITTDNSDWATNCPEFKVTAVQVTRVSQLSDWQRRYQEFSNSQIALVKQRDMARMG

SEQ ID NO: 11693 - protein, 123 aa, Glycine max
  unsure (1)..(123): unsure at all Xaa locations
EARVSLLGTEFIKVATNIDPDCXMIINEKGRNAKCAMRKAFVDEXKSXLPKHILYKEHQQITDRDGXVETDSLKAHAEKPXPDRMIXNAANIFPFNTPTXRETYHYTMIIDRFFPQKSPRLTV

SEQ ID NO: 11694 - protein, 256 aa, Pantoea endophytica
  unsure (1)..(256): unsure at all Xaa locations
GAAGGIGQALALLLKTQLPSGSELSLYDIAPVTPGVAVDLSHIPTAVKIKGFSGEDARPALQGADVVLISAGVARXPGMDRSDLFNVNAGIVKNLVQQIAEVCPKACIGIITNPVNTTVAIAAEVLKKAGVYDKNKLFGVTTLDIIRSNTFVAELKGKQPTEVEVPVIGGHSGVTILXFXSQIPGVSFTEQEVADLTKRIQNAGTEVVEAKAGGGSATLSMGQAAARFGLSLVRXLQGEKGVVECAYVEGDGQYAR

SEQ ID NO: 11695 - protein, 256 aa, Pantoea endophytica
  unsure (1)..(256): unsure at all Xaa locations
GAAGGIGQALALLLKTQLPSGSELSXYDIAPVTPGVAVDLSHIPTAVKIKGFSGEDARPALQGADVVLISAGVARXPGMDRSDLFNVNAGIVKNLVQQIAEVCPKACIGIITNPVNTTVAIAAEVLKKAGVYDKNKLFGVTTLDIIRSNTFVAELKGKQPTEVEVPVIGGHSGVTILPLLSQIPGVSFTEQEVADLTKRIQNAGTEVVEAKAGGGSATLSMGQAAARFGLSLVRXLQGEKGVVECAYVEGDGQYAR

SEQ ID NO: 11696 - protein, 539 aa, Oryza sativa
MGLPGAEPPAASGGGLPGFFGGKSKYVRMDDVLPQEQEEDGVGGGGGGVRVRRSHSSRRYVFACSVFASLNSVLLGYDVGVMSGCILFIQRDLHINEVQQEVLVGCLSFISLLGSLAGGRTSDAVGRKWTIGLAAIVFQAGAAVMTLAPSFEVLMVGRLLAGVGIGFGVMIAPVYIAEISPAASRGSFTSFPEIFINLGILLGYISNYAFSGLPDHVSWRVMLAVGILPSVSIAFALLVIPESPRWLVMKNRADEAREVLLKVTDSEDEAKERLAEIERAAAAVASAGKYGDKTVWQELTRPSPVIRRMLITGLGIQCFQQITGIDALVYYSPTIFRDAGITTESQLLVATVAVGFFKTAFIALAIVLIDRVGRKPLLYVSTVGMTACLVVLAATLAALAHGSASRSAGIAVAILTVCGDVAFFSVGIGPICWVMSSEIFPLRLRSQAAALGAVMNRVTSGAVAMSFLSVCRAISVAGAFSVFAVISALSVVFVYRYVPETSGKTLEEIELLFGGGGGDGEAARGEVELGDGEHLVHKG

SEQ ID NO: 11697 - protein, 256 aa, Pantoea endophytica
  unsure (1)..(256): unsure at all Xaa locations
GXAGGIGQALXLLLKTQLPSGSELSLYDIAPVTPGVAVDLSHIPTAVKIKGFSGEDARPALQGADVVLISAGVARXPGMDRSDLFNVNAGIVKNLVQQIAEVCPKACIGIITNPVNTTVAIAAEVLKKAGVYDKNKLFGVTTLDIIRSNTFVAELKGKQPTEVEVPVIGGHSGVTILPXLSQIPGVSFTEQEVADLTKRIQNAGTEVVEAKAGGGSATLSMGQAAARFGLSLVRXLQGEKGVVECAYVEGDGQYAR

SEQ ID NO: 11698 - protein, 353 aa, Magnaporthe grisea 70-15
MYIPSARTAIVQDDKGGLKIDRNAPMPQPRPNELLVQVKAVAINPCDHKMYERFPTPGAVDGCDFAGIVVQLGSDVKTFQIGDRVCGAVHGSNPSRPESGTFAEYTVSDGEFTLKLPPNLSFREAMGLGTTGLSTIGMAIYKGLMLPGSPLEPAEKPRTVLVHGASSSVGTMALQLIRLMGHIPIATCSPRNFELVKKYGAEEVFDYNDPECGQQIKQYTGNTLAYIIDPFTDVKSVALCYEAMGRAGGRYACLEMYPEFALERRSIKVFFALGMALLGHSLDLAYGYERDEDPEMRSFGIGWYKVLQELLYQGKLRPHPLRELEGGFEGILKGVQMVKNKEVSGQKLVVSLE

SEQ ID NO: 11699 - protein, 445 aa, Triticum aestivum
  unsure (1)..(445): unsure at all Xaa locations
MASRIASRLLRRSSPTLGLLRSYTHVRNYSSQLSGLIPVGPQSSKLTRRNNYFPNASPYQLWSRSFASDNGDKFEAVVPFMGESVTDGTLANFLKKPGDRVEADEAIAQIETDKVTIDVSSPEAGVIEKFIASEGDTVTPGTIVAIVSKSAAPAETHVAPSEEAPQKESPPPPEKPEAKSPKVESVKPQVTAAPDPTHADTSPTAPQLPPKERERXRVPMPRAXRKRIANRLKDSQNTFAMLTTFNEVDMTNLMKLRSDYKDEFVKKHGVKLGLMSCFVKAAVSGLQNQPIVNAVIDGDDIIYRDYVDVSVAVGTSKGLVVPVIRDADTMNFADIEKGINNLAKKATEGALSIDEMAGGTFTISNGGVYGSLISTPIINPPQSAILGMHSIVQRPVVVDGSILARPMMYLALTYDHRLIDGREAVYFLRRIKDVVEDPRRLLLDI

SEQ ID NO: 11700 - protein, 536 aa, Gossypium arboreum
MLQIAFSSYSWLLTASNQKDGMLFPVALSFLVAILGISLWHVWTIRKPKKDIAPLPPGPRGLPIVGYLPYLGTDNLHLVFTDLAAAYGPIYKLWLGNKLCVVISSAPLAKEVVRDNDITFSERDPPVCAKIITFGLNDIVFDSYSSPDWRMKRKVLVREMLSHSSIKACYGLRREQVLKGVQNVAQSAGKPIDFGETAFLTSINAMMSMLWGGKQGGERKGADVWGQFRDLITELMVILGKPNVSDIFPVLARFDIQGLEKEMTKIVNSFDKLFNSMIEERENFSNKLSKEDGNTETKDFLQLLLDLKQKNDSGISITMNQVKALLMDIVVGGTDTTSTMMEWTMAELIANPEAMKKVKQEIDDVVGSDGAVDETHLPKLRYLDAAVKETFRLHPPMPLLVPRCPGDSSNVGGYSVPKGTRVFLNIWCIQRDPQLWENPLEFKPERFLTDHEKLDYLGNDSRYMPFGSGRRMCAGVSLGEKMLYSSLAAMIHAYDWNLADGEENDLIGLFGIIMKKKKPLILVPTPRPSNLQHYMK

SEQ ID NO: 11701 - protein, 427 aa, Glycine max
MAIRNSLTGQFLRRSSVAGARLMSSSSSWFRSIEPAPKDPILGVTEAFLADQSPNKVNVGVGAYRDDQRKPVVLECVREAERRVAGSQFMEYLPMGGSIKMIEESLKLAFGDNSEFIKDKRIAAVQALSGTGACRLFAAFQQRFHPNTQIYIPVPTWANHHNIWRDAGVPMKTFRYYHPESRGLDFSGLMDDIKNAPDGSFFLLVLTAHNPTGVDPSEEQWREISSQIKAKGHFPFFDMAYQGFASGDPERDAKAIKIFLEDGHLIGLAQSYAKNMGLYGQRAGSLSVLCEDEKQAVAVKSQLQLIARPMYSNPPLHGALIVSTVLGDPDLKKLWLKEVKVMADRIIGMRTTLRENLEKKGSTLPWQHITNQIGMFCYSGLTPEQVDRMTNEFHIYMTRNGRISMAGLNTGNVGYVADAIHEVTKSF

SEQ ID NO: 11702 - protein, 403 aa, Crocosphaera watsonii WH 8501
MIHQPPAGARDLLPLEVVQKAWINDTLQQVFGQWGYQRIVTSTIERLDTLKAGGAIEDDTVIQLHNNSGGQLGLRPELTASVARAAVTRMIDTSYPQRLCYRANVFRNPPSSDHGRQLEFYQAGVELLFSGGTLADAEILLLVTNCLQKLQVPNWYLILGDAGLTRSLLSPFPEALRQKVRNCLSSLDYVQLESLDYPSEELKQRAILLFNLRGKPEDVLSKVLDLSLDETGKSCLNNLKSLIELVNKSASQELPLTLDLSLIQTFDYYTGITFKVIEQTNNKLQTLGQGGRYDQLLGVYDPEQKSAPGIGFSLNVGALHRCLLSTEILPQKANLIDYLVVAKKTESQIEALKYAQKLREDDPSVRVTIDLENRNDEEIKKDAQQNGIKTIVWIEKGQEPIIN

SEQ ID NO: 11703 - protein, 425 aa, Oryza sativa
RPPRPGRACRRGPAFEEYVKEWKAKKAALGVPAGRCELPFLTGTPKAVECRLCSKIIHPGEEIKCSVSRCGELFHLTCAAEDTTNFIAESFKCPQHGCMVCKQKMFFWRCGRCTVAAHTKCAPWPVIHLKDDQGSAICWRHPSDWLLQNEVYPFTLKIDEVFCRLPVPYVNEDFKIDSTIRDFTAAVCKPPHFTFIRRNVYLIKKKRPDSRAEAGCTNCSADSTCKDDCECRGLYMSCSKNCHCSDMCTNKPFRKDKKIKAVKTKRCGWGAISLEPLEKGDFIIEYVGEVINDATCEQRLWDMKRRGDKNFYMCEISKDFTIDATFKGNTSRFLNHSCDPNCKLEKWQVDGETRVGVFASRSIQVGEHLTYDYRFVHFGEKVKCYCGAQNCQGYLGNQIKNPTQRALAIAALENEWLESLKIQQD

SEQ ID NO: 11704 - protein, 148 aa, Listeria monocytogenes
IMYLFSDEGTPASYREIRGSSVHAFKWINEEGKTVYVKLRWIPKAGIVNLSTEQASQIQAKEFNHASRDLYEAIENGDYPEWDLYVQVLDPKDLDNFDFNPLDATKDWFEDVFPYEHVGTMTLDRNPDNIFAETESVGFNPGVLVRGM

SEQ ID NO: 11705 - protein, 425 aa, Helicobacter pylori J99
MAYNPKILQKPKEGEEITIKDGKLHVPNYPIIPFIEGDGIGSDITPAMIKVVDSAVQKAYKGEKKIAWYEVFVGEKCYQKFKDHKELSPEEQWLLPDTIEAINHYKVSIKGPLTTPIGEGFRSLNVALRQKMDLYVCLRPVRWYGSPSPVKEPQKVDMVIFRENSEDIYAGIEWQEGSAEAKKLIHFLQNELKVEKIRFPESSGVGIKPISKEGTERLVRKAIEYAIDNDKPSVTFVHKGNIMKYTEGAFMKWGYALAQKEFNAQVIDKGPWCSLKNPKTGKEIIIKDMIADAFLQQILLRPSEYSVIATMNLNGDYISDALAAMVGGIGIAPGANLNDTVGMFEATHGTAPKYAGLDKVNPGSIILSAEMMLRHMGWVEAADLIVSAMEKAIKSKKVTYDFARLMDGAKEVKCSEFASVMIENM

SEQ ID NO: 11706 - protein, 148 aa, Listeria monocytogenes
ITYLFSDEGTPASYREIRGSSVHAFKWINEEGKTVYVKLRWVPKAGIVNLSTEQASQIQAKEFNHASRDLYEAIENGDYPEWDLYVQVLDPKDLDNFDFNPLDATKDWFEDVFPYEHVGTMTLDRNPDNIFAETESVGFNPGVLVRGM

SEQ ID NO: 11707 - protein, 493 aa, Mycobacterium tuberculosis H37Rv
MVTRIVILGGGPAGYEAALVAATSHPETTQVTVIDCDGIGGAAVLDDCVPSKTFIASTGLRTELRRAPHLGFHIDFDDAKISLPQIHARVKTLAAAQSADITAQLLSMGVQVIAGRGELIDSTPGLARHRIKATAADGSTSEHEADVVLVATGASPRILPSAQPDGERILTWRQLYDLDALPDHLIVVGSGVTGAEFVDAYTELGVPVTVVASQDHVLPYEDADAALVLEESFAERGVRLFKNARAASVTRTGAGVLVTMTDGRTVEGSHALMTIGSVPNTSGLGLERVGIQLGRGNYLTVDRVSRTLATGIYAAGDCTGLLPLASVAAMQGRIAMYHALGEGVSPIRLRTVAATVFTRPEIAAVGVPQSVIDAGSVAARTIMLPLRTNARAKMSEMRHGFVKIFCRRSTGVVIGGVVVAPIASELILPIAVAVQNRITVNELAQTLAVYPSLSGSITEAARRLMAHDDLDCTAAQDAAEQLALVPHHLPTSN

SEQ ID NO: 11708 - protein, 174 aa, Borrelia miyamotoi
MNYEISTLFTEEKIRNKIQKLAQKIRNYYKDKNNVVFISILKGSFMFFADITREIGLNVKIDFLHVSSYNNKTHSSSKVLIKKDIDVNIENSYVILFDDIIDTGLTYKKIIEHLKSKNPKEIKICTLFNKPSRRLTKLKIDYIGFEIANYFVVGYGIDFNEKHRTLKNVAKINK

SEQ ID NO: 11709 - protein, 416 aa, Saccharomyces cerevisiae
  unsure (1)..(416): unsure at all Xaa locations
XSLSSKLSVQDLDLKDKRVFIRVDFNVPLDGKKITSNQRIVAALPTIKYVLEHHPRYVVLASHLGRPNGERNEKYSLAPVAKELQSLLGKDVTFLNDCVGPEVEAAVKASAPGSVILLENLRYHIEEEGSRKVDGQKVKASKEDVQKFRHELSSLADVYINDAFGTAHRAHSSMVGFDLPQRAAGFLLEKELKYFGKALENPTRPFLAILGGAKVADKIQLIDNLLDKVDSIIIGGGMAFTFKKVLENTEIGDSIFDKAVGPEIAKLMEKAKAKGVEVVLPVDFIIADAFSASANTKTVTDKEGIPAGWQGLDNGPESRKLFAATVAKATVILWNGPPGVFEFEKFAAGTKALLDEVVKSSAAGNTVIIGGGDTATVAKKYGVTDKISHVSTGGGASLELLEGKELPGVAFLSEKK

SEQ ID NO: 11710 - protein, 163 aa, Triticum aestivum
  unsure (1)..(163): unsure at all Xaa locations
VAPFQGLKSTAGLPVSRRSNGASLGSVSNGGRIRCMQVWPIEGIKKFETLSYLPPLSTEALLKQVDYLIRSKWVPCLEFSKVGFIFREHNASPVXXXXXXXXXXXXXXXXXXXXXXXXXEVEEVKKEYPDAYVRIIGFDNMRQVQCVSFIAFKPPGCEESGKA

SEQ ID NO: 11711 - protein, 265 aa, Streptococcus pneumoniae R6
MKIGFIGLGNMGASLAKSVLQTRTSDEILLANRSQAKVDAFIADFGGQASSNEEMFAEADVIFLGVKPAQFSELLSQYQTILEKRESLLLISMAAGLTLEKLASLIPSQHRIIRMMPNTPASIGQGVISYALSPNCRTEDSELFCQLLSKAGLLVELGESLINAATGLAGCGPAFVYLFIEALADAGVQTGLPRETALKMAAQTVVGAGQLVLESQQHPGVLKDQVCSPGGSTIAGVASLEAHAFRGIVMEAVHQAYKRTQELGK

SEQ ID NO: 11712 - protein, 270 aa, Nicotiana alata
MAKKDGNQEEEISQMEEGNIHSASNSDSNVGFCSSVSVVVILQKLIAEAIGTYFVIFAGCGSVAVNKIYGSVTFPGICVTWGLIVMVMVYTVGYISGAHFNPAVTITFSIFGRFPWKQVPLYIIAQLMGSILASGTLALLFDVTPQAYFGTVPVGSNGQSLAIEIIISFLLMFVISGVATDDRAIGQVAGIAVGMTITLNVFVAGPISGASMNPARSIGPAIVKHVYTGLWVYVVGPIIGTLAGAFVYNLIRSTDKPLRELAKSASSLRS

SEQ ID NO: 11713 - protein, 390 aa, Burkholderia fungorum LB400
MNAPHDTPTSPTFPSRLPNVGTTIFTVMSALAAEKGAVNLGQGFPDFNCDPRIVDAVANAMREGHNQYPPMAGAAPLRQAISDKIANLYGRRYDATTEITVTAGATQALLTAILCSVHPGDEVVVVEPTYDSYLPSIELAGGKPVFVTLEAPDYAIPFDRLAAAITPKTRLLLINTPHNPTGTVWREQDMRKLEEIVRGTNVLILSDEVYEHMVYDGAPHESVARYPELAQRSFVVSSFGKTYHVTGWKVGYVAAPAALTVEFRKVHQFNVFTVNTPMQIGLADYMKDPAPYLDLPAFYQKKRDFFRAGLANSRFRLLPCTGTYFQCVDYSAISDLPEAEFAQWLTGEIGVAAIPVSAFYHEAHESGVVRFCFAKQESTLATALERLARL

SEQ ID NO: 11714 - protein, 256 aa, Pantoea endophytica
GAAGGIGQALALLLKTQLPSGSELSLYDIAPVTPGVAVDLSHIPTAVKIKGFSGEDARPALQGADVVLISAGVARKPGMDRSDLFNVNAGIVKNLVQQIAEVCPKACIGIITNPVNTTGSIAAEVLKKAGVYDKNKLFGVTTLDIIRSNTFVAELKGKQPTEVEVPVIGGHSGVTILPLLSQIPGVSFTEQEVADLTKRIQNAGTEVVEAKAGGGSATLSMGQAAARFGLSLVPALQGEKGVVECAYVEGDGQYAR

SEQ ID NO: 11715 - protein, 582 aa, ASPERGILLUS NIDULANS FGSC A4
MTIIYILALAIAALSVGSAASNYHENLLLQPLPPSSLLASFNFRSNATQTSFQQQHFRYFPRALGQILQHANTRELHLRFTTGRWDSESWGSRPWDGAKEGGTGVELWAWIEAADDEIAFSKWITLTQSLSGLFCASLNFIDSTRTTRPVASFEATGHHVDSDNLHLLHGTLPGEVVCTENLTPFLKLLPCKGKAGVASLLDGHKLFDAAWQSMAIDVRPVCPSSGECLMQIDQTVDIVMDIERSKRPRVPADKLVCDTSKSYHARDTCYPLETTAAKSWSISELFGRTVSGSCPLMDTQEKTVCLRVPPTQEVRPSPELVNARFYDQFTRCYTPPSSEPFDLDVPEQAAINITSSVPLEEPVLHAERTIVGHGQERGGMRIIFDNPSSEKPVDFIYFESLPWFLRPYIHTLQSTITGPDGVRRQAPTTDFIRETFYRPGVDRERGTQLELALSVPPASTVTLTYDFEKAILRYTEYPPDANRGFNVAPAVIKIAASKPIYIRTTSLLLPLPTPDFSMPYNVIILTSTVIALAFGSIFNLLVRRFVTVEEAAALRAQTFKGRLGGKIVALRDRIRGKSAKVE

SEQ ID NO: 11716 - protein, 256 aa, Pantoea agglomerans
  unsure (1)..(256): unsure at all Xaa locations
GAAGGIGQALALLLKTQLPAXSELSLYDIAPVTPGVAVDLSHIPTAVAIQGFSGEDATPSLQGADVVLISAGVARKPGMDRADLFNVNAGIVRNLIEQVATTAPKALIGVITNPVNTTVAIAAEVLKKHGVYDKNRLFGVTTLDIIRANTFVAALKGKQPDQVEVPVIGGHSGVTILPLLSQVKGVSFSDQEVADLTKRIQNAGTEVVEAKAGGGSATLSMGQAAARFGLSLVRALKGEANVVECAYVEGGGEHAR

SEQ ID NO: 11717 - protein, 400 aa, Caulobacter crescentus CB15
MSLESAALRRIAPSATIAISAKARALKAAGRDVIALSAGEPDFDTPDNIKNAAIEAIKAGKTKYTDPDGMPELKAAICAKFKRENGLEYKPSQIHVAPGGKPVIYNALVATLNPGDEVIIPAPYWVSYPDMTLLAGGTPVSVETTAESGFKITPEALEAAITPKTKWLIINSPSNPSGGAYSRAELQAIADVLLRHPQVWVLTDDMYEHLVFDDFEFTTIAQVEPKLYDRTLTMNGVSKGYSMTGWRIGYAAGPEPLIKAMGKMISQTTSNPCSISQWAALEALNGTQDFIKPNAKLFQERRDLVVSMLNQATGLHCPTPEGAFYVYPSCAGLIGKTAPSGKVIESDEDFATELLESEGVAVVHGAAFGLSPFFRISYATSNEVLEDACSRIQRFCASVK

SEQ ID NO: 11718 - protein, 429 aa, Streptococcus mutans UA159
MTLQKPKGTQDILPQETVKWQYVENVARKTFKKYHYGEIRTPMFERYEVISRSVGDTTDIVTKEMYDFHDKGDRHITLRPEGTAPVVRSYVENKLFAPEVQKPVKVFYIGSMFRYERPQAGRLREFHQLGVECFGSNNPAIDAETIAMAYQLFNELGIKDVTLHLNSLGNKESRKAYRQALIDYLIPMKDKLSKDSQRRLEENPLRVLDSKEKEDKEAVENAPSILDYLDDDSQAHFQGVRDMLEVLDIPYVIDTNMVRGLDYYNHTIFEFITQVDKSELTLCAGGRYDSLVEYFGGPATAGFGFGLGLERLLLVIDKQKINLPVDNSLDVYIAVLGAAANSTALELIQAIRKQGFSAERDYLSRKIKAQFKSADVFKTKLIMTLGESEVETGQVAVKNNFTRQEIAVSFEEIKTDFASVFKQLGSDRP

SEQ ID NO: 11719 - protein, 256 aa, Pantoea agglomerans
  unsure (1)..(256): unsure at all Xaa locations
GAAGGIGQALALLLKXQLPAGXELSLYDIAPVTPGVAVDLSHIPTAVAIQGFSGEDATPALQGADVVLISAGVARKPGMDRADLFNVNAGIVRNLIEQVATTAPKALIGVITNPVNTTVAIAAEVLKKHGAYDKNRLFGVTTLDIIRANTFVAALKGKQPDQVEVPVIGGHSGVTILPVXSQVKGVSFSDQEVADLTKRIQNAGTEVVEAKAGGGSATLSMGQAAARFGLSLVRALKGEANVVECAYVEGEGEHAR

SEQ ID NO: 11720 - protein, 251 aa, Neurospora crassa
MARRYDSRTTIFSPEGRLYQVEYALEAISHAGTAIGILAKDGIVLAAERKVTSKLLEQDTSAEKLYILNDNMICAVAGMTADANILINYARQAAQRYLLTYNEDIPCEQLVRRLCDLKQGYTQHGGLRPFGVSFIYAGWDPQRQFQLYLSNPSGNYGGWKATSAGANNASAQSLLKQDYKEDCTLKEACAMAVKVLSKTMDSTKLSPEKIEFATVGQTKDGKIYHRLWSADEITALLKEHDLAKDDNTEDK

SEQ ID NO: 11721 - protein, 144 aa, Schizosaccharomyces pombe
DPYVEWVISLEQNVMEGAFDKVASMIRSCNFPEFSYFMKIVMSMVRNEIATCAEKVYSEIPLSNATSLLYLENTKETEKLAEERGWDIRDGVIYFPKEANALETEDGMLIDEEDELELPPTASKHTISSIRQLLSYTSELEQIV

SEQ ID NO: 11722 - protein, 256 aa, Pantoea endophytica
  unsure (1)..(256): unsure at all Xaa locations
GAAGGIGQALALLLKTQLPSGSELSLYDIAPVTPGVAVDLSHIPTAVKIKGFSGEDARPALQGADVVLISAGVARKPGMDRSDLFNVNAGIVKNLVQQIAEVCPKACIGIITNPVNTTVXIAAEVLKKAGVYDKNKLFGVTTLDIIRSNTFVAELKGKQPTEVEVPVIGGHSGVTILPLLSQIPGVSFTEQEVADLTKRIQNAGTEVVEAKAGGGSATLSMGQAAARFGLSLVRALQGEKGVVECAYVEGDGQYAR

SEQ ID NO: 11723 - protein, 253 aa, Pantoea cedenensis
  unsure (1)..(253): unsure at all Xaa locations
GAAGGIGQALALLLKTQLPAGSDLSLYDIAPVTPGVAVDLSHIPTAVNIKGFCGEDATPALKGADVVLISAGVARKPGMDRSDLFNVNAGIVRNLIEQVANTCPKALIGVITNPVNTTVAIAAEVLKKAGVYDKNRLFGVTTLDIIRSNTFVAELKGKNPAELNVPVVGGHSGVTILPLLSQVPGVSFSQQEVVDLTKRIQNAGTEVVEAKAGGGXATLSMGQAAAKFGLSLVRAINGESNVVECAYVEGDGQ

SEQ ID NO: 11724 - protein, 233 aa, Trichodesmium erythraeum IMS101
MTDDSIEVKAIFNKIAPVYDQLNDLLSLGIHKVWKQMAVRWSEPDYGSTCLDLCCGSGDLAYMLAKHVGNTGHVFGVDFSREQLAIARNREPPLLNKISPIHWVEANALSLPFPHNYFDCATMGYGLRNVSNIPLCLQELYRVLKPNAKAAILDMHCPSSSTIRWFQKWYLDTVVVPVASNLGLTKEYAYISPSLTKFLTGKDQVALAYKLGFVNAKHYPIIGGMMGILVITK

SEQ ID NO: 11725 - protein, 135 aa, Azospirillum amazonense
MVRKFNVLAMVMQSFTITCLVTVIWALVGYSLSFTAASDAADAKEFIGGFSRVLLAGMDPTGTHALAPTIPEPVFMMYQMTFAIITPALITGAFADRMKFSAMLIFITLWSLVVYAPVAHTVWHPNGFMGKLGVL

SEQ ID NO: 11726 - protein, 314 aa, Xanthomonas axonopodis pv. citri str. 306
MTESTLAFVFPGQGSQSLGMLAELSELHPQIRETFAEASEGAGVDLWALSQGGPEEMLNRTEYTQPALLAAGVAVWRLWTAQRGQRPVLLAGHSLGEYTALVAAGALSLHDGAHLVRLRGQFMQAAAPAGVGAMAAVLGAEDAVVQEVCDQASGSDVVVPANFNSPGQIVIGGHAAAVDRALGLLAERGVRKAVKLAVSVPSHTPLMREAANQLGEAMAGLTWHAPQIPVVQNVDARVHEGSTAIRQALVEQLYLPVQWTGCVQALASQGITRIAECGPGKVLSGLIKRIDKSLDARPLATPADYAGALDAWAH

SEQ ID NO: 11727 - protein, 590 aa, Candida albicans SC5314
MGQILSQPVVEKHSDEHKDKYLAYGISCMQGWRINMEDAHATILNLYDLPLKKSLSSNSEQDEDEEDEEEEADSQDSTTTNTTKSQQQQNQKEDLQQNNDKQNSQQDIKDGDNDTQMSDSDENHHHAAPQQQHIAFFGVYDGHGGEKAAIFTGEKLHHLIKETKEFKQKDYINALKQGFLNCDQEILKDFYMRDDDSGCAATSAIITPDLIVCGNAGDSRTIMSTNGFAKALSFDHKPSNEGEKARICAAGGYVDMGRVNGNLALSRGIGDFDFKKNVDLPAEEQIVTCYPDVIQHNIDYKSDEFVVLACDGIWDCLTSQKCVECVRRGIYERKSLSIICEEIMDLCCAPTSDGSGIGCDNMSIAIVALLDYTKNETLDQWYEKIISRVEQQQQQKNDPNSLNKYGPISQPYNELYKEMYGEYYDIGQQGQGGNGRSNIGSGNGSGRGSGASGSSSGGGASINGNSIFGRSGYDDEDDDDDEEKNIERRRRDQDESNLNGGAISLQKLLASNAITNENGVIYLDTSSAQSLLAHFGVADAGAHGDEEDEEEEGEGEDVHQGLAHEEEEEEEEEKEGSKIEEISEKIDDEV

SEQ ID NO: 11728 - protein, 392 aa, SYNECHOCOCCUS SP. WH 8102
MPTSRRLEALGNGVFARTDRAKQAHRDKTGVPPLIDLSLGSTDLQPPEEILRCMAAAVTDPASSAYCLEAGTAPFQQAVAAWCQRRFGVEVDPQRQVQLLVGSQEGTAHLPLAILDPGDRALLLDPSYPSHRGGLVLAGASICSLPLFQEQDWLPDFDAIRPAVWDQLKLFVLGYPHNPTATVGNQELLDQAMARGCRHQLVIANDNPYVDLALEGEAPSLLRSPGWSEWGIEFFSLSKGWCLGGFRLAFAIGAEPLITALRQVKGVVDFNQSLALQQGAIQALTQWADWPRSLHGAYRERRDRVLSVLRGGGWSCPTPGMAMYLWLPLPADAGVRKLDDETFASHVLQRSGVALTPGSGFGEGGKGWLRMALVRPTDELEDAARRVVAAVP

SEQ ID NO: 11729 - protein, 254 aa, Enterococcus faecalis V583
MPKEFETKRVLVTGAASGIGQAQAIAFAEQGAEVIGIDLDETGLKQTAALVDPDSAKSFTYFVGDVSSPSFVQATMKQIVKNNGQIDILLNTAGILDDYRPSLETSEALWDQILATNLKSVFLVTNAILPYFLQQKKGVIVNMASIAGLVAGGGGAAYTASKHAIIGYTKQLSYDYAKLGIRANAIAPGAIQTPMNAADFAGEGEMAAWVARETPAGRWAQPQEVAKLSLFLASDDADYIHGTVMTIDGGWTMK

SEQ ID NO: 11730 - protein, 160 aa, Bradyrhizobium japonicum USDA 110
MRRMMAAFVALALLASPAVHAVQPDEIMSDPAKETRARDLSRELRCMVCQNQSIDDSDAPLARDLRLLVRERIAAGDSNSQVLDFLVARYGEFVLLKPRFERQTLLLWLLGPLLLTGGGLALWLQIRRRSRSGADLPAPPLTPDEEARLAALMSDEAKSS

SEQ ID NO: 11731 - protein, 576 aa, Allochromatium vinosum
MARIPHPRDESRVSHAPERRHEPLRLLEHITRFRDQTQAYLNGDLSEEAFRPLRLLHGLYRLRETTMLRVAVPQGRLSSEPLRRLARIAREYALGEVHLTTRQTIQFTGPAIGAVPQILAELAEVGLSSFLTSGNGIRGIVVDPLAGLAADELEDPRPWHAILDQWRLTHPLMGQLPRKFKIGIHGARTDRVTLAAQDLGLELVRDARGELGFRVLVGGGLGRGPRLAQELTPFVHWPHLLTWIEAILRVYARDGRQPDPYKSRLKNLVQRLGLVEFRAQVESEWAHLRDGPATLTKAQVERAARPFVEAPTDDTVFAATTVPAPAPNEPPEYLLWRHQNVQPHKRAGHAIVTLSTKRLGTAPGNLSPEQLERIADWAATESRDAVRLTPNQNLVLTQVREDRLFALWEDVRAFGLDGPNRGLLTDLVACPGARECDLAHGDSLGLAAAIQARFADADDVRDIGPLDLRISGCVNACAHHNLAAIGIRGLRKQGESRYQILIGGRSGREARLAEPLGPSFAADEVPEAVAGLIALYRRHRQTGETFDAAVQRLGAEPFRTIVTRAADAAPQETPHD

SEQ ID NO: 11732 - protein, 390 aa, Emericella nidulans
MLVSSPSPSALRPAPSSPAATQLHPPHSPCSTSFTRRLSSTSAALAYQAQQYDSAADRSVVPGSPFTPRSSRVAVEELRSALKRHSVSSPPSRPSGDPACGRMSAGQTSLGGGISTSASAAASFAAGPSSNAALPETSNQSTANTSSVPGPAPTVPPAFAAPQNTQPPPMPAPTTTAGSNKRNSQSDSTRGVEPAGPGSLSLEGSQSKRLRPANPAVKYLPVRYEFADPRDLVVLISSMLMELIRYNDKIPLNQGRLTRFHSRTPPRISVHDYLQRLTTHATLSPPILLSMVYYIDRLCALYPAFTVSSLTIHRFLITSATVASKGLSDSFWTNKTYARVGGISMAELALLELEFLFRVEWRIVPQPEVLNDYYQSLVERCDGYEIQSGL

SEQ ID NO: 11733 - protein, 278 aa, Zea mays
  unsure (1)..(278): unsure at all Xaa locations
MDPYKHRPSSGSNSSFWTTNSGAPVWNNNSALTVGQRGPILLEDYHLIEKLAQFDRERIPERVVHARGASAKGFFEVTHDVSHLTCADFLRAPGVQTPVIVRFSTVVHERGSPETLRDPRGFAVKFYTREGNFDLVGNNMPVFFIRDGMKFPDMVHAFKPNPKTNLQENWRIVDFFSHHPESLHMFTFLFDDVGIPLNYRHMEGFXGVNTYTLITRDGKXPHLVKFHWKPTWGGEMLARHETVTVGRPCHSPATKIYLIHCTGKYPEWEPYSQPLISP

SEQ ID NO: 11734 - protein, 191 aa, Pneumocystis carinii
MQTIKCVVVGDGAVGKTCLLISYTTNKFPSEYVPTVFDNYAVTVMIGEEPYTLGLFDTAGQEDYDRLRPLSYPQTDVFLICFSVTSPASFENVREKWHPEVRHHCPGTPCLIVGTQIDLRDDPMIVEKLSRQRQTPITKELGEKLSKELGAVKYVECSALTQKGLKNVFDEAIVCALEPPVTKKKTKCLIL

SEQ ID NO: 11735 - protein, 273 aa, Glycine max
MFLCWYCQKSGVHHAVNPDPYRGIFGSDGEKYARDVQDIINFGTSGNVAAFISEAIQGVGGIIELAPGYLPVVYNAIKKAGGLFIADEVQAGFGRTGSHFWGFEAHNVVPDIVTIAKGIGNGIPLGAVVTTPEIAEVLTRRSYFNTFGGNPVCTAAGLAVLKVIEKEQLQQNAFVVGSHLKERLTALKDKYELIGDVRGRGLMLGVELVTDRELKTPAKNETLHVMDQMKELGVLIGKGGYYGNVFRITPPLCFTKEDADFVADAMDLTLSRM

SEQ ID NO: 11736 - protein, 1012 aa, Desulfovibrio gigas
MLIKRRAFLKLTAAGATLSAFGGLGVDLAPAKAQAATMALKTVDAKQTTSVCCYCSVGCGLIVHTDKKTNRAINVEGDPDHPINEGSLCAKGASTWQLAENERRPANPLYRAPGSDQWEEKSWDWMLDTIAERVAKTREATFVTKNAKGQVVNRCDGIASVGSAAMDNEECWIYQAWLRSLGLFYIEHQARICHSATVAALAESYGRGAMTNHWIDLKNSDVILMMGSNPAENHPISFKWVMRAKDKGATLIHVDPRYTRTSTKCDLYAPLRSGSDIAFLNGMTKYILEKELYFKDYVVNYTNASFIVGEGFAFEEGLFAGYNKETRKYDKSKWGFERDENGNPKRDETLKHPRCVFQIMKKHYERYDLDKISAICGTPKELILKVYDAYCATGKPDKAGTIMYAMGWTQHTVGVQNIRAMSINQLLLGNIGVAGGGVNALRGEANVQGSTDHGLLMHIYPGYLGTARASIPTYEEYTKKFTPVSKDPQSANWWSNFPKYSASYIKSMWPDADLNEAYGYLPKGEDGKDYSWLTLFDDMFQGKIKGFFAWGQNPACSGANSNKTREALTKLDWMVNVNIFDNETGSFWRGPDMDPKKIKTEVFFLPCAVAIEKEGSISNSGRWMQWRYVGPEPRKNAIPDGDLIVELAKRVQKLLAKTPGKLAAPVTKLKTDYWVNDHGHFDPHKIAKLINGFALKDFKVGDVEYKAGQQIATFGHLQADGSTTSGCWIYTGSYTEKGNMAARRDKTQTDMQAKIGLYPGWTWAWPVNRRIIYNRASVDLNGKPYAPEKAVVEWNAAEKKWVGDVPDGPWPPQADKEKGKRAFIMKPEGYAYLYGPGREDGPLPEYYEPMECPVIEHPFSKTLHNPTALHFATEEKAVCDPRYPFICSTYRVTEHWQTGLMTRNTPWLLEAEPQMFCEMSEELATLRGIKNGDKVILESVRGKLWAKAIITKRIKPFAIQGQQVHMVGIPWHYGWSFPKNGGDAANILTPSVGDPNTGIPETKAFMVNVTKA

SEQ ID NO: 11737 - protein, 218 aa, Pisum sativum
MAGYRADDEYDYLFKLVLIGDSGVGKSNLLSRFTRNEFNLESKSTIGVEFATKSLNIDSKVIKAQIWDTAGQERYRAITSAYYRGAVGALLVYDVTRRATFENAARWLKELRDHTDPNIVVMLIGNKSDLRHLVAVPTEDGKSFAERESLYFMETSALEATNVENAFSEVLSQIYHIVSKKAVEAGESGSSSAVPSIGQTINVKEDSSVFKRFGCCSN

SEQ ID NO: 11738 - protein, 253 aa, Pseudomonas fluorescens PfO-1
MSMTFSGQVAVVTGAANGIGRATAQAFAAEGLKVVVADLDAAGGEGTVALIRTAGGEATFVRCNVTVESEVKNLMDEVINTYGRLDYAFNNAGIEIEKGKLAEGSMDEFDAIMGVNVKGVWLCMKYQLPLLLAQGGGAIVNTASVAGLGAAPKMSIYAASKHAVIGLTKSAAIEYAKKKIRVNAVCPAVIDTDMFRRAYEADPKKGEFANAMHPVGRIGKVEEIASAVLYLCSDGAAFTTGHSLAVDGGVTAF

SEQ ID NO: 11739 - protein, 201 aa, Pisum sativum
MSNEYDYLFKLLIIGDSSVGKSCLLLRFADDSYVDSYISTIGVDFKIRTVELEGKTVKLQIWDTAGQERFRTITSSYYRGAHGIIIVYDVTDMESFNNVKQWLHEIDRYANDSVCKLLVGNKCDLTENKVVQTQTAKAFADELGIPFLETSAKDSINVEQAFLTMAAEIKKKMGSQPSGSKSAESVQMKGQPIPQNNNCCG

SEQ ID NO: 11740 - protein, 236 aa, Oryza sativa
MAGLGFDETELRLGLPGAGELAARSSGKRGFAETIDLKLKLQPAAPAAVSGEEGAQEDKEDADAAAAAADEKMSMKRSASQSSVVTAEPDPDKPRAPKAQVVGWPPVRSFRKNVLAEKCKAAALVKVSMDGAPYLRKIDVAMYKSYPELSMAFQNMFTSFTIGIYGKCGSHQQLKESNKLRDDLEYVPTYEDKDGDWMLVGDVPWEMFVESCKRLRIMKGSEAIGLAPRAVEKCKS

SEQ ID NO: 11741 - protein, 547 aa, Glycine max
MASHLLNHSSKMRNASKLLHHERALLVRWFSGDAHSSLNRNRDVWKTQFHESSARSSVFEPASCFNKHSFGMQKRNIFMATIKRGSIIGSEFNGEISRSLQVLSRRCYASASDLPPHQEIGMPSLSPTMTEGNIARWLKKEGDRISPGEVLCEVETDKATVEMECMEEGFLAKIIRGDGAKEIKVGEVIAVTVEDEGDIAKFKDYQPSASEPSEPPAKETSAPPPPKKEEVVEEPAREPEPKVSKPSAPPSSGDRTFASPLARKLAEEKNVPLSSIKGTGPEGLIVKADIDDYLASGAKEVSASSKAKVAADAALDYTDIPVSQIRKVTASRLLLSKQTIPHYYLTVDTCVDKLMSLRTQLNSLQEASGGSRISVNDLVIKAAALALRKVPQCNSSWANDYIRQYHNVNINVAVQTDNGLFVPVVRDADKKGLSKIGEEVKQLAKKAKENSLKPQEYEGGTFTVTNLGGPFGVKQFCAIINPPQAGILAVGSAERRVVPGSGAEEFKFASFMSVTLSCDHRVIDGAIGAEWLKAFKGYIENPETMLL

SEQ ID NO: 11742 - protein, 487 aa, Rhizobium sp. NGR234
MQRFQCYIDGEFADGEGRFESVDPATGAAWAEMPEAREADVDRAVEAAHKALDAGPWSKLTATLRGKLLYRLADLVAENAQRLAELETRDTGKIIRETSAQIAYVAEYYRYYAGIADKIEGSYLPIDKPDMEVWLRREPIGVVAMVVPWNSQLFLSAVKIGPALAAGCTMVVKASEDGPAPLLQFARLVHEAGFPAGVVNIITGFGPACGAALSRHPKVDHIAFTGGPETARHVVRNSAENLASTSLELGGKSPFIVFADADLESAANAQVAGIFAATGQSCVAGSRLIVEKSVKDRFLEILKRKAEAICIGSPLDMATEVGPLATERQRAHIQALLGRSLAAGARLVTGGTAPDGAGFFYQPTILDCDGNSTPALEEEFFGPVLSVVSFETEAEALALANATRYGLAAGLFTRDLTRAHRLMKGIRTGIVWVNTYRAVSPIAPFGGFGLSGHGREGGMEAALDFTRTKTVWLRTSDDPIPDPFVMR

SEQ ID NO: 11743 - protein, 640 aa, Oryza sativa
MATAATLPSSSSSAAAAVQTISRVLSFPRRGGGGFLHLRRHPLAAAAAATRGRGPLLRLGPRRPFSASASAGDNGAAAGGDGGGCDYDYDLFTIGAGSGGMRASRVAASLYGARAAVCEMPFATVASDSLGGVGGTCVLRGCVPKKLLVYASKYSHEFEESHGFGWRYGTEPKHDWSTLMTNKNLELQRLVGVQTNMLKNSGVTIIEGRGKVVDPHTVSVDGKLYTAKNILIAVGGRPSMPDIPGIEHVIDSDAALDLPSRPEKIAIVGGGYIALEFAGIFNGLKSGVHVFIRQKKVLRGFDEEVRDFVADQMSLRGITFHTEETPQAVMKSDDGLLTLTTNKGSINGFSHVMFATGRKPNTKNLGLEEVGVKMDKHGAIVVDEFSRTSVDSIWAVGDVTNRVNLTPVALMEGGALARTIFGNEPTKPDYSAVPSAVFSQPPIGQVGLTEEKAIEKYGDVDVYTSNFRPLRATLSGLPDRVYMKVIVCANTNKVLGVHVCGEDAPEIIQGIAIAVKAGLMKQNFDATIGVHPTTAEELVTMRSPTRKVRRDAVDESDQSISNRGNNRQISVFRAVPEKSNPRLQPVKNGDELQQMASYLIRTHTRWDGIVTSVFPFHSGSIWRQHVAWRQQQQSRQNLGA

SEQ ID NO: 11744 - protein, 345 aa, Enterococcus faecium
MSEKELMKVVGFYEGLPIDDPKSFIDEKEQIPVPSSRDLLVKVNAVSVNPVDTKLRQDNGIRNALRILGFDGVGKVVAVGDEVQKFSVGDRVFYAGTTTRAGSNQEYQLVDERIVALAPKNLSDEEAAALPLTSLTAYELLFEKFGLTPEENANRGKKILVINGSGGVGSILNQLAHWAGLEVYATASPKNFEWLKKTGVDYPIDYHHDLSKSFRELGIDQVEYVAVLFDITRYFDQIKHLVRPFGHVGTIVGIKEPLDIGVWKNQSISFDWEYMFAKTDYNYEIETQGEALAHIAALANEGIIRSTLSKVYSDGMNAKNLKQATKDVETGHMLGKVVVSGPFNG

SEQ ID NO: 11745 - protein, 302 aa, Ipomoea batatas
MDYERFIQAHRETDADITVAALPMDEKRATAFGLMKIDEEGRIIEFAEKPKREQLKAMKVDTTILGLDDQRAKELPFIASMGIYVISKNVMLNLLREKFPGANDFGSEVIPGATSIGMRVQAYLFDGYWEDIGTIEAFYNANLGITKKPVPDFSFYDRSAPISTTPRYLPPSKMLDADVTDSVIGEGCVIKNCKIHHSVVGLRSCISEGAIIEDSLLMGADYYETDADRRLLAAKGSVPIGIGRNSHIKRAIIHNIARIGNDVKIINNDNVQEAARETEGYFIKSGIVTIIKDALIPSGTII

SEQ ID NO: 11746 - protein, 213 aa, Populus tremula
CDLLRINTDRGVMLTDGKSRFSINGKPIYHFLGGSTFSEYTVCHIGTVAKINPAAPLDKVCILSCGISTGLGAALNVAKPQKGHTVAVFGLGAVGLAAAEGARLSGASRIIGVDLNPSRFKEAKKFGVAELINPKDHDKPVQQVIIEMTDGGVDRSIECTGNVQAMISAFECVHDGWGVAVLVGVPSKDDEFKTHPMNLLNERTLKGTFFGNY

SEQ ID NO: 11747 - protein, 401 aa, Synechocystis sp. PCC 6803
MIHHPPAGARDLLPLEVAQKARINDQLQQTFHRWGYQRIVTSTLEWLDTLVAGGAISANNVIQLQDSGEGRLGLRPELTASIARAVVTRMTDNQPQRLCYRANVFRNPPEGYHGKQMEFFQAGIELLFAGGVRADAEILLLLTDCLTQLGLSDWQLILGDAGLTRSLLAKLPPTLQATVRDCITRLDYVELSQLPYPDNEAKNLALQLFDLRGTVEEVLARLGKLDLQGECLGLVDRLQALLCLVAASGDGPANLVLDLSWLQPFDYYTGMVFQAVSRQADNCYVLGQGGRYDQLLSQYHPQQQSFPGTGFSLNIEELHQCLLELGTLPTSTAPIDYLVCPVDDTAEGATFRHAQQLRRQHPDRRVELDLGGRSPEELNTYAQAMAVGQIVWVGADGPVDL

SEQ ID NO: 11748 - protein, 957 aa, Bradyrhizobium japonicum USDA 110
MSLIEEIDFGTPRAKSETMVTLTIDGKEISVPEGTSIMRAAMEAGHQIPKLCATDMVDAFGSCRLCLVEIEGRAGTPASCTTPVMPGLVVHTQTDRLKKLRKGVMELYISDHPLDCLTCGANGDCELQDMAGAVGLRDVRYGYEGENHVFAKSNGEVNAAWMPKDESNPYFAYDPSKCIVCSRCVRACEEVQGTFALTISGRGFDSRVSPGMSESFLGSECVSCGACVQACPTATLTEKSVIEIGQPEHSVVTTCAYCGVGCAFKAEMRGEEVVRMVPYKDGKANRGHSCVKGRFAWGYTNHKERILKPMIRERIEDPWREVSWDEAFSFAAARMRGIQKKYGRDAIGGITSSRCTNEETYLVQKLIRAGFGNNNVDTCARVCHSPTGYGLSQTFGTSAGTQDFDSVENTDVAVVIGANPASAHPVFASRLKKRLRQGAKLIVIDPRRTEMVESPHVKALHLPLMPGTNVAVVTALAHVIVTEGLVNEAFVRERCDWTEFEEWAAFVAQPNNSPEATAILTGVDPKALREAARIYATGGNGAIYYGLGVTEHSQGSTTVIAIANLAMATGNIGRPGVGVNPLRGQNNVQGSCDMGSFPHELPGYRHISGNAVRDQFEALWNVKLNPEPGLRIPNMFDAAIEGTFMGIYVQGEDILQSDPNTSHVVAALAAMECVIVHDLFLNETANYAHVFLPGSSFLEKDGTFTNAERRIQRVRKVMTPKNGMADWEVTIGLAKAMGFEMNYSHPSEIMDEIAALTPTFTGVSYAKLDELGSVQWPCNEKAPEGTPVMHIDGFVRGKGKFIVTEYVATDERTGPRFPLLLTTGRILSQYNVGAQTRRTENVVWHAEDRLEIHPHDAEQRGVRDGDWVRLKSRAGETTLRAEITDRVAPGVVYTTFHHPDTQANVITTDYSDWATNCPEYKVTAVQISPSNGPSDWQKSYDAQARHSRRIAPAEAAE

SEQ ID NO: 11749 - protein, 213 aa, Populus tremula
CDLLRINTDRGVMLTDGKSRFSINGKPIYHFLGGSTFSEYTVCHIGTVAKINPAAPLDKVCILSCGISTGLGAALNVAKPQKGHTVAVFGLGAVGLAAAEGARLSGASRIIGVDLNPSRFKEAKKFGVTELINPKDHDKPVQQVLIEMTDGGVDRSIECTGNVQAMISAFECVHDGWGVAVLVGVPSKDDEFKTHPMNLLNERTLKGTFFGNY

SEQ ID NO: 11750 - protein, 1209 aa, Trichodesmium erythraeum IMS101
MGRKCILGFILFLLTLTLTILHGSVISKNTNDYQLSNQIKEVKTWQTSELEKEQYNFYQSSEEDFIKPQKFDHLQTVINKKDLPVYKNLSTSKPHSTYKVTDILWLLISSGLVFLMQPGFMCLESGLTRSKNNINVAFKNLTDFGISVFCFWSIGFAFMFGTSASGIIGHSNFFFATNVQPLDAAFFLFQVMFCGTATTIVSGAVAERMKFGTYLFVAFLVSGFIYPIFGHWAWNGIDTGVLRGWLGQRGFIDFAGSTVVHSIGGWVSLATLLVIGPRTGRFPRDRPPEKIHGSNLPLSILGVMLIWFGWFGFNGGSTLALNEQVPGIIVNTIFSSVAGMITGLSIGWSIRGIPGVDLIINGTLGGLVAITASCHAVTTLSAVIIGFIGGIVTILVEQILEKIRVDDAVGAIPVHLGAGIWGTLAVALFGKPEILGTGLSLSEQLTVQLLGVCTAFLLGFFVVYPILLITNKFFLLRVSTEDEHIGLNISEHHAKTEILDLFEIMSSQASTQDLTLRVPVEPFTLVGQIAERYNHVMDTLEEVTTRNDAIIKLATDAIITFNKSELEIISVNPSAEKIFSYKPQDLVGMPIYEILDFTINPLMREKIDSNDLITEGKKSTVEALKLWVNPSFISFPTREIINAYYTFNFQDIKPENLQSYFPNFIHLFDKNSADTQIELETEKKITQKKYYIERLISLIAETGNLYELVGIRKDGSLFPIEIAVREAKLNQKNFYTGTFRDISERKESEAKLKENEQRFRSLSTATFEGIIIYEQGKIVDANTAALQMFKYELSEIIGMNGLELIDSKYKNLVWKNMSSGYEKPYEVVGIRKDNSTFPIEIQAKTFFYCSYQHRVSAIRDITERKLAEKALRESEEKFRAVMEQAADAFIIHDLQGKIVDVNQSTCQTLGYTYEELLHLFIEDIEINFVLEYLYQKWQKLIPGIPITLQGTHKRKDGTTFPVEVRLGLLKAGNGNLVLALCRDITERKKVEQALLLEQGKSEKLLLNILPKPIADKLKENQDIIAEGFDEVTVLFADLVGFTQLASSVYPKRLVYWLNEIFSKFDLLAEKYGLEKIKTIGDAYMVVGGLPTPMENHAEAIALIAIDMREELAHFAHKSKQDFLIRIGINTGPVVAGVIGRKKFIYDLWGDTVNIASRMESQGIPGVIQVTEATYQILKHKFLFTERGLIHIKGKGYMKTYFLQGKKVIP

SEQ ID NO: 11751 - protein, 443 aa, Cytophaga hutchinsonii
MSFNFETLQLHAGQEVDPTTQSRAVPIYQTTSYVFKDSNHGANLFALKEFGNIYTRIMNPTTDVFEKRIAALEGGVAALATSSGQSAQFIALTNILQAGDNFVTTSFLYGGTYNQFKVSFKRLGIEARFAEGDQVASFEKLIDAKTKALYVETIGNPEFNIPDFEAFAALAKKHDLPLIVDNTFGAGGYLFRPLEHGANVVVESATKWIGGHGTSVGGVIVDGGNYNWGNGKFPQFSEPSEGYHGLVFWDVFGTNGPFGNIAFIIRARVEGLRDFGPSQSPFNSFLLLQGLETLSLRVDRHVQNAQKLAEWLEQHADVATVNYPGLQSSKYHNLAKKYLKRGFGGVLSFEIKGGKSRAAQFINSLKLASHLANVGDAKTLIIHPASTTHQQLSDEEQKVAGVSAGLLRVSVGIEHIDDIIADFEQAFETVKEIEHTVSVSEQV

SEQ ID NO: 11752 - protein, 748 aa, Synechocystis sp. PCC 6803
MATTVQLSDQSLRQLETLAIHTAHLIQPHGLVVVLQEPDLTISQISANCTGILGRSPEDLLGRTLGEVFDSFQIDPIQSRLTAGQISSLNPSKLWARVMGDDFVIFDGVFHRNSDGLLVCELEPAYTSDNLPFLGFYHMANAALNRLRQQANLRDFYDVIVEEVRRMTGFDRVMLYRFDENNHGDVIAEDKRDDMEPYLGLHYPESDIPQPARRLFIHNPIRVIPDVYGVAVPLTPAVNPSTNRAVDLTESILRSAYHCHLTYLKNMGVGASLTISLIKDGHLWGLIACHHQTPKVIPFELRKACEFFGRVVFSNISAQEDTETFDYRVQLAEHEAVLLDKMTTAADFVEGLTNHPDRLLGLTGSQGAAICFGEKLILVGETPDEKAVQYLLQWLENREVQDVFFTSSLSQIYPDAVNFKSVASGLLAIPIARHNFLLWFRPEVLQTVNWGGDPNHAYEATQEDGKIELHPRQSFDLWKEIVRLQSLPWQSVEIQSALALKKAIVNLILRQAEELAQLARNLERSNADLKKFAYIASHDLQEPLNQVSNYVQLLEMRYSEALDEDAKDFIDFAVTGVSLMQTLIDDILTYAKVDTQYAQLTFTDVQEVVDKALANLKQRIEESGAEIEVGSMPAVMADQIQLMQVFQNLIANGIKFAGDKSPKIKIWGDRQEDAWVFAVQDNGIGIDPQFFERIFVIFQRLHTRDEYKGTGMGLAICKKIIEGHQGQIWLESNPGEGSTFYFSIPIGN

SEQ ID NO: 11753 - protein, 478 aa, Klebsiella pneumoniae
MTAPVQHPMYIDGQFVSGRGDGWIDVLNPATEALLSRIPDGTAEEARLAIDAAERAQPGWEALPAIERAGWLRKIAAGIRQRADEIAGLIVAEGGKIQQLAAVEVAFTADYLDYMAEWARRYEGEIVQSDRPGENILVFKRALGVTTGILPWNFPFFLIARKLAPALITGNTIVIKPSEFTPNNAIAFAEIVHQVGLPKGVFNLVLGRGETVGQELAGNPKVAMVSMTGSVAAGEKIMAAAAKNITKVCLELGGKAPAIVMDDADLELAVKAVVDSRVINTGQVCNCVERVYVQQGIYDRFVNRLGEAMKAVQFGDPATRDDIAMGPLINAAARDQVAGKVRSGGAGGAGGAGGQPLEGKGYFYPPTLLLDVRQEMDIIHEETFGPVLPVVAFSTLDEALATANDSDYGLTSSIYTRDLNVAMKAIKGLKFGETYINRENFEAMQGFHAGWRKSGIGGADGRHGLNEYLQTQVVYLQA

SEQ ID NO: 11754 - protein, 490 aa, Pseudomonas syringae pv. tomato str. DC3000
MARFELQKLYIDGGYVDASNTETFDSINPANGEVLAKIQRASKEDVERAVVAAEKGQKIWAAMTAVERSRILRRAVDILRERNDELAALETLDTGKAISETRYVDIVTGADVLEYYAGLVPAIEGEQIPLRDSSFVYTRREPLGVVAGIGAWNYPIQIALWKSAPALAAGNAMIFKPSEVTSLTTLKLAEIYTEAGVPNGVFNVLTGSGREVGTWITEHPRIEKVSFTGGTDTGKKVMASASSSSLKEVTMELGGKSPLIVFDDADLDRAADIAMMANFYSSGQVCTNGTRVFVPNALKGEFEAKILERVKRIRPGNPEDENINFGPLVSFEHMESVLGYIAKGKEQGARLLCGGDRLTGGVFDKGAFVAATVFTDCTDEMTIVREEIFGPVMSILGYDTEDEVVRRANDTDFGLAAGIVTRDLNRAHRVIHLLEAGICWINAWGESAAQMPVGGYKQSGVGRENGISSLAQYTRIKSVQIELGDYASVF

SEQ ID NO: 11755 - protein, 302 aa, Shewanella oneidensis MR-1
MKQHQIRKAVIPVAGLGTRMLPATKAIPKEMLPVVDKPLIQYVVSEAIAAGIKEIVLVTHASKNSIENHFDTSFELEAQLERRVKRQLLEAVQSICPKDVTVISVRQSQAKGLGHAILCAKSVVGDAPFAVLLPDVIIDEASCDLKTDNLASMVSLFDETQVGQIMVEGVPHHLVNQYGIADVNGHDLQPGESEPLVELVEKPPVDEAPSNLAVVGRYVLPAAIWPLLAKTPAGAGDEIQLTDAIAMLMKEETVNAYYMQGKSHDCGNKQGYMRANVEYALRHSEIGEDFAHYLKTVVKGIK

SEQ ID NO: 11756 - protein, 215 aa, Sodalis glossinidius
MSAQQQAVILAHCRQHGIWIVSDEVYSRIVFDGPPEGCAPSFLDIADPDDRLLVINSFSKSWLMTGWRLGWVVAPPALMYELGKLIEYNSSCAPGFVQKAGLVAVNQGEAVRQETVALFQASRDYLYQRLGTLPDIEVPLPAGAIYLFFRVRGLDDSLAFCKALVAEAGVGLAPGSAFGDAGEGCLRWCIASSIEKLEQGADRFSRFLHRSPLRR

SEQ ID NO: 11757 - protein, 376 aa, Oryza sativa (indica cultivar-group)
MATAGKVIKCKAAVAWEAGKPLSIEEVEVAKEMEVRVKILFTSLCHTDVYFWEAKGQTPVFPRIFGHEAGGIVESVGEGVTDLAPGDHVLPVFTGECKECAHCKSAESNMCDLLRINTDRGVMIGDGKSRFSINGKPIYHFIGTSTFSEYTVMHVGCVAKINPAAPLDKVCVLSCGISTGLGATINVAKPKGSTVAIFGLGAVGLAAAEGARIRGASRIIGIDLNANRFEEARKFGCTEFVNPKDHDKPVQQVLAEMTNGGVDRSVECTGNINAMIQAFECVHDGWGIAVLVGVPHKDAEFKTHPMNFLNERTLKGTFFGNYKPRTDLPNVVELYMKKELEVEKFITHSVPFSEINTAFDLMHKGEAIRCIIRMEN

SEQ ID NO: 11758 - protein, 260 aa, Zea mays
MPQGDHIELHQKRHGKRLDHEERKRKREAREVHRRSKDARNLIGAKGKRFAKKRYAEKAQMKKTLKMHDESNKRQKVDDDVQEGALPPYLLDRDQTQRAKVLSNTIKQKRKEKAGKWDVPLPKVRPVAEEEMFKVLRTGKRKTKQWKRMVTKATFVGAGFTRKPPKYERFIRPTGLRFTKAHVTHPELKCTFNLDIISVKKNPNGPMYTSLGVMTRGTIIEVNVSELGLVTPAGKVVWGKYAQVTNNPENDGCINAVLLV

SEQ ID NO: 11759 - protein, 213 aa, Populus tremula
CDLLRINTDRGVMLTDGKSRFSINGKPIYHFLGGSTFSEYTVCHIGTVAKINPAAPLDKVCILSCGISTGLGAALNVAKPQKGHTVAVFGLGAVGLAAAEGARLSGASRIIGVDLNPSRFKEAKKFGVTELINPKDHDKPVQQVIIEMTDGGVDRSIECTGNVQAMISAFECVHDGWGVAVLVGVPSKDDEFKAHPMNLLNERTLKGTFFGNY

SEQ ID NO: 11760 - protein, 408 aa, Zea mays
RWEPAWRRARTARRCRWPRWCSRSSSSRRSSTTRTSSPTAALRGVVSVPQTCDLYRGSWVYDEVSAPVYKEGECEFLTEQVTCMRNGRRDDSYQKWRWQPAGCDLPRFDARLLLERLRNKRLMFVGDSLNRNQWESMVCLVQSVIPDRGQKTLTKFVNGGSSNVFYAHEYNATIDFYWSPLLVESNSDNPIIHRVEYRIIRADRIEKHASVWRDADVIVFNSYLWWRIPPCARRYGSFEDGDAKLDEMEMADGFEIAIKKLTEWLAKNIDKNKTRIFFAGSSPTHSWASNWGGQDKNKCLNETEPISYRPGGGYKAATTDYSLMAMARSYFRRTLEPRGIRVQILNITELSDYRKDGHPTVFRRQFVPLTKEQIADPASYADCTHWCLPGVPDVWNEFLYGYLTQQSK

SEQ ID NO: 11761 - protein, 180 aa, Glycine max
MQHRKLTSGRPSGTDGSDYSYRMVVDSRYQLVAKGKKYLSLHFITEAVLLLIGATLAYLPGIEADAPNTVAYSSVIVSVVSLIIGNIGRRRSRSGLLRFYAVVSSIVMLLLIASLATQHLLLKAIQDSKLWRTGKYDVNDLSHFQIGLLLYMVTLSVLKLCTVNAVVSLLFNMAPPKKTS

SEQ ID NO: 11762 - protein, 249 aa, Arabidopsis lyrata subsp. petraea
MGRGRVELKRIENKINRQVTFAKRRNGLLKKAYELSVLCDAEVALIIFSNRGKLYEFCSSSNMLKTLDRYQKCSYGSIEVNNKPAKELENSYREYLKLKGRYENLQRQQRNLLGEDLGPLNSKELEQLERQLDGSLKQVRSIKTQYMLDQLSDLQNKEQMLLETNRALAMKLDDMIGVRSHHMGGGWEGGEQNVTYAHHQAQSQGLYQPLECNPTLQMGYDNPVCSEQITATTQAQAQQGNGYIPGWML

SEQ ID NO: 11763 - protein, 507 aa, Saccharomyces cerevisiae
MTMTHQQDLKGVFTAKDLDFKPAGKITKKDLNTGVTKAEYAVRGAIPTRADELKEELKKNPEVLPFDDIINANIGNPQQLDQKPLTFTRQVLAILEYPEILRVGHNELASLNLFSRDALERAERLLNDIGGSIGAYSHSQGVPGIRQTVADFITRRDGGEPATPEDIYLTTGASSAATSLLSLLCKDSQTGLLIPIPQYPLYTASASLFNAQVLPYYLDEESNWSTNSDEIEKVVQDALKKQIRPSVLIVINPGNPTGAVLSEETIARICLIAAKYGITIISDEVYQENIFNDVKFHSMKKVLRKLQHLYPGKFDNVQLASLHSISKGFMDECGQRGGYMEIIGFSQEIRDALFKLMSISICSVVTGQAVVDLMVKPPQPGDESYEQDHDERLKIFHEMRTRANLLYETFKELEGIECQKPQGAMYLFPRLVLPKKALCESERLGIEPDEFYCTSLLESTGICTVPGSGFGQRPGTYHVRTTFLAPGTKWIQDWKEFHQDFFSKYRN

SEQ ID NO: 11764 - protein, 293 aa, Dryopteris caudipinna
  unsure (1)..(293): unsure at all Xaa locations
VGILPLSLQYGFSVANKFLQGAQSIDNHFKTAPFEKNIPVLLGLLSVWNVSFLNHPARAILPYCQALEKFAPHIQQLSMESNGKGVSIEGVPLSFEAGEIDFGEPGTNGQHSFYQLIHQGRVIPCDFIGIIESQQPVYLKGEVVSNHDELMCNFFAQADALAYGKTPEELXAEGVPEHLVPHKTFSGNRPSLSILLPKLTPYTLGQLLSIYEHRIAVQGFIWGINSFDQWGVELGKSLASHVRKQINASRSQGKSVAGFNYSTSTLLNHYLKVKSNVYTSTHDSFPPAILPPK

SEQ ID NO: 11765 - protein, 176 aa, Trichodesmium erythraeum IMS101
MLSTTELLIASQWFGIATIGFFILTIIAFIFNREFRFRLVGVTGFMGVLTAGLFGLSLGLFNRVEVPGAVRYTLVYDNGATQTVIAVAPTIKESELVATMEQAAGDLFSPGRLGMDRQLTIRVRTIIHPEEGVSEPLYLGEVKRSLSQREDENIDVKIFPETVAKLLDYQIDNLES

SEQ ID NO: 11766 - protein, 723 aa, Desulfovibrio desulfuricans
ADNRPEKWVKGVCRYCGTGCGVLVGVKDGKAVAIQGNPNNHNAGLLCLKGSLLIPVLNSKERVTQPLVRRHKGGKLEPVSWDEALDLMASRFRSSIDMYGPNSVAWYGSGQCLTEESYVANKIFKGGFGTNNVDGNPRLCMASAVGGYVTSFGKDEPMGTYADIDQATCFFIIGSNTSEAHPVLFRRIARRKQVEPGVKIIVADPRRTNTSRIADMHVAFRPGTDLAFMHSMAWVIINEELDNPRFWQRYVNFMDAEGKPSDFEGYKAFLENYRPEKVAEICRVPVEQIYGAARAFAESAATMSLWCMGINQRVQGVFANNLIHNLHLITGQICRPGATSFSLTGQPNACGGVRDGGALSHLLPAGRAIPNAKHRAEMEKLWGLPEGRIAPEPGYHTVALFEALGRGDVKCMIICETNPAHTLPNLNKVHKAMSHPESFIVCIEAFPDAVTLEYADLVLPPAFWCERDGVYGCGERRYSLTEKAVDPPGQCRPTVNTLVEFARRAGVDPQLVNFRNAEDVWNEWRMVSKGTTYDFWGMTRERLRKESGLIWPCPSEDHPGTSLRYVRGQDPCVPADHPDRFFFYGKPDGRAVIWMRPAKGAAEEPDAEYPLYLTSMRVIDHWHTATMTGKVPELQKANPIAFVEINEEDAARTGIKHGDSVIVETRRDAMELPARVSDVCRPGLIAVPFFDPKKLVNKLFLDATDPVSREPEYKICAARVRKA

SEQ ID NO: 11767 - protein, 213 aa, Populus tremula
CDLLRINTDRGVMLTDGKSRFSINGKPIYHFLGGSTFSEYTVCHIGTVAKINPAAPLDKVCILSCGISTGLGAALNVAKPQKGHTVAVFGLGAVGLAAAEGARLSGASRIIGVDLNPSRFKEAKKFGVTELINPKDHDKPVQQVIIEMTDGGVGRSIECTGNVQAMISAFECVHDGWGVAVLVGVPSKDDEFKTHSMNLLNERTLKGTFFGNY

SEQ ID NO: 11768 - protein, 125 aa, Glycine max
  unsure (1)..(125): unsure at all Xaa locations
ASSLISSPAVISVNPAGAGMVAPLTGLKCMAGFPTRKTNNDLPFIATNGGRVECMRVWPPVGKKKFETLSYLPYLDDARLAKEIKFLLRKGWIPCLEFXMEHCFSYREHSQSPGYYDGTYWTMRN

SEQ ID NO: 11769 - protein, 213 aa, Populus alba
CDLLRINTDRGVMLTDGKSRFSINGKPIYHFLGGSTFSEYTVCHIGTVAKINPAAPLDKVCILSCGISTGLGAAMNVAKPQKGHTVAVFGLGAVGLAAAEGARLSGASRIIGVDLNPSRFKEAKKFGVTELINPKDHDKPVQQVIIEMTDGGVGRSIECTGNVQAMISAFECVHDGWGVAVLVGVPSKDDEFKTHPMNLLNERTLKGTFFGNY

SEQ ID NO: 11770 - protein, 609 aa, Streptomyces aureofaciens
MCGIVGVVDYDAPAEHRRDLLQAMTDTMACRGPDAEGLWFGRAAGLGHRRLSVIDPEHGRQPMTAEHEGRGAAITFSGEIYNFRELRAELTSHGHRFRTSCDTEVVLRGYLQWGAALVERLNGMFAFAVWDEHSEELLLVRDRMGVKPLYYWPTAAGVRFGSEPKAVLADRTLSRRVGPDGLCEVLDMVKTPEAAVFSGLVEVRPGQLVRVGRGGVRRQTYWRLEAREHTDDLPTTIGTVRDLLADTVTRQLVSDVPLGTLLSGGLDSSAVTALAARSGPVRSFSVDFRGAADAFASDAVRREADAPYVRELAGHVGADHLEVLLDSPGLSDPAVRSAVLRATDLPPAYWGDMWPSLYLFFRAVRENVTVALSGEAADELFGGYRWFRNPLALRAATFPWLTPGSARYFGGSSLFQAGLLDKLDLDGYRAARYAEALAEVPVLPGESAPERRMREIGHLNLTRFVQTLLDRKDRMSMAVGLEVRVPFCDHRLVEYVFNVPWEMKSFDGREKSLLRAAVADLLPRSVVERVKTPYPATQDPGYEGALRAELAGVLADPDAPVLPLLDRERALAAAARPTGAVSRPYDRGSLELVLWLNSWLAEYEVTLDL

SEQ ID NO: 11771 - protein, 438 aa, Mycobacterium tuberculosis H37Rv
MHFARHGAGIQHPVIVRGDGVTIFDDRGKSYLDALSGLFVVQVGYGRAELAEAAARQAGTLGYFPLWGYATPPAIELAERLARYAPGDLNRVFFTSGGTEAVETAWKVAKQYFKLTGKPGKQKVISRSIAYHGTTQGALAITGLPLFKAPFEPLTPGGFRVPNTNFYRAPLHTDLKEFGRWAADRIAEAIEFEGPDTVAAVFLEPVQNAGGCIPAPPGYFERVREICDRYDVLLVSDEVICAFGRIGSMFACEDLGYVPDMITCAKGLTSGYSPLGAMIASDRLFEPFNDGETMFAHGYTFGGHPVSAAVGLANLDIFEREGLSDHVKRNSPALRATLEKLYDLPIVGDIRGEGYFFGIELVKDQATKQTFTDDERARLLGQVSAALFEAGLYCRTDDRGDPVVQVAPPLISGQPEFDTIETILRSVLTDTGRKYLHL

SEQ ID NO: 11772 - protein, 291 aa, Oryza sativa
MSSRRDVLAVVLVAALLPPALSRGLWLGHHGLGHGHGRWRAPHVGGHGQGQGPQQHAPLGGGGWSSAHATFYGGGDASGTMGGACGYGNLYSQGYGTNTAALSTALFNNGLSCGACFEVRCDAGGGGSHSCLPGSVVVTATNFCPPNNALPSDDGGWCNPPRAHFDMSQPVFQRIALFKAGIVPVSYRRVACQKKGGIRFTINGHSYFNLVLVTNVGGAGDVHAVAVKSERSAAWQALSRNWGQNWQSAALLDGQALSFRVTTGDGRSVVSNNAVPRGWSFGQTFSGAQFN

SEQ ID NO: 11773 - protein, 502 aa, Mycobacterium tuberculosis H37Rv
MTTLWQPHRNDYSPIPGRGVHARRGARRPRPRGGRAERPGTGQLTRSGRRALLVGLTAASVGVLYGYDLSAIAGALLSLSEEFELTTREQELLTTTAVLGQIAGALGGGILANAIGRKKSVVLIVAGYAVFALLGATSVSVPMLVVARLLLGVTIGLSVVVVPVYVAESAPAAVRGSLVTAYQLATLSGIVVGYLVGYLLAGSHGWRAMFGLAAAPATLLLPLLWRMPDTARWYLLKGRIADARSALRRIQPEADIDAELADMAAAVDERGGGIGEMVRRPYLRATLFVIALGFLVQITGINAIIYYSPRLFAAMGFAGYFAMLALPAMVQVAGLAAVCASLFLVDRLGRRPILLSGIATMITADAVLITVFANDSDGGTGLVLGFAGVLLFIIGFNFGFGSLVWVYAAESFPSRLRSMGSSPMLTSTLTANAIVAAFSLTMLRVLGGAGVFAVFGTFAVVAFVVVYRFAPETKGRKLEEIRHFWENGGRWPAERSPAADEP

SEQ ID NO: 11774 - protein, 399 aa, Pseudomonas syringae pv. tomato str. DC3000
MSGNRGVVYLGAGKVEVQSIPFPKMEDPRGKRIEHGVILRVVSTNICGSDQHMVRGRTTAQTGLVLGHEITGEVLEAGRDVEHLKVGDLVSVPFNVACGRCRSCKEQNTGVCLTVNPARPGGAYGYVDMGDWVGGQAEYVLVPYADFNLLKLPDRDAAMEKIRDLTCLSDILPTGYHGAVTAGVGPGSTVYVAGAGPVGLAAAASARLLGAAVVIVGDVNPTRLIHAKAQGFEIADLSQDTPLHEQIAALLGEPEVDCAIDAVGFEARGHGHAGAQAEAPATVLNSLMGVVRVAGKIGIPGLYVTEDPGAVDAAAKMGSLSIRLGLGWAKSHSFHTGQTPVMKYNRQLMQAIMWDRIKIADVVGVEVISLDDAPRGYGEFDAGVPKKFVIDPHGLFGGV

SEQ ID NO: 11775 - protein, 165 aa, Zea mays
  unsure (1)..(165): unsure at all Xaa locations
MVSAAAQAGVVASCVVXVLFVPMGLAGRHLSRNKVLFFSGALFISLAVGIHLSPYPPSLSLPHLASFLLLPHPGSASASSGSSCVQFLHRVSWSDAAGAADNGSGGGKARAWSWPPSLASACGFARLSRDDASLLLNGSWVMVAGDSQARLLVLALLRLLLDPAA

SEQ ID NO: 11776 - protein, 506 aa, Vibrio vulnificus YJ016
MTQQLEQNLATAQKYLARFRDNTLGHFINGEWTLGSKGETFDNLTPTDNTSLGKVVKGTAEDVDAACEAAQQAFTAWAEMSGAERKKILHKLADKIEQRAEEIALVESMDCGQPLRFMRQAAIRGAANFRFFADKSPEAKNGLSLHQDTHTNYTIRTPIGPVGVITPWNTPFMLSTWKIAPALAAGCTVVHKPAEFSPLTAAILAECAKEAGLPDGVWNMVNGFGEVAGKTLTEHKAIKAVAFVGETVTGSMIQAQGAPTLKRVHFELGGKNPVIVFDDADFERALDAVVFMIYSLNGQRCTSSSRLLIQNGIKPKFIEALKQRVESLQVGHPLDPETEVGPLVHQSHYNKVMSYMTAAEEDGATIAVGGRKLPEKGAGNYLTPTLFTDADNTMRIAREEIFGPVLTCIGFDSEEEALEIANDTDYGLSGYIWTSNTGRAMRMATKVEAGMIWVNSENNRNLPSPFGGVKMSGIGRDGGDWSFDFYMETKNVCIAHDLHRVPTLGK

SEQ ID NO: 11777 - protein, 529 aa, Pirellula sp. 1
MAEITLHPPSSPSTFHWSLPGMLSRVLVVVCLLTCILGVPLVGLPVASVGAQDEVANTSAAETAPAEPSASAEEIAPAEENEAAEEPAAPTLESLQAGVDEALLAGHNGWMLVCCALVLFMTAPGLAMFYGGLVRRKNVLSVMMQCIFLMGMMTVLWALYGYSFAFGGSGGWFGNTDYLFMEGVQRYWDDDLGKAITPMEGAMTRMTHMLFQGMFFIITPALICGAFAERMKFSAMVVFSILWGTFIYCPLTHWVWDEGPLSYFAGDKALAGGALDFAGGTVVHISSGISALVAALLIGPRMGYPREPLQPHNLTYTALGAAMLWVGWFGFNAGSELASDDLTASAFAVTHFSAAAGAVAWVTLEWLVLGKPTVLGASSGAVAGLVCITPAAGFVQPMPALIMGAMAGGVCYWACSTLKHKLRYDDALDAFGVHGVGGTLGAILTGVFATRAAWDVSDGVPIGLIESGGDFTLVIGQVVAVLVTYVFAGVGSLILLKLIDICIGLRVPAESEQRGLDISDHGEEGYQFA

SEQ ID NO: 11778 - protein, 283 aa, Enterococcus faecium
MIEKERYPNAKGEDNMKVGFIGTGNMAQAIIDGLLKKGTVSKEEVFVSSGHFENAQKFAAETGVHACKSNQEVASQSDIVLLAVKPKIIEKVLEELREYSQKVLFISIASGKSLTDLETALEDPQASIVRVMPNVNVSVGAGVSAICKNEAATEEQLQQATMIFEAIGSVYPLAESDFSTFIGLAGSSPAFVYMLIDAMGRTGVLNGLSKQTATEIAAKAIMGSCQKFLSSDKNPWELVDQVSSPGGTTVAGVVALEEAGFIPAIIKGINTTIEKDLEMLNKK

SEQ ID NO: 11779 - protein, 327 aa, Bordetella bronchiseptica RB50
MSAQIRLMPSQLEALRRHTVVVADTGDFEAMRALRPTDATTNPSLILKAVQQEAYRPLLVQTARAHQGASPAEITDRLLVAFGRQILDIVPGRVSTEVDARLSFDTRATVERARGLIALYQAAGVPRERVLIKIASTWEGIQAARVLQAEGIRCNLTLLFCLPQAAACADAGVQLISPFVGRIYDWHKKNAGAEWVEDARRGANDPGVQSVSRIYRYYKRFGIETEIMGASFRNVDQILALAGCDLLTISPELLTRLSQTEGEVPAALSPQAGHDDADAVRLDGGEVAFRTQLNEDAMASEKLSEGIRLFVADARKLDALIESHGAA

SEQ ID NO: 11780 - protein, 412 aa, Magnetococcus sp. MC-1
MMIQPVRGVRDIMPDESVRWQFIESTLRRVFGQYGFGEIRIPLFEKTELFARAVGETTDIVEKEMYTFEDRGGESLALRPEGTASVVRSFINNGLDRQLPWKAYYIGPMFRYERPQKGRYRQFHQAGAELFGAEGPLADAEIMAMVLRSLQEIGIAGQLQLEINSLGCPACRPAYRAQLTDYLQSHHGALCGNCQNRLERNPLRVLDCKVESCKAIAKEAPKMRDHLCAGCDHHFAGLTAHLDALQLPYVINPMMVRGLDYYTRTAFEVTTNALGAQNAVAAGGRYDGLVTEMGGKATPAIGFAMGLERLALLMDESAIAPPLPALYVVSLEADTAAFGFAEQVRGAGLAVEVNLQGGSMKSQMKKAGRSNARWCAIIGQTEAQNQQVVLKDMQEGAQATLSWDEALHRIRA

SEQ ID NO: 11781 - protein, 503 aa, Glycine max
  unsure (1)..(503): unsure at all Xaa locations
MSIPIPHRQLFIDGDWKVPVLKNRIPIINPSTQHIIGDIPAATKEDVDLAVAAAKAALSRNKGADWASASGSVRARYLRAIAAKITEKKPELAKLEAIDCGKPLDEAAWDIDDVAGCXEFYADLAEKLDAQQKAHVSLPMDTFKSYVLKEPIGVVALITPWNYPLLMATWKVAPALAAGCAAILKPSELASVTCLELAEICKEVGLPPGVLNILTGLGPEAGAPLAAHPDVDKIAFTGSSATGSKIMTAAAQLIKPVSLELGGKSPIIVFEDVDLDKAAEWTIFGCFWTNGQICSATSRLIVHESIATEFLNRIVKWVKNIKISDPLEEGCRLGPIVSEGQYEKILKFISNAKSEGATILTGGSRPEHLKKGFFVEPTVITDVTTSMQIWREEVFGPVLCVKTFSTEEEAIDLANDTVYGLGSAVISNDLERCERITKAFKAGIVWINCSQPCFTQAPWGGIKRSGFGRELGEWGLDNYLSVKQVTQYISDEPWGWYQSPSRL

SEQ ID NO: 11782 - protein, 213 aa, Populus alba
CDLLRINTDRGVMLTDGKSRFSINGKPIYHFLGGSTFSEYTVCHIGTVAKINPAAPLDKVCILSCGISTGLGAALNVAKPQKGHTVAVFGLGAVGLAAAEGARLSGASRIIGVDLNPSRFKEARKFGVTELINPKDHDKPVQQVIIEMTDGGVDRSIECTGNVQAMISAFECVHDGWGVAVLVGVPSKDDEFKTHPMNLLNERTLKGTFFGNY

SEQ ID NO: 11783 - protein, 91 aa, Arabidopsis thaliana
MAPTKKGKKTKSAAESTTVTESSSFPTCLRLLTPSSVAITIHAKPGSKAASITDVSDEAVGVQIDAPARDGEANAALLEYMSSVKFLFLRR

SEQ ID NO: 11784 - protein, 159 aa, Glycine max
MKALQIAEKARDAILSGKFDQVRVNLPNGDMVGHTGDIEATVVACKAADAAVKMILDAIEQVGGIYVVTADHGNAEDMVKRDKSGKPLLGKDGKIQILTSHTLEPVPIAIGGPGLAPGVRFRNNVPTGGLANVAATVMNLHGFEAPSDYETTLIEVVDN

SEQ ID NO: 11785 - protein, 522 aa, Triticum aestivum
MSSMQFSSVLPLEGKACISPVRREGSASERLKVGDSSSIRHERASRRMCNGGRGPAATGAQCVLTSDASPADTLVLRTSFRRNYADPNEVAAVILGGGTGTQLFPLTSTRATPAVPIGGCYRLIDIPMSNCFNSGINKIFVMTQFNSASLNRHIHRTYLGGGINFTDGSVEVLAATQMPGEAAGWFRGTADAVRKFIWVLEDYYKNKSIEHILILSGDQLYRMDYMELVQKHVDDNADITLSCAPVGESRASEYGLVKFDSSGRVVQFSEKPKGDDLEAMKVDTSFLNFAIDDPAKYPYIASMGVYVFKRDVLLNLLKSRYAELHDFGSEILPRALHDHNVQAYVFTDYWEDIGTIRSFFDANMALCEQPPKFEFYDPKTPFFTSPRYLPPTKSDKCRIKEAIISHGCFLRECKIEHSIIGVRSRLNSGSELKNAMMMGADSYETEDEISRLMSEGKVPIGVGENTKISNCIIDMNARIGRDVVISNKEGVQEADRPEEGYYIRSGIVVIQKNATIKDGTVV

SEQ ID NO: 11786 - protein, 213 aa, Populus alba
CDLLRINTDRGVMLTDGKSRFSINGKPIYHFLGGSTFSEYTVCHIGTVAKINPAAPLDKVCILSCGISTGLGAALNVAKPQKGHTVAVFGLGAVGLAAAEGARLSGASRIIGVDLNPSRFKEAKKFGVTELINPKDHDKPVQQVIIEMTDGGVDRSIECTGNVQAMISAFECVHDGWGVAVLVGVPSKDDEFKTHPMNLLNERTLKGTFFGNY

SEQ ID NO: 11787 - protein, 269 aa, Triticum aestivum
MRSWANRPHSSLLASFLAASCLLVAGSPQELHEASGSRILHQTKPHTHEMHCSRERSRAAWKAVDEYLMPFVEKEKYELPSKCRLRPENDMFREQEQHKIHFDVNEWRCGFCKKSFRAEKFIDQHFANRHNNLLDNTQGRCLADLCEALHCDLTMEFKKPKSKCNAAAAARNRHLCENLADSCFPINQGHSASRLHEFFLRQFCDAHTCNGGSKPFPKGGRKQTNRFYLALCILTMLLLPVFYLIVFLHQREMKKGDQVFKRIGKPVHK

SEQ ID NO: 11788 - protein, 294 aa, Vigna unguiculata
  unsure (1)..(294): unsure at all Xaa locations
MEQYEKVEKIGEGTYGVVYKARDRVTDETIALKKIRLEQEDEGVPSTAIREISLLKEMQHRNIVRLQDVVHSEKRLYLVFEYLDLDLKKHMDSSPEFVKDPRQVKMFLYQILCGIAYCHSHRVLHRDLKPQNLLIDRRTNSLKLADFGLARAFGIPVRTFTHEVVTLWYRAPEILLGSRHYSTPVDVWSVGCLFAEMVNRRPLFPGDSEIDELFKIFRILGTPNEETWPGVTALPDFKSTFPKWPPKDLATMVPNLDAAGLNLLSXMLSLDPSKRITARIAVEHEYFKDIKFVP

SEQ ID NO: 11789 - protein, 460 aa, Bdellovibrio bacteriovorus HD100
MNAPANTHFFIIPLKTLPSLKAIALRTARASDITMFCSQKRANSMSNKIQRVRGTRDLLPEDSILFRFVEESAYEKALLYGYGEIETPIFEFSDVFHRTLGETSDVVNKETYDFTDRGGESLTLRPEGTAGVARAFISEGMMQNLPLKFYYSGPMFRYERPQKGRYRQFYQLGAECLGYESPLADVETISLAWDLLKKIGISDDCTLEINTLGDAESRAAYRDTLVNYFTAHKDQLSEDSKMRLEKNPLRILDSKDEGDKKLNANAPKLEQSLNQTSQDFFKKVIAGIEKLGIPYKINDHLVRGLDYYCHTVFEFTTTKLGAQGTVLAGGRYDGLIETMGGPKTPGVGWAAGIDRLADLTPKELATKKEVIIAVVGADEQGEDESVKVAHEMRVRGFKTENFLSGKMGKKMQKANKLGAHYALILGGNEVTNKTVTVKNFTTGEQKEITRAELQTYPFSI

SEQ ID NO: 11790 - protein, 309 aa, Pirellula sp. 1
MSLDAAKPAILFPGQGAQTPGMGTWLCAEYPIANELFDEAADVLGYDLKSLCADGPAEKLNETVHSQPALFVVGVAAARVHDDLNPELAKKIVAAAGLSLGEYTAVCYAGGVSFADGLKLVQKRGEAMQACADATDSGMASVLGLDLEKLTSVCEECRSGDEILQPANLLCPGNIAVSGHRSALERLEPAASAAGAMKVVPLSVAGAFHTPIMDGAVEQLTRALEEVELSDTRIPVYSNVDAKPHTSADEIRQLLARQVVNPVRWDDSINAMLGDGVDGFLEAGTGRVLRGTIKRIARKTPTDGFGDQP

SEQ ID NO: 11791 - protein, 98 aa, Glycine max
  unsure (1)..(98): unsure at all Xaa locations
KACNAFFLKVNPIGFLXKVFNXVRMSKKTGWGVLASPQNGETEDPFLAALFFGLAPGQIKTGAPSRSKGFFKYNQLFKIXEELGSEPVFFGANFRTPV

SEQ ID NO: 11792 - protein, 559 aa, Nicotiana tabacum
MGSSGDAWKLKDHPKLPKGKTVAVIVLDGWGEAKPNEFNAIHVAETPVMYSLKNGAPEKWRLIKAHGNAVGLPTEDDMGNSEVGHNALGAGRIFAQGAKLVDLALASGKIYEGEGFKYVKECFEKGTLHLIGLLSDGGVHSRLDQVQLLLKGAAKHGAKRIRVHALTDGRDVLDGSSVGFMETLENSLAQLREKGIDAQVASGGGRMYVTMDRYENDWDVVKRGWDAQVLGEAPHKFKDPVEAVKKLRQEPNANDQYLAPFVIVDDNGKPVAAILDGDAVVTFNFRADRMVMLAKALEYENFDKFDRVRVPKIRYAGMLQYHGELQLPSHYLVSPPEIARHSGEYLVRNGVRTFACSETNKFGHVTFFWNGNRSGYFNEKLEEYVEIPSDSGITFNVKPKMKALEIAERTRDAILSGKFDQVRVNLPNGDMVGHTGDIKATIEACKSADEAVKMILEAIEQVGGIYLVTADHGNAEDMVKRNKKGEPALDKNGNIQILTSHTCEPVPIAIGGPGLAPGVRFRQDLPTGGLANVAATFMNLHGSEAPSDYEPSLIEVVDN

SEQ ID NO: 11793 - protein, 753 aa, Escherichia coli
MSQHNEKNPHQHQSPLHDSSEAKPGMDSLAPEDGSHRPAAEPTPPGAQPTAPGSLKAPDTRNEKLNSLEDVRKGSENYALTTNQGVRIADDQNSLRAGSRGPTLLEDFILREKITHFDHERIPERIVHARGSAAHGYFQPYKSLSDITKADFLSDPNKITPVFVRFSTCQGGAGSADTVRDIRGFATKFYTEEGIFDLVGNNTPIFFIQDAHKFPDFVHAVKPEPHWAIPQGQSAHDTFWDYVSLQPETLHNVMWAMSDRGIPRSYRTMEGFGIHTFRLINAEGKATFVRFHWKPLAGKASLVWDEAQKLTGRDPDFHRRELWEAIEAGDFPEYELGFQLIPEEDEFKFDFDLLDPTKLIPEELVPVQRVGKMVLNRNPDNFFAENEQAAFHPGHIVPGLDFTNDPLLQGRLFSYTDTQISRLGGPNFHEIPINRPTCPYHNFQRDGMHRMGIDTNPANYEPNSINDNWPRETPPGPKRGGFESYQERVEGNKVRERSPSFGEYYSHPRLFWLSQTPFEQRHIVDGFSFELSKVVRPYIRERVVDQLAHIDLTLAQAVAKNLGIELTDDQLNITPPPDVNGLKKDPSLSLYAIPDGDVKGRVVAILLNDEVRSADLLAILKALKAKGVHAKLLYSRMGEVTADDGTVLPIAATFAGAPSLTVDAVIVPCGNIADIADNGDANYYLMEAYKHLKPIALAGDARKFKATIKIADQGEEGIVEADSADGSFMDELLTLMAAHRVWSRIPKIDKIPA

SEQ ID NO: 11794 - protein, 524 aa, Pisum sativum
MLVELALALMVIALFIHLRPTPTAKSKALRHLPNPPCPKPRLPFIGHLHLLDNPLLHHSLIRLGERYGPLYSLYFGSMPTIVVSTPDLFKLFLQTHEASSFNTRFQTSAIRRLTYDNSVAMDPFGPYWKFIRKLIMNDLFNASTINKLRPLRTREIRRVLKVMAQSAETQEPLNVTEELLKWTNNTISTMMLGEAEEVRDIARDVLKIFGEYSLTDFIWPLKMFKFGNYEKRTEAIFNKYDPIIEKVIKKRQEIVNKRKEKNGEIQESEQSVVFLDTLLEFAQDETMEIKITKEQIKGLVVDFFSAGTDSTAVATEWTLAELINNPRVLKKAREEIDSVIGKDRLVDESDVQNLPYIRAMVKEVFRMHPPLPVVKRKCTEECEINGYVIPEGALVLFNVWAVGRDPKYWKRPLEFRPERFLENAGEGEAGSVDLRGQHFQLLPFGSGRRMCPGVNLATAGMATLLASIIQCFDLQVPGPDGKILKGDDAKVSMKERAGLSVPRAQNLVCVPLARDGLAAKLLSS

SEQ ID NO: 11795 - protein, 184 aa, Zea mays
  unsure (1)..(184): unsure at all Xaa locations
MADAFAGAPTKTANIPATMRAVQYDSCGGGAAGLKHVEVPVPSAKKNELLLKLEAASINPVDWKVQKGMLRPFLPRKLPFIPVTDVAGVVADVGPGINGFQAGDQVVAMLNSFNGGGLAEYAVASENLTVKRPPEVSAAEGAGLPIAAGTALQALRTIGXAKFDGTGKAMNVLVTAGIRGGVGL

SEQ ID NO: 11796 - protein, 180 aa, Cucumis sativus
TELRLGLPGTSPDDQSNSPINRTNSNKRALPSDDQNSSESRREINSDTSKCSQENTPPTKAQVVGWPPVRSFRKNSLQAKKKEETAAGMFIKVSMDGAPFLRKVDLKIYQGYPDLLQALENMFKFSLGKFCEREGYNGSEFVPTYEDKDGDWMLVGDVPWEMFMSSCKRLRIMKRLRIMK

SEQ ID NO: 11797 - protein, 387 aa, Vibrio cholerae
MSVIKMIDLDLAGKRVFIRADLNVPVKDGKVTSDARILASLPTIKHCLEAGAKVMVTSHLGRPTEGEYAEEFSLLPVVNYLNDALDCEVRLVKDYLDGVELNAGELVVLENVRFNKGEKKNEEALSKKYAALCDVFVMDAFGTAHRAQASTHGVGMFAPIACAGPLLADELEALGKAMDKPARPMVAIVGGSKVSTKLTVLESLSKIADQLVVGGGIANTFIAAAGHNVGKSLYEADLVETAKKLMEECAIPVATDVACAKAFDENAEAEIKHVSEVQDDDMIFDLGPNSTAELAEILKNAKTILWNGPVGVFEFKNFEAGTRGIAEAIAQSEGFSVAGGGDTLAAIDKFGIKADVSYISTGGGAFLEFVEGKKLPAVEMLEARAKA

SEQ ID NO: 11798 - protein, 213 aa, Populus alba
CDLLRINTDRGVMLTDGKSRFSINGRPIYHFLGGSTFSEYTVCHIGTVAKINPAAPLDKVCILSCGISTGLGAALNVAKPQKGHTVAVFGLGAVGLAAAEGARLSGASRIIGVDLNPSRFKEAKKFGVTELINPKDHDKPVQQVIIEMTDGGVDRSIECTGNVQAMISAFECVHDGWGVAVLVGVPSKDDEFKTHPMNLLNERTLKGTFFGNY

SEQ ID NO: 11799 - protein, 377 aa, Triticum aestivum
  unsure (1)..(377): unsure at all Xaa locations
MLLRPPRLPRLSPRRLRSDSPMASTLALLRPSAPSPATNLRAPFRSRVSTRVSVGSAVAAGADTLFADYKPTTAFLFPGQGAQAVGMGKEALNVRAAAELFDKANDILGYDLLNLCIDGPKEKLNSTVISQPAIYVTSLAAVEVLRAREEGQSVINSVDVTCGLSLGEYTALAFAGAFSFEDGLKLVKLRGEAMQDASDAANSAMVSVIGLDSEKVQQLCDAANEDVDEKERVQIANFLCPGNYAVSGGVKGIEAVEAKAKSFKARMTVRLAVAGAFHTSFMQPAVSRLESALAATEIRSPRIPVISNVDAQPHSDPETIKKILAQQXVTSPVQWETTVTTLLGRGLEKSYELGPGKVIAGIIKRINKGASIENIGA

SEQ ID NO: 11800 - protein, 484 aa, Mycobacterium tuberculosis H37Rv
AQASPAAHGGSGGAGGNGGAGSAGNGGAGGAGGNGGAGGNGGGGDAGNAGSGGNGGKGGDGVGPGSTGGAGGKGGAGANGGSSNGNARGGNAGNGGHGGAGGSGDTGGAGGAGGQGGFGGTGGSGSGIGGGAGGNGGNGGAGGTGVVLGGKGGDGGNGDHGGPATNPGSGSRGGAGGSGGNGGAGGNATGSGGKGGAGGNGGDGSFGATSGPASIGVTGAPGGNGGKGGAGGSNPNGSGGDGGKGGNGGAGGNGGSIGANSGIVGGSGGAGGAGGAGGNGSLSSGEGGKGGDGGHGGDGVGGNSSVTQGGSGGGGGAGGAGGSGFFGGKGGFGGDGGQGGPNGGGTVGTVAGGGGNGGVGGRGGDGVFAGAGGQGGLGGQGGNGGGSTGGNGGLGGAGGGGGNAPDGGFGGNGGKGGQGGIGGGTQSATGLGGDGGDGGDGGNGGNSGAKAGGAGGKGQAGQPNSGTEPGFGGDGGLGGAGATP

SEQ ID NO: 11801 - protein, 213 aa, Populus alba
CDLLRINTDRGVMLTDGKSRFSINGKPIYHFLGGSTFSEYTVCHIGTVAKINPAAPLDKVCVLSCGISTGLGAALNVAKPQKGHTVAVFGLGAVGLAAAEGARLSGASRIIGVDLNPSRFKEAKKFGVTELINPKDHDKPVQQVIIEMTDGGVDRSIECTGNVQAMISAFECVHDGWGVAVLVGVPSKDDEFKTHPMNLLNERTLKGTFFGNY

SEQ ID NO: 11802 - protein, 1538 aa, Mycobacterium tuberculosis H37Rv
MVMSLMVAPELVAAAAADLTGIGQAISAANAAAAGPTTQVLAAAGDEVSAAIAALFGTHAQEYQALSARVATFHEQFVRSLTAAGSAYATAEAANASPLQALEQQVLGAINAPTQLWLGRPLIGDGVHGAPGTGQPGGAGGLLWGNGGNGGSGAAGQVGGPGGAAGLFGNGGSGGSGGAGAAGGVGGSGGWLNGNGGAGGAGGTGANGGAGGNAWLFGAGGSGGAGTNGGVGGSGGFVYGNGGAGGIGGIGGIGGNGGDAGLFGNGGAGGAGAAGLPGAAGLNGGDGSDGGNGGTGGNGGRGGLLVGNGGAGGAGGVGGDGGKGGAGDPSFAVNNGAGGNGGHGGNPGVGGAGGAGGLLAGAHGAAGATPTSGGNGGDGGIGATANSPLQAGGAGGNGGHGGLVGNGGTGGAGGAGHAGSTGATGTALQPTGGNGTNGGAGGHGGNGGNGGAQHGDGGVGGKGGAGGSGGAGGNGFDAATLGSPGADGGMGGNGGKGGDGGKAGDGGAGAAGDVTLAVNQGAGGDGGNGGEVGVGGKGGAGGVSANPALNGSAGANGTAPTSGGNGGNGGAGATPTVAGENGGAGGNGGHGGSVGNGGAGGAGGNGVAGTGLALNGGNGGNGGIGGNGGSAAGTGGDGGKGGNGGAGANGQDFSASANGANGGQGGNGGNGGIGGKGGDAFATFAKAGNGGAGGNGGNVGVAGQGGAGGKGAIPAMKGATGADGTAPTSGGDGGNGGNGASPTVAGGNGGDGGKGGSGGNVGNGGNGGAGGNGAAGQAGTPGPTSGDSGTSGTDGGAGGNGGAGGAGGTLAGHGGNGGKGGNGGQGGIGGAGERGADGAGPNANGANGENGGSGGNGGDGGAGGNGGAGGKAQAAGYTDGATGTGGDGGNGGDGGKAGDGGAGENGLNSGAMLPGGGTVGNPGTGGNGGNGGNAGVGGTGGKAGTGSLTGLDGTDGITPNGGNGGNGGNGGKGGTAGNGSGAAGGNGGNGGSGLNGGDAGNGGNGGGALNQAGFFGTGGKGGNGGNGGAGMINGGLGGFGGAGGGGAVDVAATTGGAGGNGGAGGFASTGLGGPGGAGGPGGAGDFASGVGGVGGAGGDGGAGGVGGFGGQGGIGGEGRTGGNGGSGGDGGGGISLGGNGGLGGNGGVSETGFGGAGGNGGYGGPGGPEGNGGLGGNGGAGGNGGVSTTGGDGGAGGKGGNGGDGGNVGLGGDAGSGGAGGNGGIGTDAGGAGGAGGAGGNGGSSKSTTTGNAGSGGAGGNGGTGLNGAGGAGGAGGNAGVAGVSFGNAVGGDGGNGGNGGHGGDGTTGGAGGKGGNGSSGAASGSGVVNVTAGHGGNGGNGGNGGNGSAGAGGQGGAGGSAGNGGHGGGATGGDGGNGGNGGNSGNSTGVAGLAGGAAGAGGNGGGTSSAAGHGGSGGSGGSGTTGGAGAAGGNGGAGAGGGSLSTGQSGGPRRQRWCRWQRRRWLGRQRRRRWCRWQRRCRRQRWRWRCRQRRLRRQWRQGRRRCRPWLHRRRGRQGRRWRQRRFQQRQRSRWQRR

SEQ ID NO: 11803 - protein, 458 aa, Triticum aestivum
  unsure (1)..(458): unsure at all Xaa locations
MASALSAPAASAVAAARCKVFGGGRNDGRAGCRVGVARKNTSHITMAVAVDASRFEGVPMAPPDPILGVSEAFKADTSDLKLNLGVGAYRTEELQPAVLNVVKKTEKLMLEKGENKKYLPIEGFPAFNKATXADLLLGANNPVIKQGRVATLQSLSGTGSLRLAAAFIQRYFPDAKVLISSPTWGNHKNIFNDARVPWSEYRYYDPRTVGLDFEGMIADIQAAPXEGSFVLLHGCAHNPTGIDPTPEQWEKLADVIEEKKHMPFFDVAYQGFASGSLDEDASSVRLFVKRGLEVFVAQSYSKNLGLYAERIGAINVICSAPEVADRVKSQLKRLARPXMYSNPPIHGAKIVANVVGDPTMFGEWKEEMEQMAGRIKNVRQKLYDSLTAKDQSGKDWSFILSQIGMFSFTGLNRPQSDNMTDKWHIYMTKDGRISLAGLNLAKCEYLADAIIDSFHNVN

SEQ ID NO: 11804 - protein, 202 aa, Petunia x hybrida
MSNEYDYLFKLLLIGDSSVGKSCLLLRFADDSYVDSYISTIGVDFKIRTVELDGKTIKLQIWDTAGQERFRTITSSYYRGAHGIIIVYDVTEMESFNNVKQWLSEIDRYANESVCKLLVGNKCDLVENKVVDTQTGKALADELGIPFLETSAKDSINVEQAFLTMAGEIKKKMGNQPAGAKKTGSTVQIKGQPIEQKSNCCG

SEQ ID NO: 11805 - protein, 444 aa, Azotobacter vinelandii
MKAVVFHDIGDIRLDDVPEPQIEAPTDAIVRLTASAICGTDLHFIRGSVGGMRPGTILGHEGVGIVEQLGEGVRNLQIGDRVVIPSTIACGNCSYCRAGYYAQCDVANPNGKEAGTAFYGGPAQAGPFQGLQAEKARIPFANVGLVKLPSEISDDQAILLSDIFPTGYFGAKMAEIRDGDTVAVFGCGPVGQFAIASARLLGAARVFAIDRCPDRLQMARQQGAETIDFEREDPVRTLRRLTDGIGVDRAIDAVGVDAGHEHAFQHGHDPEEEERFAREVAAVAPKPHPDGANWQPGDAPSQALEWAVEALAKAGTLSIVGVYPPQAHSFPIGLATEKNLTINMGNCHHRKYIPKLIELILAKRIDPAKILTQIKPMGDAIAAIRAFDRHEHGWIKVELQPQRMQGGTEGSEEVLSADQLLDEGIEETFPASDPVSVSPRPERH

SEQ ID NO: 11806 - protein, 485 aa, Oryza sativa
RLPPNPLKIGGGGGGGSWSIHGRPDVTSRYQVLGRAGSGAYADVYRGRRRSDGAPVALKEVHDAVSARREADALLAAAPSRHVVALLDHFPGGDHDDDVLVLEWLPLDLSAVVRAAAAARPSALPAAQRKRWMLQVLEGVAACHSAGVVHRDLKPANLLISEDGVLKVADLGQARILQETGTYQGMHPYEQSSGVEPWVSQQRAVLHGVKENHPSHDSETQTGQEPERLTAADYLHEMDQLRAKSTHGDVDKMSLQDGNASCLATCSTADIDDDPFRASYSYDAEEGMLEEESGAFTSCVGTRWFRAPELLYGSTNYGQEVDLWSLGCILAELFNLEPIFPGTSDIDQIGRIISVLGNITEETFPGCSNLPDYNKIFFNKVEKPIGLEACLPDRSASEVSIIKRLLCYDPTKRASAADLLNDPYFAEEPLPVPIEGLQVPESKDEDDDSTEEWANFRGGDSDSDFDEFGSMDVTKTDKGFSIRFS

SEQ ID NO: 11807 - protein, 80 aa, Triticum aestivum
PAWYKTEKQVTDEMLKNPKPEWGNDIPDTKEAYWYRCMFDEHFPPHCASTVMRWTPTWSKQTDPSGRAIATHNAKYDSAA

SEQ ID NO: 11808 - protein, 175 aa, Solanum tuberosum
MADVEYRCFVGGLAWATTDQTLSDAFSQYAEVVESKIINDRETGRSRGFGFVTFKDEQAMRDAIEGMNRQDLDGRNITVNEAQSRGGVEAGGGRGGGGYGGGRREGGGGGYGGYGGGRREGGGGGGYSGGGGGYGGGRREGGYGGGGGGYGGGDRYSDRSSRGGGGGSSDGNWRN

SEQ ID NO: 11809 - protein, 203 aa, Catharanthus roseus
MSEEIISVSDRFLLSLIEEHLLSDNSDDSSSELTSTEENWEEIFADFLNWSGSEIQKRGSPSSESCQSNSMAESCQEDSVVGTPPEAAAGGGCSKDWNRYKGVRRRPWGKFAAEIRDPKKKGSRIWLGTYETPEDAALAYDAAAFNMRGAKARLNFPHLIGSNISGPVRVNPRKRFPAEPSTTSSSSSSSSSENSGGRKKRRY

SEQ ID NO: 11810 - protein, 121 aa, Oryza sativa
  unsure (1)..(121): unsure at all Xaa locations
QYWRVLDFLYHHPESLHTFLFLXDDLCIPTDHRHMDGVXVNTYTFVSXDTHKAWFVKFHWXPTCGVCWFADDQATRRKGMIHTHRTKXLCCSMCHGNFRECELLLQVINPEEEEWFDFYRV

SEQ ID NO: 11811 - protein, 449 aa, Microbulbifer degradans 2-40
MTFDYDFFVIGAGSGGVRASRIAAGLGAKVAVAEDTFMGGTCVNVGCVPKKLFVYASEFAEHFEAAKGFGWQQVDGSFDWPTLRDNKTKEIERLNGIYERMLGGANVEVIHGRATLLGNNKVGIGDKVVTAKHILIATGGTPKWPTFEGAEHCITSDQIFYLETLPKRVLVQGGGYIAVEFAGILNGLGCATELAYRGPLFLRGFDSEVREFVATQMAEKGVQLSFNTDIESIAKNDDGSLTVRLNNGEVREVDAVLSAIGREPRINGLGLENTQVKTAKNGFIEVDNNFLTADPSIYAVGDVVGRMPLTPVALAEGMALARYLFDNKPIELNYSNIPTAVFCQPNIATVGLTQQQAEEQFGEVLVFKSDFKALKHTLSGLAERTLMKLIVDKTTDKVVGCHMVGPDAAEIMQGIAVAIVAGATKQDFDNTIGIHPSAAEEFVTMRSPV

SEQ ID NO: 11812 - protein, 338 aa, Enterococcus faecalis V583
MYKAIVAAKGKTTKIVEKESRPLKDNEARLKMEVCGVCHTDLHVKNADFGDVSGCTLGHEGIGIVTEVGKDVTSLKIGDRASVAWFYEGCGHCEYCTSGRETLCRSVKNAGYTVDGAMAEECIVTDGYAVKVPENLASEPASSITCAGVTTYKAIKESGIRPGQWLMISGLGGLGNLALQYAKHVFNAKVVAVDVNDNQLAFAKEMGADLLINPVKDPDFAAQLQKEIGGVHAAVVTAVAKSAFNGAVDAVRAGGTVVAVGLPVETMDLSIPRLVLDGIHVVGSLVGTRQDLREAFQFGAEGKVVPVCQTRQPEEINAIFEEMEQGKIRGRMVIDFRS

SEQ ID NO: 11813 - protein, 452 aa, Azotobacter vinelandii
MAYDFDLFVIGAGSGGVRAARFAAGFGARVAVAESRYLGGTCVNVGCVPKKLLVYGAHYAEDFEQARGYGWSLGEARFDWAGLVANKDREIQRLNGIYRKLLTDSGVTLLEGHARLTDAHGVEVNGQRYSAEHILVATGGWPVVPDIPGREHAITSNEAFHLPACPERVLVVGGGYIAVEFASIFHGLGAKTSLLYRGELFLRGFDAAVREHLRDEMLKRGLDLQFNADIARIDRQADGSLRATLRDGRSLESDCVFYATGRRPMLDDLGLEEIGVELDERGYIRVDELYRSSQPSILAIGDVTGNVQLTPVALAEGMAVARRLFRPEQYRPVDYRLIPTAVFSLPNIGTVGLTEEQARKAGYRVKIFESRFRPMKLTMTDSQERSLMKLVVDAASERVLGCHMVGPEAGEILQGLAVALKAGATKQVFDETLGIHPTAAEEFVTMRIPVDR

SEQ ID NO: 11814 - protein, 423 aa, Glycine max
INCNNIQGNIARWLKKEGDKISPGEVLCEVETDKATVEMECMEEGYLAKIIRGDGAKEIKVGEVIAVTVEDEGDIAKFKDYQPSASEPSAVPAKEISAPPTPKKEEEVEEPGREPEPKVSKPSAPPSSGDRTFASPLARKLGEEKNVPLSSIKGTGPEGLIVKADIDDYLASGAKEVSASSKAKVATDAALDYTDIPVSQIRKVTASRLLLSKQTIPHYYLTVDTCVDKLTSLRTQLNSLQEASGGSRISVNDLVIKAAALALRKVPQCNSSWANDYIRQYNNVNINVAVQTDNGLFVPVIRDADKKGLSTIGEEVKQLAKKAKENSLKPQDYEGGTFTVSNLGGPFGVRQFCAIINPPQAGILAVGSSERRVVPGSGAEEFKFASFMSVTLSCDHRVIDGAIGAEWLKAFKGYIENPETMLL

SEQ ID NO: 11815 - protein, 189 aa, Glycine max
  unsure (1)..(189): unsure at all Xaa locations
KFSIVFFFFRFSIFYSMGIGGSALGPHFVAEALAPDNPPLKIRFVDNTDPAGVDHQIAQLGLELASTLVIVISKSGGTPETRNGLWEVQKAFREAGLDLPKQVXSQGVAITQENSLLDNTARIEGWLARLPMFDWVGGRTSEMSAVGLLPAALQGIDIIEMLAGASLMDEANRSTADMAILSIQGQPVI

SEQ ID NO: 11816 - protein, 321 aa, Candidatus Blochmannia floridanus
MIAHNDIFAVVFPGQASQHIGMLSDLANSYHAIRDTFYEASEILNYDVWNLVQFGPISELNKTYYSQPAILTASVAIWKVWMQQIGKLPNVMAGHSLGEYSALVCSGSIDFLSAIKLVTTRSVLMQEISPDGYGAMSIIIGLSDDVVRELCQIVESIDDQIVAPAGFNTSDNIVISGHKAAVNHVNLLCKKAGAKYVTTLPISVPSHCSIMKKMVSRFQKIIENTVISSPKIPVINNVDVSIEQEPQFIRDSLIRQLYNPVRWNEIMQEFINKDIKIVLEMGPGKVLTRLIQRSVYSDSLFSLSINDVDSLSKAIQCIIRN

SEQ ID NO: 11817 - protein, 157 aa, Zea mays
  unsure (1)..(157): unsure at all Xaa locations
MNVPVVDPXQGEFPETIEEYLHHGTMKCIAFNRKGTLLAAGCSNGXCIIWDFGNKGACKKNFVIKDSTAPYNKCGPWVQVWATRFAWPLLLDKSIDTFGDVAQLGEKNCTVLLLSAEFHYVASLSTWVLPTPFLFCFGHGPSNFSWTPFCIEKHGKT

SEQ ID NO: 11818 - protein, 452 aa, Zea mays
MKTEASHKAIAAGGGKMTVLHSPVGVRSIVTSLVAFFILASSIVFLLDRGQEEQVQVAVEHGRQEVQVKLESGLQEPAIRGTTQEGDASNEECNWSRGRWVYDNVSRPLYSGLKCSFIFPEVACDKYGRKDAMYQHWRWQPHGHGCDLPRFDAIKLLENLRNKRMVFVGDSVNRNQWVSLVCMVEASIPDDRLKIRTFNGSLISFKALEYNATIDFYWSPLLVESNSDNPIIHRVEYRIIRADRIEKHASVWRDADIIVFNSYLWWRKQKDDMRMKVMYGSFEDGDAKLDEMEMVDGFEIAIKKLTEWLAENIDKNKTRIFFAGSSPTHSWASNWGGQDKNKCLNETEPISYRPGGGYKAATTDYSLMAMARSYFRRTLEPRGIRVQILNITELSDYRKDGHPTVFRRQFVPLTKEQIADPASYADCTHWCLPGVPDVWNEFLYGYLTQQRK

SEQ ID NO: 11819 - protein, 220 aa, Hyacinthus orientalis
ADLNIAIGTHHEVSHPGALKAALAEFISTLIFVFAGQGSGIAFSKLSGGGPATPAGLISAALSHAFALFVAVSVGANISGGHVNPAVTFGAFLGGNITLFRGLLYWVAQLLGSTAACLLLRFSTGEETGSFGLSGVSVWNALVLEIVMTFGLVYTVYATAIDPKKGSLGTIAPIAIGFIVGANILAGGAFDGASMNPAVSFGPPLVSWEWPNHWVYWAGP

SEQ ID NO: 11820 - protein, 258 aa, Manihot esculenta
MAVVDFVLIHTICHGAWIWYKLKPVLEAAGHKVTALDLAASGVDPRQIEQINSFDEYSEPLLTFMESLPQGEKVILVGESCGGLNIAIAADKYPEKIAAAVFQNSLLPDTKHKPSYVVDKLMEVFPDWKDTEYFEFSNSNGETITGMVLGLKLMRENLYTICPPEDYELAKMLTRRGSLFQSILAQREKFTEKGYGSIKKIYVWTGDDKIFLPEFQLWQIENYKPDLVFRVMGGDHKLQLTKTNEIAGILQKVADIYA

SEQ ID NO: 11821 - protein, 272 aa, Zea mays
  unsure (1)..(272): unsure at all Xaa locations
ILKSRSSLGYKQVREEDKSKLVGNVFSSVASSYDLMNDLMSVGLHRLWKDRLISKLNPFPGMKHLDVAGGTGDVAFRVLERVKSVCHRAMQVFVVCVSLIKGTHIYVCDINPNMLNVGKKCVAERGYSEEHCLSWIQGDAEALSFEDGSMDGYTIAFGIRNVTHIEKALSEAYSXMVLKQGWRFLCLELSHVDVPIFKXCNYDAYSFSMIPAIEELVDGDRQIEDGQXLTRHVNLEPWQEKFAQMIQEAGFQRVEYENLLSGVVAIHSGLKL

SEQ ID NO: 11822 - protein, 570 aa, Neurospora crassa
MSTFNGLLAEFPDIRVHSVYCSAATREILLRLETVARRINYAQGILEARQLSYKHLRNLLKPLPLDTPVELELEPGNHIQVTLLDANHCPGAVMFLFEGQGKAALYTGDIRSEPWHVNAIARSPSMVQYAYGLKTLDTIYLDTSFVEDIEFPTKARGISELLDKVSKYPPKTIFHFQAWTYGYEDVWIALSKALQSRVHVDEYKMGIYQSLLAKDPGNRRGFGALHHLSPEAPALVGFMRGNSYHPGCLTLDENVRLHSCEKGNYCKTVRENPIVQIHPVLTHLHNGEDLPELGIGGGGDDLEHDEEQEHLSEVQVQMVTKFIRWLEKSAEKVELLPLESFASGSKIEIGLELLTSGADNKSALINFLRDLIMKSKSQIALERSMLAAHNAAEGSLPSLITFPYSRHSSYAELCHLVGTFKPKDVWPNTVNPREWLEQGITIEHLFGEHCSGNSFRHDKLMEEMFGMREQPIRISDDSQSTTSHPASSCHTPSSPTPQVVDNWDGTTIAPNLNLESSFSQISVQSEAFFDMRTHAFHLMLDNAINNAGHDIGLISTRDHHTNKEVELGET

SEQ ID NO: 11823 - protein, 491 aa, Oryza sativa (indica cultivar-group)
MDPCKFRPSSSFDTKTTTTNAGAPVWNDNEALTVGPRGPILLEDYHLIEKVAHFARERIPERVVHARGASAKGFFECTHDVTDITCADFLRSPGAQTPVIVRFSTVIHERGSQETIRDPRGFAVKFYTREGNWDLLGNNFPVFFIRDGIKFPDVIHAFKPNPRSHVQEYWRVFDFLSHHPESLHTFFFLFDDVGIPTDYRHMDGFGVNTYTFVTRDAKARYVKFHWKPTCGVSCLMDDEATLVGGKNHSHATQDLYDSIAAGNFPEWKLFVQVIDPEEEERFDFDPLDDTKTWPEDEVPLRPVGRLVLNRNVDNFFNENEQLAFGPGLVVPGIYYSDDKMLQCRVFAYADTQRYRLGPNYLMLPVNAPKCAHHNNHYDGAMNFMHRDEEVDYYPSRHAPLRHAPPTPITPRPVVGRRQKATIHKQNDFKQPGERYRSWAPDRQERFIAVRRRVAHPKVSPELRAIWVNYLSQCDESLGVKIANRLNVKPSM

SEQ ID NO: 11824 - protein, 492 aa, Solanum tuberosum
MDPSKYRPSSAYDTPFLTTNAGGPVYNNVSSLTVGPRGPVLLEDYYLIEKLATFDREKTPERVVHARGASAKGFFEVTHDISHLTCADFLRAPGAQTPVICRFSTVVHERGSPESIRDIRGFAVKFYTREGNFDLVGNNVPVFFNRDAKSFPDTIRALKPNPKSHIQENWRILDFFSFLPESLHTFAFFYDDVCLPTDYRHMEGFGVHAYQLINKEGKAHYVKFHWKPTCGVKSMSEEEAIRVGGTNHSHATKDLYDSIAAGNYPEWKLFIQTMDPEDVDKFDFDPLDVTKTWPEDLLPLIPVGRLVLNRNIDNFFAENEQLAFNPGHIVPGIYYSEDKLLQTRIFAYADTQRHRIGPNYMQLPVNAPKCGHHNNHRDGAMNMTHRDEEVDYLPSRFDPCRPAEQYPIPACVLNGRRTNCVIPKENNFKQAGERYRSWESDRQDRYITKWVESLSDPRVTHEIRSIWISYLSQADKSCGQKVASRLTVKPTM

SEQ ID NO: 11825 - protein, 399 aa, Methanosarcina mazei Goe1
MKMAINGADTVWVLLSSALVLLMVPALALFYGGLVQRKNVLSSMMHSFVAMGVLALEWIIIGYSLAFSEGNWFIGGLENVFLSGIDPYSVTGTIPTYAFVAFQGMFAIITPALISGAIVGRVKFKSYIAFILLWGLIVYAPVCHWVWGGGFLTGEALDFAGGTVVHITAGMSSLAILAYLGKRRGYGVDSLKPHNVTLTLLGAGLLWFGWFGFNAGSALAANEIAALAFMTTLVAPAAAGFVWMALEWAHLGRPTALGFATGILAGLVGITPAAGFVTPVAAIAIGAIASFICYQAVMFKNRLGYDDSLDAFGVHGVGGIVGAILTGVYASVGGEGLLLGNSAQLMIQLQGVVITIVYAMACTLLIGFVLHKTIGLKVSESEEIIGLDKTQHGEAAYNI

SEQ ID NO: 11826 - protein, 361 aa, Neurospora crassa
MSVPEKFTGFQVNGPETWTEFHKNEFQPKPFGDYDVDIKIECCGVCGSDVHTISGGWGEQKFPLAVGHEIIGTALRVGPKVTLIKPGQRVGVGAQSYSCLDCRQCKNDNETYCRKQLDTYGAVWPDTGIVSQGGYSSHVRTHEHWVFPIPDALPSTVAAPMLCAGLTAYSPLVRNGCGPGKKVGIVGLGGIGHLGLLFAKALGATVYVISRTHSKEADARKMGADGFLATADPNWNEEHIMTFDLIINTANSFEGFDLDAYLSLLDVHGKWVSVGLPEDEEGIRVRNQTFLKNGCFFGSSHLGSRRETLEMLQLAADKGVRTWVEEVKINEENLKGVMQKMKGAGGRYRFCLTGYEEAFGA

SEQ ID NO: 11827 - protein, 213 aa, Populus alba
CDLLRINTDRGVMLTDGKSRFSINGKPIYHFLGGSTFSEYTVCHIGTVAKINPAAPLDKVCILSCGISTGLGAAMNVAKPQKGHTVAVFGLGAVGLAAAEGARLSGASRIIGVDLNPSRFKEAKKFGVTELINPKDHDKPVQQVIIEMTDGGVDRSIECTGNVQAMISAFECVHDGWGVAVLVGVPSKDDEFKTHPMNLLNERTLKGTFFGNY

SEQ ID NO: 11828 - protein, 323 aa, Fragaria x ananassa
MTATQIPEVVLESSNGRRTMPVLGFGTASNNLQPEVLIEAVLEAIKLGYRHFDTASIYGSEQTLGVAIAQALKLGLVASRDELFITSKLWPNDGHPNLVIPALKKSLQNLELEYLDLYLIHWPISAKPGKLSHALEEKDQMPMDFKGVWADMEEAQRLGLTKSIGISNFSTKKTQNLLSFATIPPSVNQVEMSPFWQQKKLRDFCKASGIVVTAFSPLGAIGTSWGTNHVLESKVLNEIAEAHGKTVAQVCIRWVYQVGATLAVKSYNKERLKQNVQVFDWELTEEDLEKINQIPQRKMMPREELVTATGPYKSLDDLWDGEY

SEQ ID NO: 11829 - protein, 405 aa, Vibrio parahaemolyticus RIMD 2210633
MAGVLGMILAGGEGSRLRPLTESRSKPSVPFGGSYRLIDFALNNFVNADLMRIYVLTQFKSQSLFHHLKKGWNINGITDRFIDPIPAQMRTGKRWYEGTADAIYQNLRFMELEEPDQVCIFGSDHIYKMDIKQMLNFHTEKKASLTVSALRMPLKEASQFGVIEVDAEGRMIGFEEKPANPKSIPGEPDFALVSMGNYVFEAQVLFSELVEDADNEASSHDFGKDIIPKMFPRGDVFVYDFSTNRISGEKEEVYWRDVGTIDAYWQAHMDLLEKDAPFSLYNRKWPLHTYYPPLPPATFTDSDNGRVQIIDSLVCNGSYVRGSRIEKSVLGFRSNIASACDISECILLGDVKIGEGCVLRRVIVDKDADIAPGTQIGVNLQEDKKHFHVSEEGIVVIPKGARVGY

SEQ ID NO: 11830 - protein, 213 aa, Populus nigra
CDLLRINTDRGVMLTDGKSRFSINGKPIYHFLGGSTFSEYTVCHIETVAKINPAAPLDKVCILSCGISTGLGAALNVAKPKKGHTVAVFGLGAVGLAAAEGARLSGASRIIGVDLNPSRFKEAMKFGVTELINPKDHDKPVQQVIIEMTDGGVDRSIECTGNVQAMISAFECVHDGWGVAVLVGVPSKDDEFKTHPMNLLNERTLKGTFFGNY

SEQ ID NO: 11831 - protein, 500 aa, Oryza sativa
MAMMAMGAASWAPIPAPARAAAAFYPGRDLAAARRRRGAAARRPFVFTPRAVSDSRSSQTCLDPDASTSVLGIILGGGAGTRLYPLTKKRAKPAVPLGANYRLIDIPVSNCLNSNVSKIYVLTQFNSASLNGHLSRAYGNNIGGYKNEGFVEVLAAQQSPENPNWFQGTADAVRQYLWLFEEHNVMEFLILAGDHLYRMDYQKFIQAHRETNADITVAALPMDEERATAFGLMKIDDEGRIIEFAEKPKGEKLKSMMVDTTILGLDTERAKELPYIASMGIYVFSKDVMLKLLRQNFPAANDFGSEVIPGATEIGMRVQAYLYDGYWEDIGTIEAFYNANLGITKKPVPDFSFYDRSAAIYTQPRYLPPSKVLDADVTDSVIGEGCVIRHCTINHSVVGLRSCISEGAVIEDSLLMGADYYETETDKKALSETGGIPIGIGKNAHIRKAIIDKNARIGENVKIINVDNIQEASRETDGYFIKSGIVTVIKDALIPSGTVI

SEQ ID NO: 11832 - protein, 240 aa, Enterococcus faecalis V583
MTKKIIGIAGNQLLQAAEVFHGNQVTYTPQGFVSAVQAAGGVPLVLPIGPKELAATYIQQIDKLLLAGGQDVAPEFYGQEPHIKLEETNRDRDEFELALIEEALKQNKPIFAVCRGMQLVNVALGGTLYQDLSMYPQWSVKHGQQPTQPIFATHRIDVEPDSQLSNIYGTTGQVNSYHHQALHTLGKDLRVTAWSSDGLAEAVESTNEQQPLLAVQWHPELMYARDAKSQALFNYFVQKL

SEQ ID NO: 11833 - protein, 362 aa, Bacillus coagulans
DPEGNSYMDMLSAYSAVNQGHRHPKIIEALKNQADKVTLTSRAFHNELLGPWTKRMAKLTKKDKVLPMNTGVEAVETAIKAARRWAYQVKGVTENQAEIIAADGNFHGRTLNAISLSNDPDATKNYGPFVPGINKVSYGDINAIEKAITENTAAIILEPIQGEAGIIIPPEGYLKKVRELCSERNILFIADEVQTGFARTGKMFACEWENVEPDIYVMGKALGGGVFPISAIAANNEIMDVFTPGSHGSTFGGNPLACAVSMAAIDVIEEENLVNKSLESGKYFADKLRAINFEGIKEVRARGLFIGMEFHQPVRAICEKLKDKGILCKETHVNTIRFAPPLLITKNEMDWAIQRIEEVLTN

SEQ ID NO: 11834 - protein, 317 aa, Triticum aestivum
MMAKVNAEDETAWAIAVDMECAAVEAMAPITLGQDHYHIAMFCPCDLPKYLNMTPGADMDNPADKCSKRMPVARWSAKQCVVQVLWTLDWLRELDQCLEIERSTYYACRLLLQFSPVSSLRSSIRPMVKYASYNGQDEAASKAVDFCLRALEDFDLALHGSPSDPSASVEAMRSKISDVIQALDNVMQIVPSTLIQKERLLGDASGQKRSKATFETCEKPIETKNTAHGWLQVRFKPIHQERYQCRRGWGKASHEQRAVVDAKDTPGKWEQGKFKPSNSRRGKAVVLGVWLLPLCLLISMVVVMSSSRHYVTEPVSY

SEQ ID NO: 11835 - protein, 406 aa, Candidatus Blochmannia floridanus
MFKSMIMAPPDPILGLSKIYHSDTKKNKINLGIGVYIEKFHAAPILESVKQAEDLLLKKEISKNYLAIEGSNDFNNANQTLLFGPNDSIISKNRIRTVQAPGGTGALRIAAECIAKYDNTINKKRRIWISEPSWVNHKNIFFAAGLEVCTYPYYQKSTHSIEFDKLIDTFNNIVKPGDIVLLHGCCHNPTGMDPTIEQWKMLSECAEKNRWIPLFDLAYQGFDNGLQEDLIGLHMFCKNNPELIVCNSYSKNFGLYNERVGACTIITENNNHADCVLSQLRATIRAIYSNPPAHGAAIVSTILQNKTLRFIWEKELKNMRDHIKNMRKLLFNTLNKYKNSKVINQDFSFINNQKGMFAYIGLNSNQVIKLREELGIYLVDSGRLNLAGLSHKNIDYICNAICNLYI

SEQ ID NO: 11836 - protein, 353 aa, Candida sp. HA167
MSTPENLSFVLQKPFDVKFEDRPIPKLSDPYSVKIQVKKTGICGSDVHYFTHGAIGDFVVKAPMVLGHESSGVVLEVGSEVKSLKVGDRVAMEPGVPSRHSDEYKSGRYNLCPHMAFAATPPYDGTLCKYYILPEDFCVKLPEHVSLEEGALVEPLSVAVHSSKLGNIKPGSHVAIYGAGPVGLLVAAVASAFGAESVTIIDLVESRLNLAKELGATATVQVDFKDTPKESAAKVVAANNGIAPDVVIDASGAEASINSAINAIRPGGTYVQVGMGKPDVSFPIATLIGKELTVKGSFRYGYGDYPLAVSLLASGKVNVKKLITHEVKFEDAAEAFQLVRDGKAIKCIINGPE

SEQ ID NO: 11837 - protein, 279 aa, Zea mays
MAARLRRSPISSPPPPPSLCISLYPPPHSSVETTYPACSTYLRSPAMTVLDAESRFHVLAVDDSIIDRKLIEMLLKSSSYQVTTVDSGNKALELLGLRDNGAEDASPPSSSSSSSSSSSPDHQEIDVSLIITDYCMPGMTGYDLLKRVKGSSSLKDIPVVIMSSENVPARISRCLQDGAEEFFLKPVKPADMKKLKSHLLKRKQPNQKNKPQAQAVESPEQQLDPHPQPVHEPEEAAADRNGVNKRKAAAMEEGLTVVVTAPESTKPRRLSTSSLTVET

SEQ ID NO: 11838 - protein, 500 aa, Ustilago maydis 521
MMESVSSKSSPSRSSAHVAPAFPTPGTVAPATVTVASAHSASPLHFSASAVNALSAPAEHSSSSKATPPAIPRPAGSSSSSSASVLSPSTTSVATQTAPSISAANSNTKVLPYLFDDAQLDDVLVLVVDMLVRLTEHNDSLPLDPSALTRFHSRATPNISLSAYLRRIAKYTSIEKCCVLILLVYIDRVCERLEGFTICGLTVHRFICAAILCASKALCDAFNTNEHYAKVGGISLQEINLLEKEFLQIIDWRLICGGAELQHYYASLVRNHKDYVLDEPKRAGQNLQEQKQEHGLAAMELDGAEASAGSDMNGHDGTSGNTATDGSIRAGATAQAASSQHSSPFPLPISSSNSNSNTSTSASPFTTSTATNGSGRSLTGVATSSASGSSSGDSQRGAAAGSSSSIVTSPTSAMQVDAEPWMTSQVAAPAMMNRRRKDEHRTPPSPLGQSQVHAPQNGGSSVNAVQTNGHASSTQQAQHSTVSANADAYKRTRFDHPPRQ

SEQ ID NO: 11839 - protein, 511 aa, Schizosaccharomyces pombe
MLNSVIKRSALCRFKFTCLQVSECRPAQIEISKRLYSAKASGNGEYDLCVIGGGPGGYVAAIRGAQLGLKTICVEKRGTLGGTCLNVGCIPSKALLNNSHIYHTVKHDTKRRGIDVSGVSVNLSQMMKAKDDSVKSLTSGIEYLFKKNKVEYAKGTGSFIDPQTLSVKGIDGAADQTIKAKNFIIATGSEVKPFPGVTIDEKKIVSSTGALSLSEVPKKMTVLGGGIIGLEMGSVWSRLGAEVTVVEFLPAVGGPMDADISKALSRIISKQGIKFKTSTKLLSAKVNGDSVEVEIENMKNNKRETYQTDVLLVAIGRVPYTEGLGLDKLGISMDKSNRVIMDSEYRTNIPHIRVIGDATLGPMLAHKAEDEGIAAVEYIAKGQGHVNYNCIPAVMYTHPEVAWVGITEQKAKESGIKYRIGTFPFSANSRAKTNMDADGLVKVIVDAETDRLLGVHMIGPMAGELIGEATLALEYGASAEDVARVCHAHPTLSEATKEAMMAAWCGKSIHF

SEQ ID NO: 11840 - protein, 463 aa, Saccharomyces cerevisiae
MLSRATRTAAAKSLVKSKVARNVMAASFVKRHASTSLFKQANKVESLGSIYLSGKKISVAANPFSITSNRFKSTSIEVPPMAESLTEGSLKEYTKNVGDFIKEDELLATIETDKIDIEVNSPVSGTVTKLNFKPEDTVTVGEELAQVEPGEAPAEGSGESKPEPTEQAEPSQGVAARENSSEETASKKEAAPKKEAAPKKEVTEPKKADQPKKTVSKAQEPPVASNSFTPFPRTETRVKMNRMRLRIAERLKESQNTAASLTTFNEVDMSALMEMRKLYKDEIIKKTGTKFGFMGLFSKACTLAAKDIPAVNGAIEGDQIVYRDYTDISVAVATPKGLVTPVVRNAESLSVLDIENEIVRLSHKARDGKLTLEDMTGGTFTISNGGVFGSLYGTPIINSPQTAVLGLHGVKERPVTVNGQIVSRPMMYLALTYDHRLLDGREAVTFLKTVKELIEDPRKMLLW

SEQ ID NO: 11841 - protein, 213 aa, Populus nigra
CDLLRINTDRGVMLTDGKSRFSINGKPIYHFLGGSTFSEYTVCHIGTVAKINPAAPLDKVCILSCGISTGLGAALNVAKPKKGHTVAVFGLGAVGLAAAEGARLSGASRIIGVDLNPSRFKEAKKFGVTELINPKDHDKPAQQVIIEMTDGGVDRSIECTGNVQAMISAFECVHDGWGVAVLVGVPSKDDEFKTHPMNLLNERTLKGTFFGNY

SEQ ID NO: 11842 - protein, 206 aa, Fagus sylvatica
DGHGVLETSRYVNNHLFQHLKRFTLEQHSMSVEVIRKAYQATEEGFLSQVTKQWPLKPQIAAVGSCCPVGVICGGTLYIANLGDSRAVLGRVMKATGEVLSIQLSAEHNVAIESVRQELHSLHPEDPQIVNLKHNVWRVEGLIQISRSIGDVNLKKAESNREPLYAKFRLREPFKKPILSADPAISVHQLQPHDQFVILASDGLWD

SEQ ID NO: 11843 - protein, 510 aa, Pseudomonas syringae pv. syringae
MPLLNWSRHMVCLTAAGLITVPTVYATDTLTRDNGAVVGDNQNSQTAGAQGPVLLQDVQLLQKLQRFDRERIPERVVHARGTGVKGEFTASADISDLSKATVFKSGEKTPVFVRFSSVVHGNHSPETLRDPHGFATKFYTADGNWDLVGNNFPTFFIRDAIKFPDMVHAFKPDPRTNLDNDSRRFDFFSHVPEATRTLTLLYSNEGTPAGYRFMDGNGVHAYKLVNAKGEVHYVKFHWKSLQGIKNLDPKEVAQVQSKDYSHLTNDLVGAIKKGDFPKWDLYVQVLKPEELAKFDFDPLDATKIWPDVPEKKIGQMVLNKNVDNFFQETEQVAMAPANLVPGIEPSEDRLLQGRVFSYADTQMYRLGAIGLSLPVNQPKVAVNNGNQDGALNTGHTTSGVNYEPSRLEPRPADDKARYSELPLSGTTQQAKITREQNFKQAGDLFRSYSAKEKTDLVQRFGESLADTHTESKNIMLSVLYKEDRHYGTRVAEVAKGDLSKVKSLAASLKD

SEQ ID NO: 11844 - protein, 119 aa, Zea mays
  unsure (1)..(119): unsure at all Xaa locations
HDATHPVAHCSGYSEEHCFSWIQGDAEALSFEDGSMDGYTIAFGIRNVTHIEKALSEAYSXMVLKQGWRFLCLELSHVDVPIFKXDEKFAQMIQEAGFQRVEYENLLSGVVAIHSGLKL

SEQ ID NO: 11845 - protein, 247 aa, Arabidopsis lyrata subsp. petraea
MGRGRVELKRIENKINRQVTFAKRRNGLLKKAYELSVLCDAEVSLIVFSNRGKLYEFCSTSNMLKTLERYQKCSYGSIEVNNKPAKELENSYREYLKLKGRYENLQRQQRNLLGEDLGPLNSKELEQLERQLDGSLKQVRCIKTQYMLDQLSDLQGKEHILLEANRALSMKLEDMIGVRHHHIGGAWEGGDQHNVAYGHPQAHSQGLYQSLECDPTLQIGYSHPVCSEQMAVTAQGQSQPGNGYIPG

SEQ ID NO: 11846 - protein, 358 aa, Arabidopsis thaliana
MAGAKDSGCDDDLRIAGGCDPGKRGNPEDSSSPVEVSCSICLESVLDDGTRSKAKLQCGHQFHLDCIGSAFNMKGAMQCPNCRNVEKGQWLYANGSTRPFPEFSMEDWIPEEDLYGLSYPEMQYRVHWCPFGELSQAAASFEELEPATTTYHTEFHGHHAAAVNHSYLAYVGPGPAATPRTSDNNSTDDHPWNSHSNDHFHQLPVAPQYHHHSPSFSLPAAHVVDGEVDSSAARGLPYAHPFLFSHRSNQRSSPAINSYQGSSTQMREQHHAYNHQRQQHHANGPTLASPLISMTRRGLPPPPPPPPMPDQNVGFFIYPGGHHEPETDQIHAWERDWFPHFPVPSNHRTIPSLWHRHF

SEQ ID NO: 11847 - protein, 446 aa, Methanosarcina mazei Goe1
MKAVVYRGPNQVSVEEVEDPKIEHPADAIIRLTSSGICGSDLHMYEGRTVEKPGKVLGHEPLGVIEEVGDAVTSFKKGDRVVVTFNIACGHCLNCIRGFTSACLTVNPESAGGAFGYAKMGPYRGAQAEFLRVPFADLNCTKLPGSPGDKWEDDFIMLSDVFPTGFFATQLAMVMPGFPVAVFGAGPVGLLSAYSAILQGAAQVFVVDYIPERLKLAKSIGAIPVDFTLSDPVAMIEALRSQHSRVDTVLPGEEKLQGIMSSIENLAKSIGANLELARSDPVTMIQMLRAGNPAIVQSLIPGEEKMKGVMSGIDAVGYQARDRQDPSRENPTQVISDLVRLINPTGHLGVIGVYVADDPGAYNERAKKGEYILPFGQLWEKGISVGTGQTPVKKLQPMLRDMIIAGVAKPSFIVSHKISIEEAPDAYREFAKRSEGFTKVTIQFEK

SEQ ID NO: 11848 - protein, 414 aa, SYNECHOCOCCUS SP. WH 8102
MMPSVHRRSRPWDPEATPRIPEMALQPAAGARDLNPRQVESNRALSERLASVFRLWGYDEVSPPRVERLDTLMAGGAIASEDVVRLVADEPLGLRPEMTASIARAACTRLASRPRPLRLWASGTVFQSRAADEGGQCIEENLQCGVELFGVAPIEAEMELLSLLMAAVERLDFQAQHQPRLLMGHTGLMDLLLSPVPPVLRDAVRAALIQYDRLGLETIELEEGLRATLLSLLDCRGTPNEVLERLSSCFGAQALFDDLHRLCRQLQGPAAAQGVRLQLDPTFQPRFELYTGLVFQLVCDTHSAPVVVARGGRYDDLVRRCGAQPGQDFGAGFSLAIDPIRELLSDSSSNPTVAPQLMVAFSERSTLEAALERQRWWHQQGRSAVIELHPFSTRSLAEQQATDQGGFQLDWIDP

SEQ ID NO: 11849 - protein, 954 aa, Neurospora crassa
MEDGHHSPDSTKESKSEEHSKMNGSKLKRDGASNAGNAATPNGSQTGISRPPSMSPDEHKAASESTATPSENVPTQKPSRKASQKNMKREPVLFNHLPDVREEACTHFQVIHDCLYGSKNMGASEHDALDCDCAEEWRGDMNHACGEDSDCINRATKMECVDGDCNCGSGCQNQRFQRKQYADVSVIKTEKKGFGLRANTDLQVNDFIFEYIGEVINEPTFRSRMVKYDKEGIKHFYFMSLTKSEFVDATKKGNLGRFCNHSCDPNCYVDKWVVGDKLRMGIFAGRAIKAGEELVFNYNVDRYGADPQPCYCGEPNCTGFIGGKTQTERATKLPPATIEALGIEDGDSWDTAVAATVKKPRKKKATEDDEEYINRFEPRGLDEEGVTKVMATLMQCKEKWIAVKLLGRLQNADDDHVRNRVVKMHGYQILKTTLNTFKEDTNVVLQILDILYQLPRITKNKITDSNIEAAVEPLTHSDHEDVASQSKRLLQEWSKLETAYRIPRKKLDPSAPVTTNSFEDDRRNVNHEEHPSRPVNPFENMVVPTGPRSNIPQRNMNYFNNQRPRKLPTNLPAGWFVTTDSTGKYYFYDKSGHTQWQRPTTPAVDVPKPSAKVEQNQKALQDIIDSLTKEPTPRHSANQTPKSNTPVPDNGKKEKWRSLPVEKQMKIYENTLFPHVKYVMDKFHRRLPKEDLKRFGREINKKLVASDYKNHRVDDPTTISSNQARKIKKFVKDFFDRAVVKHRENEQRAAQKAGPSSSGAPSPTNGGSAKSPLGRNGASNATVKTQQPDADGDIVLTDVEDEGENTPATSSSDRKRKRAEEQEVPAPASEAIPSPKRAKEDSTTEDSIPSPPPPPPPPTDTPLTEEERSMREQEEALMRENEEAQRLEDEEAERRVSVTVQGAAVATSKVNGVNGTKAHHTSEASPAVSDENGMDAGRDEKSHEQMAQQEPVSR

SEQ ID NO: 11850 - protein, 181 aa, Enterococcus faecium
MLEKDIERILISQEEIQVRCKELGKELTEIYQNTNPLVVGVLKGAVPFMADIVRSIDTYLELDFMDVSSYGNATVSSGEVKIVKDLDTNVEGRDLLIVEDIIDSGRTLAYLVDLFKYRKAKSVKIVTLLDKPEGRVVNIEADYVGFNVPNEFVVGYGLDYAEAYRNLPYIGVLKPSVYQSN

SEQ ID NO: 11851 - protein, 314 aa, Glycine max
MNFNKEQKKTVDQSILLCCKFFVSESRNNATLNAIERAARSNPETVIVNMFHDRSYNRARYDLVSYVLHDCTGNPIYSPLHQTVIAMAEATFNAINLEFHEGAHPRLGALDDIIFHPLGHASLDEAAWLAKAVAADIGNRFSVPVFLYAAAHPTGKEVDAIRRELGYYRPNSRGSQWAGWAMPETLPLSPDEGPNVVSRAKGITVIGARPWITFYNVPILCTDVSVARRIARKVSARGGGLPTVQTIALVHEDSTEIACMLLDSKQVGADRVQNRVEMLAAQEGLDIEQGYFTDISPEMIVEKYMKLINSANKS

SEQ ID NO: 11852 - protein, 213 aa, Populus nigra
CDLLRINTDRGVMLTDGKSRFSINGKPIYHFLGGSTFSEYTVCHIGTVAKINPAAPLDKVCILSCGISTGLGAALNVAKPKKGHTVAVFGLGAVGLAAAEGARLSGASRIIGVDLNPSRFKEAKKFGVTELINPKDHDKPVQQVIIEMTDGGVDRSIECTGNVQAMISAFECVHDGWGVAVLVGVPSKDDEFKTHPMNLLNERTLKGTFFGNY

SEQ ID NO: 11853 - protein, 623 aa, Pirellula sp. 1
MPNRRARHSVFRRNPSQLHHRFDVLIHMSSLLPTEPNFAHPDGAAPGVVTSPGLPIEGQGDSFDLVSLLLQEQQTLTAVEDFAAAHDSGTAEDNVADQPAQARYYSKLMPASPPGPGQQFAFDVNLDTCSGCKACVVACHTMNGLDETESWRRVGTLVIGETEPEAIPAAIGVQHVTTACHHCEDPGCLNGCPVKAYDKDPETGIVRHLDDQCIGCKYCTMMCPYEVPKYSKRLGIVRKCDMCHQRLSVGEAPACVQSCPNEAIAIRVVDQQCQEVSDEERLVAGAPLSSITRPTTVFRSNDPTKRFQGVAQDNGIDEPAEDHWPLVGLLIATQVGVGMLLTERVLAAIGWLAGSPMPTETTRWTATVALMVSMIGMNLAPLHLGQPLRSWRIFLGLRTSWLSREAVLLGKFVGVLTMAVVAMWLPAVSEYLPDWVSIPAWVPGMVLLGAIVFGVAGLFSSAMIYIATKRVLWRFDRTMIRFMGTAVVGGVAASAAVIAATSDRSNSVTVLLGLATFALIAKLVWEQSILLRSEPGSSNDQWDRRSQRLVRHHLSKWSLSRLALGYAGLALLVVSSALAIAGSSMLLTVFAAAATMLLVAGETTERLIYFSSVVHDRMPGTLR

SEQ ID NO: 11854 - protein, 213 aa, Ustilago maydis 521
MAAESNYDYLFKVVLIGDSGTGKSNLLSRFTRNEFSLESKSTIGVEFATRSISVDGKTVKAQIWDTAGQERYRAITSAYYRGAVGALLVYDIAKHPTYVNVSRWLKELRDHADSNIVIMLVGNKSDLRHLRAVPTEEAKAFAAENNLSFIETSALDASNVEQAFQNILTEIYRIVSNKALQSSDDVIKPSGGETITVQPSADDGGQTKKNGCC

SEQ ID NO: 11855 - protein, 178 aa, Glycine max
  unsure (1)..(178): unsure at all Xaa locations
MASSMISSPAVTTVNRAGAGMVAPFTGLKSMAGFPTKKTNNDITSIASNGGRVQCMQVWPPIGKKKFNTLSYLPDLNNTQLAKEVEYLLKKRXIPYLQFDLNHNFIYHNHNESPRYYNKLYXTIXNLPIFNYTNTSHVCKDLQXTKTTYPSNCIPIIRFYNSHQXQYINFISYXPAXF

SEQ ID NO: 11856 - protein, 157 aa, Chloroflexus aurantiacus
MNIYQFTVRTIDGEQQSLAVYRNKVLLIVNVASHCGLTPQYGDLESLYRRYKDRGFVVLGFPSNQFNQEPDDEATIKSFCARTYAVTFPLFAKVEVNGPNTHPLFAYLKAQQPGLSPDGEIKWNFTKFLVNRNGTVVRRYAPTDTVGAIERELVELL

SEQ ID NO: 11857 - protein, 520 aa, Zea mays
MRATIPALSLLVTPRLPSLAVPLAGGRLREGGRSRTRLRVAAPTSVPGEAAEQAEPSTSAPESGEKFSWRDHWYPVSLVEDLDPSRPTPFQLLNRDLVIWKEPKSGEWVALDDRCPHRLAPLSEGRIDETGCLQCSYHGWSFDGSGACTKIPQAMPEGPEARAVRSPKACAIKFPTLVSQGLLFVWPDENGWEKAAATKPPMLPKEFEDPAFSTVTIQRDLFYGYDTLMENVSDPSHIEFAHHKVTGRRDRARPLTFRMESSGAWGYSGANSGNPRITATFEAPCYALNKIEIDTKLPIFGDQKWVIWICSFNIPMAPGKTRSIVCSARNFFQFTMPGKAWWQLVPRWYEHWTSNLVYDGDMIVLQGQEKIFLAATKESSTDINQQYTKITFTPTQADRFVLACRTWLRKFGNSQPEWFGNPTQEALPSTVLSKREMLDRYEQLSLKCSSCKGAYNAFQNLQKVFMGATVVCCAAAGIPPDVQLRLLIGAAALVSAAIAYAFHELQKNFVFVDYVHADID

SEQ ID NO: 11858 - protein, 753 aa, Shigella flexneri 2a str. 2457T
MSQHNEKNPHQHQSPLHDSSEAKPGMDSLAPEDGSHRPAAEPTPPGAQPTAPGSLKAPDTRNEKLNSLEDVRKGSENYALTTNQGVRIADDQNSLRAGNRGPTLLEDFILREKITHFDHERIPERIVHARGSAAHGYFQPYKSLSDITKADFLSDPNKITPVFVRFSTVQGGAGSADTVRDIRGFATKFYTEEGIFDLVGNNTPIFFIQDAHKFPDFVHAVKPEPHWAIPQGQSAHDTFWDYVSLQPETLHNVMWAMSDRGIPRSYRTMEGFGIHTFRLINAEGKATFVRFHWKPLAGKASLVWDEAQKLTGRDPDFHRRELWEAIEAGDFPEYELGFQLIPEEDEFKFDFDLLDPTKLIPEELVPVQRVGKMVLNRNPDNFFAENEQAAFHPGHIVPGLDFTNDPLLQGRLFSYTDTQISRLGGPNFHEIPINRPTCPYHNFQRDGMHRMGIDTNPANYEPNSINDNWPRETPPGPKRGGFESYQERVEGNKVRERSPSFGEYYSHPRLFWLSQTPFEQRHIVDGFSFELSKVVRPYIRERVVDQLAHIDLTLAQAVAKNLGIELTDDQLNITPPPDVNGLKKDPSLSLYAIPDGDVKGRVVAILLNDEVRSADLLAILKAMKAKGVHAKLLYSRMGEVTADDGTVLPIAATFAGAPSLTVDAVIVPCGNIADIADNGDANYYLMEAYKHLKPIALAGDARKFKATIKVADQGEEGIVEADSTDGSFMDELLTLMAEHRVWSRIPKIDKIPA

SEQ ID NO: 11859 - protein, 493 aa, Zea mays
MRTLAPRPSQSRSLQQPRNLCRALHTGVQAAPGPALMNLAAFSSTLATLPWYEMPSINSSATFSSSLLRRSLCASLRTISHMASAAAPTSAPVATTENGAAKAIEQRPVQVAERLEKFKTTIFTQMSMLAIKHGAINLGQGFPNFDGPDFVKEAAIQAINAGKNQYARGFGVPELNSAIAERFLKDSGLQVDPDKEVTVTSGCTEAIAATILGLINPGDEVILFAPFYDSYEATLSMAGANVKAITLRAPDFAVPLEELEAAVSKDTKAIMINTPHNPTGKMFTREELESIAALCKENDVLLFSDEVYDKLVFEADHISMASIPGMYERTVTMNSLGKTFSLTGWKIGWAIAPPHLTWGLRQAHSFLTFATCTPMQAAAAAALRAPDSYYDELKRDYSAKKAILLEGLEAAGFIVYPSSGTYFIMVDHTPFGFDNDIEFCEYLIREVGVAAIPPSVFYLNPEEGKNLVRFTFCKDEDTLRGAVERMKTRLRKK

SEQ ID NO: 11860 - protein, 509 aa, Bdellovibrio bacteriovorus HD100
MLKGSFKIQERMHDMAQSKKGLTTSAGAPVSDNQNSLTVGPRGPLVLQDVALIEKLAHQNRERVPERTVHAKGSGAFGTLTINGDISKYTRAKFLQPGTKTDLLIRFSTVAGERGAADAERDVRGFALKFYTEEGNFDLVGNNTPVFFVRDPYKFPDFIHTQKRDPRTNLRSPTAMWDFWSLSPESCHQVTILFSDRGLPASYRHMHGFGSHTYSLINSKEDRHWVKFHFKTQQGIKNLTNDEGAELVGRTRESHQEDLYNSIEEKSFPKWRMYVQIMSEEQAKKTWYNPFDLTKVWPHGEFPMIEVGTMELNRNPTNYFAEIEQAAFNPNNMVPGVSWSPDKMLQSRTFAYADAHRYRIGTHYEMLPVNKPKVEVNHYHLDGAMRLDVPEYNHAYYEPNSFGGPAQQEQYREPPLKLDDATMDRFDHHQGNDDYRQAGDLFRLMDADKKRQLLDNIAEHMKRGNVPEEIVRRQIEVFMRCDPAYGSGLAERMGVKVYSDKYESGSAHH

SEQ ID NO: 11861 - protein, 753 aa, Pirellula sp. 1
MSISIKDNRNDAGKTFQLPTLLQRRTGPMTRELVLRPGDHGLGMTHDSMAADTTTTATCGFCATGCGLRLHLKDGEAIGLTPETAYPVNLGMACPKGWEALRVLDSPERATLPLLRDETGKLSPIEWDDAFSKFCDGMKQVQSEHGPESIAFLSTGQIACEEMAFLGALARFGMDIRHCDGNTRQCMATAVTAYKESFGFDSPPYTYDDFEQSDCLVFIGANPCVGHPIMWERVLRNPHNPEIIVIDPRRTETAAAATQHLQLRPKNDLALLYAITNELILRDFVEHDFVQNHTQGFEELRQHVSQYDLATVCEEAGLAVEDVSAAVEAIGRGRAVSLWWTMGVNQSYQGTRTAQAIINIALITGNIGRPGTGANSITGQCNAMGSRLWSNTTNLFGHHSFTEESDRRKVAEALNIPVEKIPSTTSWKYDRIIEGIRNGEIKGLWVVATNPAHSWIDQGDVRELFDQLDFLVVQDMYKTTETCSHADLILPSAGWGEKEGTFINSERRYGLLKKVRHAPGQALADFQIFRGIAHRWGVGEMFAEWTSPEAVFQIMQRASRGQPSDISGIEGYEQIDRCGGIQWPWSADHASGGFEPEQQRRLFADGRFFHEDRRARLIVDDVSPMPEPAGEDYPIVLLTGRGTVSQWHTQTRTRQSPLLRSLYPNQPYVEMHPRDAAELDVEHGDLVRVRSRRGHADATACLTHSVQPGQVFMPMHYECTNQLTLSHFDPHSGQPSYKDCAVRIEPVLTSDHD

SEQ ID NO: 11862 - protein, 613 aa, Pirellula sp. 1
MTDQQDSKPFSDEQQQYLAGFTFGADVARAVQGLPVISGSGGQGTTLAIGGGSTTVDGESVPTGPDRFAFEAQSAVLAAGKKLSKEEQAKRDKNPLDMWDEMQARSDAGEFPKGTDVFLQKFHGLFYVTPAQDSFMCRLRLPGGQIQAWQLRGLADLADQSAGPYLDLTTRGNVQLREIPADQAMNILFGTRELNIVPLGSGGDNIRNCTSSAMSGLDADELIETLPLAIRMHHYILNHREMYGLPRKFNIAFEGGGRIASLEDTNDIGFKAVRVLDENASDDLPAGVYFQLCLGGITGHKDFARYTGVLLRESECVAVAAAIVRVFIRTGDRTDRKKARLKYVLDDMGFEKFIAEVEAEMGRTLTKVDVSRLTVQDIEDRSAHVGVFPQKQPGLNSLGIVFPVGRMTTDQARALADLALRYSNGDIRLTVWQNLILTNITDADLPAVQAGIRECGLDYEANSVRAGLVACTGSAGCKFAGAPTKANAIEIAERVESVLTLDQPINIHLTGCHHSCAQHYIGDIGLIACQVEVGDDMVDGYHICLGGGWGSRQGIAREIFKSVPFAEVPDLVTGILSSYQQNRVDSNESFNDFAGRLSDEELKSLVATPSVVC

SEQ ID NO: 11863 - protein, 236 aa, Zea mays
  unsure (1)..(236): unsure at all Xaa locations
MQLLIANFTEFQLATVITFLLHETVFFLSGLPSLLFERFGLFAKYKIQKRSNTSAYQNRCVLRLILYHVSVNLPVMILSYPAFKFMGLRSSLPLPHWTVVVSQVLFYFVLEDFIFYWGHRALHTKWLYKHVHSVHHEYATXPFGLTSEYAHPAEILFLGFATDDGPALTGPHLFTLWLWMVLRVLKTVEAHTGYHFPWSPSNFLPLYGGSDFHDYHHRVLYTKSGNYASTFVYMDW

SEQ ID NO: 11864 - protein, 442 aa, Ralstonia eutropha
MPQRHLPESRRPAMNRRQSQPFRTGDVMYQHIKVPAGEKITVNQDFSLNVPDNPIIPYIEGDGTGLDITPVMIKVVDAAVAKAYCGKRKIAWMEIYAGEKSTKVYGLDVWLPDETLEVLKDYVVSIKGPLTTPVGGGIRSLNVALRQTGPDVCLRPVRYFKGVPSRCVSSEKTDMVIFRENSEDIYAGIEWAAESEHAKKLIKFLQDEMGVKKIRFPRTSGIGIKPVSREGTERLVRKAIQYAIDNDKPSVTLVHKGNIMKFTEGGFRDWGYELAHKEFGAELVDGGPWCKFKNPKTGKDIVIKDAIADAFLQQILLRPAEYSVIATLNLNGDYVSDALAAQVGGIGIAPGANMSDSVAMFEATHGTAPKYAGKDYVNPGSEILSAEMMLRHMGWTEAADLIISSMEQSILSKKVTYDFARLLEGATQVSCSGFGQVMIDNM

SEQ ID NO: 11865 - protein, 614 aa, Bacillus subtilis subsp. subtilis str. 168
MCGITGWVDFKKQLVQEKQTMDRMTDTLSKRGPDDSNVWGEHHVLFGHKRLAVVDIEGGRQPMACTYKGDTYTIIYNGELYNTEDLRKELRARGHQFERTSDTEVLLHSYIEWQEDCVDHLNGIFAFAVWDEKRNLLFAARDRLGVKPFFYTKEGSSFLFGSEIKAILAHPDIKARVDRTGLSEIFGLGPSRTPGTGIFKGIKEIRPAHALTFSKDGLNIWRYWNVESEKHTDSFDDTVANVRSLFQDAVTRQLVSDVPVCTFLSGGLDSSAITAIAAGHFEKEGKAPLHTYSIDYEENDKYFQASAFQPNDDGPWIEKMTEAFGTTHHKCVISQKDLVDHLEEAVLVKDLPGMADVDSSLLWFCREIKKDFVVSLSGECADEIFGGYPWFHTADVESGFPWMRSTEERIKLLSDSWQKKLNLKEYVNAKYEETLAETPLLDGETGVDKARRQLFYLNMLWFMTNLLDRKDRMSMGASLEVRVPFADHRLVEYVWNIPWEMKMHDNREKGILRKALEGILPDDILYRKKSPYPKTHHPEYTKGVSEWLKTIRSQKDSVLHTLLDRKQLDQLLETEGSSFKVPWFGQLMKGPQLIAHLAQIHTWFEAYRIDIDER

SEQ ID NO: 11866 - protein, 302 aa, Thermoanaerobacter tengcongensis
MKIKKAIIPAAGLGTRFLPATKAQPKEMLPIVDKPTIQYIVEEAVQSGIEDILIITGRNKRAIEDHFDKSVELELELKKKNQESLLSLVEDISNMVNIHYIRQKEPKGLGHAIYCAKSFVGNEPFAVLLGDDVVDAEVPVLKQMIEQFERYNCTIIGVQEVPEEDVHKYGIVSGTFIEDRLYKVNDLIEKPRREEAPSNIAILGRYIITPRIFEILEHTPPGRGGEIQLTDALKTLLNYEAIYAYNFIGKRYDVGDKLGYLMATVEYALKREDLREPFKRYLITIVQDLLGMEEAAVTERDV

SEQ ID NO: 11867 - protein, 452 aa, Ustilago maydis 521
MPAADFDAAAFGETHITKGIGRLSKHVFEDGKGSWITTDKGVKLLDMTSGIGVCNLGHCHPKVTEAAVKQCAKITHAQVNIGFSAPQIELIKNLLPILPHASLDTVFFWNSGAEAVEAAVKLARAATKKQNVIVMQGSYHGRTAATAALTRSKTIYGEGHGPLMPGVFATSFPFYSHFGLPVDTDVEELVRQSLHQVRLTLQQQTAASDTAAILIEPVIGEGGYVPAPASFLHGLREICDENELLLICDEVQSGFGRTGTMFAVEDSGVRPDVLIFAKGIANGFPLSGIASTNQIMSRQKPGSMGGTYAGNAVSCAAATAVIKAFKDEHVLDNVAQRSKQLVSFLRALQHESKYGHLIEDIRGRGLMIGVQFGSPVTKTDSHNSTAANPRKPEQIAPKVVAECLKRNMLLLSTSVFDVLRFIPALNISQDELSHACTIFKQAFEAAAQELGH

SEQ ID NO: 11868 - protein, 686 aa, Arabidopsis thaliana
MRNWEDPFTLACNTALKKNLPSCIFIIIFISVLCPVAMSQVVVPDSDADCLLRFKDTLANGSEFRSWDPLSSPCQGNTANWFGVLCSNYVWGLQLEGMGLTGKLNLDPLVPMKNLRTISFMNNNFNGPMPQVKRFTSLKSLYLSNNRFSGEIPADAFLGMPLLKKILLANNAFRGTIPSSLASLPMLLELRLNGNQFQGQIPSFQQKDLKLASFENNDLDGPIPESLRNMDPGSFAGNKGLCDAPLSPCSSSSPGVPVVPVSPVDPKSTSPPTGKKAGSFYTLAIILIVIGIILVIIALVFCFVQSRRRNFLSAYPSSAGKERIESYNYHQSTNKNNKPAESVNHTRRGSMPDPGGRLLFVRDDIQRFDLQDLLRASAEVLGSGTFGASYKAAISSGQTLVVKRYKHMNNVGRDEFHEHMRRLGRLNHPNILPLVAYYYRREEKLLVTEFMPNSSLASHLHANNSAGLDWITRLKIIKGVAKGLSYLFDELPTLTIPHGHMKSSNIVLDDSFEPLLTDYALRPMMSSEHAHNFMTAYKSPEYRPSKGQIITKKTDVWCFGVLILEVLTGRFPENYLTQGYDSNMSLVTWVNDMVKEKKTGDVFDKEMKGKKNCKAEMINLLKIGLRCCEEEEERRMDMREVVEMVEMLREGESEDDFGSMDHRGTHNNVYSSMLLDDDDFGFSMNR

SEQ ID NO: 11869 - protein, 468 aa, Eremothecium gossypii
MQEAGDSKGRRSSFHGGSSSFLKNLNSLLKLKKSPGRPAEGAEPANEPHLGDNAKERDRGLCTRPPGPVSRCSTGTVYRSPSHRRQGSSASAKREFKPSHATAVQHASHCCNCMLRGMQPPADSPAERGVTRGEAFANPVCSRGLESKSVPPYVYDSRLPASAIPWHTKDSSTDQLPRISVDVLAAILDGKFSSHYSEVYIIDCRFEYEFQAGHIKNAINVSSRRELEAEFIQKRIQRCSADPGRPPLLVFHCEYSSYRGPIIAAHLRNYDRILNHGQYPRLHYPDIVVLQGGFKSFIEAFPGFCQGHYVGMDSYVNHELELARFKRDSKTILTRQNSQHIFQEQGQEGGHGLAGRAYQPDPVATLLPTRRPSFSFDAPPQSPSLVIGGNSGSSACSCSSSTRSVLTGKMLLMHDLTTDVKACDKDDQDDQFSFDLGDELAITVEDLFSSPVGRRLFPEIVKEEDNDS

SEQ ID NO: 11870 - protein, 299 aa, Streptococcus pneumoniae
MTSKVRKAVIPAAGLGTRFLPATKALAKEMLPIVDKPTIQFIVEEALKSGIEDILVVTGKSKRSIEDHFDSNFELEYNLKEKGKTDLLKLVDETTGMRLHFIRQTHPRGLGDAVLQAKAFVGNEPFVVMLGDDLMDITDEKAVPLTKQLMNDYEKTHASTIAVMPVPHEDVSSYGVIAPQGEGSNGLYSVETFVEKPAPEETPSDLAIIGRYLLTPEIFEILEKQAPGAGNEIQLTDAIDTLNKTQRVFAREFTGTRYDVGDKFGFMKTSIDYALKHPQVKDDLKNYLIQLGKELTEKE

SEQ ID NO: 11871 - protein, 261 aa, Thermus thermophilus HB27
MRLAFVGLGKMGRSILKGALERGFLRPEEVGVLGRTPERSRELAEPFGVRPLTRADLGMAERVLIAVQPRDFPALAPEIAHHRLGYISIMAGISTSVLARRLDNRRVVRAMPNLAVVIGESSTALTALKEAREAEDLAFARALFATVGDVYEIPEHLFDAFTGMSASAPAYLAVVAEALADAGVKMGMPRALALRLAADALAATGELLKGRHPAQVKDEVASPGGTTIHGLHALEARAVRAAFYEAVEAATRRGHELGESE

SEQ ID NO: 11872 - protein, 318 aa, Thermus thermophilus HB27
MRAVVLKGFGGLEMLEERDLPVPEPGPGEVLVRNLAVAVNPVDAKIRAAGRWAGVEPPFVLGYDAAGVVAKVGPGVKDLKEGDEVYYTPEIFGNPHGTYAEYTPVPAGIVAKKPKNLSFAEAAAIPLAGGTAWEAVVRRLAVRPGETVLVMGGAGGVGSFAVQFAKAAGAYVIATASAENLPVLKELGADLTLDYRGPWAEEVLKATEGQGVDAAFETAGESLVERVIPVVRPFGRIATILPPQGNLSGLYTKNQTLYGVFLTRERKRLLEMRPLFERGLARPLIAEVLPFSLENLRKAHARMDSGHGRGKIVLTFQA

SEQ ID NO: 11873 - protein, 104 aa, Glycine max
LDTVGGAISYLVSGMTARTAAVFFCFAVVKTVDDHCGLWLPGNIFHIFFQNNTAYHDIHHQLQGLKYNYSQPFFSIWDKLLGTYMPFDLVKRPKGGFEARLAKE

SEQ ID NO: 11874 - protein, 253 aa, Oryza sativa
MSGTPADGGGGGGGGGGGSGDDWFLDCGILEDLPAAACGAFPWDASPSCSNPSVEVSSYVNTTSYVLKEPGSNKRVRSGSCGRPTSKASREKIRRDKMNDRFLELGTTLEPGKPVKSDKAAILSDATRMVIQLRAEAKQLKDTNESLEDKIKELKAEKDELRDEKQKLKVEKETLEQQVKILTATPAYMPHPTLMPAPYPQAPLAPFHHAQGQAAGQKLMMPFVGYPGYPMWQFMPPSEVDTSKDSEACPPVA

SEQ ID NO: 11875 - protein, 246 aa, Lycopersicon esculentum
MGRGRVELKRIENKINRQVTFAKRRNGLLKKAYELSVLCDAEVALLVFSNRGKLYEFCSTSNMLKTLDRYQKCSYGTLEVNRSIKDNEQSSYREYLKLKAKYESLQRYQRHLLGDELGPLTIDDLEHLEVQLDTSLKHIRSTRTQMMLDQLSDLQTKEKLWNEANKVLERKMEEIYAENNMQQAWGGGEQSLNYGQQQHPQSQGFFQPLECNSSLQIGYDPITTSSQITAVTNAQNVNGMIPGWML

SEQ ID NO: 11876 - protein, 328 aa, Nostoc sp. PCC 7120
MRAMILDAPRQPLRLTELPVPKPNSEQVLIRVHACAVCRTDLHIVDGELTHPKLPLILGHQIVGTIEALGEKVDQFHLGQRVGVPWLGHTCAHCPYCLSGRENLCDYAEFTGYNLDGGYADYTVADHRFCFPLDPSYPDLQAAPLLCGGLIGYRAYNMTGNAEKLGFYGFGSSAHILIQLARYQGRKVFAFTRPGDTVGQEFARQLGANWAGDSDVLPPEPLDAAIIFAPVGKLVPTALRAVAKGGVVVCAGIHMSDIPSFPYSILWEERVLRSVANLTRQDGEEFLTIAPQIPIRTEVNSFPLTQANEALDALRSGKIEGSAVLVMK

SEQ ID NO: 11877 - protein, 180 aa, Spinacia oleracea
MASSVLSSARVATVSRTPAQASMVAPFTGLKSTVGFPATKKNDDITSLASNGGRVQCMKVWPTQNMKRYETLSYLPPLTTDQLARQVDYLLNNKWVPCLEFETDHGFVYREHHNSPGYYDGRYWTMWKLPMFGCTDPAQVLNELEECKKEYPNAFIRIIGFDSNRQVQCVSFIAYKPAGY

SEQ ID NO: 11878 - protein, 517 aa, Pirellula sp. 1
MRRGANLSHPAQRRAIQYHLARGHRGVIQFNPNIRNSSPFFCTEPIMSLLRFDASGSINDDYGITQAQIDSLKGQMETLRTEMVETDQKQYESGDIPADKQPLDARFFWLPEEMLEAYAKEREASELGRIFKVANGLHDQIDAAVVLGIGGSYMGARAMMEACCDPYHNEMSRAARGSKPRMYFEGNNVDNDASDSLLQRVRAGGYADSDAEKRHAIIVISKSGGTMETAVAFRQFLANLESELGSEAEDWLSRLVVPVTGESGKLHDLATEIGCDEIFTVPDGVGGRFSVLSPVGLVPAAFLGLDCMKLLEGAVAMNEHFKTADYADNVVMQYVAVNHLLSQHRDKSIRVMSVWSKALESVGLWYDQLLAESNGKDGKGVTPLTTLNTRDLHSRHQQHQQGRNDKVFNNVIVESQRTDSLAVGHSQRNQDTLNDIAEKTLPDIMAAAIKGTNDALHADGRPTTDIILPQIDTHVLGQLFQMLMIATVIEGRLLGINPYGQPGVEQYKTNMNKNLGR

SEQ ID NO: 11879 - protein, 358 aa, Haemophilus somnus 2336
MKSYTIAVLSGDGIGPEIMAEAIKVLDAVQKKYNFKLNYRTFDVGGIAIDNHGTPLPASTLNGCEESDAILFGSVGGPKWEHLPPNQQPERGALLPLRKHFKLFCNLRPAILYQGLEKFCPLRADIAAKGFDMMTVRELTGGIYFGQPKGRDGEGMQTRAFDTEVYYKYEIERIAKVAFETAMKRRKHVTSVDKANVLISSVLWRETVNEVAKNYPDVTLDHIYIDNATMQLIKQPEFFDVLLCSNIFGDIISDEAAIITGSMGMLPSASLNEHGFGLYEPAGGSAPDIAGKGIANPIAQILSAAMMLRYSFNLNEEADSIENAVKQVLSQGYRTADLADEHPPISTAEMGNLIANAI

SEQ ID NO: 11880 - protein, 260 aa, GIBBERELLA ZEAE PH-1
MPQNEYMERWRKLHGRRLDHEERVRKRTAREGHKASQDAQNLRGLRAKLYQQRRHKEKIQMKKQIKAHEERNVKTADEKDPTTPMPSYLLDRTNPSTAKALSSAIKNKRAEKAAKFAVPLPKVRGISEEEMFKVVKTGKKIQKKAWKRMVTKPTFVGPDFTRRNPKHERFIRPMGLRYKKANVTHPELGVTVQLPIISVKKNPQNPLYTQLGVLTKGTVIEVNVSELGLVTAGGKVVWGRYAQVTNNPENEGCINSVLLV

SEQ ID NO: 11881 - protein, 433 aa, Borrelia burgdorferi
MGFHIYEIKARQIIDSRGNPTVEADVILEDGTYGRAAVPSGASTGINEAVELRDGDKSVYMGKGVLKAIENIKNIIAPELEGMSALNQVAIDRKMLELDGTPTKEKLGANAILAVSMATAKAAAKYLGLRPYQYLGAYKANILPTPMCNIINGGAHSDNSVDFQEFMIMPIGAKTFSEAIRMAAEVFHTLKGILSGKGYATSVGDEGGFAPNLKSNEEACEVIIEAIKKAGYEPGKDIAIALDPATSELYDPKTKKYVLKWSTKEKLTSEQMVEYWAKWVEKYPIISIEDGMAEEDWDGWKKLTDKIGNKIQLVGDDLFVTNTSFLKKGIEMGVANSILIKVNQIGTLTETFEAVEMAKKAGYTAIVSHRSGETEDTTIADLVVALGTGQTKTGSLSRTDRIAKYNQLIRIEEELETTAEYHGKSVFYSIKQK

SEQ ID NO: 11882 - protein, 1003 aa, Azotobacter vinelandii
MAGATAATLGFAPGVANATQPRQYKLLRAKETRNNCTYCSVGCGVLMYSLGDGAKNAKPRIFHIEGDPDHPVSRGSLCPKGAGLVDFIHSEQRLQYPEYRAPGSDKWQRISWEEAIERIARLMKDDRDANFVEKNAAGVTVNRWLTTGMLCSSAASNETGALDWRFTRALGILGMDCQARLCHGPTVSALAPSFGRGAMTNNWVDIKNANVVLVMGGNPAEAHPVGFKWAIEAKIRNGAKLIVVDPRFNRSAAVADLYTPIRAGSDVTFLMGVVNYLIANDRIQHEYVRAYTNASLLVRDDFGFDEGLFSGYDEVKKQYDRSSWAYQLDENGHARRDPTLSHPRCVWNLLKQHVSRYTPEMVTRLCGTPKEDFLEICRLLGDTSAPDKTATFLYALGWTHHTSGVQIIRGAAMIQLLLGNIGMPGGGINALRGHSNIQGYTDLGLLSVRMPGYLNLPSERQPDLATYLAQSTPKALLPGQVNYWQNTEKFFVSLMKSVWGDKATRDNDWGFDWLPKWDVEYDVLRYMELMYEGKVNGYLAQGFNPIAAFPDKNKAVAALSRLKYLVVIDPLVTESSNFWQNHGEANDVNPAEIQTEVFRLPSSCFAEENGSIANSGRWLQWHWAGAAPPAEAWHDGKILGHLFLRLRELYEREGGANPAPLLNMAWNYSDPEDPAPEEVAREANGYALADLYDPQGNLLAKKGELLRDFSLLRADGSTASFCWVFAGSWTEAGNQMARRDNASDGQGLGSTPGWAWSWPQNRRILYNRASVDPQGKPWDPKRKLIEWNGQRWSGIDVADFAATVAPGSEANPFIMLPEGLGRLFAVGALGDGPFPEHYEPIESPLAENPLHPKVTFNPTTRLFDNDRQRMGTAADFPYVATTYSITEMFRHWTKASRLNAIVQPEQFVEIGEQLAAQKGIRAGDTVKVSSMRGFIKAKAVVTKRIATLEIDGQPVDTVGIPCHWGFTGTTRKGFLANTLTPAVGDANAQTPEYKAFLVNIEKV

SEQ ID NO: 11883 - protein, 295 aa, Haemophilus ducreyi 35000HP
MMKGIILAGGSGTRLYPITRGISKQLLPVYNKPMIYYPLSVLMLAGIREILVITTPVDHQHFKALLGDGSHFGIHIDYAIQAKPAGLAEAFIIGEPFIGKDNVCLVLGDNIFYGQGFTQILSVAANRQQGATLFGYQVNNPARFGVVEFDQDLRILTLEEKPQKPKSDWAVTGLYFYDNRVIEFAKQVTPSARGELEITDINQRYLQEGMLHLQLLGRGFAWFDTGTYDSLHEAAAFVKTIEHLQKLQVACLEEIAWRKGWLTDIDVITLAEPMIQNEYGQYLLALVQQQRKYKA

SEQ ID NO: 11884 - protein, 432 aa, Thermus thermophilus HB27
MKPSVRTPLPGPKAWALLERGERVLSPSYVRPYPFVPARGQGAFLEDVDGNLFLDFMSGIAVNTTGYAHPKVVEAVRAQAERFAHVCFSDFTHEPTLSLAERLVGKLGGGYRVFFGNSGTEGVEAAIKLVRYHTRRPYLLAFTGAFHGRSLGALSLTASKSAYRQGFAPFLPGVVHLPFPNPFRPPLGARPEEAGDAVLDHLEHLFQTVLPPEEVAALFLEPIQGEGGYVVPPPGFIPRLKEVLDRFGILLVADEVQTGAGRTGRFFALEHEGVQADVYVLAKGLASGYPISAVLFREELGSWPPGAHGTTFGGQAVAAAAAHATLDLLEGGLQENAARLGEFLLAELRALKRRFPFLGDVRGRGLMIGLDFGDPDHPQPDLRDKAVRLAFEKGLLLLPAGPSALRIAPPLVLTQEEAALGLEILEEVFRAL

SEQ ID NO: 11885 - protein, 401 aa, Glycine max
MATKRSVGTLKEGDLKGKRVFVRVDLNVPLDDNLNITDDTRVRAAVPTIKYLTGHGAKVILSSHLGRPKGVTPKYSLKPLVPRLSQLLGIEVTMANDSIGEEVEKLVAQLPEGGVLLLENVRFYKEEEKNDPEFAKKLASLADLYVNDAFGTAHRAHASTEGVAKYLKPSVAGFLMQKELDYLVGAVSNPKRPFAAIVGGSKVSSKIGVIESLLEKVNVLLLGGGMIFTFYKAQGYSVGSSLVEEDKLSLATTLLEKAKAKGVSLLLPTDVVIADKFAADANSKTVPASSIPDGWMGLDIGPDSIKTFGEALDKTQTVIWNGPMGVFEFDKFATGTEAIAKKLAELSGKGVTTIIGGGDSVAAVEKVGLADKMSHISTGGGASLELLEGKQLPGVLALDDA

SEQ ID NO: 11886 - protein, 245 aa, Malus x domestica
GKVELKRIENKSNRQVTFSKRRNGLLKKAFELSVLCDAEVALIIFSGRGKLYEFSSSLSMMKTLERYQRCSYSSLDANRPANETQNSYQEYLQLETRVEALQQSQRNLLGEDLATLNTKKLEELEHQLETSLNKIRSTKTQFMLDQLSDLQNREQMLVEANKALRRKLEETSVQAPQFMAWEAAGDGHNNIQQTWLPSNSEAFFHPFGGNNSTSQIGYAHLGSHNGMDVGNPGQHVNGYIPGWML

SEQ ID NO: 11887 - protein, 248 aa, Malus x domestica
MGRGRVELKRIENKINRQVTFAKRRNGLLKKAYELSVLCDAEVALIIFSSRGKLYEFCSSFSMMKTLEKYQSCSYGSLEANLPANETQNSYQDYLMLKARVEVLQQSQRNLLGEDLSHLNTKELEHLEHQLETSLKQIRSRKTQFILDQLSDLQNREQMLVEANKALKRKLEETSVHAPEGMAWEAAGHGPNNIQQTRLPSHSEAFFHPLEGNNSSSQIGYTHMGSDNEMNVGNPGQYVNGYIPGWML

SEQ ID NO: 11888 - protein, 183 aa, Shigella flexneri 2a str. 2457T
MQDSILTTVVKDIDGEVTTLEKYAGNVLLIVNVASKCGLTPQYEQLENIQKAWADRGFVVLGFPCNQFLEQEPGSDEEIKTYCTTTWGVTFPMFSKIEVNGEGRHPLYQKLIAAAPTTVAPEESGFYARMVSKGRAPLYPDDILWNFEKFLVGRDGKVIQRFSPDMTPEDPIVMESIKLALAK

SEQ ID NO: 11889 - protein, 396 aa, Zea mays
MQSAAAIGLVRPCAARPLPTYPSPRRGAGACSGAAQPILAPRGLCLSARASLLPASPLEEEYRRCRAAGTCRRGKVAAADGAVEEAGGGLVKTLQLGSLFGLWYLFNIYFNIYNKQVLKVLPYPINITTVQFAVGSAIALFMWITGILKRPKISGAQLFAILPLAIVHTMGNLFTNMSLGKVAVSFTHTIKAMEPFFSVLLSAIFLGELPTPWVVLSLLPIVGGVALASLTEASFNWAGFWSAMASNVTFQSRNVLSKKLMVKKEESLDNINLFSIITVMSFFLLAPVTLLTEGVKVSPAVLQSAGLNLKQIYTRSLIAACCFHAYQQVSYMILARVSPVTHSVGNCVKRVVVIVTSVLFFRTPVSPINSLGTGIALAGVFLYSQLKRLKPKPKAA

SEQ ID NO: 11890 - protein, 225 aa, Zea mays
  unsure (1)..(225): unsure at all Xaa locations
QKDSFLLRLGRRXLKRGIPYLGICRGSQVLNVACXGSLYQDLEHELVLPAAHVQHINYGDYDGHRHPVRVLSGTPLHEWFARDLADGAQLMVNSYHHQGVRRLAQRFVPMAIAPDGLVEGFYDPDTYNPGEGRFIVGLQFHPERMRKPGSDEFDYPGCARAYQEFVRAVVAYQEKTAAPPHLEMMRRRKVIPRSFSLAMDMYLSDSHTKPAEKRDHEAGAEFLES

SEQ ID NO: 11891 - protein, 486 aa, Shewanella oneidensis MR-1
MSQQYLTSQSGSPIADDQNSLSAGERGPLLLQDWHLIEKLAHFNRERIPERVVHAKGTGVYGTFTLTKDLSDYTIADHFNGVGKQTETFVRFSTVGGEMGSADAERDPRGFGLRFYTARGNHDIVGNNTPTFFLRDGIKFPDFIHTQKRNPLTNLKDPQAMWDFWSLNPEAMHQVTILMSDRGIPANYRQMHGYGSHTFSFWNAKGERFWVKFHFKSQQGVVNLSNEQADKLKGIDPDSSQRDMVVAITDGNFPRWTVNVQIMPEADANTYHINPFDLTKVWPHGDYPLIEIGVLELNRLPQNYFAEVEQVALAPSNLVPGVGASPDKMLQARLFAYADAQRYRIGANYNQLPVNCPHAAKANHHQRAGAMAGTQCPYHGSQTGGDASANYGPNSTIGALVEPANFAEPPLRLDGETARYSRYNQDDYTQAGNLYRIFSEEEKARLVATISGSLRQASMDVQQRMLAHFQKADADYGQRIKMALGL

SEQ ID NO: 11892 - protein, 263 aa, Oryza sativa
LPTTSRGGHLCPSPPPSRRRRCCQVAAAAGGIGRRAVSLAGVASWLTATAAGRADASPFDKYVKKKKLEPLETYVPAVLLTQDQFRDLEKSLEFEKPRYDESRSLLRSGPASSLRINIRAVAQYASSSGQGKAASDAVDECLRALEDLDSLLLQASRNNPSASVDVMRSKISVALGALDNLLQTVPSAVLDKGKAIADAYRTPTDDYEMGRCNRVGSKIETTTGYSLMLNLLTHTESFVNVTVLYVNCEVKYSLYFLPKKKKK

SEQ ID NO: 11893 - protein, 365 aa, Streptomyces coelicolor A3(2)
MAVRTAVRAAVVPAPGAPLEVTGIELPEPGPGRVRVRLAAAGVCHSDLSLSNGTMRVPLPAVLGHEGAGTVVAVGEGVTHVAPGDEVVLNWAPSCGACHACSLGEVWLCAHALAGAADVHARRADDGTDLHPGLNVAAFAEETVVAASCVLPAPEGIPLTEAALLGCAVLTGYGAVHHSARVREGETVAVFGVGGVGLATLQAARIAGASKIVAVDVSPEKEELARAAGATDYLLASDTTAREIRALTGKQGVDVAVECVGRAVTIRTAWESTRRGGRTTVVGIGGKDQQVTFNALEIFHWGRTLSGCVYGNADPARDLPVLAEHVRAGRLDLGALVTERIALDGIPAAFDNMLAGKGGRALVVF

SEQ ID NO: 11894 - protein, 767 aa, Bacillus subtilis subsp. subtilis str. 168
MITYVFPGQGSQQKGMGQGLFEQYQHLTDQADQILGYSIEKLCTEKSYLDVNHTEYTQPALYVVNALSYLKRVEETGRKPDFAAGHSLGEYNALMAAGAFDFETGLRLVKKRGELMGRITGGGMAAVIGLSKEQVTAVLEEHRLYDIDVANENTPQQIVISGPKKEIEKARAVFENTKDVKLFHPLNVSGAFHSRYMNEAKQVFKQYIDSFQFAPLAIPVISNVYAEPYHQDRLKDTLSEQMDNTVKWTDSIRFLMGRGEMEFAEIGPGTVLTGLIHRIKNEAEPLTYIPKKNPAISAHLKEQRNVQAGITAESLGSAEFKQDYHLTYAYLAGGMYRGIASKEMVVKLSRAGMMGFFGTGGLSLKEVEDAIHAIQGELGKGQAYGINLVHNMKHTESEEKMIDLLLRNQVSIVEASAFLSVTPVLVRYRAKGVKRNQNGDVICSNRLIAKISRPEVAESFLSPAPENMLQKLLGENKITMNEAELLRCIPMADDICVEADSGGHTDGGVAYSLMPAMTSLRDEMMKKYQYRKKIRVGAAGGIGTPEAAMAAFMLGADFILTGSINQCTVEAATSDKVKDLLQQMNVQDTAYAPAGDMFESGSKVQVLKKGVFFPARANKLYELYQRYGSIRELDAKMLAQLEEKYFKRSIEDIYKDIALHYPPADIEKAEQNPKHKMALIFRWYFRYSSKLAISGSRHSKVDYQIHCGPALGAFNQWVKGSQLENWRNRHVDEIGKKLMTETAVLLHERMQSMYQPSHETDNIKIKV

SEQ ID NO: 11895 - protein, 561 aa, Zea mays
  unsure (1)..(561): unsure at all Xaa locations
MGSSGFSWTLPDHPKLPKGKPVAVVVLDGWGEANPDQYNCIHVAQTPVMDSLKNXGAPEKWRLVKAHGTAVGLPSDDDMGNSEVGHNALGAGRIFAQGAKLVDQALASGKIYDGDGFNYIKESFESGTLHLIGLLSDGGVHSRLDQLQLLLKGVSERGAXKKIRVHILTDGRDVLDGSSIGFVETLENDLLELRAKGVDAQIASGGGRMYVTMDRYENDWDVVKRGWDAQVLGEAPYKFKSALEAVKTLRAQPKANDQYLPPFVIVDDSGNAVGPVLDGDAVVTINFRADRMVMLAKALEYADFDNFDRVRVPKIRYAGMLQYDGELKLPSRYLVSPPEIDRTSGEYLVKNGIRTFACSETVKFGHVTFFWNGNRSGYFDATKEEYVEVPSDSGITFNVAPNMKALEIAEKARDALLSGKFDQVRVNLPNGDMVGHTGDIEATVVACKAADEAVKIILDAVEQVGGIYLVTADHGNAEDMVKRNKSGKPLLDKNDRIQILTSHTLQPVPVAIGGPGLHPGVKFRNDIQTPGLANVAATVMNLHGFEAPADYEQTLIEVADN

SEQ ID NO: 11896 - protein, 417 aa, Rhizopus niveus
MSLSNKLSIRDLNLKDKRVLIRVDFNVPMKDGAITNNNRIVQALPTVKYALDNGASAVILMSHLGRPNGEAVAKYSLKPVAAEVEKLLGKPVEFLNDCVGPDVEKACQSAKDGKVILLENLRFHIEEEGSAKVDGQKVKADAEAIKKFRASLTTLADIYINDAFGTAHRAHSSMVGVDLSQRAAGFLMQKELEYFAKALENPSRPFLAILGGAKVSDKIQLIENMLDKVNALIICGGMAFTFKKTLDNVKIGKSLFDEPGSKLVQNLVKKAAEKNVKIVFPVDFITADKFAPDASTGYATDDDGIPDGWQGLDCGERSNKLFREEILKSKTIVWNGPSGVFEFDAFSSGTKAVLDAVINATKEGATTIIIGGGDTATAALKWGAEGQVSHISTGGGASLELLEGKELPGVTALSSKN

SEQ ID NO: 11897 - protein, 416 aa, Rhizopus niveus
MSLSNKLSIRDLDLKNKRVLIRVDFNVPMKDGAITNNNRIVQALPTVKYALDNGASAVILMSHLGRPNGEAVAKYSLKPVAAEVEKLLGKPVEFLNDCVGPDVEKACQSATGGKVILLENLRFHIEEEGSAKVRWSKVKADAEAVKKFRASLTALADIYVNDAFGTAHRAHSSMVGVDLSQRAAGFLMQKELEYFAKALENPARPFLAILGGAKVSDKIQLIENMLDKVNALIVCGGMAFTFKKTLDNVKIGKSLFDEAGSKLVRNLVKKAAEKNVKLVFPVDFVTADKFAPDANTGYATDADGIPDEWEGLDCGKKSSELFREEILKSKTIVWNGPSGVFEFDAFANGTKSVLNAVIEATKEGATTIIGGGDTATAALKWGAEGKVSHISTGGGASLELLEGKELPGVTALSSKN

SEQ ID NO: 11898 - protein, 163 aa, Zea mays subsp. parviglumis
EEGRIIEFAEKPKGEQLKAMMVDTTILGLDDVRAKEMPYIASMGIYVFSKDVMLQLLREQFPEANDFGSEVIPGATSIGKRVQAYLYDGYWEDIGTIAAFYNANLGITKKPIPDFSFYDRFAPIYTQPRHLPPSKVLDADVTDSVIGEGCVIKNCKINHSVVG

SEQ ID NO: 11899 - protein, 747 aa, Streptomyces coelicolor A3(2)
MPRTALRICPLCEATCGLALTVDGSTVTAARGDRDDVFSRGFICPKGASFGAVDSDPDRLRAPLVRTNGELREATWEEAFDAVAAGVRPLVERYGPHSVGVVLGNPNVHTMAGALYPNVLLGALGSRSLFTASTLDQMPKHVSSGLLFGDANAIPVPDLDRTDHLLLIGANPLESNGSLCTAPDFPGRLRALKARGGTLTVVDPRRTRTAKLADRHVAIRPGSDALLLAAMAHVLYEEGLVDLGALAPHVGGVDDVAAAVRDFTPESVAAACDVDADVTRALARELAAAPTAAVYGRIGSCTVPHGTIASWLVDVLNILTGNLDRPGGALFPQAATDRTPRPAGPGRGFALGRWRSRVSGHPEAKGELPLSALAEEIDTATDAGEPVRALLTIAANPVLSAPDGDRLDKALESLDFMVSVDPYLNETSRHAHVVLPPPPPAQSPHHDFAFNTLAVRNQVRYTRPAVPLEPGRMAETEILARLTLAVTGAHGTDPAAVDALVIEQTLAKAVREPHSPAHGRDPAELTALLTGETGPERRLDLMLRLGPYGDGFGARPDGLTLERLLAHPHGIDLGPLRPRLPQPLKTRSGKVELLPAPIAADLPRLARARDARPAGLVLVGRRHLRSNNSWMHNVPALTGGSNRCTLHVHPEDAARLGLRGAQPVRVTGPGGAVTAPAEVTDAVRPGVVSLPHGWGHDRPGTRQTHAATDPGVNVNQLLDGSALDPLSGNAVLNGVPVTLTPLTGAEL

SEQ ID NO: 11900 - protein, 517 aa, Methylobacillus flagellatus KT
MTVTPALLVILDGFGYREDSHDNAIALANTPNIDRFWTQYPHTLINASETFVGLPRGQMGNSEVGHLNIGAGRVVFQDFERINQAIASREFFSNPVLIEAVNKAKAGHKAVHILGLLSDGGVHSHQDHIHATIEMAVNAGVEKVYVHAFLDGRDTPPISAKPYLEKLEQACASIGGGKIASICGRFYAMDRDKRWPRVEAAYNLITDGQGEFASASALQGLEAAYARDEKDEFVKATAIAAAGEQPVTMEDGDVVIFVNFRSDRARQLTHALLDPDFEGFNRRRQPKLAGFYTLTLYDKAETRAKPIFAPVEIRNTFGEYVAQHGLKQLRIAETEKYPHVTFFFNGGEEQVFAGEDRILVPSPKVATYDLQPEMSAYEVTDRLEAAILSRKYDAIICNYANCDMVGHSGDLSASIKAVETIDTCIARIVKAMESIGGQMIITADHGNVEQMRDYENNQPHTQHTTNQVPLFFIGKPATLAAPGTGSLCDLAPSLLAMMGLKQPPEMTGKSLVAFQAA

SEQ ID NO: 11901 - protein, 169 aa, Synechocystis sp. PCC 6803
MTAQANNTIYGFSANALDGSPVALRDFEGKVLLIVNTASQCGFTPQYQGLQALYNRFGDRGFTVLGFPCNQFGQQEPGGSGEIKNFCETRYGVTFPLFEKVEVNGPNAHPLFKFLTAASPGMAIPFLGGAEDIKWNFTKFLVDRQGKVVKRYGSIAKPDEIAADIEKLL

SEQ ID NO: 11902 - protein, 216 aa, Zea mays
MAHRVNNEYDYLFKIVLIGDSGVGKSNILSRFTRNEFCLESKSTIGVEFATRNLQIDGKTVKAQIWDTAGQERYRAITSAYYRGAVGALLVYDITKKQSFDSVQRWLRELRGHADANIVVMMVGNKSDLNHLRSVPEEDGRAFSEKEGLSFLETSALEAINVEKAFHTILSEIHQTVSKKALAAQASASTNGRSMQGTTINVAESSTVTKGSCCSS

SEQ ID NO: 11903 - protein, 435 aa, Streptococcus agalactiae NEM316
MSIITDVYAREVLDSRGNPTLEVEVYTESGAFGRGMVPSGASTGEHEAVELRDGDKSRYGGLGTQKAVDNVNNVIAEAIIGYDVRDQQAIDRAMIALDGTPNKGKLGANAILGVSIAVARAAADYLEVPLYSYLGGFNTKVLPTPMMNIINGGSHSDAPIAFQEFMIMPVGAPTFKEALRWGAEVFHALKKILKERGLETAVGDEGGFAPKFEGTEDGVETILKAIEAAGYEAGENGIMIGFDCASSEFYDAERKVYDYSKFEGEGGAVRTAAEQIDYLEELVNKYPIITIEDGMDENDWDGWKALTERLGGRVQLVGDDFFVTNTDYLARGIKEEAANSILIKVNQIGTLTETFEAIEMAKEAGYTAVVSHRSGETEDSTIADIAVATNAGQIKTGSLSRTDRIAKYNQLLRIEDQLGEVAQYKGIKSFYNLKK

SEQ ID NO: 11904 - protein, 530 aa, Thermus thermophilus HB27
MRKAAGKYGNTLEFGHLVGGEEVLEGPLLERRNPSDREDVVARFPEADKDLVRKAALKAREAFAEWSRTPAPIRGQVLFNLVKILEREKPTLTRLMVREVGKTPKEAAGDVQEAIDTALFFASEGRRLYGQTVPSEMRDKELFTFRRPLGVVGIITAGNFPIAVPSWKLIPAVLTGNTVVWKPSEDAPTLSFVFAKLFEEAGLPPGVLNVVFGGGKGSTGQWMVELMDEGLFQKFAFTGSTQVGRWIGEVAGRNLIRPTLELGGKNPLVVMRDADLDLAVEGAWWSAFATGGQRCTSAGNILVDAPIYEEFKRRFLERVEATLVGNPLLHPEVTYGPFINERFFARWQEHYRVGEAEGARLLFGRGRITRENPYPRFLGDPEAGLYGWPTVWEVRPGTRLFTEEVFGPTINLVKVDGIEEAIAVANSTPYGLSSAIYTNHRHWAYLFKVGIRAGMTSINNATVGAEAHLPFGGVKASGNGGRESGIWVLEEYTYWHAVNEEYSGRLQLAQMDTGYVSPKAPTPWGEVLGL

SEQ ID NO: 11905 - protein, 236 aa, Mesorhizobium loti MAFF303099
MKPVIGIVSDLDVEKDGYVCLANYVRAIEKAGALPVILPYTNAESVSSVLELLSGVVLSGGGDFPAELYGANPHSTLQAMIPARDTFEFALARSALEKSMPILGICRGMQLLNVVSGGAIYPHTLDELPDARDHRDGTPLSEMVHKVHIEPNTKLSRLCGEHAAAFEVNSMHHQAISRLAPGFVVSARADDGVVEAIEATDRPFVVGVQWHPEWMVDTQPACLSLLENFTKACATR

SEQ ID NO: 11906 - protein, 162 aa, Zea mays subsp. parviglumis
RRRIIEFAEKPKGEQLKAMMVDTTILGLDDVRAKEMPYIASMGIYVFSKDVMLQLLREQFPEANDFGSEVIPGATSIGKRVQAYLYDGYWEDIGTIAAFYNANLGITKKPIPDFSFYDRFAPIYTQPRHLPPSKVLDADVTDSVIGEGCVIKNCKINHSVVG

SEQ ID NO: 11907 - protein, 235 aa, Arabidopsis thaliana
MVLEFSRQETDPGHDFVQESTNLFGVQERGQISFPDQNLDWYNTETINPKKDKHRSKPSSGSYDILELDVADLLAKYTHYCQICGKGFKRDANLRMHMRAHGDEYKTREALISPTSQDKKGGYSLKKHYYSCPQHGCRWNQRHEKFQPLKSVICAKNHYKRSHCPKMYMCRRCSVKHFSVLSDLRTHEKHCGDIKWVCSCGTKFSRKDKLMSHVSLFLGHVPAHGSSKPPTITLK

SEQ ID NO: 11908 - protein, 320 aa, Oryza sativa
MGGARGSQCQQGELVKHKHNHYPTYVPPPPTSGYSTAKALVKIKEVEHILQWELSLTLIYATLLNMAFLAQIGMPGQLEKKERRNRENWRTANAGLVFISTSPEKRRMMTSTMARPTMLACCKLYISESRNAAALRAIEQAACGGGAVVVNRFTDDAYNRGRTLASIRRQLGYFKPNSSGDQWRGAPETDALPVAPDAGPERSPRSKGVVVVGATGWVDNYNVPVRTGDVEAARRIARAVSERGGGLPSVQAMGLAHGGGVVEVACNLLDPARVGAEQVQGMVERLAAGEGLSVGKGYFTDYSQDKIVELYFKSAANTEG

SEQ ID NO: 11909 - protein, 163 aa, Zea mays subsp. parviglumis
EEGRIIEFAEKPKGEQLKAMMVDTTILGLDDVRAKEMPYIASMGIYVFSKDVMLQLLREQFPEANDFGSEVIPGATSIGKRVQAYLYDGYWEDIGTIAAFYNANLGITKKPIPDFSFYDRFAPIYTQPRHLPPSKVLDADVTDSVIGEGCVIKNCKIHHSVVG

SEQ ID NO: 11910 - protein, 221 aa, Enterococcus faecalis V583
MKKAIAECLGTFILVFFGTGTAVLGNGMEGIGTTGIALAFGLTIVAAAYSIGTISGAHLNPAVSIGMWLNKRMTTMELIYYVVGQIVGGLIASFALLSILKGAGKSIENLGQNGVGELSVAGALTVEIILTFIFVLVVMTVTSAKKGNASLAGIVIGLTLTMIHLVGIPLTGTSVNPARSIAPAVFAGGSALSELWIFIVAPLIGGLLAALVAKFVLDTEE

SEQ ID NO: 11911 - protein, 163 aa, Zea mays subsp. parviglumis
EEGRIIEFAEKPKGEQLKATMVDTTILGLDDVRAKEMPYIASMGIYVFSKDVMLQLLREQFPEANDFGSEVIPGATSIGKRVQAYLYDGYWEDIGTIAAFYNANLGITKKPIPDFSFYDRFAPIYTQPRHLPPSKVLDADVTDSVIGEGCVIKNCKIHHSVVG

SEQ ID NO: 11912 - protein, 174 aa, Pseudomonas putida KT2440
MKTLVDHLSQYANYHRDPRNIATHFVGIPMIVLAVTILLSRPGWEIAGMWLSPALLAAAASVWFYLRLDLRFGLVMGLLLGLCLWVGEALAVQSTTLWLGAGLGAFVVGWIIQFIGHYYEGRKPAFVDDVSGLIIGPLFVVAEAAFMLGLCPTLKRAVEANAGPIAMRQKKASV

SEQ ID NO: 11913 - protein, 560 aa, Zea mays
  unsure (1)..(560): unsure at all Xaa locations
MGSSGFSWTLPDHPKLPKGKPVAVVVLDGWGEANPDQYNCIHVAQTPVMDSLKNGAPEKWRLVKAHGTAVGLPSDDDMGNSEVGHNALGAGRIFAQGXAKLVDQALASGKIYDGDGFNYIKESFESGTLHLIGLLSDGGVHSRLDQLQLLLKGVSERGAKKIRVHILTDGRDVLDGSSIGFVETLENDLLELRAKGVDAQIASGGGRMYVTMDRYENDWDVVKRGWDAQVPGEAPYKFKSALEAVKTLRAQPKANDQYLPPFVIVDDSGNAVGPVLDGDAVVTINFRADRMVMLAKALEYADFDNFDRVRVPKIRYAGMLQYDGELKLPSRYLVSPPEIDRTSGEFLVKNGIRTFACSETVKFGHVTFFWNGNRSGYFDATKEEYVEVPSDSGITFNVAPNMKALEIAEKARDALLSGKFDQVRVNLPNGDMVGHTGDIEATVVACKAADEAVKIILDAVEQVGGIYLVTADHGNAEDMVKRNKSGKPLLDKNDRIQILTSHTLQPVPVAIGGPGLHPGVKFRNDIQTPGLANVAATVMNLHGFEAPADYEQTLIEVADN

SEQ ID NO: 11914 - protein, 307 aa, Campylobacter jejuni
MHNILFGNILNRSVTMKGIILAGGSGTRLYPSTLTLCKQLLPIYDKPMIYYPMSVLMLAKIKEVLIISTPKDIDRFKELFKDGSFLGMQIQYKIQERPEGLAQGLILAQDFIQNDDIALILGDNIFYGQGFSDILENAKDDLKKGFASIFSYHVKDPERFGVVEMDQNGNVLSLEEKPKNPKSNHVATGLYFYNNDAIDIAKNVKPSARGELEITDVNIEYLRLNKLKSQHLGRGFAWIDTGTHDSLIEASSFVQTIELRQGYKIACLEEIAYNNNWIDNEILEKRALLLSKSNYGQYLYKILSQGK

SEQ ID NO: 11915 - protein, 201 aa, Aspergillus awamori
MNPEYDYLFKLLLIGDSGVGKSCLLLRFADDTYTESYISTIGVDFKIRTIELDGKTMKLQIWDTAGQERFRTITSSYYRGAHGICVVYDVTDMDSFNNVKQWLQEIDRYATEGVNKLLVGNKSDMEDKKVVEYTVAKEFADSLGIPFLETSAKNASNVEQAFLTMARQIKERMGTATVNNKPTVQVGQGQGVQSGSAGGCC

SEQ ID NO: 11916 - protein, 195 aa, Araucaria heterophylla
DDDHGEVISEIRRSDLEPYLGLHYPATDIPQASRFLFMKNRIRMICDACAPPVRVVEDKRLPRELSLCGSTLRAPHGCHVQYMCNMGSIASLVMSVVVNEKEEKEGDSDGQQQQQKGRRLWGLVVCHHTSPRFVPFPLRYACEFLMQVFGIQLNKEVELGTQLREKQILRTQTLLCDMLFRGGAPMGIITRKPNV

SEQ ID NO: 11917 - protein, 180 aa, Mesembryanthemum crystallinum
MASMMSNAAVVGRTTPAQASMVAPFTGLKSVSAFPVTKKSNDITSIASNGGRVQCMQVWPPLGKKKFETLSYLPPLSEESLMKEVQYLLNNGWVPCLEFEPTHGFVYREHGNTPGYYDGRYWTMWKLPMFGCTDPSQVVAELEEAKKAYPEAFIRIIGFDNVRQVQCISFIAYKPASYDA

SEQ ID NO: 11918 - protein, 192 aa, Araucaria heterophylla
DDHGEVISEVRKSDLEPYLGLHYPATDIPQASRFLFMKNRVRMICDCCAPPVRVIEDKRLPRELNLCGSTLRAPHGCHAQYMSNMGSISSLVMAVIVNEKEEEEGDSDGQQQQKGRRLWGLVVCHHTSPRFVPFPLRYACEFLMQVFGIQLNREIELAAQSREKHILRTQTLLCDMLLRDAPMGIVTQKPNI

SEQ ID NO: 11919 - protein, 246 aa, Malus x domestica
MGRGRVELKRIENKINRQVTFAKRRNGLLKKAYELSVLCDAEVALIIFSNRGKLYEFCSSSSILKTLDRYQKCSYGAVDQVNRPAKELESSYREYMKLKGRYESLQRTQRNLLGEDLGPLNTKELEQLERQLEGSLKQVRSTKTQYMLDQLSDLQNKEQLLIEANRDLTMKLDEISSRNQLRQSWEGGDQGMAYATQHHHAQSQGFFQPLDCNPTLQMGYSAVGSEQMSATTNAQQVNCFIPGWML

SEQ ID NO: 11920 - protein, 389 aa, Nostoc sp. PCC 7120
MKAVCWYGANEVRVETVPDPKILNPRDAIIKITSTAICGSDLHIYGGYIPTVQQGDIIGHEFMGEVVEVGSRVDNLKIGDRVVVPSTIGCGRCHYCEHDMWSLCDNSNPNGWLEEKLYGNITSAIYGYSHLLGGYAGAQAEYIRVPFADVGVVKVPPDLPDEMLLFISDAIPTGYMGAEMCDIQPGDTVAVWGCGAVGQFAMISAYMMGAEKVIAIDRFPERLEMAKKYAKAEVINYEEVNAGEALKEMTGGRGPDACIDAVGLEAHGVGLEDFYDQTKQKLKLESDRPHVLREMMVACRKGGTLSIMGVYGGFVDKIPFGAAFNKGLTFRMGQMHGQKYMNLLLQLILDGKLDPSFVVSHQLPLEQAPLGYHIFQQKKDNCIKVVLKP

SEQ ID NO: 11921 - protein, 193 aa, Ustilago maydis 521
MQTIKCVVVGDGAVGKTCLLISYTTNAFPGEYIPTVFDNYSANVMVDGKPVSLGLWDTAGQEDYDRLRPLSYPQTDVFLVCFSLVSPPSFENVRTKWWPEVSHHAPNIPTILVGTKLDLREDPETIAKLRDRRMQPITYAQGNQMARDIHATKYLECSALTQKGLKGVFDEAIRSVLAPAPVKSKKKNNCMIL

SEQ ID NO: 11922 - protein, 183 aa, Mesembryanthemum crystallinum
MASSLMSNAATTMAAATTTAQANMVAPFNGLKSVSAFPVTRKNNDITSVASNGGRVQCMQVWPPLGKKKFETLSYLPPLSEESLIKEVQYLLNNGWVPCLEFEPTHGFVYREHGNTPGYYDGRYWTMWKLPMFGCTDPSQVVAELEEAKKAYPEAFIRIIGFDNVRQVQCISFIAYKPASYDA

SEQ ID NO: 11923 - protein, 193 aa, Araucaria heterophylla
DDHGEVIAEIRRVDLEPYLGLHYPATDIPQASRFLFMKNKVRMICDCRADPVKVIQDKRLAQPLSLSGSALRALHGCHVQYMANMGSIASLVMAMTINENENENDEETSGSGQKGGRRLWGILVCHHTSPRFVPFPLRYACEFLMQVFGIQLNKEVELAAQLREKHMLRTQTVLCDMLLRDAPVGIVTQTPNI

SEQ ID NO: 11924 - protein, 292 aa, Nostoc sp. PCC 7120
MTKTAWVFPGQGSQALGMGTDLLDIPTAKEKFAQAEAILGWSVSEICQNEEKLSQTLYTQPSLYVVESILADLTKERGHQPDLVAGHSLGEYIALYVAGVFEWSAGLKLVKRRAELMDSAAGGMMAAMMNFDREQLETVISQTPDVVLANDNSPAQVVISGTPEAVQTVMSQVKAKRAVPLKVSGAFHSHLMNTAAVEFQEILETVEFQQASVPVLSNVEPAPAVDAAILKQRLSQQMTGSVRWREISLTLPANGIEKVVEIGPGNVLTGLIKRTTADLILKNIRNAAELPN

SEQ ID NO: 11925 - protein, 216 aa, Xylella fastidiosa 9a5c
MAAYDHLYHCDPGLSGWMQRLGPLPALRGWRQPFNVVDALARAILFQQLSGKAASTIVARIEAVIGSACLYAETLACIDDACLRTCGVSSNKILALRDLTRREVAGELPSVRQMGSMHHNTIVEKLIPIRGIGRWTVEMMLMFRLGRPDVLPVDDLGVRKGIQRVDSLAFVPTPKALCTRGECWAPYRTYAGLYLWRIADFHEGEGAVISDRSQDE

SEQ ID NO: 11926 - protein, 242 aa, Malus x domestica
RVELKRIENKINRQVTFAKRRNGLLKKAYELSVLCDAEVALIVFSNRGKLYEFCSSPSILQTVDRYQKCSYGAVDQVNIPAKELESSYREYMKLKGRCESLQRTQRNLLGEELGPLNTKELEQLERQLEASLKQVRSTKTQYMLDQLSALQNKEQLLIEANRDLTMKLDEIGSRNQLRQSWEGGDQGMAYGTQHHHAQSQGFFQPLDCNPTLQIGYPAEGSEQMGATTHAQQVNCFIPGWML

SEQ ID NO: 11927 - protein, 389 aa, Nostoc sp. PCC 7120
MKAVCWHGTNDVRVETVPDPKILNPRDAIIKITSTAICGSDLHIYNGYIPTMQSGDILGHEFMGEVVELGSAVKNVKVGDRVVVPFTISCGSCFFCQRDLWSLCDNSNPNAWLVELQMGHSPAGLFGYSHLFGGYAGGQAEYARVPFADVGLLKIPDNLPDEQVLFLTDIFPTGYMAAENCNIKPGDIVAVWGCGPVGQFAIKSAYMLGAERVIAFDRIPERLQMAKEQCNAEVLNYEEVNIGEALKEMTGGRGPDACIDAVGMEAHGTDLMAFYDQVKQAVRLETDRPTALRQVIVSAAKGGHVSLAGVYGGFLDKIPMGSAMNKGLTFKMGQTHVHKYLKPLLERIQNGEIDPSFVITHTIPLEQAPHGYEIFKHKKDNCIKVVLKP

SEQ ID NO: 11928 - protein, 195 aa, Araucaria heterophylla
DEHGEVLAEIRRSDLEPYLGLHYPATDIPQASRFLFMQNRVRMICDCRAAPVEVIQAEELKQPLCLVGSTLRAPHGCHAQYMANMGSIASLVMAVVINGNEDEGGGGGGSGSGSGRGSMKLWGLVVCHHTSPRAVPFPLRYACEFLMQAFGLQLNMELQLAAQLTEKHILRTQTLLCDMLLRDAPIGIVTHSPSI

SEQ ID NO: 11929 - protein, 237 aa, Saururus chinensis
MGRGRVQLKRIENKINRQVTFSKRRTGLLKKAHEISVLCDAEVALIVFSTKGKLYDYSTNAGMARILERYERYCYAEREVAVTSPDSEGSWWLEYGKLKARIEAQQRIQRQLMGEDLDALTPKELQQLENQLESALKHVKSRKNQVIYDSMVELRRKEKLLRDENTMMEKKIQEKKKERVQQAQWEQQIQSQNSPSFLPTLNIGYHQGTATETGEKEEAHPGHNTVMLAWLLRSSNN

SEQ ID NO: 11930 - protein, 301 aa, Asarum caudigerum
AGLSSPPRERKRVRENLIFSLAFKFARFQNFRFSFSFAGGFIFFEFSSLFFFGLQEMGRGRVQLKRIENKINRQVTFSKRRTGLLKKAHEISVLCDADVALIVFSAKGKLYEYATNSSMETILERYERYSFAERELVADPESEGGWCLEYGKLKARVDALQKSHKHIMGEDLDSLSIKELQHLEQQLDVALKHIRSRKNQVMLDTISELQRKEKMLLEQNKALQKTMREKENAMVRQAQWEQDNQPQASRPSFMLSRPLPTLHIGSNYHQTRNTETEKQGDRPHSRSNSGIPAWMLSHMND

SEQ ID NO: 11931 - protein, 401 aa, Yersinia pestis biovar Medievalis str. 91001
MEASDMFEKITAAPADPILGLTDIFRADDRAHKINLGIGVYKDETGKTPVLTSVKKAEQYLLENEATKNYLGIDGLPVFASCTQELLFGANSAIIADKRARTAQTPGGTGGLRIAADFIAHQTSAKRVWVSNPSWPNHKNVFEAAGLEVVEYAYYDAANHALDFDGLLNSLSEAQAGDVVLFHGCCHNPTGIDPTETQWSQLAELSVAKGWLPLFDFAYQGFANGLEEDAQGLRIFAATHQELIVCSSYSKNFGLYNERVGACTLVAADSNVADTAFSQVKAVIRANYSNPPAHGASVVATILSNAALRAIWEQELTDMRQRIQRMRQLFVNTLQEKGAQQDFSFIINQNGMFSFSGLTKEQVLRLRDEFAVYAVNSGRVNVAGMTPDNMAPLCEAIVAVL

SEQ ID NO: 11932 - protein, 297 aa, Bacillus subtilis subsp. subtilis str. 168
MRTKKRTKEMLPIFDQKKVAFIGAGSMAEGMISGIVRANKIPKQNICVTNRSNTERLTELELQYGIKGALPNQLCIEDMDVLILAMKPKDAENALSSLKSRIQPHQLILSVLAGITTSFIEQSLLNEQPVVRVMPNTSSMIGASATAIALGKYVSEDLKKLAEALLGCMGEVYTIQENQMDIFTGIAGSGPAYFYYLMEFIEKTGEEAGLDKQLSRSIGAQTLLGAAKMLMETGEHPEILRDNITSPNGTTAAGLQALKKSGGGEAISQAIKHAAKRSKEISEDIEKTAAPLSGVIK

SEQ ID NO: 11933 - protein, 484 aa, Actinobacillus actinomycetemcomitans
MSAKCPFDHNSATLTTAAGAPVVDNDNTMSAGPRGPLLLQDVWYQEKLAHFARERIPERVVHAKGSAAFGTFTVTHDITQYTKAALFSEVGKQTEVLLRFSTVAGERGAADAERDVRGFSLKFYTEQGNWDLVGNNTPVFFIRDPLKFPDFIHTQKRNPQTNLRDATAAWDFWSRHPESMHQIMILFSDRGIPASLRNMNGYGSHTYSFINADNERFWVKFHFKTQQGHKFLTNAEAAKVVGEDRESSQRDLYDAIANGNFPRWNVRIQIMPEADAEKHNYSFDLTKVWPHKDYPLIDVGVLELNRNPQNYFAEVEQAAFAPNNNVPGIGFSPDRMLQGRLFSYQDAQRYRLGVNHHQIPVNAPKCPYHTTHRDGAMRVDHNGGTHPNYAPNRFDTYVPTHDQGPSLQLEREGAHFNFRDYDEDYYSQPAALYAIMDAAQRDRLAGNFAASLAEVTDDAIVEHQLVHFERVNTELANAIRTKLA

SEQ ID NO: 11934 - protein, 163 aa, Zea mays subsp. parviglumis
EEGRIIEFAEKPKGEQLKAMMVDTTILGLDDVRAKEMPYIASMGIYVFSKDVMLQLLREQFPEANDFGSEVIPGATSIGKRVQAYLYDGYWEDIGTIAAFYNANLGITKKPIPDFSFYDRFAPIYTQPRHLPPSKVLDADVTDSVIGEGCVIENCKIHHAVVG

SEQ ID NO: 11935 - protein, 214 aa, Clostridium tetani
MKFFIDTANVEEIKKVAKWGVLDGVTTNPTLIAREGRDLKEVIEEICSIVDGPISAEVISLESEKMVEEAKELIKIHKNIVIKVPMCEEGLKAVSELTKLGIKTNVTLIFSAQQALLAAKAGATYVSPFLGRIDDIGSFGIQLVEDIVTIFTNFGIESEIICASIRTPIHVLECARVGGDIATVPYKVFAQMLKHPLTDRGIEQFLEDYKSMNK

SEQ ID NO: 11936 - protein, 292 aa, Pyrococcus furiosus DSM 3638
MKVRKAVIPAAGLGTRMLPITKSMPKEMLPIVDRPAIHYVVEEAIKAGIEDILIITGKGKRAIEDYFDRSFELEYYLRERGKFEELKQVEEIGEMVDIYYVRQKKPLGLGDAILHAEKHVNGEPFAVLLGDDIIISKKPAIKQLMEVAERKNTSVIGVEKVPWELVSRYGIINGQKIDEQLYTITDMVEKPSPDEAPSNMAIIGRYVLIPEIFDFLKETPPGKGGEIQLTDALRAMLNEYEMLAKVISGRRYDIGTRIGFIKANIELSLLRDDLREGVILFIKNILQEVQDE

SEQ ID NO: 11937 - protein, 511 aa, Bacillus subtilis
MSKKPAALIILDGFGLRNETVGNAVALAKKPNFDRYWNQYPHQTLTASGEAVGLPEGQMGNSEVGHLNIGAGRIVYQSLTRVNVAIREGEFERNQTFLDAISNAKENNKALHLFGLLSDGGVHSHINHLFALLKLAKKEGLTKVYIHGFLDGRDVGPQTAKTYINQLNDQIKEIGVGEIASISGRYYSMDRDKRWDRVEKAYRAMAYGEGPSYRSALDVVDDSYANGIYDEFCIPSVITKENGEPVAKIQDGDSVIFYNFRPDRAIQISNTFTNKDFRDFDRGENYPKNLYFVCLTHFSETVDGYVAFKPINLDNTVGEVLSQHGLKQLRIAETEKYPHVTFFMSGGREAEFPGEERILINSPKVATYDLKPEMSAYEVKDALVKEIEADKHDAIILNFANPDMVGHSGMVEPTIKAIEAVDECLGEVVDAMVAKGGHAIITADDGNADILITESGEPHTAHTTNPVPVIVTKEGITLREGGILGDLAPTLLDLLGVEKPKEMTGTSLIQK

SEQ ID NO: 11938 - protein, 430 aa, Bacillus subtilis
MPYIVDVYAREVLDSRGNPTVEVEVYTETGAFGRALVPSGASTGQYEAVELRDGDKDRYLGKGVLTAVNNVNEIIAPELLGFDVTEQNAIDQLLIELDGTENKGKLGANAILGVSMACARAAADFLQIPLYQYLGGFNSKTLPVPMMNIVNGGEHADNNVDIQEFMIMPVGAPNFREALRMGAQIFHSLKSVLSAKGLNTAVGDEGGFAPNLGSNEEALQTIVEAIEKAGFKPGEEVKLAMDAASSEFYNKEDGKYHLSGEGVVKTSAEMVDWYEELVSKYPIISIEDGLDENDWEGHKLLTERLGKKVQLVGDDLFVTNTKKLSEGIKNGVGNSILIKVNQIGTLTETFDAIEMAKRAGYTAVISHRSGETEDSTIADIAVATNAGQIKTGAPSRTDRVAKYNQLLRIEDQLAETAQYHGINSFYNLNK

SEQ ID NO: 11939 - protein, 467 aa, Glycine max
  unsure (1)..(467): unsure at all Xaa locations
LIVIQTAACAHRLFSKLPPLFWILLLLHHPVIADSTLSLDTSFRKWRSHDSISASPTSASDSVFNHLVRAPEDPILGVTVAYNKDPSPVKLNLGVGAYRTEEGKPLVLNVVRRVEQQLINDVSRNKEYIPIVGLADFNKLSAKLIFGADSPCYSRQXRVTTVQCLSGTGSLRVGGEFLAKHYHQRTIYLPTPXTWGNHPKVFNLAGLSVKTYRYYAPATRGLDFQGLLEDLGSAPSGSIVLLHACAHNPTGVDPTLEQWEQIRQLIRSKALLPFFDSAYQGFASGSLDADXAQPVRLFVADGGELLVAQSYAKNLGLYGERVGALSIVCKSADVASRVESQLKLVIRPMYSSPPIHGASIVAAILKDRNLFNDWTIELKAMADRIISMRQELFDALCSRGTPGDWSHIIKQIGMFTFTGLNAEQVSFMTKEFHIYMTSDGRISMAGLSSKTVPLLADAIHAAVTRVV

SEQ ID NO: 11940 - protein, 120 aa, Glycine max
MAPTVMMASSATAVAPFQGLKSAASLPVARRSTRSLGNVSNGGRIRCMQVWPAYGNKKFETLSYLPPLSTDDLLKQVDYLLRNGWIPCLEFSKLGFVYRENSTSPCYYDGRYWTMWKLPM

SEQ ID NO: 11941 - protein, 307 aa, Corynebacterium glutamicum ATCC 13032
MSLPIAQHQNAVKTVVVPAAGMGTRFLPATKTIPKELLPVVDTPGIELVAKEAADLGATRLAIITAPNKDGILKHFEEFPELEATLEARGKTDQLNKVRAARELIATVPVVQEKPLGLGHAVGLAESVLDDDEDVVAVMLPDDLVLPFGVTERMAEVRAKFGGSVLAAIEVAEDEVSNYGVFKLGELDAESESEGIRRVVGMVEKPAPEDAPSRFAATGRYLLDRAIFDALRRIEPGAGGELQLTDAIALLIEEGHPVHIVVHEGKRHDLGNPAGYIPAVVYFGLRHAEYGSKIHRAVKEILAEFES

SEQ ID NO: 11942 - protein, 115 aa, Triticum aestivum
QGLKSTACLPVSRRSNGASLGSVSNGGRIRCMHVWPIEGIKKYETLSYLPPVSTEALLKAVDYLIRSKWEHSLEISRVGFILREHNASSGYYDGRYWTMWKLTMLGCTDATQVIN

SEQ ID NO: 11943 - protein, 411 aa, Mesorhizobium sp. BNC1
MDTQTAISDASFRPATRVASLGVSEILQIGARAAQMKRAGEDVIVLGAGEPDFDTPENVKDAATRAMARGETKYTHLDGSPAMKEAVRHKFLSENRLDFTTDEITVSAGAKQIIYNAFMATLDPGDEVILPAPYWTSYMDVVRICGATPVVVACDAENGFRATAEQIERAITPRTRWLLLNSPSNPSGAAYGAEDYRPILDMLMRNPHVWLMADDIYEHIVYDGFEFVTPLALEPRLRGRTLTINGVSKAYAMTGWRIGYGAGPQPLVKAMSVIQSQSTSNPCSISQAAAIEALTGPQEFLAERRESFRERRDLVVTGLNTIEGIECRVPEGAFYAFAGCGGLLGRRTSDGSEIVSDRDLANYLLKDAKVAVVPGSAFGLSPFFRISYATSKSELTEALRRIGEACRRLVS

SEQ ID NO: 11944 - protein, 444 aa, Yersinia pestis KIM
MGLVKQGARVAVIERYNNVGGGCTHWGTIPSKALRHAVSRIIEFNQNPLYSDNARTIKSSFADILNHADRVINQQTRMRQGFYDRNHCHMFSGDASFIDANTVNVRYADGTSDTLQADNIVIATGSRPYRPVNVDFNHERIYDSDTILQLSHEPQHVIIYGAGVIGCEYASIFRGLSVKVDLINTRDRLLAFLDQEMSDALSYHFWNNGVVIRHNEEFEQIEGTTDGVIVHLKSGKKVKADCLLYANGRTGNTSGLGLENIGLEADSRGLLKVNSMYQTALSHVYAVGDVIGYPSLASAAYDQGRIAAQAMIKGEANVHLIEDIPTGIYTIPEISSVGKTEQELTAMKVPYEVGRAQFKHLARAQIVGMDTGSLKILFHRETKQILGIHCFGERAAEIIHIGQAIMEQKGEGNTLEYFVNTTFNYPTMAEAYRVAALNGLNRLF

SEQ ID NO: 11945 - protein, 97 aa, Saccharomyces cerevisiae
MSEPAQKKQKVANNSLEQLKASGTVVVADTGDFGSIAKFQPQDSTTNPSLILAAAKQPTYAKLIDVAVEYGKKHGKTTEEQVENAVDRLLVEFGKEI

SEQ ID NO: 11946 - protein, 312 aa, Triticum aestivum
MAATATKLSSGHEMPAVGLGVWRMDSAAVRGLIHSALRAGYRHFDCAADYKNEAEVGDALAEAFETGLVKREDLFITTKLWNSDHGHVVEACKDSLKKLRLDYLDLYLIHFPVATKHTGVGTTGSALGDDGVLDIDTTITLETTWHAMEDLVSMGLARSIGISNYDIFLTRDCLAYAKIKPAVNQIETHPYFQRDSLVKFCQKHGISVTAHTPLGGSTANTEWFGSVSCLDDPVIKSLAEKYGKTPAQLVLRWGLQRNTVVIPKTSKVERLEENFAVFDFDISIEDMEKIKALDRNYRTNQPAKFWGINLYA

SEQ ID NO: 11947 - protein, 230 aa, Methanosarcina acetivorans C2A
MVSLDEAVTARLKRGSKHFEVLVEPEGALAYKRGEEVNLEDILAVETIFEDANRGDRAAESDILNSFETTDPFEIAAVILKSGELQLTAEQRKRMLEEKKKKVIYTISRNAINPQTRAPHPPARIERAMEEAKVHIDPLKSVDQLVTITMKAIRPLIPIRFEEINIAVKIPPEYAPKAYGDISKVGTITKEEWQGDGSWIAVVRIPAGVQTDFYALINHLTKGEAQTKLL

SEQ ID NO: 11948 - protein, 137 aa, Zea mays
  unsure (1)..(137): unsure at all Xaa locations
MTNLCQTTVEIVQRVPTVGDDLIGTNLFMVSNSVYETTXPALVLXVNQIGSVTESVEADNMDKRSGWXVMAGHRXSXTHDTFIADLSGGLSTVHITMGAAXRSERMAKYNLLLRIXEELGDASVYAGAKFRSPVQPY

SEQ ID NO: 11949 - protein, 515 aa, Lycopersicon esculentum
MAKISRLFGSTVKAAITAQAGFHGKRIPAVSSLQEHIVKSTPARYNSTQACLENDISGTDNKGFKGHDMLAPFTAGWQSTDVDPLIIEKSEGSHVYDMQGRKYIDTLAGLWCTALGGNEPRLVDAATKQLNTLPFYHSFWNRTTKPSLDLAKELLDMFTAKKMAKAFFTNSGSEANDTQVKLVWYYNNALGRPNKKKFIARAKAYHGSTLISASLTGLPALHQNFDLPAPFVLHTDCPHYWRYHLPGETEEEFSTRLAKNLEDLILKEGPETIAAFIAEPVMGAGGVIPPPATYFDKIQAVVKKYDILFIADEVICAFGRLGTMFGSDMYNIKPDLVTLAKALSSAYMPIGAVLVSPEVSDVIHSQSNKLGSFSHGFTYSGHPVACAVALEAIKIYKERNMVERVNRISPKFQEGLKAFSDSPIIGEIRGLGLILATEFANNKSPNDHFPPEWGVGAYFGAQCQKNGMLVRVAGDTIMMSPPFVVTPEELDELIRIYGKALRETEKRVEELKSQK

SEQ ID NO: 11950 - protein, 458 aa, Lycopersicon esculentum
MAKTNGFMGHDMLAPFTAAWMIDMGPLVIDKAEGSYVYGVNGKKYLDSLSGLWCTVLGGSEPRLIEAASKQLNKSAFYHSFWNRTTKPSLDLAKELINMFTANKMGKVFFTSSGSEANDTQVKLVWYYNNAIGRPNKKKIISRKNAYHGSTYMTAGLSGLPSLHLKFDLPPPYILHTDCPHYWNYHLPGETEEEYSTRLANNLENLILKEGPETVAAFIAEPVMGGAGVIIPPATYFEKIQAVLKKYDILFIADEVICGFGRLGTMFGCDKYNIKPDLVSIAKALSGGYIPIGAVLVSEEISKVIMSQSNQLGVFCHGFTYSGHPVACAVALEALKIYKEKNITEVVNKLSPKLQEGLKAFIDSPIIGEIRGTGLVLSTEFVDNKSPNDPFPPEWGVGTYFGSQCQKHGMLVSFSGDHVNMAPPFTLSLEELDEMISIYGKALKDTEKRVEELKSQKK

SEQ ID NO: 11951 - protein, 498 aa, Micrococcus luteus
TTPHATGSTRQNGAPAVSDRQSLTVGSEGPIVLHDTHLLETHQHFNRMNIPERRPHAKGSGAFGEFEVTEDVSKYTKALVFQPGTKTETLLRFSTVAGELGSPDTWRDVRGFALRFYTEEGNYDLVGNNTPIFFLRDPMKFTHFIRSQKRLPDSGLRDATMQWDFWTNNPESAHQVTYLMGPRGLPRTWREMNGYGSHTYLWVNAQGEKHWVKYHFISQQGVHNLSNDEATKIAGENADFHRQDLFESIAKGDHPKWDLYIQAIPYEEGKTYRFNPFDLTKTISQKDYPRIKVGTLTLNRNPKNHFAQIESAAFSPSNTVPGIGLSPDRMLLGRAFAYHDAQLYRVGAHVNQLPVNRPKNAVHNYAFEGQMWYDHTGDRSTYVPNSNGDSWSDETGPVDDGWEADGTLTREAQALRADDDDFGQAGTLVREVFSDQERDDFVETVAGALKGVRQDVQARAFEYWKNVDATIGQRIEDEVKRHEGDGIPGVEAGGEARI

SEQ ID NO: 11952 - protein, 228 aa, Agrobacterium tumefaciens str. C58
MGRKLLAEFFGTFWLVFGGCGSAVFAAAFPELGIGFTGVALAFGLTVLTMAYAVGGISGGHFNPAVSVGLTVAGRFPASSLVPYVIAQVAGAIVAAAALYVIATGKAGIDLGGFASNGYGEHSPGGYSLVSALLIEIILTAFFLIVILGSTHGRVPAGFAPIAIGLALTLIHLISIPVTNTSVNPARSTGQALFVGGWALQQLWLFWLAPIVGGAAGAVIWKLFGEKD

SEQ ID NO: 11953 - protein, 414 aa, Arabidopsis thaliana
MENGATTTSTITIKGILSLLMESITTEEDEGGKRVISLGMGDPTLYSCFRTTQVSLQAVSDSLLSNKFHGYSPTVGLPQARRAIAEYLSRDLPYKLSQDDVFITSGCTQAIDVALSMLARPRANILLPRPGFPIYELCAKFRHLEVRYVDLLPENGWEIDLDAVEALADENTVALVVINPGNPCGNVYSYQHLMKIAESAKKLGFLVIADEVYGHLAFGSKPFVPMGVFGSIVPVLTLGSLSKRWIVPGWRLGWFVTTDPSGSFKDPKIIERFKKYFDILGGPATFIQAAVPTILEQTDESFFKKTLNSLKNSSDICCDWIKEIPCIDSSHRPEGSMAMMVKLNLSLLEDVSDDIDFCFKLAREESVILLPGTAVGLKNWLRITFAADATSIEEAFKRIKCFYLRHAKTQYPTI

SEQ ID NO: 11954 - protein, 520 aa, Lycopersicon esculentum
MAKITSLIGSGIVAATNQVGPHVKHIPAVGNLQKQIVSDQIQVRWSSTETSLKNDISATDVRGYKGHDMLAPFTAGWHSTDLEPLVIQKSEGSYVYDVNGKKYLDALAGLWCTSLGGNEPRLVAAATKQLNELAFYHSFWNRSTKPSLDLAKELLDLFTANKMAKAFFTNSGSEANDTQVKLVWYYNNALGRPDKKKFIARTKSYHGSTLISASLSGLPALHQQFDLPAPFVLHTDCPHFWRFHQPGETEEEFSTRLANNLENLILKEGPETIAAFIAEPVMGAGGVIPPPATYFEKVQAILKKYDILFIADEVICGFGRLGTMFGCEKYNIKPDLVSVAKALSSGYMPIGAVLVSPEVSDVIYSQSNKLGTFSHGFTYSGHPVSCAVALETLKIYKERNIIEQVNRISPKFQEGLKAFSDSPIIGEIRGTGLLHGTEFTDNKSPNDPFPPEWGIGAYFGARCEKHGVLVRVAGDNIMMSPPYILSLEEIDELIIKYGKALKDTENRVEELKSQKKIKSS

SEQ ID NO: 11955 - protein, 255 aa, Thermoanaerobacter tengcongensis
MNFKDKVVIVTGGGQGIGRCIAQTFASKGAKVVIAEIDDEAGLENEEYIRKNGGEALFVHTDVALEEDVKNMVNKTIETYGKIDILINNAGIGSGGTIYTRPMEEWDRVINVNLKGAYMCAKYVAPHMRDNGGGVIINIASTRAFMSEPHTEPYSASKGGLIALTHSLAISLAYDKIRVNSISPGWIEVSEWKKSREAKKPELTEQDHLQHPAGRVGKPEDVANACLFLCSEEASFITGANLIVDGGMTVKMIYL

SEQ ID NO: 11956 - protein, 247 aa, Methanosarcina acetivorans C2A
MAPQMGYDRAITVFSPDGRLFQVEYAREAVKRGTTAVGIKAADGVVLLVDKRITSRLVEAESIEKIFQIDEHIGAATSGLVADARSLVDRARVEAQVNRVSYDEPIGVEVISKKICDHKQTYTQYGGVRPYGTALLIAGVDDNKPRLFETDPSGALLEYKATAIGAGRNAVVEVFEADYREDMNMDAAILLGMDALYKAAEGKFDAGTLEVGVVSLEDKKFRKLGPEEVENYVQQILEKHKGTESSE

SEQ ID NO: 11957 - protein, 1442 aa, Saccharomyces cerevisiae
MTASDLLTLPQLLAQYSSSAPQNKVFYTTSTKNSHSSFKGLESVATDATHLLNNQDPLNTIKDQLSKDILTTVFTDETTLVKSIHHLYSLPNKLPLVITVDLNLQDYSAIPALKDLSFPILISSDLQTAISNADSSYKIATSSLTPVFHFLNLEKIGTSTAIEQDIDFPTLEIANEETKVALSEATDSLTNFELVKGKESITTVIVNLSPYDAEFSSVLPSNVGLIKIRVYRPWNFSKFLEILPSSVTKIAVLQGVSKKSQSNEFQPFLLDFFGNFNELVSRNIEQVVLTNIGNVNDYGNVINTVISNINKKEPDNNLFLGESNEKAEEQAEVTQLISSVKKVVNLEDAYIKVLKQLFSSNLQILNQFSSETIEPSNPEFGFGRFLKQEAQREELISLAKTSLDPSLYLSEDANKIVQLLSKWLSFNGRDLDEAQLQEANATGLEIFQLLQSNQDSSTVLKFLKIAPTSDSFIFKSSWLIGSDAWSYDLGHSGIQQVLSSRKNINVLLIDSEPYDHRKQNQDRKKDVGLYAMNYYSAYVASVAVYASYTQLLTAIIEASKYNGPSIVLAYLPYNSENDTPLEVLKETKNAVESGYWPLYRFNPVYDDPSTDKEAFSLDSSVIRKQLQDFLDRENKLTLLTRKDPSLSRNLKQSAGDALTRKQEKRSKAAFDQLLEGLSGPPLHVYYASDGGNAANLAKRLAARASARGLKATVLSMDDIILEELPGEENVVFITSTAGQGEFPQDGKSFWEALKNDTDLDLASLNVAVFGLGDSEYWPRKEDKHYFNKPSQDLFKRLELLSAKALIPLGLGDDQDADGFQTAYSEWEPKLWEALGVSGAAVDDEPKPVTNEDIKRESNFLRGTISENLKDTSSGGVTHANEQLMKFHGIYTQDDRDIREIRKSQGLEPYYMFMARARLPGGKTTPQQWLALDHLSDTSGNGTLKLTTRATFQIHGVLKKNLKHTLRGMNAVLMDTLAAAGDVNRNVMVSALPTNAKVHQQIADMGKLISDHFLPKTTAYHEVWLEGPEEQDDDPSWPSIFENRKDGPRKKKTLVSGNALVDIEPIYGPTYLPRKFKFNIAVPPYNDVDVLSIDVGLVAIVNPETQIVEGYNVFVGGGMGTTHNNKKTYPRLGSCLGFVKTEDIIPPLEGIVIVQRDHGDRKDRKHARLKYTVDDMGVEGFKQKVEEYWGKKFEPERPFEFKSNIDYFGWIKDETGLNHFTAFIENGRVEDTPDLPQKTGIRKVAEYMLKTNSGHFRLTGNQHLVISNITDEHVAGIKSILKTYKLDNTDFSGLRLSSSSCVGLPTCGLAFAESERFLPDIITQLEDCLEEYGLRHDSIIMRMTGCPNGCSRPWLGELALVGKAPHTYNLMLGGGYLGQRLNKLYKANVKDEEIVDYIKPLFKRYALEREEGEHFGDFCIRVGIIKPTTEGKYFHEDVSEDAY

SEQ ID NO: 11958 - protein, 407 aa, Pseudomonas putida
MAIEIKAPTFPESVADGTVATWHKQPGEAVKRDELIVDIETDKVVLEVLATADGVLGAIVKGEGDTVLSDEVLGSIVEGGAAAAAPAAAPAAAAPAAAAADAGEDDPIAAPAARKLAEENGIDLAAVTGTGKGGRITKEDVVAAVANKKSAPAAAPAAKPAAAAAAPVVVAAGDRTEKRVPMTRLRAKIAERLVEAQSSMAMLTTFNEVDMTEVMALRSKYKDLFEKTHNGVRLGFMSFFVKAATEALKRFPAVNASIDGNDIVYHGYADVGVAVSSDRGLVVPVLRNAESMSLAEIENGIATFGKKARDGKLAIEEMTGGTFTITNGGTFGSMMSTPIVNPPQAAILGMHNIIQRPMAINGQVVIRPMMYLALSYDHRLIDGKEAVTFLVTIKNLLEDPSRLLLDI

SEQ ID NO: 11959 - protein, 990 aa, Synechocystis sp. PCC 6803
MVAQIDSQQQYEQATQAIAKELLAQTREKRSLWDKIGDNLRLDDKLLDWTMGHPGLRVQLFKFIDCLPALQSNSEIANHLQQYMSEEEVELPEALKKLLNFADAHSTPAQIAAGTVSKATEQLAFKYIAGETIAQVIKTVERLRKEKMGFTIDLLGEAVITESEAAEYWQNYLDLMAQLSQQAKSWSKVPQIDQADGEILPQVQVSVKLTAFYSQFDPLDPAGSKAKVCERIRELLRRAQELGVAVHFDMEQYHYKDLILNILKELLVEEEFRSRTDVGITMQAYLRDSTEDLEALIPWAKHRGYPVTVRLVKGAYWDQETIKAQQNHWQIPVYVEKAQTDANYERMTRLLLENHEYLYAAIGSHNVRSQALACAIAEELNIPKRRYEMQILYGMGEPLARAIVKRGHRVRVYAPYGRLLPGMAYLIRRLLENTANSSFLRQNLEERPIEELIAPPQVKGINDLPTKGYGNAPDTDYADADLRQQAFQALTRVKQQLGKTYLPYINGEYVETANYIDSVNPCRPSQAIGKVGLISVEQADHALEIAKAAFPAWKKTPVRERCGILRKAADIMEERRHELNAWICLEVGKIIPQADAEVSEAIDFCRYYADEMERLDQGVNLDIPGETNRYFYQPRGIALVISPWNFPMAIAVGMTVAALVTGNCTLLKPAETSTVIAAKIAEILIAAGVPPGVFQYVPGKGSVVGSHMVNHPDVHLIAFTGSREVGCRIYADAALVQPGQKHLKRVIAEMGGKNAIIVDESADLDQAVAGAVYSAFGYTGQKCSACSRVVVLSPVHDAFVERFVEATRSLNVGPTDDPSTQVGPVIDAKAQARIQEYIEQGKAECELAIACDAPSEGYFVGPTVFKNVDRHATIAQEEIFGPVVTIIRAANFDEALEIANGTDYALTGGLYSRTPDHINRAAAEFEVGNLYINRTITGAIVSRQPFGGFKMSGVGSKAGGPDYLLQFLEPRHVTENIQRQGFAPIEGADQ

SEQ ID NO: 11960 - protein, 628 aa, Neisseria polysaccharea
SPNSQYLKTRILDIYTPEQRAGIEKSEDWRQFSRRMDTHFPKLMNELDSVYGNNEALLPMLEMLLAQAWQSYSQRNSSLKDIDIARENNPDWILSNKQVGGVCYVDLFAGDLKGLKDKIPYFQELGLTYLYLMPLFKCPEGKSDGGYAVSSYRDVNPALGTIGDLREVIAALHEAGISAVVDFIFNHTSNEHEWAQRCAAGDPLFDNFYYIFPDRRMPDQYDRTLREIFPDQHPGGFSQLEDGRWVWTTFNSFQWDLNYSNPWVFRAMAGEMLFLANLGVDILRMDAVAFIWKQMGTSCENLPQAHALIRAFNAVMRIAAPAVFFKSQAIVHPDQVVQYIGQDECQIGYNPLQMALLWNTLATREVNLLHQALTYRHNLPEHTAWVNYVRSHDDIGWTFADEDAAYLGISGYDHRQFLNRFFVNRFDGSFARGVPFQYNPSTGDCRVSGTAAALVGLAQDDPHAVDRIKLLYSIALSTGGLPLIYLGDEVGTLNDDDWSQDSNKSDDSRWAHRPRYNEALYAQRNDPSTAAGQIYQGLRHMIAVRQSNPRFDGGRLVTFNTNNKHIIGYIRNNALLAFGNFSEYPQTVTAHTLQAMPFKAHDLIGGKTVSLNQDLTLQPYQVMWLEIA

SEQ ID NO: 11961 - protein, 326 aa, Eremothecium gossypii
MSVNYEQVNVAPLVLLSVLDHYKRMNTPDNKRCVGVLLGDNSGSTIKVTNSFALPFEEDEKNPDVWFLDHNYIENMNDMCKKINAKEKMIGWYHSGPKLRSSDLKINGLFKKYTQGNSLLLIVDVKQQGVGLPTDAYMAIEEVKDDGSSTERTFVHLPTAIEAEEAEEIGVEHLLRDVRDQAAGNLSLRLTNQLKSLQGLQRKLRDIVAYLDKVNSGQLPANHIILGKLQDVFNLLPNLGSPDEEAPATKKDDVLASSNTLQKALTVKTNDELMVIYISNLMRAIIAFDNLIENKIKNKKLQEAKRDPEPEEATKEEIQQQESAKA

SEQ ID NO: 11962 - protein, 259 aa, Digitalis grandiflora
MSSKPRLEGKVVIITGAASGIGEEAARLFVEHGASVVVADVQDELGHQVVASVNSDDKISYHHCDVRDEKQVAATVRYAVEKYGRLDVMMSNAGVFGALMTNVIDLDMVDFENVLATNVRGVANTIKHAARAMVEGKVKGSIICTASVSASLGGMGPPAYTASKHAVLGLVKAACAELGVHGIRVNSVAPYGVATPMPCSAYGMTPSQMEDANSSRANLKGVVLKAKHVAEAALFLASDESAYVSGQNLAVDGGFTVVR

SEQ ID NO: 11963 - protein, 387 aa, Pseudomonas sp. 'TAC II 18'
MTVLKMTDLDLQGKRVLIREDLNVPVKDGVVTSDARILASLPTIKLALEKGAAVMVCSHLGRPTEGEFSAENSLKPVADYLSKALGREVPLVSDYLNGVDVKAGDIVLFENVRFNKGEKKNADELAKQYAALCDVFVMDAFGTAHRAEGPTHGVAKFAKVAAAGPLLAAELDALGKALGAPAKPMAAIVAGSKVSTKLDVLNSLSQICDLLIVGGGIASTFLAAAGHPVGKSLYEPDLLDTARAIAAKVNVPLPTDVVVAKEFAESAEATVKLIADVAADDMILDIGPQTAEHFAQLLKTSKTILWNGPVGVFEFDQFGNGTKVLAKAIADSAAFSIAGGGDTLAAIDKYGVADQISYISTGGGAFLEFVEGKVLPAVEVLESRAKA

SEQ ID NO: 11964 - protein, 522 aa, Oryza sativa
ISTMQFSSVFPLEGKACVSPIRRGGEGSASDRLKIGDSSSIKHDRAVRRMCLGYRGTKNGAQCVLTSDAGPDTLHVRTSFRRNFADPNEVAAVILGGGTGTQLFPLTSTRATPAVPIGGCYRLIDIPMSNCFNSGINKIFIMTQFNSASLNRHIHRTYLGGGINFTDGSVEVLAATQMPGEAAGWFQGTADAVRKFIWVLEDYYKHKAIEHILILSGDQLYRMDYMELVQKHVDDNADITLSCAPVGESRASDYGLVKFDSSGRVIQFSEKPKGTDLEAMKVDTSFLNFAIDDPTKFPYIASMGVYVFKRDVLLNLLKSRYAELHDFGSEILPRALHEHNVQAYVFADYWEDIGTIRSFFDANMALCEQPPKFEFYDPKTPFFTSPRYLPPTKSDKCRIKDAIISHGCFLRECTIEHSIVGVRSRLNSACELKNTMMMGADLYETEDEISRLLSEGKVPIGVGENTKINNCIIDMNARVGRNVVITNSEGVQESDRPEEGYYIRSGIVVILKNATIKDGKVI

SEQ ID NO: 11965 - protein, 396 aa, Ralstonia metallidurans CH34
MFDSILDWAANGLANWSWWEIVIYTLVMTHITIAGVTIFLHRCMAHRSLDLHPIAQHFFRFWLWMTTGMVTKEWTAIHRKHHAKCETEDDPHSPQTRGIRKVLLEGAELYRAEAKNKETITKFGHGTPDDWIERNLYSRFSWQGVALMLIIDLALFGLVGMSVWAVQMLWIPIHAAGIINGLGHYWGYRNYDCEDASTNVSPWGFIIGGEELHNNHHTYPTSAKFSIKWYEIDVGWWYIRAMQSVGLAKVKKIPPKARLVEARPVDHNTLEAIIANRYDVMARYAKTLKSAYKDELRKHKEGNTPEYSSFKPARKWFHREETKLAAPQRQQLATIVEQNKMLSTFVEMRRELAVIWGRSNLTREQLLAQLQAWCHRAEASGIQALQEFSLRLRRYA

SEQ ID NO: 11966 - protein, 390 aa, Thermus thermophilus HB27
MRTLLDLDPKGKRVLVRVDYNVPVQDGKVQDETRILESLPTLRHLLAGGASLVLLSHLGRPKGPDPRYSLAPVGEALRAHLPEARFAPFPPGSEEARREAEALRPGEVLLLENVRFEPGEEKNDPELSARYARLGEAFVLDAFGSAHRAHASVVGVARLLPAYAGFLMEKEVRALSRLLKDPERPYAVVLGGAKVSDKIGVIESLLPRIDRLLIGGAMAFTFLKALGGEVGKSLVEEDRLDLAKDLLGRAEALGVRVYLPEDVVAAERIEAGVETRVFPARAIPVPYMGLDIGPKTREAFARALEGARTVFWNGPMGVFEVPPFDEGTLAVGRAIAALEGAFTVVGGGDSVAAVNRLGLKDRFGHVSTGGGASLEFLEKGTLPGLEVLEG

SEQ ID NO: 11967 - protein, 359 aa, Agrobacterium tumefaciens str. C58
MEEYSHADDGATNEARLQRRLTQLKGAQPGYEAAAFLAAIVESSDDAIISKSLQGIITTWNLSAERLFGYSADEAVGRPITMLIPEDRLDEEPAILARINAGERVDHFETVRRRKDGTLIDISLTISPIRAGDGTIIGASKIARDISERKRAAEHQDMLLREMHHRVKNLFTITGSIITLAARTAQTPAELADGMKNRLIALSHAHQLTLPSFSGGESPSERSTTLFNLLSNLLSPFADKDAGRWHLHGEDPHISAERVTSLALLFHEYATNAVKYSALSVADGRLDVTLTPGPDCFEIAWLESNARTTAAGKTKEADFGTTLENMLVRTLNAQVSRDWQRQGLLIRLTLPRNVFSLPS

SEQ ID NO: 11968 - protein, 109 aa, Triticum aestivum
REAAIYDRQIRLWGLDAQQRIGKAHILIASVRALSNEVCKNLALAGVASITLLDHEIVKEHDLGSQFLLHEDDIGKNRAESAARNIQLLNPRVHVYVDTEDISEKPDSY

SEQ ID NO: 11969 - protein, 499 aa, Mesorhizobium sp. BNC1
MKSLEGSRQELFIGGRFRAPSSGRFIPSFDPTTGEVWYEFAEADAADVDAAVTSATKAFHNPAWRRMTQTDRGKLIRRLAELVLEHADELALMETRDNGKLIKEMMAQMRAMPDSYIYFAGMADKLQGDTIPVNKLDSLNYSQREPLGVVGMITPWNSPLMLLTGTLAPCLAIGNTVVVKPSEHATASTLALAELVVEAGIPEGVVNVVTGTGAVTGEALTRHPGLAKIVFTGSTATGRRIAANAAENLIPCQMELGGKSPHVVFSDVDIERAVNGVVSGIFAAAGQTCVAGSRCFVEANIYDRFLEALVERTRHIRVGHPMEESTDVGPLAMKSQLEKIEGYVASGARDGAKIAVGGRRPKDGDLARGWYFEPTVMADARNDMKFMRDELFAPVVGVMPFRDEAEMITLANDTEYGLASGIWTRDIDRAMRFASQIDAGTVWINTYRSAAYMSANGGFKNSGYGRRGGFDVMREFSRSKNVLIDYSGAMQDPFVIRLK

SEQ ID NO: 11970 - protein, 369 aa, Oryza sativa
MGKGGKGAEAAAAAVAGAGEEENMAAWLVAKNTLKIMPFKLPPVGPYDVRVRMKAVGICGSDVHYLREMRIAHFVVKEPMVIGHECAGVIEEVGSGVTHLAVGDRVALEPGISCWRCRHCKGGRYNLCEDMKFFATPPVHGSLANQIVHPGDLCFKLPENVSLEEGAMCEPLSVGVHACRRADVGPETGVLIMGAGPIGLVTLLAARAFGAPRVVIVDVDEHRLSVARSLGADAAVRVSARAEDVGEEVERIRAAMGGDIDVSLDCAGFSKTVATALQATRGGGKVCLVGMGHNEMTVPLTSAAIREVDVVGIFRYKDTWPLCIEFLRSGKIDVKPLITHRFGFSQEDVEEAFEVSARGRDAIKVMFNL

SEQ ID NO: 11971 - protein, 461 aa, Thermoanaerobacter tengcongensis
MENLHTREYDLAVIGGGPGGYVAAIKAAKKGAKVALFEKDKLGGTCLNRGCIPTKAYARAAEVYGILKKAKEFGFDIQINYFDYAQVVKRKDTIVGELVEGIKALLKANKIEVFNKEAKVDKEKNVIFEGEKIKAKNIIIATGSSPAELPIEGIDSKNVLNSDTILEITSLPKSLCIIGGGVIGMEFAFIMNQFGVEVYVVEMMPNILPSLDKKVSSAVKFAAQKRGIKIYTSSTVEKVEEEGENSVVTIRSGDDIKKISVDKVFVSIGRKLNTSIGPIVDLLEFDKKAIKVDEHMRTNIEGVWAVGDVTGKMMLAHVASSQGEVAVDNIFGKSRTLDYYKIPAAVFTEPEIGYFGYTEEEAKEKFGEIKVGRFDFKHNGRAKTYGETEGFAKIISTEDGEVVGAWVVGSGASELVHIISTACQSGAKAEELKDVVYAHPTKSETIMEAFKDIFKEAIHKI

SEQ ID NO: 11972 - protein, 418 aa, Kineococcus radiotolerans SRS30216
MHAGAVPEPTTGARAVPIFQTTSFVFEDAADAANLFALQKYGNIYSRISNPTVAALEERIASLEGGLGALACASGQAAEFLVFAALAGAGDQIVASNNLYGGTVTQLDVTLRRFGVDTVFVAPEPDAVRAAITEKTRFVFTELVANPSTVIADIRALADVAHEAGIPLVVDATTATPYLCRPIEHGADIVIHSATKFLGGHGTTLGGVVVDAGTFPWDNGKFPAMTEPVASYGGLSWWGNFAEYGFLTKLRSEQLRDIGATLSPHSAFLLLMGVETLPQRMREHVANAKAVAEWLEADERVSWVRYSGLPTHPHHERARRYLPEGPGAVFSFGVVGGRAAGERFIESCQLCSHLANIGDARTLVLHPASTTHQQLSPDQLTAAGVPEDLIRISVGLEDVEDVLWDLDQALTAAVGGNR

SEQ ID NO: 11973 - protein, 831 aa, Rhodobacter sphaeroides f. sp. denitrificans
MTLTRRDLIKAQAAATAAAAAGLPVSALAQPVTGGAEALRIRWSKAPCRFCGTGCGVMVGTRDGQVVATHGDTQAEVNRGLNCVKGYFLSKIMYGEDRLTTPLLRMKDGVYHKEGEFAPVSWDEAFDVMAAQAKRVLKDKGPKAMGMFGSGQWTIWEGYAASKLMRAGFLSNNLDPNARHCMASAATAFMRTFGMDEPMGCYDDFEAADAFVLWGSNMAEMHPILWSRLTDRRLSHEHVRVAVLSTFTHRSMDLADTPIIFRPGTDLAILNYIAHHIISTGRVNRDFVDRHTNFALGATDIGYGLRPEHQLQLIAKGAADAGAMTPTDFETFAALVSEYTLERAAEISGVEPALLEELAELYADPDRKVMSLWTMGFNQHVRGVWANHMVYNLHLLTGKISEPGNSPFSLTGQPSACGTAREVGTFAHRLPADMVVTNPEHRAHAEEIWKLPAGLLPDWVGAHAVEQDRKLHDGEINFYWVQVNNNMQAAPNIDQETYPGYRNPENFIVVSDAYPTVTGRCADLVLPAAMWVEKEGAYGNAERRTHFWHQLVEAPGEARSDLWQLMEFSKRFTTDEVWPEEILAAAPAYRGKTLFEVLFANGSVDRFPVSDVDPDHANHEAALFGFYPQKGLFEEYAAFGRGHGHDLAPFDTYHEVRGLRWPVVEGEETRWRYREGYDPYVKPGEGLRFYGKPDGRAVILGVPYEPPAESPDEEFGFWLVTGRVLEHWHSGSMTLRVPELYKAFPGAVCFMHPEDARSRGLNRGSEVRVISRRGEIRTRLETRGRNRMPRGVVFVPWFDASQLINKVTLDANDPISRQTDFKKCAVKIEAV

SEQ ID NO: 11974 - protein, 429 aa, Mesorhizobium loti MAFF303099
MKDIMKNSAISERKNQSISRGVGMTTQIYADRAENSEIWDVEGRRYIDFSSGIAVVNTGHRHPRVIEAVKAQLDRFTHTCHQVVPYESYVRLAERLNAMLPGKFEKKTIFVTTGAEAVENAIKIARNATGRPAVIAFAGGFHGRTFMGMALTGKVVPYKVGFGAMPGDVYHAPFPVPLHGVSVADSLAALDRLFKADVDPARVAAIIVEPVQGEGGFYEAPREFLTALRKLCDQHGMLLIADEVQTGFARTGKMFAMDHHEVAADITTMAKSLAGGFPLSAVTGRAEIMDAPGPGGLGGTYGGSPIGVAAAHAVLDVIEDEKLCDRANTLGARLKQRLQSIRDDVPEIVDIRGLGFMNAVEFNDVKKGMPSAEIANAIRLKALDKGLILLTCGVYGNVIRFLAPITIQDEVMNEALDILESSIREVCAA

SEQ ID NO: 11975 - protein, 448 aa, Sphingomonas sp. RW5
MSDYDYDLIVIGAGSGGVRAARVAAAHGARVAIVEEYRVGGTCVIRGCVPKKLLIYGAHFAEDLRDARQFGWQVPDCQFDWPTLRDNVLAEVDRLEGLYRNTLGSHGVTILPGRGTIIGPHGVRIAGGQDVTSRMILVATGARPLLPSFDGAEHGISSNEAFHLDDVPRRIAIVGGGYIANEFAGIFNELGSAVTVINRSGQLLRGYDHSVRDRLVEISTRKGIAFRFDASFEKVIKLADGSLSVQLAGEDAFSVDCLMFAIGRVPNSSDLGLEEQGVEIDPLGAIIVDDDGRSTVGSIFAVGDVTNRIQLTPVAIREGQAFADTQFGGKPHRVDYRHVPSAVFSHPPIAFVGLTEQQARDQVGEVKIYTSDFRPMKNVLAKRDERALYKMICDADTDRILGLHMIGPDAPEILQAAAIAVKAGLSKAAFDETIALHPTMAEELVLLR

SEQ ID NO: 11976 - protein, 562 aa, Zea mays
MHLTVMSLSAAVANGAAAYRYDTIQPVARLRFCGLRRKAHRLHSPRYSRHLVAARRSVVVAATAGNGAAASGTFDYDLVIIGAGVGGHGAALHAVEKGLKTAIIEGDVVGGTCVNRGCVPSKALLAVSGRMRELQDEHHMKSLGLQVSSPGYDRQVVADHANNLASKIRSNLTNSMKALGVDILTGIGTIVGKQKVRYGKVGFPDNEITARNIIIATGSVPFVPKGIEIDGKTVFTSDHALKLESVPEWIAIVGSGYIGLEFSDVYTALGSEVTFVEALDQLMPGFDPEIAKLAQRILISPRKIDYHTGVFASKITPAKDGKPVLIELIDAKTKEHKETLEVDAALIATGRAPFTKGLGLENINVVTQQGFVPVDERMQVMDATGNVVPNLYCIGDANGKLMLAHAASAQGISVVEQISGRDNILNHLSIPAACFTHPEISMVGLTEPQAREKADKEGFEISVVKTSFKANTKALAENEGDGLAKMIYRPDTGEILGVHILGLHAADLIHEASNAIALGTHVQDIKFAVHAHPTLSEVLDELFKAAKVNTAGSHSMNEPVAV

SEQ ID NO: 11977 - protein, 259 aa, Digitalis purpurea
MSSKPRLDGKVAIITGAASGIGEEAARLFVEHGASVVVADVQDELGRQVVASVNSDDKISYHHCDVRDEKQVEATVRYAVEKYGRLDVMVSNAGVFGALMTTVIDLDMVDFENVLATNVRGVANTIKHAARAMVEGNVKGSIICTASVSASLGGMGPPAYTASKHAVLGLVKAACAELGVHGIRVNSVAPYGVATPMPCSAYGMTPSQMEDANCSRANLKGVVLKAKHVAEAALFLASDESAYVSGQNLAVDGGFTVVR

SEQ ID NO: 11978 - protein, 430 aa, ASPERGILLUS NIDULANS FGSC A4
MATNTTLLYDLPPLPAYQLTPRPSLVDGIPDNILALILPVVAYWAVSMFFHVIDVYDLFPQYRLHTPAEVLTRNRASRWDVVRDVVLQQVVQTLAGLILAYFDEQEYIGREEYDVAVWARRIRFVQRGLPYLLALFGLDASGVAANFSRNGHKMLAGAVAGGYYPGATQSIVSSGGIETVVPAFTNWEMSLAAFIYWYFIPALQFTWGICVVDTWQYFLHRAMHLNRWLYVHFHSRHHRLYVPYAYGALYNHPVEGLLLDTVGAGIGFLTSGMTHRQSMWFFTFSTIKTVDDHCGYAFPWDPLQHATTNNAAYHDIHHQSWGIKTNFSQPFFTFWDRLFNTQWKGEVKLRYERSREAAEKKLSEGGMQQDSDMENSSSDFAQPNGEAAVVSPEEPSDRDARTRLRKKTASFSPSVDSLKGVNHGVPSSVL

SEQ ID NO: 11979 - protein, 414 aa, Thermus thermophilus HB27
MDLDAFTLFERHINPGLAGLLRFTGLDRVESHAEGPYVWDTQGKRYLDFLGLYGTLNLGHRHPKVVEAVKRQLDRMPMSVRVLVSEPTARLAAKLAEITPEGLEMVFFGNSGAEAVEAAIKLARAYTGKPGIVTTQGGFHGKTMGALSLTPKPEYQDPARPLLPGVKVVPYGDLKALEAAIDEDTAAVIVEPIQGEGGIRVPPEGYLRGVRELTREKGVLMIADEVQTGLGRTGRLFGVDWEGVAPDLMTLAKALGGGVMPIGACVGRREVFEVFKNNPLFHSSTFGGNPLAAAAALAAIEVTLEEDLPGRALELGRHLMEGLKALKEEHPHLIEDVRGRGLMVGVEFTDADIGALVVAEMAERGVLTAFGLNNPKVVRLEPPLIIGKEHVDEALAVFAEALKATEKALEGLLG

SEQ ID NO: 11980 - protein, 212 aa, Zea mays
  unsure (1)..(212): unsure at all Xaa locations
MMNCDGGGDPVEDFLISGAVDDEDLAIFCDGGLGIEGVNGDACGFEQSNLGKRSRDEPCSSGLKSKACREKMRRDKLNDRFLELSSVMNPGKQAKLDKANILSDAARMVAQLRGEAEKLKESNEKLRENIKDLKEEKNELREEKVRLKVEKDRLEQQVKAMSVAPTGYVPHLPHPASYHPAAFAPFVPPQQAAGNKSAPIPAPFPGXAMWQW

SEQ ID NO: 11981 - protein, 513 aa, Matthiola incana
MTTLILTILLATFLSLFIFFLLRRNRNRNHRLPPGPNPWPIVGNLPHMGPKPHQTLAAMVTTYGPILHLRLGFVNVVVAASKSVAEQFLKIHDANFASRPPNSGAKHIAYNYQDLVFAPYGQRWRMLRKISSVHLFSAKALEDFKHVRQEEIGRLTREVARADTKPVNLGQLVNMCVVNALGREMIGRRLFGDGADHKAEEFRSMVTEMMALAGVFNVGDFVPALDWLDLQGVAGKMKRLHKRFDAFLSSILKEHEINNGGDQKHTDMLTTLISLKGTDFDGDGASITDTEIKALLLNMFTAGTDTSASTVDWAIAELIRHPHIMKRTQEELDAVVGRNRPINESDLSRLPYLQAVIKENFRLHPPTPLSLPHIAAESCEINGYHIPKGSTLLTNIWAIARDPEQWSDPLAFRPERFLPGGEKFGVDVKGSDFELIPFGAGRRICAGLSLGLRTIQLLTATLVHGFEWELAGGVTPEKLNMEETYGITVQRAVPLIVHPKPRLALNVYGVGSG

SEQ ID NO: 11982 - protein, 568 aa, Oenothera mexicana
MASPALISETEAWKDLKAHVEDIKRTHLRELMGDTERCQSMMVEFDNIFLDYSRQQASPDTINKLYKLADAAHLKQKIDRMYNGDHINSTENRSVLHVALRAPRNSAICSDGKNVVPDVWNVLDKIKDFSERVRNGSWVGATGKELKDVIAVGIGGSFLGPLFVHTALQTDPEASKNARGRELRFLANVDPIDAARNISGLDPETTLVVVVSKTFTTAETMLNARTLREWISSALGPSAVAKHMVAVSTNLPLVEKFGIDPNNAFAFWDWVGGRYSVCSAVGVLPLSLQYGFAVVEKFLQGAHNIDQHFSSAPFEKNIPVLLGLLSVWNVSFLGYPARAILPYSQALEKLAPHIQQVSMESNGKGVSIDGLPLPFESGEIDFGEPGTNGQHSFYQLIHQGRVIPCDFIGVVKSQQPVYLKGEVVNNHDELMSNFFAQPDALAYGKTPEQLKKENVSEHLIPHKTFTGNRPSVSILLPTLDAYRIGQLLAIYEHRVAVQGFIWGINSFDQWGVELGKSLATQVRKQLHASRVKGESVEGFNFSTKTLLTRYLEATSDVPAAPSTLLPKI

SEQ ID NO: 11983 - protein, 392 aa, Bacillus subtilis
MEHLLNPKAREIEISGIRKFSNLVAQHEDVISLTIGQPDFFTPHHVKAAAKKAIDENVTSYTPNAGYLELRQAVQLYMKKKADFNYDAESEIIITTGAQAIDAAFRTILSPGDEVIMPGPIYPGYEPIINLCGAKPVIVDTTSHGFKLTARLIEDALTPNTKCVVLPYPSNPTGVTLSEEELKSIAALLKGRNVFVLSDEIYSELTYDRPHYSIATYLRDQTIVINGLSKSHSMTGWRIGFLFAPKDIAKHILKVHQYNVSCASSISQKAALEAVTNGLDDALIMREQYKKRLDYVYDRLVSMGLDVVKPSGAFYIFPSIKSFGMTSFDFSMALLEDAGVALVPGSSFSTYGEGYVRLSFACSMDTLREGLDRLELFVLKKREAMQTINNGV

SEQ ID NO: 11984 - protein, 503 aa, Ajellomyces capsulatus
MGADDTFNSYRYKDTPTYTDSNGCPVMDPESSQRVGENGPLLLQDFHLIDLLAHFDRERIPERVVHAKGAGAYGEFEVLDDISDITTINMLKGVGKKTKLVTRFSTVGGEKGSADSARDPRGFSTKFYTEEGNWDWVFNNTPVFFLRDPSKFPLFIHTQKRNPQTNLKDATMFWDYLSTHQEAIHQVMHLFSDRGTPYSYRHMNGYSGHTFKWLTPDGGFNYVQIHLKTDQGSKTLTNEEATKLAAENPDWHTEDLFRAIERGEYPSWTCYVQVLSPQQAEKFRWNIFDLTKVWPHSEVPLRRFGRLVLNKNPQNYFAEMEQAAFSPSHLVPGVEPSADPVLQSRLFSYPDTHRHRLGVNYQQIPVNCPLRAFNPYQRDGAMAVNGNYGANPNYPSTFRRMNYMPVKASQEHEKWTGAVLAKQLPVTDEDFVQANGLWQVLGRQPGQQANFVKNVAGHLCNAEQKVRKAAYGMFIRVNKDLGSSIESSTEALVASQAQSQPRL

SEQ ID NO: 11985 - protein, 560 aa, Arabidopsis thaliana
MASSTALICDTEAWKDLKGHVEDIKKTHLRDLMSDANRCQSMMMEFDGLLLDYSRQRATVETMDKLLNLAKASQLTEKISRMFNGEHINSTENRSVLHVALRAPKDAVIKADGMNVVPEVWNVLDKIKEFSDKIRSGSWVGATGKPLKDVIAIGIGGSFLGPLFVHTALQTDPEALESAKGRQLRFLANIDPVDVARNISGLNPETTLVVVVSKTFTTAETMLNARTLREWITAALGASAVAKHMVAVSTNLALVEKFGIDPNNAFAFWDWVGGRYSVCSAVGVLPLSLQYGFSMVEKFLKGASSIDQHFQSTPFEKNIPVLLGLLSVWNVSFLGYPARAILPYSQALEKFAPHIQQVSMESNGKGVSIDGLPLPFETGEIDFGEPGTNGQHSFYQLIHQGRVIPCDFIGIVKSQQPVYLKGEVVSNHDELMSNFFAQPDALAYGKTPEQLQKENVSENLIPHKTFSGNRPSLSLLLPELTAYNVGQLLAIYEHRVAVQGFVWGINSFDQWGVELGKVLATQVRKQLHSSRTQGTAPEGFNYSTTTLLKRYLETSSEPQM

SEQ ID NO: 11986 - protein, 498 aa, Pisum sativum
MARKMLNDGEPDLKKGEEQGKVYDFDLFIIGAGSGGVRAARFSSNFGAKVGICELPFHPISSETIGGVGGTCVIRGCVPKKILVYGASYGGELQDARNFGWELNENVDFNWKKLLQKKTDEINRLNGIYKRLLSNAGVKLFEGEGKIASPNEVEVTQLDGTKLSYSAKHILIATGSRAQRPNIPGQELGITSDEALSLEEFPKRAVILGGGYIAVEFASIWRGMGSSVNLVFRKELPLRGFDDEMRAVVARNLEGRGINLHPRTNLAQLIKTEDGIKVITDHGEELIADVVLFATGRSPNSKRLNLEKVGVEFDKAGAIVVDEYSRTNIPSIWAVGDVTNRLNLTPVALMEASLFAKTVFGGQASKPDYNDIPYAVFCIPPLSVVGLSEEQAVEQTKGDVLIFTSTFNPMKNTISGRQEKTVMKLVVDAQTDKVLGASMCGPDAPEIVQGIAIAIKCGATKAQFDSTVGIHPSSAEEFVTMRSETRRVTGGVKPKTNL

SEQ ID NO: 11987 - protein, 355 aa, Streptomyces viridochromogenes
MKALILVGGVGSRLRPITHTSAKQLVPVANRTVLSYVLDSIKEAGISEVGIVVGATAAEIQASVGDGAEFGLDVTYIQQDAPRGLADAVLVSRDFLGDDDFVMYLGDNYVVDGIVDFVADFRRDKPAAQVMLARVADPRRFGVAELDENGRVTAVVEKPQDPRSDLAIVGVYAFSSAVHEAVAGIRPSWRNELEITDALQWLADHGHEVGSTVIDRYWKDVASVTDVLEMNRHLLESLETRIDGEVDEASELVGRVVVEAGAKISGSRIVGPAVIGPDTVVQDSYLGPFTSIEGNCRVAHSEIQYSIVLRGASIEGVARVEDSVIGRETEVNAAPRTSTAHRLVLGDHSRVQVGG

SEQ ID NO: 11988 - protein, 512 aa, Sclerotinia sclerotiorum
MTILVAMGGFIFGYDTGQISGFLEMHVFLQRFGERSSNLVAHPAGYYFTNLSIGTLIGCLVAGPLANRFGRRTCIPPFVIGVVIQMAVGKGEWVGIVMGRWVAGLGVGGLSVLVPMYMAETSPVPVTGAVISCYQLFITIGIFTADCINYGTESFKSTASYRIPMGVGFIWAIILGGGILFLPETPRYNWNHGKPEKAQETMAAFYGVEESHPMIRTEVAEIEKVRAATVGDHPWYEAVTGPRMLYRVSLAMALQMLQQLTGANYFFYYGTTIFAGVGIKNSYVTAMILGGVTVGATFFGVYMARHFRRRECLYIAALWQTMCFLIFASVGQFIFKDAAEGSHTAKTSGTVMIVFAVLFIVGFASTWGPLVWACIGEMFPYRYRAVAMAFATSAKWFWNFMLAFFTPFITQDINYAYGYVFAGCNLAAFFVVFFFLVESSGKTLQEVDAMYLMGVKPIGSHAFQFDSELRESLGTDINTDAMNLETRNGRVQKVNEAGQGGVFHDEGGNVKE

SEQ ID NO: 11989 - protein, 381 aa, Citrobacter freundii
  unsure (1)..(381): unsure at all Xaa locations
MIRAAHIAHLRRESPFDGGMPPTPPTILRERLLAQQQARVEELRHAKYEGILDGNSAITVLHGEARFKDDQSLIVSLNEGGERVVMFDRCLVATGASPAVPPIPGLKESPYWTSTEALASDTIPERLAVIGSSVVALELAQAFARLGSKVTALARNTLFFREDPAIGEAVTAAFRAEGIEVLEHTQASQVAHMDGEFVLTTTHGEIRADQLLVATGRAPNTRSLALETAGVAVNAQGAIVIDKGMRTSSPHXYAAGDCTDQPQFVYVAAAAGTRAAINMTGGDAALDLTAMPAVVFTDPQVATVGYSEAEAHHDGIETDSRPLTLDNVPRALANFDTRGFIKLVIEEGSGRLIGVQAVAPEAGELIQTAVLAIRNRMTVQE

SEQ ID NO: 11990 - protein, 305 aa, Miscanthus sinensis var. sinensis
IESVGEGVTDVAPGDHVLPVFTGECKECPHCKSAESNMCDLPRINTDRGVMIGDGKSRFSINGKPIYHFVGTSTFSEYTVMHVGCVAKINPQAPLDKVCVLSCGISTGLGASINVAKPPKGSTVAIFGLGAVGLAAAEGARIAGASRIIGVDLNPSRFEEAGKFGCTEFVNPKDHKKPVQEVLAEMTNGGVDRSVECTGNINAMIQAFERVHDGWGVAVLVGVPHKDAEFKTHPMNFLNERTLKGTFFGNFKPRTDLPNVVELYMKKELEVEKFITHSIPFAEINKAFDLMAKGEGIRCIIRMEN

SEQ ID NO: 11991 - protein, 529 aa, Sclerotinia sclerotiorum
MLGAIASIGGFMFGYESGQISGFVQMSDFLDRFGENGELSAVRQGTIVAILCAGTLVGCLGSSYLCDTIGRRYTISSSAFFYIIGVIIEITSSTHWVQFAMGRFTAGLGIGALSTSVPMYQSESVPKNIRGAVVSSYQLLITLGIWTAYMINYGTHSAYTNSAQWRIPNGLSALWAIILGTAVLFMPESLALHTVSDVKMKARKNMALLNGVDPYSPLIDSEIQEIEQKLAAEREGGDHPWYEIFTGPRMLYRTLLGMVLQAGQQLTGANFFFYYGTTIFKSGGISDSYVTSIILGTVNVVATIGGLWIVKNCGRRKALMVGAAEMFVCMLIYSFVGHFKIQRQAQCSSPWAVLICFTCIYIVGSATTWGPLVWAIVGELYPARYRASCMALATASNWLFNFLISFFTTFITNDIDYYYGLVFAGSLFALFWIVYFFVIETKDRSLEEIDTMYVLHVNPRTSSTWDPKSLGAEGVKGVDTDGMFLTTGGKDIKKSEMAGRPMLEHDERRFPETAGGAASQEHKPEIMNA

SEQ ID NO: 11992 - protein, 551 aa, Hordeum vulgare subsp. vulgare
MATVRQSDGVAANGLAVAAAANGKSNGHGVAAAVNGKSNGHGVDADANGKSNGHGVAADANGKSNGHAEATANGHGEATANGKTNGHRESNGHAEAADANGESNEHAEDSAANGESNGHAAAAAEEEEAVEWNFAGAKDGVLAATGANMSIRAIRYKISASVQEKGPRPVLPLAHGDPSVFPAFRTAVEAEDAVAAAVRTGQFNCYPAGVGLPAARSAVAEHLSQGVPYMLSADDVFLTAGGTQAIEVIIPVLAQTAGANILLPRPGYPNYEARAAFNRLEVRHFDLIPDKGWEIDIDSLESIADKNTTAMVIINPNNPCGSVYSYDHLSKVAEVAKRLGILVIADEVYGKLVLGSAPFIPMGVFGHITPVLSIGSLSKSWIVPGWRLGWVAVYDPRKILQETKISTSITNYLNVSTDPATFIQAALPQILENTKEDFFKAIIGLLKESSEICYKQIKENKYITCPHKPEGSMFVMVKLNLHLLEEIDDDIDFCCKLAKEESVILCPGSVLGMANWVRITFACVPSSLQDGLGRIKSFCQRNKKRNSSDDC

SEQ ID NO: 11993 - protein, 305 aa, Miscanthus sinensis var. sinensis
IESVGEGVTDVAPGDHVLPVFTGECKECAHCRSAESNMCDLLRINTDRGVMIGDGKSRFSINGKPIYHFVGTSTFSEYTVMHVGCVAKINPQAPLDKVCVLSCGISTGLGASINVAKPPKGSTVAIFGLGAVGLAAAEGARIAGASRVIGVDLNPSRFEEARKFGCTEFVNPKDHKKPVQEVLAEMTNGGVDRSVECTGNINAMIQAFECVHDGWGVAVLVGVPHKDAEFKTHPMNFLNERTLKGTFFGNFKPRTDLPNVVELYMKKELEVEKFITHSIPFAEINKAFDLMAKGEGIRCIIRMEN

SEQ ID NO: 11994 - protein, 551 aa, Hordeum vulgare subsp. vulgare
MATVRQSDGVAANGLAVAAAANGKSNGHGVAAAVNGKSNGHGVDADANGKSNGHGVAADANGKSNGHAEATANGHGEATANGKTNGHRESNGHAEAADANGESNEHAEDSAANGESNGHAAAAAEEEEAVEWNFAGAKDGVLAATGANMSIRAIRYKISASVQEKGPRPVLPLAHGDPSVFPAFRTAVEAEDAVAAALRTGQFNCYPAGVGLPAARSAVAEHLSQGVPYMLSADDVFLTAGGTQAIEVIIPVLAQTAGANILLPRPGYPNYEARAAFNRLEVRHFDLIPDKGWEIDIDSLESIADKNTTAMVIINPNNPCGSVYSYDHLSKVAEVAKRLGILVIADEVYGKLVLGSAPFIPMGVFGHITPVLSIGSLSKSWIVPGWRLGWVAVYDPRKILQETKISTSITNYLNVSTDPATFIQAALPQILENTKEDFFKAIIGLLKESSEICYKQIKENKYITCPHKPEGSMFVMVKLNLHLLEEIDDDIDFCCKLAKEESVILCPGSVLGMANWVRITFACVPSSLQDGLGRIKSFCQRNKKRNSSDDC

SEQ ID NO: 11995 - protein, 512 aa, Schizosaccharomyces pombe
MLNSVIKRSALCRFKFTCLQVSECRPAQIEISKRLYSAKASGNGEYDLCVIGGGPGGYVAAIRGAQLGLKTICVEKRGTLGGTCLNVGCIPSKALLNNSHIYHTVKHDTKRRGIDVSGVSVNLSQMMKAKDDSVKSLTSGIEYLFKKNKVEYAKGTGSFIDPQTLSVKGIDGAADQTIKAKNFIIATGSEVKPFPGVTIDEKKIVSSTGGPYLYQRYPKKMTVLGGGIIGLEMGSVWSRLGAEVTVVEFLPAVGGPMDADISKALSRIISKQGIKFKRSTKLVSAKVNGDSVEVEIENMKNNKRETYQTDVLLVAIGRVPYTEGLGLDKLGISMDKSNRVIMDSEYRTNIPHIRVIGDATLGPMLAHKAEDEGIAAVEYIAKGQGHVNYNCIPAVMYTHPEVAWVGITEQKAKESGIKYRIGTFGFSANSRAKTNMDADGLVKVIVDAETDRLLGVHMIGPMAGELIGEATLALEYGASAEDVARVCHAHPTLSEATKEAMMAAWCGKSIHF

SEQ ID NO: 11996 - protein, 305 aa, Miscanthus sinensis var. sinensis
IESVGEGVTDVAPGDHVLRVFTGECKECPHCKSAESNMCDLLRINTDRGVMIGDGKSRFSINGKPIYHFVGTSTFSEYTVMHVGCVAKINPQAPLDKVCVLSCGISTGLGASINVAKPPKGSTVAIFGLGAVGLAAAEGARIAGASRIIGVDLNPSRFEEARKFGCTEFVNPKDHKKPVQEVLAEMTNGGVDRSVECTGNINATIQAFECVHDGWGVAVLVGVPHKDAEFKTHPMNFLNERTLKGTFFGNFKPRTDLPNVVELYMKKELEVEKFITHSIPFAEINKAFDLMAKGEGIRCIIRMEN

SEQ ID NO: 11997 - protein, 305 aa, Miscanthus transmorrisonensis
IESVGEGVTDVAPGDHVLPVFTGECKECPHCKSAESNMCDLLRINTDRGVMIGDGKSRFSINGKPIYHFVGTSTFSEYTVMHVGCVAKINPQAPLDKVCVLSCGISTGLGASINVAKPPKGSTVAIFGLGAVGLAAAEGARIAGASRIIGVDLNPSRFEEARKFGCTEFVNPKDHKKPVQEVLAEMTNGGVDRSVECTGNINAMIQAFECVHDGWGVAVLVGVPHKDAEFKTHPMNFLNERTLKGTFFGNFKPRTDLPNVMELYMKKELEVEKFITHSVPFAEINKAFDLMAKGEGIRCIIRMEN

SEQ ID NO: 11998 - protein, 305 aa, Miscanthus transmorrisonensis
IESVGEGVTDVAPGDHVLPVFTGECKECPHCKSAESNMCDLLRINTDRGVMIGDGKSRFSINGKPIYHFVGTSTFSEYTVMHVGCVAKINPQAPLDKVCVLSCGISTGLGASINVAKPPKGSTVAIFGLGAVGLAAAEGARIAGALRIIGVDLNPSRFEEARKFGCTEFVNPKDHKKPVQEVLAEMTNGGVDRSVECTGNINAMIQAFECVHDGWGVAVLVGVPHKDAEFKTHPMNFLNGRTLKGTFFGNFKPRTDLPNVVELYMKKELEVEKFITHSIPFVEINKAFDLMAKGEGIRCIIRMEN

SEQ ID NO: 11999 - protein, 586 aa, Ginkgo biloba
MITVRSIPCSFSKDTVQFIGFRKVLTVRNVVSCGVSSSFRLPGSKFFPRCESSSTERATKSNRTLLDNASNFLTNLLSGGQLGTMPIAEGAVSDLFGKPLFFSLYDWFIEHGSVYKLAFGPKSFVVVSDPIVVRHILRENAFAYDKGVLADILEPIMGKGLIPADLGTWKPRRKAIVPGFHAAFLEAMVKVFGDCSERTINKLQSLLLAAEADKTMHIDVDMEAEFSNLALDIIGLSVFNYDFGSVTRESPVIKAVYGTLFEAEHRSTFYIPYWKFPLARWLVPRQRKFHEDLKIINECLDSLIQGAKETRQEDDIEALQGRDYSKVKDASLLRFLVDMKGVDVDNGQLRDDLMTMLIAGHETTAAVLTWALFLLAQNTDKLVKAQAEIDTILDQRKPTFEDIKRLQYIRLIIAEALRLYPQPPLLIRRALRQDTIPGGYRGDKDGYLIPKGTDIFISVYNLHRSPYFWDQPHEFRPERFLIPKDNKGIEGWAGFDPYRSQGALYPNEVLADFAFLPFGGGPRKCVGDQFALMESTVGLAMLLQKFEVELKDPPESLRIVTGATIHTQNGLWCKIKRRKHYSESLQ

SEQ ID NO: 12000 - protein, 220 aa, Glycine max
  unsure (1)..(220): unsure at all Xaa locations
IGSPRHYVLVHGACHGAWRWYKLKPRLESAGHKVTVLNHAASGINMKKIEDVDTFSEYTEPLLQLLDTIPSNEKVVLVGHSLGGMSIAIAMEKFPEKVAVGVFLAAFAPDVEHRPSYVLEKYNERTPSEEWLDTEFCQCGNKTLIVCGPKFLSYKLYQLCPIEDLELAMTWARPSSYVIEDLSKEKKXAPNEEYGSIPRVYIVVLRPWNPLNTHTDESKG

SEQ ID NO: 12001 - protein, 272 aa, Bacillus cereus ATCC 10987
MDKQIGFIGCGNMGMAIIGGMLNKKIVSSNKIMCSDLNTTNLENASEKYGITITTDNNEVAKNADILILSIKPDLYPLVINEIKEVIKNDAIIVTIAAGKSIESTENAFNKKLKVVRVMPNTPALVGEGMSALCPNEMVTEKDLEDVLNIFNSFGQSEIVSEKLMDVVTSVSGSSPAYVYMIIEAMADAAVLDGMPRNQAYKFAAQAVLGSAKMVLETGIHPGELKDMVCSPGGTTIEAVATLEEKGLRTAIISAMQRCTQKSVELSGQTKK

SEQ ID NO: 12002 - protein, 244 aa, Crocus sativus
MGRGRVELKRIENTINRQVTFSKRRGGLLKKANEISVLCDADVAIIIFSTKGKLSEYSTDARMESILERYDRYSCAERDIVAPDPDSQESWRDEYGRLKAKLEALQTSQRHLMGAQLDMLSAKELQQLEQQLENALKNIRSRKNQLLFDSISELLKKEKTLTTQNKDMEMKLIEKKKVKSMARQGQQYTESSSPPSLLIQDPFPSLTIGINPASGSSEEDNEARLLPPVNRNRLPPWMVRSANE

SEQ ID NO: 12003 - protein, 524 aa, Deinococcus radiodurans
MTQPNPTQPSPTQQNHDLARQLRESRLSRGLQHFIGGEWVDAHSGKTFDAHSPVDNDFLVKVAEGDASDIDRAAKAAHDAFQTWREVSGAERRKILHKVADLIEKRAQEIAVLESVDTGQAIRFMKSAAARGAENFRFYADRAPGAQDGQSLPAPGFINYSIRQPIGPVGVITPWNTPFMLSTWKIAPALAAGCTVVHKPAEWSPVSATLLTEIMDEAGLPGGVHNLVHGFGESAGKSLTEHPLVKAVAFVGETTTGSHIMRQGADTLKRVHFELGGKNPVVVFDDADLDKALDAVVFMIYSLNGERCTSSSRVLIQEGIYDEFTRRIAERAANIRVGDPLDPDTEVGPLVHPRHFEKVMSYFECARQEGATIAAGGERVGEAGNFVRPTLFTAARNDMKIAQEEIFGPVLTAIPFKDEADALELANDVNYGLAGYLWTNDLTRAHRFAHGLEAGMIWVNSENVRHLPTPFGGVKNSGIGRDGGDYSFEFYMETKNIAISLGTHKTAKLGVGQAPAVGKKEAGE

SEQ ID NO: 12004 - protein, 461 aa, Hordeum vulgare subsp. vulgare
MVHQSNGHGEAAAAAANGKSNGHAAAANGKSNGHAAAAAVEWNFARGKDGILATTGAKNSIRAIRYKISASVEESGPRPVLPLAHGDPSVFPAFRTAVEAEDAVAAALRTGQFNCYAAGVGLPAARSAVAEHLSQGVPYKLSADDVFLTAGGTQAIEVIIPVLAQTAGANILLPRPGYPNYEARAAFNKLEVRHFDLIPDKGWEIDIDSLESIADKNTTAMVIINPNNPCGSVYSYDHLAKVAEVARKLGILVIADEVYGKLVLGSAPFIPMGVFGHIAPVLSIGSLSKSWIVPGWRLGWVAVYDPTKILEKTKISTSITNYLNVSTDPATFVQEALPKILENTKADFFKRIIGLLKESSEICYREIKENKYITCPHKPEGSMFVMVKLNLHLLEEIHDDINFCCKLAKEESVILCPGSVLGMENWVRITFACVPSSLQDGLERVKSFCQRNKKKNSINGC

SEQ ID NO: 12005 - protein, 416 aa, Ralstonia metallidurans CH34
MYQHIKVPAGEKIKVNADLSLNVPDNPIIPYIEGDGTGVDITPVMLKVVDAAVAKAYGGKRKISWMEIYAGEKSTKVYGPDVWLPEETMEVVKEYVVSIKGPLTTPVGGGIRSLNVALRQQLDLYVCLRPVRYFKGVPSPVREPEKTDMVIFRENSEDIYAGIEWEAESEGAKKLIAFLQNEMGVKKIRFPETSGIGIKPVSKEGTQRLVRKALQYAIDNDKPSVTLVHKGNIMKFTEGGFRDWGYELAQQEFGAELVDGGPWCKFKNPKTGRDIVVKDAIADAFLQQILLRPAEYSVIATLNLNGDYISDALAAQVGGIGIAPGANMSDSVAMFEATHGTAPKYAGKDYVNPGSEILSAEMMLRHMGWTEAADLIIRSMEKSIQSKKVTYDFARLLEGATQVSCSGFGQVMIDNM

SEQ ID NO: 12006 - protein, 531 aa, Zea mays
  unsure (1)..(531): unsure at all Xaa locations
MEAVGVTPAPVAAPEKKKLLDLKDPFPAAANGGTKASPASKWAMKKKLVGGDAGYVLEDVPHLTDYMPQLPTYPNPLQDNPAYSVVKQYFVNPDDTVTQKIVVHKTSARGTHFRRAGPRQRVYFQSDEVNAAIVTCGGLCPGLNTVIRELVCGLYDMYGVSSVVGIEGGYKGFYSKNTVALTPKSVNDIHKRGGTVLGTSRGGHDTAKIVDCLQDRGINQVYIIGGDGTQKGASVIYEEVRRRGLKCSVVGVPKTIDNDIAVIDKSFGFDTAVEEAQRAINAAHVEAESAENGIGVVKLMGRNSGFIAMYATLASRDVDCCLIPESPFYLEGKGGLLEFVERRLKDNGHMVIVVAEGAGQDLIARSMNFVDTQDASGNKLLLDVGLWLSQKIKDHFKKKPSFPITLKYIDPTYMIRAVRSNASDNVYCTLLAHSALHGAMAGYTGFTVAPVXGRHAYIPFYRITEKQNKVVITDRMWARVLCSTNQPCFLSHEDVENMKHDDDEHHHMHNTQLLEGGSSPVSKCNGSAAAV

SEQ ID NO: 12007 - protein, 153 aa, Triticum aestivum
  unsure (1)..(153): unsure at all Xaa locations
MAPTVMASSATSVAPFQGLKSTAGLPVSRRSNGASLGSVSNGGRIRCMQVWPIEGIKKFETLSYLPPLXAXEALLKQVDYLIRSKWVPCLEFKXRLGFIFREHNASXPGYYDXRYWTMXWKLPMFGCXXXTHVINQVXXVXKEYPDAYVRNHR

SEQ ID NO: 12008 - protein, 240 aa, Triticum aestivum
MCGGAIIYDYIPAHRRRVSTADFWPDADHSDAHSAAPDKGKLTSQYSLWQRASVRRSKTHWFGLVAAPRAKRGRTNQYRGIRQRPWGKWAAEIRDPVKGVRVWLGTYPTAEAAARAYDRAARRIRGAKAKVNFPNKILVDGPAHEASCTMAAPPAAVLPSPKKEEEGEGLEHAACSCEEVKALSEELMAYENYMSFLGVPYMEGGTAATAAPAAFGVAAEEAPAELWSFEDSYYPGPLGL

SEQ ID NO: 12009 - protein, 214 aa, Thermus thermophilus HB27
MIRGWHLESIARLARAHDLFLISDEVYDELYYGERPRRLREFAPERTFTVGSAGKRLEATGYRVGWIVGPKEFMPRLAGMRQWTSFSAPTPLQAGVAEALKLARREGFYEALREGYRRRRDLLAGGLRAMGLRVYVPEGTYFLMAELPGWDAFRLVEEARVALIPASAFYLEDPPKDLFRFAFCKTEEELHLALERLGRVVNSPREAEGGAVSG

SEQ ID NO: 12010 - protein, 309 aa, Escherichia coli O157:H7 EDL933
MTQFAFVFPGQGSQTVGMLADMAASYPIVEETFAEASAALGYDLWALTQQGPAEELNKTWQTQPALLTASVALYRVWQQHGGKAPAMMAGHSLGEYSALVCAGVIDFADAVRLVEMRGKFMQEAVPEGTGAMAAIIGLDDASIGKACEEAAEGQVVSPVNFNSPGQVVIAGHKEAVERAGAACKAAGAKRALPLPVSVPSHCALMKPAADKLAVELAKITFNAPTVPVVNNVDVKCETNGDAIRDALVRQLYNPVQWTKSVEYMAAQGVEHLYEVGPGKVLTGLTKRIVDTLTASALNEPSAMAAALEL

SEQ ID NO: 12011 - protein, 305 aa, Miscanthus transmorrisonensis
IESVGEGVTDVAPGDHVLPVFTGERKECPHCKSAESNMCDLLMINTDRGVMIGDGKSRFSINGKPIYHFVGTSTFSEYTVMHVGCVAKINPQAPLDKVCVLSCGISTGLGASINVAKPPKGSTVAIFGLGAVGLAAAEGARIAGASRIIGVDLNPSRFEEARKFGCTEFVNPKDHKKPVQEVLAEMTNGGVDRSVECTGNINAMIQAFECVHDGWGVAVLVGVPHKDAEFKTHPMNFLNERTLKGTFFGNFKPRTDLPNVVELYMKKELEVEKFITHSIPFAEINKAFDLMAKGEGIRCIIRMEN

SEQ ID NO: 12012 - protein, 342 aa, Solanum tuberosum
MTRRCSHCSTNGHNSRTCPNRGVKLFGVRLTDGLIRKSASMGNLTHFASGSGGGSTPLNGVVHDSPGDTPDHPAVGGGSADGYASEDFVAGSSSSRERKKGVPWTEEEHRMFLLGLGKLGKGDWRGIARNYVISRTPTQVASHAQKYFIRQSNMSRRKRRSSLFDIVADESGDTPMVSRDFLADDPAQAEMQSNNLLPPTPAVDEECESMGSAASANSIDGEHALPIPESSQYQHPLVYPAYVAPFYPMPYPCWPGYTAEPAIAETHEVLKPIAVHSKSPINVDELVGMSKLSLGESIGDAAKPPSLSLKLVEGSSRQSAFHANPSSGSSGMNSSHNPIHAV

SEQ ID NO: 12013 - protein, 305 aa, Miscanthus transmorrisonensis
IESVGEGVTDVAPGDHVLPVFTGECKECPHCKSAESNMCDLLRINTDRGVMIGDGKSRFSINGKPIYHFVGTSTFSEYTVMHVGCVAKINPQAPLDKVCVLSCGISTGLGASINVAKPPKGSTVAIFGLGAVGLAAAEGARIAGASRIIGVDLNPSRFEEARKFGCTEFVNPKDHKKPVQEVLAEMTNGGVDRSVECTGNINAMIQAFECVHDGWGVAVLVGVPHKDAEFKTHPMNFLNERTLKGTFFGNFKPRTDLPNVVELYMKKELEVEKFITHSIPFAEINKAFDLMAKGEGIRCIIRMEN

SEQ ID NO: 12014 - protein, 305 aa, Miscanthus transmorrisonensis
IESVGEGVTDVAPGDHVLPVFTGECKECPHCKSAESNMCDLLRINTDRGVMIGDGKSRFSINGKPIYHFVGTSTFSEYTVMHVGCVAKINPQAPLDKVCVLSCGISTGLGASINVAKPPKGSTVAIFGLGAVGLAAAEGARIAGASGIIGVDLNPSRFEEARKFGCTEFVNPKDHKKPVQEVLAEMTNGGVDRSVECTGNINAMIRAFECVHDGWGVAVLVGVPHKDAEFKTHPMNFLNERTLKGTFFGNFKPRTDLPNVVELYMKKELEVEKFITHSIPFAEINKAFDLMAKGDGIRCIIRMEN

SEQ ID NO: 12015 - protein, 270 aa, Corynebacterium glutamicum ATCC 13032
MTTIAVIGGGQIGEALVSGLIAANMNPQNIRVTNRSEERGQELRDRYGILNMTDNSQAADEADVVFLCVKPKFIVEVLSEITGTLDNNSAQSVVVSMAAGISIAAMEESASAGLPVVRVMPNTPMLVGKGMSTVTKGRYVDAEQLEQVKDLLSTVGDVLEVAESDIDAVTAMSGSSPAYLFLVTEALIEAGVNLGLPRATAKKLAVASFEGAATMMKETGKEPSELRAGVSSPAGTTVAAIRELEESGIRGAFYRAAQACADRSEELGKR

SEQ ID NO: 12016 - protein, 307 aa, Ustilago maydis 521
MAGYTLAIIGCGTMGVAILSGVLDSQRSQQAIASSMASSVSSLHDSTTCDDLSELPTRYIATVNRLESVRRLKKTFSQYPDIQIHAGQNVAAAREADVILLGCKPQMVQDIIAECGMKEALDGKLVISICAGLRISQIVEWVTPATKVVRAMPNTPCKIREGMTILTPLPSTLPNAELDRNILLSIFSAVGRCRFLDEKHFDACTALAGSGPAFACVFLEAMADGGVMMGLPRQEALELAAQTMQGAARMVMQSGMHPAAIKDSVTTPGGCTIAGLLNLEDGKVRSTVARTIQAAAEHASGLGQNRK

SEQ ID NO: 12017 - protein, 305 aa, Miscanthus transmorrisonensis
IESVGEGVTDVAPGDHVLPVFTGECKECPHCKSAESNMCDLLRINTDRGVMIGDGKSRFPINGKPIYHFVGTSTFSEYTVTHVGCVAKINPQAPLDKVCVLSCGISTGLGASINVAKPPKGSTVAIFGLGAVGLAAAEGARIAGASRIIGVDLNPSRFEEARKFGCTEFVNPKDHKKPVQEVLAEMTNGGVDRSVECTGNINAMIQAFECVHDGWGVAVLVGVPHKDAEFKTHPMNFLNERTLKGTFFGNFKPRTDLPNVVELYMKKELEVEKFITHSVPFAEISKAFDLMAKGEGIRCIIRMEN

SEQ ID NO: 12018 - protein, 646 aa, Saccharomyces cerevisiae
MSYESGRSSSSSESTRPPTLKEEPNGKIAWEESVKKSRENNENDSTLLRRKLGETRKAIETGGSSRNKLSALTPLKKVVDERKDSVQPQVPSMGFTYSLPNLKTLNSFSDAEQARIMQDYLSRGVNQGNSNNYVDPLYRQLNPTMGSSRNRPVWSLNQPLPHVLDRGLAAKMIQKNMDARSRASSRRGSTDISRGGSTTSVKDWKRLLRGAAPGKKLGDIEAQTQRDNTVGADVKPTKLEPENPQKPSNTHIENVSRKKKRTSHNVNFSLGDESYASSIADAESRKLKNMQTLDGSTPVYTKLPEELIEEENKSTSALDGNEIGASEDEDADIMTFPNFWAKIRYHMREPFAEFLGTLVLVIFGVGGNLQATVTKGSGGSYESLSFAWGFGCMLGVYVAGGISGGHINPAVTISMAIFRKFPWKKVPVYIVAQIIGAYFGGAMAYGYFWSSITEFEGGPHIRTTATGACLFTDPKSYVTWRNAFFDEFIGASILVGCLMALLDDSNAPPGNGMTALIIGFLVAAIGMALGYQTSFTINPARDLGPRIFASMIGYGPHAFHLTHWWWTWGAWGGPIAGGIAGALIYDIFIFTGCESPVNYPDNGYIENRVGKLLHAEFHQNDGTVSDESGVNSNSNTGSKKSVPTSS

SEQ ID NO: 12019 - protein, 305 aa, Miscanthus transmorrisonensis
IESVGEGVTDVAPGDHVLPVFTGECKECPHCKSAESNMCDLLRINTDRGVMIGDGKSRFSINGKPIYHFVGTSTFSEYTVMHVGCVAKINPQAPLDKVCVLSCGISTGLGASINVAKPPKGSTVAIFGLGAVGLAAAEGARIAGASRIIGVDLNPSRFEEARKFGCTEFVNPKDHKKPVQEVLAEMTNGGVDRNVECTGNINAMIQAFECVHDGWGVAALVGVPHKDAEFKTHPMNFLNERTLKGTFFGNFKPRTDLPNVVELYMKKELEVEKFITHSVPFAEINKAFDLMAKGEGIRCIIRMEN

SEQ ID NO: 12020 - protein, 284 aa, Helicobacter hepaticus ATCC 51449
MKKTLIVVGYGNMAKAILANNSFVTQRYHLIITGRYAHKAYDFITQCALDASVYEAKVESSSSNKSIIDIEGKDILLCTKPAGLESFVFKGQANSVYSVLAGTSIAMIQKHLSASSIVRLMPNIAAHSKLSATAFYYHMLDTKDSAQVLHNEIRPFIESFGVAVQVDSEALIESSIAASGSSIAFLALIAESLIDAGILEGLNEQQSIALVKQTFVGFATELAHKSPNELKYAISSPGGTTIRGLAVLEESGMRGILIKAAHTAAEHARQAIQKYSTQDMPKKR

SEQ ID NO: 12021 - protein, 613 aa, Thermoanaerobacter tengcongensis
MCGIAGWVNFNMDLSLQNEVIEKMTDTLKKRGPDGSGVWLSKHCVLGHRRLIVIDPQGGIQPMIKKYGEKNFVIIHNGELYNMDELKNELISLGYTFNTRSDTEIILTSYIEWGPLCVKKFNGIFAFAIWDEVQNRLFIARDHLGIKPLFYTIKNGSLIFGSEIKAILAHPHVKPEIDSQGLAEIFVMGPSRTPGCGVFKDIKELKAGHYLIFTKNGVNISKYWSLQSLPHEDSLEKTAEKIRYLLKDSSVRQLVSDVPLCSLLSGGLDSTAVSFFANEELKQKGHKLITYSVDYVGNDKYFTPNEFQPNSDADWVKFVANKLDTDHNYVFIDNEELAHALKPALYARDLPGMADIDSSLYLFLKEVKKGATVALSGEGADEVFGGYPWFRNKESIRSHTFPWTRMVNERMKLLLPEVVNYIRPLEYLNDRYNEALNEVPKLNGEDPYNARMREMFYLNITRFMPMLLDRMDRMSMAVGLEARVPFLDYRLVEYVWNIPWEMKNLNNREKGILRYALKGYIPDEVIERKKSPYPKTHNPVFKNIVKKWLKQIINDSTSPLLQLVDKKAIAELIETDAKAYDPAWFSQLMGSPQLFAYLVQINMWLKDYKISIV

SEQ ID NO: 12022 - protein, 322 aa, Neurospora crassa
MVPAIKLNSGFDMPQVGFGLWKVDGSIASDVVYNAIKAGYRLFDGACDYGNEVECGQGVARAIKEGIVKREELFIVSKLWNTFHDGDRVEPIVRKQLADWGLEYFDLYLIHFPVALEYVDPSVRYPPGWHFDGKSEIRPSKATIQETWTAMESLVEKGLSKSIGVSNFQAQLLYDLLRYAKVRPATLQIEHHPYLVQQNLLNLAKAEGIAVTAYSSFGPASFREFNMEHAQKLQPLLEDPTIKAIGDKYNKDPAQVLLRWATQRGLAIIPKSSREATMKSNLNSLDFDLSEEDIKTISGFDRGIRFNQPTNYFSAENLWIFG

SEQ ID NO: 12023 - protein, 361 aa, GIBBERELLA ZEAE PH-1
MAEYEFKGWLGKDAESANGKMEWGSFEPKKWEENDVDIKITHCGVCGSDLHTLRSGWGETPFPCCVGHEIVGKAVKVGKNVKNIKVGDRVGVGAQARSCLREDCIECSAGRVNYCDNMVSTYGSVYPDGIGKSYGGYADYNRTDSRFVVKIPEALPSELAAPMLCGGVTVYAPLRNNGCGPGKTVGIVGVGGLGHFGILFAKALGADKVVGISRKASKRDEVLALGADSYIATDDDEDWANKYAKTVDIIVCTVSSSKMPFSDYFKLLRHGGNFIQVGAPDSGLLPPVNAFTLIKGGFKLSGSLIGSPADIEEMLELAVKKNVKPWIEKRPMEDANQTIIDIEEGKARYRYVLVNQKNIEQ

SEQ ID NO: 12024 - protein, 275 aa, Escherichia coli
IGQALALLLKTQLPSGSELSLYDIAPVTPGVAVDLSHIPTAVKIKGFSGEDATPALEGADVVLISAGVARKPGMDRSDLFNVNAGIVKNLVQQVAKTCPKACIGIITNPVNTTVAIAAEVLKKAGVYDKNKLFGVTTLDIIRSNTFVAELKGKQLGEVEVPVIGGHSGVTILPLLSQVPGVSFTEQEVADLTKRIQNAGTEVVEAKAGGGSATLSMGQAAARFGLSLVRALQGEQGVVECAYVEGDGQYARFFSQPLLLGKNGVEERKSIGTLSA

SEQ ID NO: 12025 - protein, 212 aa, Bacillus subtilis subsp. subtilis str. 168
MLFFVDTANIDEIREANELGILAGVTTNPSLVAKEANVSFHDRLREITDVVKGSVSAEVISLKAEEMIEEGKELAKIAPNITVKIPMTSDGLKAVRALTGLGIKTNVTLIFNANQALLAARAGATYVSPFLGRLDDIGHNGLDLISEVKQIFDIHGLDTQIIAASIRHPQHVTEAALRGAHIGTMPLKVIHALTKHPLTDKGIEQFLADWNK

SEQ ID NO: 12026 - protein, 424 aa, Archaeoglobus fulgidus DSM 4304
MGFTGRRGKAEIIEAFSKHVSPYKAKFFSMVGIDFVPARREGVWYWDLDGRKLMDCHCNGGVFNLGHRHPEIVKTLVEALDELDIGNHHLISEQRARLAEKLAELMPGDISRTVFGVGGGEAIDFAIKLARGHTGRKKIIYAKGGYHGHTGFALAAGDEKYRKPFEPLAPGFVEVPFGDAEAVEKAVDDDTAAVLFETIPATLGMPLPPEDFYRRVREICDEKGCLMIMDEVQTGLGRTGKMWGIEHYKVVPDVIVTAKGLSGGVYPISATCFKEGLDDFMAENPFIHVSTFGGAELGCVVAEKVLEITSRESFLENVRKTGEALSEILGKLKDEYDFVDEIRQKGLFIGIKMVEEGWGPLLSISCYHSGILAVYANNDTSVMQFLPPLIVGEKEVDYIREKLAGAMEIASQRREMVEFIRKML

SEQ ID NO: 12027 - protein, 160 aa, Pseudomonas putida KT2440
MSAFHDLKLEALNGGELPLAPFKGQVVLVVNVASKCGLTPQYKALENLYQIYKDKGFNVLGLPCNQFAGQEPGSEKEIQDFCSLNYGVSFPLGSKLEVNGPQRHSLYRLLAGEGAEFPGDITWNFEKFLVGKDGRVLARFSPRTAPDDPAVVQAIEKALA

SEQ ID NO: 12028 - protein, 283 aa, Eremothecium gossypii
MGYTLTILGCGVMGQAVLSAIYNAPKADDESRAMYPSRIITCNNNAQSAKQVTELVRGFGTSPNGIEVESTSGDNAKAVAEARVVVLGTKPYLVEEVLQDVRTQVADKLLISLAAGWTLDQLVDYTARVARVMTNTPAKYGYGAAAVSHSPDVTADERALVSRLVGHLGLCVELPEKNMDAATALIGSGPAFALLMLESMMEAGVKLGIPLDVSRRCAAKVLEGTARMAEETGSHPAALKHQVCTPGGTTIAGLCVMEDSGVRSGIVKGIEEAANVAARLGRK

SEQ ID NO: 12029 - protein, 288 aa, Escherichia coli
IGQALALLLKTQLPSGSELSLYDIAPVTPGVAVDLSHIPTAVKIKGFSGEDATPALEGADVVLISAGVARKPGMDRSDLFNVNAGIVKNLVQQVSKTCPKACIGIITNPVNTTVAIAAEVLKKAGVYDKNKLFGVTTLDIIRSNTFVAELKGKQPGEVEVPVIGGHSGVTILPLLSQVPGVSFTEQEVADLTKRIQNAGTEVVEAKAGGGSATLSMGQAAARFGLSLVRALQGEQGVVECAYVEGDGQYARFFSQPLLLGKNGVEERKSIGTLSAFEQSALEGMLDTL

SEQ ID NO: 12030 - protein, 386 aa, Azotobacter vinelandii
MTVLKMTDLDLKGKRVLIREDLNVPVKDGVVKSDARILASLPTIKLALEKGAAVMVCSHLGRPTEGEYSEENSLKPVADYLSGALGREVPLLGEYLDGVKVEPGQVVLFENVRFNKGEKKNADELAQRYAALCDVFVMDAFGTAHRAEGSTHGVARFAKVACAGPLLAAELEALGKALDNPQRPMAAIVAGSKVSTKLDVLNSLSQVCDQLIVGGGIANTFLAAAGYKVGKSLYEADLVDTAKAIAAKVSVPLPVDVVVAKAFAESAEATVKAIDEVADDDMILDIGPQTAAQFAELLKSSRTILWNGPVGVFEFDQFGNGTKVLAEAIAASPAFSIAGGGDTLAAIDKYGVGEKISYISTGGGAFLEFVEGKVLPAVAVLEERAR

SEQ ID NO: 12031 - protein, 187 aa, Sciadopitys verticillata
DEHGEVVSEIRRSDLEPYLGLHYPATDIPQASRFLFMQNRVRMICDCCATPVKAVQAEELKQPLCLVGSTLRAPHGCHAQYMANMGSIASLVMAVIINGNDEEGASGRSSMKLWGLVVCHHTSPRAVPFPLRYACEFLMQAFGLQLNMELQLAAQLTEKHILRTQTLLCDMLLRDAPIGIVTQSPSI

SEQ ID NO: 12032 - protein, 511 aa, Arabidopsis thaliana
MMMRAVIRRAASNGSSPSLFAKSLQSSRVAASSPSLLSGSETGISMYLLIFDEQSNKVLFENLNRHICIVEIMLIAFITLLCQFLKIFVLLFCLYPTSRELGHLEVGEFSFFNPAKMGDTVEAVVPHMGESITDGTLATFLKKPGERVQADEAIAQIETDKVTIDIASPASGVIQEVNMFALCVVYSVVIVVLFLFLVNEGDTVEPGTKVAIISKSEDTASQVTPSQKIPETTDTKPSPPAEDKQKPRVESAPVAEKPKAPSSPPPPKQSAKEPQLPPKERERRVPMTRLRKRVATRLKDSQNTFALLTTFNEVDMTNLMKLRSQYKDAFYEKHGVKLGLMSGFIKAAVSALQHQPVVNAVIDGDDIIYRDYVDISIAVGTSKGLVVPVIRGADKMNFAEIEKTINSLAKKANEGTISIDEMAGGSFTVSNGGVYGSLISTPIINPPQSAILGMHSIVSRPMVVGGSVVPRPMMYVALTYDHRLIDGREAVYFLRRVKDVVEDPQRLLLDI

SEQ ID NO: 12033 - protein, 170 aa, Pseudomonas oleovorans
MNDQRKGDHAEPTTHFGYQDVPESQKAKKVAEVFHSVAAKYDLMNDVLSGGMHRLWKRFTIELSGVRAGNRVLDIAGGTGDLAAKFSRLVGPTGQVVLADINESMLKVGRDRLLDRGVAGNIEFVQADAEKLPFPDNHFDCVTIAFGLRNVTHKDEAIRSMLRVLKPGGR

SEQ ID NO: 12034 - protein, 305 aa, Miscanthus transmorrisonensis
IESVGEGVTDVAPGDHVLPVFTGECKECPHCKSAESNMCDLLRINTDRGVMIGDGKSRFSINGKPIYHFVGTSTFSEYTVMHVGCVAKINPQAPLDKVCVLSCGISTGLGASINVAKPPKGSTAAIFGLGAVGLAAAEGARIAGASRIIGADLNPSRFEEARKFGCTEFVNPKDHKKPVQEVLAEMTNGGVDRSVECTGNINAMIQAFECVHDGWGVAVLVGVPHKDAEFKTHPMNFLNERTLKGTFFGNFKPRTDLPNVVELYMKKELEVEKFITHSVPFAEINKAFDLMAKGEGIRCIIRMEN

SEQ ID NO: 12035 - protein, 305 aa, Miscanthus transmorrisonensis
IESVGEGVTDVAPGDHVLPVFTGECKECPHCKSAESNMCDLLRINTDRGVMIGDGKSRFSINGKPIYHFVGTSTFSEYTVMHVGCVAKINPQAPLDKVCVLSCGISTGLGASINVAKPPKGSTVAIFGLGAVGLAAAEGARIAGASRIIGVDLNPSRFEEARKFGCTEFVNPKDHKKPVQEVLAEMTNGGVDRSVECTGNINAMIQAFECVHDGWGVAVLVGVPHKDAEFKTHPMNFLNERTLKGTFFGNFKPRTDLPNVVELYMKKELEVEKFITHSVPFAEINKAFDLMAKGEGIRCIIRMEN

SEQ ID NO: 12036 - protein, 218 aa, Sisymbrium irio
MAAFEESTDLDAIQGHLFEDFMVSDGFMGDFDFNASFVSGLWCIEPVMNQVPKQEPDSPVLDPDSFVKEFLQVEAESSTSTGTTELNSSSQETDQSISTRKKSKRFEEQEEEEPRHYRGVRRRPWGKFAAEIRDPAKKGSRIWLGTFESDVDAARAYDCAAFKLRGRKAVLNFPLDAGKYEAPANSGRKRKRSDVQGELQRSQSNSSSSSSDGETTCE

SEQ ID NO: 12037 - protein, 305 aa, Miscanthus transmorrisonensis
IESVGEGVTDVAPGDHVLPVFTGECKECPHCKSAESNMCDLLRINTDRGVMIGDGKSRFSINGKPIYHFVGTSTFSEYTVMHVGCVAKINPQAPLDKVCVLSRGISTGLGASINVAKPPKGSTVAIFGLGAVGLAAAEGARIAGASRIIGVDLNPSRFEEARKFGCTGFVNPKDHKKPVQEVLAEMTNGGVDRSVECTGNINAMIQAFECVHDGWGVAVLVGVPHKDAEFKTHPMNFLNERTLKGTFFGNFKPRADLPNVVELYMKKELEVEKFITHSVPFAEINKAFDLMARGEGIRCIIRMEN

SEQ ID NO: 12038 - protein, 358 aa, Fusobacterium nucleatum subsp. vincentii ATCC 49256
MNNEKINILNLTQEELTELLVSLGLKKFYGKEVFIWLHKKITRSFDEMTNLSLKDREILKEKTYIPFFNLLKYQVSKIDKTEKFLFELEDGGTIETVLLRHKDSKNREIRNTLCVSSQVGCPVKCSFCATGQSGYMRNLSVSEILNQIYIVERRLRKKGETLNNLVFMGMGEPLLNIDNLAKSLSIISNENGVNISKRKITISTSGVVSGIEKILLDKIPIELAISLHSAINEKRDKIIPLNKNFPLEDLSAVLVEYQKQTKRRITFEYILIDNFNISETDANALADFIHQFDHVVNLIPYNEVEGVEHTRPSVKKIDKFYNYLKNIRKVNVTLRQEKGSDIDGACGQLRQRNKKGDN

SEQ ID NO: 12039 - protein, 305 aa, Miscanthus transmorrisonensis
IESVGEGVTDVAPGDHVLPVFTGECKECPHCKSAESNMCDLLRINTDRGVMIGDGKSRFSINGKPIYHFVGTSTFSEYTVMHVGCVARINPQAPLDKVCVLSCGISTGLGASINVAKPPKGSTVAIFGLGAVGLAAAEGARIAGASRIIGVDLNPSRFEEARKFGCTEFVNPKDHKKPVQEVLAEMTNGGVDRSVECTGNINAMIQAFECVHDGWGVAVLVGAPHKDAEFKTHPMNFLNERTLKGTFFGNFKPRTDLPNVVELYMKKELEVEKFITHSVPFAEINKAFDLMAKGEGIRCIIRMEN

SEQ ID NO: 12040 - protein, 538 aa, Oryza sativa (japonica cultivar-group)
MMEAVAVAAAVLLLLHVAARVADAVWWRPRRLEAHFAGQGVRGPPYRFLVGCVREMVALMAEATAKPMPPAAPHNALPRVLAFYHYWRKIYGPTFLIWFGPTPRLTVAEPEMVREIFLTRAEAFDRYEAHPVVRQLEGDGLVSLHGDKWAHHRRVLTPGFYPDNLNRLVPHVGRSVAALAERWRAMACAGGGEVEVDVAEWFQAVAEEAITRATFGRSYDSGRVVFRLQARLMAFASEAFRKVLVPGYRFLPTKKNRMSWGLDREIRRGLVRLIGRRSGGDGGEEDETTTELKDKQDSGFNDLLGLMINAGVDRTMPVEDMVEECKTFFFAGKQTTTNLLTWATVLLAMHPDWQDRARREVLAVCGDAAGELPTKDHLPKLKTLGMILNETLRLYPPAVATIRRAKFDVTLGGGGDGDAGGIHIPRDTELLVPIMAIHHDARLWGPDAAQFNPARFASGAARAAKHPLAFIPFGLGSRMCIGQSLAILEAKLTMAVLLQRFDLALSPTYVHAPTVLMLLHPQYGAPLIFRPRQSQPSN

SEQ ID NO: 12041 - protein, 305 aa, Miscanthus transmorrisonensis
IESVGEGVTDVAPGDHVLPVFTGECKECPHCKSAESNMCDLLRINTDRGVMIGDGKSRFSINGKPIYHFVGTSTFSEYTVMHVGCVAKINPQAPLDKVCVLSCGISTGLGASINVAKPPKGSTGAIFGLGAVGLAAAEGARIAGASRIIGVDLNPSRFEEARKFGRTEFVNQKDHKKPVQEVLAEMTNRGVDRNVECTGNINAMIQAFECVHDGWGVAVLVGVPHKDAKFKTHPMNFLNERTLKGTFFGNFKPRTDLPNVVELYMKKELEVEKFITHSVPFAEINKAFDLMAKGEGIRCIIRMEN

SEQ ID NO: 12042 - protein, 447 aa, Glycine max
  unsure (1)..(447): unsure at all Xaa locations
VLASLHHLSNYMTNLTTXLNRLQDFPCYSVLEEHSVDVHDTIAVVVHKNSPRETHFRRAGPRQKVYFESEDVYACIVTCGGLCPGVNTVIREIVCGLYHMYGVHKVLGIEGGYRGFYSCNTIPLTPKVVNDIHKRGGTILGTSQGEGGNDTLKIVDSIQDRGINQVYILGGDGTQRGASVIFEEIRRRGLKVSVVGIPESVDNDIPVIDKSFGFDTAVEEAQRAINAAHVEAESTENGIGVVKLMGRHSGFISMYATLASRDVDCCLIPESPFYLEGPGGLFEFIRKRLAENGHMVIVISEGAGHELISESLSATNKQEASGNKLLQDVGLWLSQKIKDHFTKSQKMDITLKYIDPTYMIRAVPSIASDNVHCTLLAQSAVHGAMAGYTGFAVGTVNGKHAYIPFYRINEIEKKVVITDRMWARLLSSTNQPSFLNPKDITTHQTGN

SEQ ID NO: 12043 - protein, 139 aa, Zea mays
CKEQNHGNPTSHKPELVLNNFTTRLGHRVGRMIQSLFPQDPNFRGRRVVTFHNQRDYIFFRHHRYIFETKEKKVASKEKTSGSKSGSEKQQVICRLQECGPRFTLKLLTLQHGTFDTRSGEYEWVHKPDMDTSRRRFFL

SEQ ID NO: 12044 - protein, 556 aa, Candida albicans SC5314
MSVLTRKRVISPSDSPNKKQNTMSDDQFSEKMYTTYVKSALLSLETDALPINTITDKINLPIGHPESITLPQFQIVLNGLVSNTSRLDNTACSNLIFAILRYNWLDIADTDGYHRFAESYSQFLVALVSTLPKYLHEVTNKLIQEFDSPNTTHHHEILTKIIKYVPTSINSIPQLLQKNFPHHISSSTKELTNYVQNLVRVLDYTPELQFSIWQLIIESSIKLDVELQNELDDLDDEEIEDLISGEEDSDSEDEWEVTTTSIKSLSSKLDSIISTLLTTTANSFTIEELNNGNGVNLFNTINSLFKSHILPTHFTKSIQFILFHITQFQPELADSYLVLLIDVAFNPSEILEKRLKAMQYLSSYIARAKNLSRHQVIFIVSYLVGWLNKFIIEREQEVESSGDKQVGGMERFKLFYAAFQALLYIFCFRHELLSTTENDWECDLDKFFQRAILTKFNPLKFCDETVVYIFAKLATKLNVCYCYSIIEHNKRERMLHTNALPSAVGNFKQKQEFLDLEAYFPFDPLVLPISKSIVAPNYIEWSEDTHAEETDSEDDI

SEQ ID NO: 12045 - protein, 589 aa, Oryza sativa (japonica cultivar-group)
MGWWGWAAAAAAAAAWVAVKVLEVLWWRPRRVEEHFARQGITGPRYRFLVGCVREMVALMVAASAKPMPPPYRSHNVLPRVLAFYHHWKKIYGNPPPPPLLLNSILSQKQQPRTRRWQVAVVGERFAPGRYDIDMMAALGSTFLIWFGPTPRLAIADPELIREVLLARADRFDRYESHPMVRQLEGEGLVSLRGDKWAHHRRVLTPAFHMDNLRLLLPCVGMTVLDMADKWRAMAEADKSGEVEIDVSDWFQVVTEDAITRTAFGRSYEDGKVVFKLQAQLMAFASEAFRKVFIPGYRFLPTKKNTSSWKLDKEIRKNLVTLIGRRQEAGDDEKLDGCAKDLLGLMINAAASSNGGKRSALPVSPITVNDIVEECKTFFFAGKQTTSNLLTWAIVVLAMHPEWQERARQEVLDVCGADGVPSREQLAKLKTLGMILNETLRLYPPAVATVRRAKADVELGGYLRIPRDTELLIPIMAVHHDARLWGPDAAQFNPARFAGGVARAARHPAAFIPFGLGARMCIGQNLAILEAKLTVAVILHRFEFRLSARYVHAPTVLMLLHPQYGAPIVFRPRSSSQPTCEKMNPLTSS

SEQ ID NO: 12046 - protein, 538 aa, Prunus cerasus
MADRRAEYNAVVSGQPQKNIADFDPPGKPKRNKYAFACAILASMTSILLGYDIGVMSGAVIYIKKDLKVSDVEIEVLVGILNLYSLIGSAAAGRTSDWIGRRYTIVLAGAIFFAGALLMGFAPNYAFLMFGRFVAGIGVGYALMIAPVYTAEVSPASSRGFLTSFPEVFINAGILFGYVSNYGFSKLPTHLGWRLMLGVGAIPSIFLAIGVLAMPESPRWLVMQGRLGDARKVLDKTSDSLEESKLRLGEIKEAAGIPEHCNDDIVEVKKRSQGQEVWKQLLLRPTPAVRHILMCAVGLHFFQQASGIDAVVLYSPRIFEKAGITNPDHVLLCTVAVGFVKTVFILVATFMLDRIGRRPLLLTSVAGMVFTLACLGLGLTIIDHSGEKIMWAIALSLTMVLAYVAFFSIGMGPITWVYSSEIFPLQLRAQGCSIGVAVNRVVSGVLSMTFISLYKAITIGGAFFLFAAIAAVGWTFFFTMLPETQGRTLEDMEVLFGKFYRWRKANALLKQKKQVDHGDGNNNPNNPQIQLGTKGQAN

SEQ ID NO: 12047 - protein, 58 aa, Glycine max
  unsure (1)..(58): unsure at all Xaa locations
MEWCSELPDPSVEVXLTCSDGTFARAAVPSGASTGIYEALELRDGGSDYLGKGVSKAV

SEQ ID NO: 12048 - protein, 288 aa, Escherichia coli
IGQALALLLKTQLPSGSELSLYDIAPVTPGVAVDLSHIPTAVKIKGFSGEDATPALEGADVVLISAGVARKPGMDRSDLFNVNAGIVKNLVQQVAKTCPKACIGIITNPVNTTVAIAAEVLKKAGVYDKNKLFGVTTLDIIRSNTFVAELKGKQPGEVEVPVIGGHSGVTILPLLSQVPGVSFTEQEVADLTKRIQNAGTEVVEAKAGGGSATLSMGQAATRFGLSLVRALQGEQGVVECAYVEGDGQYARFFSQPLLLGKNGVEERKSIGTLSAFEQNALEGMLDTL

SEQ ID NO: 12049 - protein, 193 aa, Sciadopitys verticillata
DDHGEVISEIRRSDLEPYLGLHYPATDIPQASRFLFMKNRIRMICDCCAPPVIVVEDKRLPRELSLCGSTLRAPHGCHAQYMSNMGSIASLVMAIVVNEKEEEDEDTDGEKQQQNGRRLWGLVVCHHTSARFVPFPLRYACEFLMQVFAIQLNKEVELAAQLREKHILRTQTLLCDMLLRDAPMGIVTQKPNI

SEQ ID NO: 12050 - protein, 288 aa, Escherichia coli
IGQALALLLKTQLPSGSELSLYDIAPVTPGVAVDLSHIPTAVKIKGFSGEDATPALEGADVVLISAGVARKPGMDRSDLFNVNAGIVKNLVQQVAKTCPKACIGIITNPVNTTVAIAAEVLKKAGVYDKNKLFGVTTLDIIRSNTFVAELKGKQPGEVEVPVIGGHSGVTILPLLSQVPGVSFTEQEVADLTKRIQNAGTEVVEAKAGGGSATLSMGQAAARFGLSLVRALQGEQGVVECAYVEGDGQYARFFSQPLLLGKNGVEERKSIGTLSAFEQSALEAMLDTL

SEQ ID NO: 12051 - protein, 198 aa, Streptococcus pneumoniae
GIEDILVVTGKSKRSIEDHFDSNFELEYNLKEKGKTDLLKLVDETTGMRLHFIRQTHPRGLGDAVLQAKAFVGNEPFVVMLGDDLMDITDEKAVPLTKQLMDDYKRTHASTIAVMPVPHDEVSAYGVIAPQGEGKDGLYSVETFVEKPAPEDAPSDLAIIGRYLLTPEIFQILENQAPGAGNEIQLTDAIDTLNKTQR

SEQ ID NO: 12052 - protein, 390 aa, Azotobacter vinelandii
MVPNYAPAAFIPVRGQGSRVWDQNGRELIDFTGGIAVNSLGHCHPRLVAALTEQAGKLWHVSNIFTNEPTLRLAKKLEEATFADRAFFCNSGAEANEAAFKLARRVAHDRFGPQKCEIISALDSFHGRTFFTVSVTGQPKYSDGFGPKPEGITHVPYNDLAALEAAISERTCAVVLEPIQGESGILPAQQAYLEGARRLCDQYDALLILDEVQTGVGRTGELFAYMHYGVVPDILSTAKGLGGGFPIGAMLTRSDLAKHFSAGVHGTTFGGNPLACAVAEAVIDVVNTPEVLQGIKAKHQRFKTRLEAIGRQYGIFSQVRGMGMLIGSVLSEPWKGKARDVLVAAEQEALMVLQAGADVVRFAPSLVIEDADIDEGLERFERAIVRLVRG

SEQ ID NO: 12053 - protein, 261 aa, Populus tremula x Populus tremuloides
KLVFYDCQSIAGRMDWDNNQENHQDSHQNQRECRNGINGTNVNVNGNGGTNMLYVKVMTDEQLETLRKQIAVYAAICEQLVEMHKTLSAQQDLAGGRLGNLYCDPLMASGGHKITARQRWTPTPVQLQILERIFDQGNGTPSKQKIKEITSELSQHGQISETNVYNWFQNRRARSKRKQLVASSNNAESEVETEVDSLNEKKKPEIFHAQQNPPRAEDLCFQSPEISSELHFLGDDHLTGKVGVPGNYNLYDQAEDYGMAG

SEQ ID NO: 12054 - protein, 389 aa, Rhodopseudomonas palustris CGA009
MKALTWHGKNDIRCENVPDPKIQHGRDAIIKVTACAICGSDLHLMDGVMPSMQSGDVLGHETMGEVVEVGSENTKLKVGDRVVVPFTISCGECFFCQRGFYSGCERSNPNAKMAEKMWGHSPAGLFGYSHMLGGYAGGQAEYLRIPYADVGPIKVPDGLTDEQVLFLSDIFPTGFMAADFCNLKGGETVAVWGCGPVGQMAIKSAFLLGAERVIAIDTVPERMELARQSGAIVINFMDDDVYDKIQDLTNGRGADACIDAVGTEAAATASLDSMIDRVKVATFMGTDRPHVLRQAIHCCRNFGTVSIVGVYGGLLDKIPMGSAINRGLTMRMAQTPVQQYLPQLLGRIQQGEIDPSFVITHRATLDEGPELYKTFRDKKDGCIKVVMRP

SEQ ID NO: 12055 - protein, 305 aa, Miscanthus transmorrisonensis
IESVGEGVTDVAPGDHVLPVFTGECKECPHCKSAESNMCDLRRINTDRGVMIGDDKSRFSINGKPIYHFVGTSTFSEYTVMHVGCVAKINPQAPLDKVCVLSCGISTGLGASINVAKPPKGSTVAIFGLGAVGLAAAEGARIAGASRIIGVDLNPSRFEEARKFGCTEFVNPKDHKKPVQEVLAEMTNGGVDRSVECTGNINAMIQAFECVHDGWGVAVLVGVPHKDAEFKTHPMNFLNERTLKGTFFGNFKPRTDLPNVVELYMKKELEVEKFITHSVPFAEINKAFDLMAKGEGIRCIIRMEN

SEQ ID NO: 12056 - protein, 291 aa, Nicotiana tabacum
MNDDDALTSNWNDIMLDTGIADAEPKMQYQEQKQPSNFPVHQGQPLQQVPTASVETSAIVPASSTASGASSKQRMRWTPELHEAFVEAVNKLGGSERATPKGVLKLMKVEGLTIYHVKSHLQKYRTARYKPEALEGSSEKKESSIGDLSALDLKTGIEITEALRLQMEVQKQLHEQLEIQRNLQLRIEEQGRYLQEMFEKQCKSIPSTDLVKASSSIAEDASAQSTDAVQRSSNKNDPAVPPSNPQEAGDYITQKVGEKQKEQEREDLGNLETNNSSSSNTPPTKRAKLDE

SEQ ID NO: 12057 - protein, 305 aa, Miscanthus transmorrisonensis
IESVGEGVTDVTPGDHVLPVFTGECKECPHCKSAESNMCDLLRVNTDRGVIIGDGKSRFSINGKPIYHFVGTSTFSEYTVMHVGCVAKINPQAPLDKVCVLSCGISTGLGASINVAKPPKGSTVAIFGLGAVGLAAAEGARIAGASRIIGVDLNPSRFEEARKFGCTEFLNPKDHKKPVQEVLAEMTNGGVDRSVECTGNINAMVQAFECVHDGWGVAVLVGVPHKDAEFKTHPMNFLNERTLKGTFFGNFKPRTDLPNVVELYMKKELEVEKFITHSIPFAEINKAFDLMAKGEGIRCIIRMEN

SEQ ID NO: 12058 - protein, 471 aa, Nostoc punctiforme PCC 73102
MSSKIKFGTDGWRGIIADDFTFPNVRKVTRAIATYLETAYTKNRPVLIAYDTRFLADQFAKTAAQVLADLGWTVKITVRDCPTPVIAYNARHLNSAGALMFTASHNPAPYCGIKYIPDYAGPATPEITDTIVANIESASDELPGSNPSGSISIFDPKPDYLQFIYTLLDIEKIKRANLKVKYDALYSTSRGYLDEVLQHSGVQLESFHDWRDVLFGGGMPEPKGEQLVELVEAVVRDQADLGLATDGDSDRFGIVDEQGTVLTPNTVLLVLARHLIKNKGKTGAIVRTVATTHLLDNFAAKNGLQIYETAVGFKYIGEKMRETAVLIGGEESGGLSIIGHIPEKDGVLADMLVAEAIAYEGKPLSQMVKEAIAEADGPLYNNRLDLHLTEAHKTAVIDSFTKNPPTEVVGIKVKEVGRKDGIKLYLEEGSWVLLRPSGTEPLVRVYLETNTPEKLTQIAQELESVIAKLEG

SEQ ID NO: 12059 - protein, 206 aa, Saccharomyces cerevisiae
MNSEYDYLFKLLLIGNSGVGKSCLLLRFSDDTYTNDYISTIGVDFKIKTVELDGKTVKLQIWDTAGQERFRTITSSYYRGSHGIIIVYDVTDQESFNGVKMWLQEIDRYATSTVLKLLVGNKCDLKDKRVVEYDVAKEFADANKMPFLETSALDSTNVEDAFLTMARQIKESMSQQNLNETTQKKEDKGNVNLKGQSLTNTGGGCC

SEQ ID NO: 12060 - protein, 305 aa, Miscanthus transmorrisonensis
IESVGEGVTDVAPGDHVLPVFTGECKECPHCKSAESNMCDLLRFNTDRGVMIGDGKSRFSINGKPIYHFVGTSTFSEYTVMHVGCVAKINPQAPLDKVCVLSCGISTGLGASINVAKPPKGSTVAIFDLGAVGLAAAEGARIAGASRIIGVDLNPSRFEEARKFGRTEFVNQKDHKKPVQEVLAEMTNRGVDRNVECTGNINAMIQAFECVHDGWGVAVLVGVPHKDAEFKTHPMNFLNERTLKGTFFGNFKPRTDLPNVVELYMKKELEVEKFITHSIPFAEINKAFDLMAKGEGIRCIIRMEN

SEQ ID NO: 12061 - protein, 305 aa, Miscanthus transmorrisonensis
IESVGEGVTDVAPGDHVLPVFTGECKECPHCKSAESNMCDLLRINTDRGVMIGDGKSRFSINGRPIYHFVGTSTFSEYTVMQVGCVAKINPQAPLDKVCVLSCGISTGLGASINVAKPPKGSTVAIFGLGAVGLAAAEGARIAGASRIIGVDLNPSRFEEARKFGCTEFVNPKDHKKPVQEVLAEMTNGGVDRSVECTGNINAMIQAFECVHDGWGVAVLVGVPHKDAESKTHPMNFLNERTLKGTFFGNFKPRTGLPNVVELYMKKELEVEKFVTHSVPFAEINKAFDLMAEGEGIRCIIRMEN

SEQ ID NO: 12062 - protein, 185 aa, Oryza sativa
GGLEARVPFLDKAFLDVAMNTDAADKMFSKGSLQEVDADGRPRMEKYILRKAFDVIPDDIEAGGDGTGSMLSASAPKKPYLPEDILWRQKEQFSDGVGYSWIDGIKDHAEQSISDEKFQERAKRYPTDTPDTKEAYMIREIFESWFPSDAAASTSVRWIPRADWGCASDPSGRAVKIHESAYADE

SEQ ID NO: 12063 - protein, 136 aa, Vibrio cholerae
DKDPGQVRVPVIGGHSGVTILPLLSQVEGVSFTDEEVAALTKRIQNAGTEVVEAKAGGGSATLSMGQAACRFGLALVKALQGESDVVEYAYVEGEGEYAPFFAQPIKLGKNGVEALLDIGKLSAYEQAALDGMLDT

SEQ ID NO: 12064 - protein, 312 aa, Yersinia pestis biovar Medievalis str. 91001
MKVAVLGAAGGIGQALALLLKTQLPSGSDLSLYDIAPVTPGVAVDLSHIPTAVNIKGFSGEDATPALQGADIVLISAGVARKPGMDRSDLFNVNAGIVRNLVEQIARTCPNALIGIITNPVNTTVAIAAEVLKKAGVYDKNKLFGITTLDTIRSNTFVAELKGKQPQDIEVPVIGGHSGVTILPLLSQIPGVSFTEQEVADLTKRIQNAGTEVVEAKAGGGSATLSMGQAAARFGLSLVRALQGESNVVECSYVEGDGKYARFFAQPILLGKNGVAERKDIGKLSAFEQQALENMLDVLHKDIELGEKFVNQ

SEQ ID NO: 12065 - protein, 136 aa, Vibrio cholerae
  unsure (1)..(136): unsure at all Xaa locations
DKDPGQVRVPVIGGHSGVTILPLLSQVEGVSFTDEEVAALTKRIQNAGTEVVEAKAGGGSATLSMGQAACXFGLALVKALQGESDVVEYAYVEGEGEYAPFFAQPIKLGKNGVEALLDIGKLSAYEQAALDGMLDT

SEQ ID NO: 12066 - protein, 205 aa, Dechloromonas aromatica RCB
MPPDYWIQAISDLSRRDAAMAELVERYAGLSLVSRGDAFMTLARSIIGQQISVKAADSVWRRFSEQVGSVTPTQILAVGERGLAGCGLSKRKTEYLCDLASHFSSGQLDPTAWSGLDDEAIITELVAVRGIGRWTAEMFLIFNLMRPDVFPLDDIGLQRAVNEHYFKGEKQPRKILAEFGERWRPWRSVATWYLWRSLDPVPVEY

SEQ ID NO: 12067 - protein, 405 aa, Coxiella burnetii
MAIEIKVPTLPESVSDATVAKWYKKEGDSISRDENLVDLETDKVMLEVPAPKDGVVEQIVAKEGEVVKADQILALLKEGGAVAKEKAKKDEKETKKEKEKKEEKKDKEKKEKTEEKESDLSPAVRRMVSEKDVDVEEIEGSGKGGRITKKDVEDYLEKQKEKPSEGKEGPADERTEKRVPLSRIRQRVAERLVQVQQEAALLTTFNEINMQLVMELRKKYREEFEKKFKVRLGFMSFFTKAVVEALKRFPMVNASIDGSDIIYHNYYDIGIAIGTERGLIVPILRNAEKMNMADIEKQIREYASRAQEGRLNIEELTGGTFTITNGGTYGTLLSTPIINPPQTAILGMHKIMDRPTVENGEVVVRPIMQVALSYDHRVIDGREAVLFLVTIKELLEDPARMILEC

SEQ ID NO: 12068 - protein, 193 aa, Vibrio cholerae
KACVGIITNPVNTTVPIAAEVLKKAGVYDKRKLFGVTTLDVIRSETFVAALKDKDPGQVRVPVIGGHSGVTILPLLSQVEGVSFTDEEVAALTKRIQNAGTEVVEAKAGGGSATLSMGQAACRFGLALVKALQGESDVVEYAYVEGEGEYAPFFAQPIKLGKNGVEALLDIGKLSAYEQAALDGMLDTLKGDI

SEQ ID NO: 12069 - protein, 148 aa, Vibrio cholerae
DKDPGQVRVPVIGGHSGVTILPLLSQVEGVSFTDEEVAALTKRIQNAGTEVVEAKAGGGSATLSMGQAACRFGLALVKALQGESDVVEYAYVEGEGEYAPFFAQPIKLGKNGVEELLDIGKLSAYEQAALDGMLDTLKGDIQIGVEFV

SEQ ID NO: 12070 - protein, 415 aa, Oryza sativa
LLFCAVICLMAQQGACNVVLIANNTTLSFDDVEATFTPEVKDSGVNGAIYAVEPLDACSPLRKKAANGPVSPFALVIRGGCQFDDKVRNAQNAGFKAVIVYDDEDSGVLVSMAGSSSGIYIYAVFLSKASGEVLKKYSGQSDVEVWILPVYENSAWSIMAISFTSLLAMAAVLATCFFVRRHQIRRDRGRIPVTREFHGMSSQLVKAMPSLIFTKVQEDNSTSSSCAICLEDYSFGEKLRVLPCRHKFHATCVDMWLTSWKTFCPVCKRDASAGTSKPPASESTPLLSSVIHLSAESTALSSFRSTVAVSPPRPIRRHPSSQSTSRAYSISSAPRNYNLQRYYTNSPYISTSRSNVDLANMSSQWSHTPDQASMHSLRSGHLSLPINIRYTIPHVSRSDYGSASLGLSHDSCSLS

SEQ ID NO: 12071 - protein, 557 aa, Arabidopsis thaliana
MATSSAWKLDDHPKLPKGKTIAVIVLDGWGESAPDQYNCIHNAPTPAMDSLKHGAPDTWTLIKAHGTAVGLPSEDDMGNSEVGHNALGAGRIFAQGAKLCDQALASGKIFEGEGFKYVSESFEANTLHLVGLLSDGGVHSRLDQLQLLIKGSAERGAKRIRVHILTDGRDVLDGSSVGFVETLEADLVALRENGVDAQIASGGGRMYVTLDRYENDWEVVKRGWDAQVLGEAPHKFKNAVEAVKTLRKEPGANDQYLPPFVIVDESGKAVGPIVDGDAVVTFNFRADRMVMHAKALEYEDFDKFDRVRYPKIRYAGMLQYDGELKLPSRYLVSPPEIDRTSGEYLTHNGVSTFACSETVKFGHVTIFWNGNRSGYFNEKLEEYVEIPSDSGISFNVQPKMKALEIGEKARDAILSGKFDQVRVNIPNGDMVGHTGDIEATVVACEAADLAVKMIFDAIEQVKGIYVVTADHGNAEDMVKRDKSGKPALDKEGKLQILTSHTLKPVPIAIGGPGLAQGVRFRKDLETPGLANVAATVMNLHGFVAPSDYELTLIEVVE

SEQ ID NO: 12072 - protein, 338 aa, Eremothecium gossypii
MLNHTYSDIGVRLAPRFLPDVSFMDDVVAPLTAVKPRPTLVPGISDGHLSLLAPVLAYWVFSGLFHVMDTLRLAEKYRIHPSEEVASRNRAGRLDVLAQVVLQHIIQTLTGLVLVYYDGEPQTGMEQLAMWRWRQAAPGWVSNEAIYVAYHYGLSVAKLLVGFFLIDTWQFWLHYLMHMNKTLYRKFHAHHHRLYVPYAYGALYNNPVEAFVLDSCGTALAALVTRMTHREEMLLYTFATMKTVDDHCGYALPWDPFQWLFPNNAVYHDIHHQNFGIKSNFAQPFFTIWDSFCRTKFPQFEEYEKKQRRVTVDRYKQFLAERQMEREAKLTLLSKKLS

SEQ ID NO: 12073 - protein, 198 aa, Streptococcus pneumoniae
GIEDILVVTGKSKRSIEDHFDSNFELEYNLKEKGKTDLLKLVDETTGMRLHFIRQTHPRGLGDAVLQAKAFVGNEPFVVMLGDDLMDITDEKAVPLTKQLMDDYKRTHASTIAVMPVPHDEVSAYGVIAPQGEGKDGLYSVETFVEKPAPEDAPSDLAIIGRYLLTPEIFQILENQASGAGNEIQLTDAIDTLNKTQR

SEQ ID NO: 12074 - protein, 198 aa, Streptococcus pneumoniae
GIEDILVVTGKSKRSIEDHFDSNFELEYNLKEKGKTDLLNLVDKTTDMRLHFIRQTHPRGLGDAVLQAKAFVGNEPFVVMLGDDLMDITDEKAVPLTKQLMDDYERTHASTIAVMPVPHDEVSAYGVIAPQGEGKDGLYSVETFVEKPAPEDAPSDLAIIGRYLLTPEIFQILENQAPGAGNEIQLTDAIDTLNKTQR

SEQ ID NO: 12075 - protein, 1388 aa, Oryza sativa
MSRRQEICRNFQRGSCKYGAQCRYLHASPHQQQQQQQAKPNPFGFGTGSRQQQQPSFGSQFQQQQQQQQKPNPFGFGVQGANAQSRNAPGPAKPFQNKWVRDPSAPTKQTEAVQPPQAQAAHTSCEDPQSCRQQISEDFKNEAPIWKLTCYAHLRNGPCNIKGDISFEELRAKAYEEGKQGHSLQSIVEGERNLQNAKLMEFTNLLNSARPSQTPSFPTMSSFPEVKNNSSFGASQTNGPPVFSSFSQIGAATNIGPGPGTTAPGMPASSPFGHPSSAPLAAPTFGSSQMKFGVSSVFGNQGSGQPFGSFQAPRFPSSKSPASSVQHRDIDRQSQELLNGMVTPPSVMFEESVGNNKNENQDDSIWLKEKWAIGEVWDTFLLVIFEVLFARNVCSFTTFVPAMEVIGIRNSIAILSDWPGDWSGLEKFHDLPLNMQAFEIYHLIHVTFEICTEMRISSPYHFGPSEEIDRWCKFMSIVAIVHTFYGNLWMRDGVFITEIQDRWQDKIQLDIMDNILVVCKSTLADDESASEVSSGSDSDSDCILGDDCPSDDDEEAAQIHKRFKELKEKLKTGKVDKLDDVVFEAGAEQDGNDTPSFDSDDEESVEEVASDEEVSARKLIKYPRFKEKPGVPTFELGMTFSCKKQFKKAITAYGLAERKAINFVKDDPKRVRARCDWPSCPWVCLLSKNSRTDGWQIATLENSHLCPSRRDNKLVTSSRIAEKYGKFIVANPSWKLAHMKATVQEEMFADVNISKLKRAKSITMKKAINAAKWQYQKLYNYQLELLRSNPGSTVVVDREVDMDPPVFKRIYICLDACKKGFLAGCRKVIGLDGCFFKGAKNGELLCAIGKDANNQMYPIAWAVVHKANKEEWHWFCGLLCSDLQVGDGSGWVFISNQQKEIINAMDKWAPQAEHRICARHIYANLKRHFYDNEHQKFWKCAKAPCITLFDLAMAELVQLTTPAVQTILNNHPQHWSRAWFRSGSNCDLVDNSMCESFNKWILEARFFPIITMLETIRRKVMVRIHDQRTISGRWTTSVCPNILKKMNVYITESAFCHATCNGGDSFEVKHHDNRFTVHLDKKECSCRYWQLSGLPCPHAISCIFFKTKTNSLDEYIAECYSVKEFKKIYSQCLEPVEGMSSWPEDDKEPLNAPGYIKMPGETRRESNEPLKATKLSRIGSIIRCSKCKQIGHNKSTCNKHHGGGSSTPDSLQVVNPADNLMLSNTQQSSKQSRKRKSRTAANTNSASQSRKTVSSKQKALVELHAHSQGSTSATIKVTSGQAFVNVSTQESAKFKPKKLTPVARLNGILMQSRKPSGSFGSSCSSINNFLKSSAGTTKMKMKMNNLVKEKWAIGEFVCHLSEGIDSGSYVAAPGSTKDLSNNQKKNQE

SEQ ID NO: 12076 - protein, 207 aa, Arabidopsis arenosa
MASFEESSDLEAIQSHLFEDLLACDGFMGDFDFDASFVSGLWCIESQVPKQEPDSPVLDPDSFVNEFLQVEGESSSSSSPELNSSSSTYETDQSVKKAERFEEEEEARHYRGVRRRPWGKFAAEIRDPAKKGSRIWLGTFESDVDAARAYDCAAFKLRGRKAVLNFPLDAGKYEAPANSGRKRKRSDVQEELQRTQSNSSSSSCDAF

SEQ ID NO: 12077 - protein, 186 aa, Coxiella burnetii RSA 493
MILPEHIREVFKTATCLHSKTEVEAALDTLAIEISHALSSSNPIFLCVVVGGIVPLGNLLPRLDFPLEVDYVHATRYRGETRGKNLEWKAEPTCNMKGRTVLVVDDILDGGLTLGAIIDYCKKRGAGEVYSAVLVDKCDARLPGGHQHADFTGLEVGNHYVFGYGMDYKGYLRNAPGIYMVAPEYE

SEQ ID NO: 12078 - protein, 273 aa, Photorhabdus luminescens subsp. laumondii TTO1
MERRKITLIGAGNMAHAIIAGLVKGGYPAELINVCAPSHTRRDALATEYGVNSGSDNIRYAQEADVVVLAVKPQVMVDVCQPLKENVDFSNKLVLSIASGISVARFDALLQDKLNIVRIMPNTPALIGQGVSGLFASEQVSQSDRDFTQALMNSVGKTYWVKDENGINDVIAAAGSAPAYFFLFMESMQQEAERLGFDNQTAREIILQTAIGSAALAASNVDLPFATLREQVTSKGGTTAEALRIFYEGKLPETISNAMQAAIRRAQEMEKQF

SEQ ID NO: 12079 - protein, 453 aa, Arabidopsis thaliana
MASLMLSLGSTSLLPREINKDKLKLGTSASNPFLKAKSFSRVTMTVAVKPSRFEGITMAPPDPILGVSEAFKADTNGMKLNLGVGAYRTEELQPYVLNVVKKAENLMLERGDNKEYLPIEGLAAFNKATAELLFGAGHPVIKEQRVATIQGLSGTGSLRLAAALIERYFPGAKVVISSPTWGNHKNIFNDAKVPWSEYRYYDPKTIGLDFEGMIADIKEAPEGSFILLHGCAHNPTGIDPTPEQWVKIADVIQEKNHIPFFDVAYQGFASGSLDEDAASVRLFAERGMEFFVAQSYSKNLGLYAERIGAINVVCSSADAATRVKSQLKRIARPMYSNPPVHGARIVANVVGDVTMFSEWKAEMEMMAGRIKTVRQELYDSLVSKDKSGKDWSFILKQIGMFSFTGLNKAQSDNMTDKWHVYMTKDGRISLAGLSLAKCEYLADAIIDSYHNVS

SEQ ID NO: 12080 - protein, 564 aa, Zea mays
MAAAAVTSNGGAVAANGPAPGRLASVYSEVQTSRLLHTLPLPSVLRSNFSVVDGPASSAAGNPDEIAKLFPNLFGQPSASLVPSAEPAATRPLKVGVVLSGGQAPGGHNVICGIFDYLQERAKGSTLLGFKGGPAGIMKCKYVELTSDFVYPYRNQGGFDMICSGRDKIETPEQFKQAEDTANKLDLDGLVVIGGDDSNTNACLLGEYFRSRNLKTRVIGCPKTIDGDLKCKEVPTSFGFDTACKIYSEMIGNVMTDARSTGKYYHFVRLMGRAASHITLECALQTHPNAALIGEEVAAKKETLKNVTNYITDIICKRADLGYNYGVILIPEGLIDFIPEVQKLIAELNEILAHDVVDEAGAWKSKLQAESRELFEFLPKTIQEQLMLERDPHGNVQVAKIETEKMLISMVETELEKRKAEGRYSAHFRGQAHFFGYEGRCGLPTNFDSNYCYALGYGAGALLQSGKTGLISSVGNLAAPVEEWTVGGTALTSLMDVERRHGKFKPVIKKAMVELDAAPFKKYASMRDEWALKNRYISPGPIQFSGPGSNDSNHTLMLELGAAL

SEQ ID NO: 12081 - protein, 112 aa, Glycine max
  unsure (1)..(112): unsure at all Xaa locations
TTVNRAGAGMADPLTALXSMAVCPTXNTIIDFTSFASNAGRAQYMQMWPPVGYKKFETLSYLPDLDDAHLGKDGEYLLRTGWSPRXEFELEHGFLCREHNRAPEYYDGRYWT

SEQ ID NO: 12082 - protein, 338 aa, Moraxella sp. TAE123
MKAAVLHEFGQSLQIEEVDIPTPGAGEIVVKMQASGVCHTDLHAVEGDWPVKPSPPFIPGHEGVGLITAVGEGVTHVKEGDRVGVAWLYSACGHCTHCLGGWETLCESQQNSGYSVNGSFAEYVLANANYVGIIPESVDSIEIAPVLCAGVTVYKGLKMTDTKPGDWVVISGIGGLGHMAVQYAIAMGLNVAAVDIDDDKLAFAKKLGAKVTVNAKNTDPAEYLQKEIGGAHGALVTAVSAKAFDQALSMLRRGGTLVCNGLPPGDFPVSIFDTVLNGITIRGSIVGTRLDLQESLDMAAAGKVKATVTAEPLENINDIFERMRQGKIEGRIVIDYTM

SEQ ID NO: 12083 - protein, 166 aa, Lactococcus lactis
MAIIGILGTPYNTVERSPFWWNKVSYTRQSFIDVFQELGHTVIVLPVDKTENIKNYLPLVDKIVLTGGVDVSPYLYGEEPHAQLGTTDPIRDRFELAAIKAALEANKPILGVCRGLQLLNVYFGGTLYQDLSLTSSQIKHLQSPTPQEVPTHHISVEKEDSFRFFT

SEQ ID NO: 12084 - protein, 535 aa, Eremothecium gossypii
MQTEEEALTASLAAFDKKLGTYRSINAGNYADDAVSGSYSVVVNSRYAMLCGSDFEEPLDGAQTLRAECISILRSSLPISMAFLMEFSMTICSLFIIGHLCTAMELASASLAVMTYNITGLSLVEGLATALDTVCPQAYGSQRYSKVGLYFLRGSAMIMVGMSLTAIIWFFSASWLQLLIPEADLIPKIQLYLRIMILGIPALVLFSTGKRYLQAQAVYEASTYVLAIVFPLTIVFVLGFTRHFGFVGAPIGIVTSQWLMVIILFVFARSIRPDTLRCWYPFMQSSHHFKRVFTHWRPLWDLAFPGLVMLEAEFLSIEALTLISTYFGVNAIASQTVIANLSSLIYQIPFAIGCVISNRVAHYVGSGLIKNAQMTIKASYCLASIVGVSMCLFVAFLNKPLARLFTNNEEVVELAHSVSYILAVNQIYDAFNTFGAAILRGQGRQRLGGIWNMIAYYIVSLPLGWWLAFGPLKLKLAGLWYGCGIGILILALAFSWYIYNSDWQLIIQECNKRENTEVENDMLHSDSVDASFSSQ

SEQ ID NO: 12085 - protein, 292 aa, Salmonella typhimurium LT2
MKTRKGIILAGGSGTRLYPVTMAVSKQLLPIYDKPMIYYPLSTLMLAGIRDILIISTPQDTPRFQQLLGDGSQWGLNLQYKVQPSPDGLAQAFIIGEEFIGHDDCALVLGDNIFYGHDLPKLMEAAVNKESGATVFAYHVNDPERYGVVEFDQKGTAVSLEEKPLQPKSNYAVTGLYFYDNSVVEMAKNLKPSARGELEITDINRIYMEQGRLSVAMMGRGYAWLDTGTHQSLIEASNFIATIEERQGLKVSCPEEIAFRKNFINAQQVIELAGPLSKNDYGKYLLKMVKGL

SEQ ID NO: 12086 - protein, 434 aa, Burkholderia cepacia
MSLNDDATFWRNARQHLVRYGGTFEPMIIERAKGSFVYDADGRAILDFTSGEMSAVLGHCHPEIVSVIGEYAGKLDHLFSGIVSRPVVDLATRLANITPPGLDRALLLSTGAESNEAAIRMAKLVTGKYEIVGFAQSWHGMTGAAASATYSAGRKGVGPAAVGSFAIPAPFTYRPRFERNGAYDYLAELDYAFDLIDRQSSGNLAAFIAEPILSSGGIIELPDGYMAALKRKCEARGMLLILDEAQTGVGRTGTMFACQRDGVTPDILTLSKTLGAGLPLAAIVTSAAIEERAHELGYLFYTTHVSDRCPPAGVGLRVLDVVQRDGLVARANVMGDRLRRGLLDLMERFDCIGDVRGRGLLLGVEIVKDRRTKEPADGLGAKITRECMNLGLSMNIVQLPGMGGVFRIAPPLTVSEDEIDLGLSLLGQAIERAL

SEQ ID NO: 12087 - protein, 361 aa, Arabidopsis thaliana
MKALILVGGFGTRLRPLTLSFPKPLVDFANKPMILHQIEALKAVGVDEVVLAINYQPEVMLNFLKDFETKLEIKITCSQETEPLGTAGPLALARDKLLDGSGEPFFVLNSDVISEYPLKEMLEFHKSHGGEASIMVTKVDEPSKYGVVVMEESTGRVEKFVEKPKLYVGNKINAGIYLLNPSVLDKIELRPTSIEKETFPKIAAAQGLYAMVLPGFWMDIGQPRDYITGLRLYLDSLRKKSPAKLTSGPHIVGNVLVDETATIGEGCLIGPDVAIGPGCIVESGVRLSRCTVMRGVRIKKHACISSSIIGWHSTVGQWARIENMTILGEDVHVSDEIYSNGGVVLPHKEIKSNILKPEIVM

SEQ ID NO: 12088 - protein, 392 aa, Synechococcus sp. PCC 7942
MPNFRLSQRLAPLQRNVFADMDRAKAVAIAAGREVIDLSLGSSDLPAPDHVVAVIAASLQDPSTHGYLLHQGTLPFRQVAAAWYERKFGLGVDPETEVLLLIGSQEGTAHLPLAVMEPGEIALLQDPGYPSHAGGVYLAGGEIYRLPTTADRGFLPDFSTIPTEILSRSRLLVLSYPHNPTTAIAPLAFFEEAVAFCRHHQLVLAHDFPYPDLGFDGVEVPSIFQADRQKQQAIEFFSLSKSYNMGGFRVGFAIGNAELIGALRRLKAVVDFNQYQGILAGAIAALTGPQACVEATRQRFRDRRDIFINALAATGWTIPKPVSTMYLWAPLPEPWQTRSLEFCEKLVAETGVAASPGIGFGDCGEGFVRFALVHDRDRLEEAARRITQFLAR

SEQ ID NO: 12089 - protein, 198 aa, Streptococcus pneumoniae
GIEDILVVTGKSKRSIEDHFDSNFELEYNLKEKGKTDLLKLVDKTTDMRLHFIRQTHPRGLGDAVLQAKAFVGNEPFVVMLGDDLMDITDEKAVPLTKQLMDDYERTHASTIAVMPVPHDEVSAYGVIAPQGEGKDGLYSVETFVEKPAPEDAPSDLAIIGRYLLTPEIFQILENQAPGAGNEIQLTDAIDTLNKTQR

SEQ ID NO: 12090 - protein, 506 aa, Bifidobacterium animalis
MKNKVQLITYADRLGDGNLASMTDILRTRFDGVYEGVHILPFFTPFDGADAGFDPIDHTKVDARLGDWDDIAELAKTHDIMVDAIVNHMSWQSKQFQDVLANGEDSEYYPMFLTMSSVFPDGATEEELAGIYRPRPGLPFTHYSFAGKTRLVWVTFTPQQVDIDTDSAKGWEYLMSIFDQMSKSHVKYIRLDAVGYGAKEAGTSCFMTPKTFELISRLREEGAKRGLEILIEVHSYYKKQVEIAAKVDRVYDFALPPLLLHSLFTGKVDALAHWTEIRPNNAVTVLDTHDGIGVIDIGSDQLDRSLKGLVPDADVDNMVETIAKNTHGESKAATGAAASNLDLYQVNSTYYSALGCNDQHYIAARAVQFFLPGVPQVYYVGALAGENDMELLKRTNVGRDINRHYYTTSEIDKNLERPVVKALNALARFRNELPAFDGDFSYSVGDDESIAFSWNGFGSFPTLTFTPSKGMGVENPQSVATLVWTDSTGEHRTDDLIANPPVMQAS

SEQ ID NO: 12091 - protein, 371 aa, Lactobacillus sakei
MEIANFGVEEWLNVYETQATLDIAQSTIASMTMSELMALSPDNGTQFYQDLAQQKMNYGAIEGSEAFKQAVSELYQTVNSNQVLQTNGATGANLLALYALVKPGNHVITMFPTYQQLYEIPISIGATVSYWQLDEDNNWVPDIAELKKLIRPETKLICLNNANNPTGTVISTELMQAIVEVARTVGAYVLVDEVYLPLGEGQQTTSIADLYELGIATNSLSKTYSVPGIRVGWLVANETLTDLFRKYRDYTMICAGVFSDQLAVYVLQNRKQVLARNRALVQHNLEIFKAWVAQEPLVDVVYPESVSTSFIHFKEIEDDEAFCKYLLKEYGVLLVPGKRFEIPGHARLGYCAPEATLKKGLAELSKALRTY

SEQ ID NO: 12092 - protein, 290 aa, Glycine max
MALGTVTRRLGNKLLPALSPSPRLLHSHATSFGFKQVNEEEKARMVGDVFTSVASSYDLMNDLMSAGLHRLWKDRLVSKLNPFPGMKHLDVAGGTGDVAFRILENIHKVKLRGLRGAFQDTLEAETQIYVCDINPKMLNVGKQRASEKGFGEDGSLVWVEGNAESLSFQNDSMDGYTIAFGIRNVTHIEKVLSEAHRVLKPGGRFLCLELSHVGIPIFKDLYDYYSFSVIPYMGELVAGDRQSYQYLVESIRRFPSQEKFASMIADAGFQKVEYENLVGGVVAIHSGLKI

SEQ ID NO: 12093 - protein, 198 aa, Streptococcus pneumoniae
GIEDILVVTGKSKRSIEDHFDSNFELEYNLKEKGKIDLLKLVDKTTDMRLHFIRQTHPRGLGDAVLQAKAFVGNEPFVVMLGDDLMDITDEKAVPLTKQLMDDYERTHASTIAVMPVPHDEVSAYGVIAPQGEGKDGLYSVETFVEKPAPEDAPSDLAIIGRYLLTPEIFQILENQAPGAGNEIQLTDAIDTLNKTQR

SEQ ID NO: 12094 - protein, 346 aa, Caulobacter crescentus CB15
MKALRYHGARDVRYESMDDPTPQSDRDAIVQVTACSICGSDLHIYHGHGFSEDLGFCVGHEAVGEVVEVGRGVQRLKVGDKVMLPAAVGCGRCRSCLSGVIQTCENGQGACYGLSARLQGSQAEAVRVPAADMNAVPVPDGVSMDQALMMTDALATAWFGARNAEVRPGASVAVIGLGPIGLMAVESAYVMGAHVVYAIDPLPARRALAEEAGAIALHPDEALARVREDTKGRGLDCVIEAVGGEATVDAALRLVRPRGVVSVIGVQQAKRFAFPLERAFGAGLTFRVGTCSVPEELPALFPLVRSGRLRPEKYISHRLPLSDGPEAYRLFESREAGALKMVLTPG

SEQ ID NO: 12095 - protein, 476 aa, Ralstonia eutropha JMP134
MKTSFINGKFVEGGDARANINPSDTHDVIDQFGEADALMATTAVDAAAESFRTWSQTSIQRRADALDSVGTELLARKEELGRLLSREQGKILPEGIAEVDRAGRIFKFFAGEAVRPAGVHAASVRDGVEIHVTSEPLGVVGIISPWNFPMAIPAWKIAPALAYGNTVVFKPAELVPSSAWALADIISRSGFPPGAFNLVLGAGRVVGNAMLTDPRVTGISFTGSTGVGARVMETAGRRFAKLQLEMGGKNPLVVLDDADLEVALNCSIQGSFYSTGQRCTASSRIICTKGIYPTFRKALAERVAALRVGHALHGDTQIGPVVDKSQLDSNLHYVSVGRAEGATLVCGGELLAKETRGFFMSPALFADVTNDMRIAREEIFGPVSCLIVADDFEHAIQIANDTDFGLSAGICTTSLRYATRFRREVKAGMVMVNVPTAGVDYHVPFGGTKASSYGAREQGSFARHFFTSTKTSYSGW

SEQ ID NO: 12096 - protein, 588 aa, Zea mays
  unsure (1)..(588): unsure at all Xaa locations
MCGILAVLGVVEVSLAKRSRIIELSRRLRHRGPDWSGLHCHEDCYLAHQRLAIIDPTSGDQPLYNEDKTVVVTVNGEIYNHEELKAKLKTHEFQTGSDCEVIAHLYEEYGEEFVDMLDGMFSFVLLDTRDKSFIAARDAIGICPLYMGWGLDGSVWFSSEMKALSDDCERFITFPPGHLYSSKTGGLRRWYNPPWFSETVPSTPYNALFLREMFEKAVIKRLMTDVPFGVLLSGGLDSSLVASVASRHLNETKVDRQWGNKLHTFCIGLKGSPDLKAAREVADYLSTVHHEFHFTVQEGIDALEEVIYHIETYDVTTIRASTPMFLMSRKIKSLGVKMVISGEGSDEIFGGYLYFHKAPNKKEFLEETCRKIKALHLYDCLRANKATSAWGVEARVPFLDKSFISVAMDIDPEWNMIKRDLGRIEKWVMRKAFDDDEHPYLPKHILYRQKEQFSDGVGYNWIDGLKSFTEQQVTDEMMNNAAQMFPYNTPVNKEAYYYRMIFERLFPQDSARETVPWGPSIACSTPAAIEWVEQWKASNDPSGRFISSHDSAATDHTXAVSRRWPTAAATXAANGTVNGKDVAVAIAV

SEQ ID NO: 12097 - protein, 531 aa, Zea mays
MEAVGVTPAPVAAPEKKKLLDLKDPFPAAANGGTKASPASKWAMKKKLVGGDAGYVLEDVPHLTDYMPQLPTYPNPLQDNPAYSVVKQYFVNPDDTVTQKIVVHKTSARGTHFRRAGPRQRVYFQSDEVNAAIVTCGGLCPGLNTVIRELVCGLYDMYGVSSVVGIEGGYKGFYSKNTVALTPKSVNDIHKRGGTVLGTSRGGHDTAKIVDCLQHDGINQVYIIGGDGTQKGASVIYEEVRRRGLKCSVVGVPKTIDNDIAVIDKSFGFDTAVEEAQRAINAAHVEAESAENGIGVVKLMGRNSGFIAMYATLASRDVDCCLIPESPFYLEGKGGLLEFVERRLKDNGHMVIVVAEGAGQDLIARSMNFVDTQDASGNKLLLDVGLWLSQKIKDHFKKKPSFPITLKYIDPTYMIRAVRSNASDNVYCTLLAHSALHGAMAGYTGFTVAPVNGRHAYIPFYRITEKQNKVVITDRMWARVLCSTNQPCFLSHEDVENMKHDDDEHHHMHNTQLLEGGSSPVSKCNGSAAAV

SEQ ID NO: 12098 - protein, 168 aa, Avena vaviloviana
VMASSATTVAPFQGLKSTAGLPVSRRSNAGLGSVSNGGRIRCMQVWPIEGIKKFETLSYLPPLSEEALLKQIDFLIRSKWVPCLEFSKVGFIFREHGSTPGYYDGRYWTMWKLPMFGCTDASQVIKEVEEVKKEYPDAYVRIIGFDNIRQVQCVSFIAFKPPGCEESG

SEQ ID NO: 12099 - protein, 168 aa, Zea mays
MAATIQSVKARQIFDSRGNPTVEVDVFCSDGTFARAAVPSGASTGVYEALELRDGGSDYLGKGVSKAVNNVNSVIGPALIGMDPTAQTEIDNFMVQQLDGTKNEWGWCKQKLGANAILAVTLAVCKAGASIKRIALYQHIVNLAGNKQIVLPVPAFNVINGGSHAGYK

SEQ ID NO: 12100 - protein, 396 aa, Shigella flexneri 2a str. 2457T
MFENITAAPADPILGLADLFRADERPGKINLGIGVYKDETGKTPVLTSVKKAEQYLLENETTKNYLGIDGILEFGRCTQELLFGKGSALINDKRARTAQTPGGTGALRVAADFLAKNTSVKRVWVSNPSWPNHKSVFNSAGLEVREYAYYDAENHTLDFDALINSLNEAQAGDVVLFHGCCHNPTGIDPTLEQWQTLAQLSVEKGWLPLFDFAYQGFARGLEEDAEGLRAFAAMHKELIVASSYSKNFGLYNERVGACTLVAADSEIVDRAFSQMKAAIRANYSNPPAHGASVVATILSNDALRAIWEQELTDMRQRIQRMRQLFVNTLQEKGANRDFSFIIKQNGMFSFSGLTKEQVLRLREEFGVYAVASGRVNVAGMTPDNMAPLCESIVAVL

SEQ ID NO: 12101 - protein, 518 aa, Oryza sativa (japonica cultivar-group)
MEEGVVGGGGAAVLVALLVTVVLAVMRSAGSRSSKRGRLPPSPMALPIIGHLHLIRPPPHRAFDRILARHGPLVYLRLGPSTHCVVIGSADVARDFLKFEASIPERPPTAVTRQLAYGKAGFAFAPYGAYWRFVKRLCMSELLGPRTVELLRPVRAAELADVLRAAQSAAERGEGVDMSHELVRMANNSIMRMVASALPGEMAEAARDCAKQVAELVGAFNAEDFVAVCRGWDLQGIGRRTNEVHARFDALLETIIEAKEEARRRSLRLGRRESSSKDLLDMLMDAAEDDTAEVKLTRDNIKAFVLDIFTAGSDTTATTVEWMLAELVNHPECMAKLRGELDAVVGRSRLVGEQDVARLPYLQAVLKETLRLRPPAVFAQRVTVEPVQVRGYTIPTDTQVFFNIFSIGRDATYWDQPLHFRPDRFLPDGAGATVDPKGQHPQLMPFGSGRRACPGMGLAMQAVPAFLAALVQCFDWAPPPSQPLPLDMEEAAGLVSARKHPLLLLPTPRIQPLPSFYS

SEQ ID NO: 12102 - protein, 204 aa, Capsella rubella
MATIEESSDLEAMQKHLFEDFLVSDGFLGDFDFDASFVSGLWCIEPQVPKQEPDSPVLDPDSFVNEFLQVEAKSSPELNTSSSSTYETDQCVKKAERFEEEVETRHYRGVRRRPWGKFAAEIRDPAKKGSRIWLGTFESDVDAARAYDCAAFKLRGRKAVLNFPLDAGKYEAPANSGRKRKRSDAQEELQRTHSNSSSSSCDAF

SEQ ID NO: 12103 - protein, 334 aa, Shigella flexneri 2a str. 301
MWIKVAAAEQHILVYQYNKEFRMKVAVLGAAGGIGQALALLLKTQLPSGSELSLYDIAPVTPGVAVDLSHIPTAVKIKGFSGEDATPALEGADVVLISAGVARKPGMDRSDLFNVNAGIVKNLVQQVAKNCPKACIGIITNPVNTTVAIAAEVLKKAGVYDKNKLFGVTTLDIIRSNTFVAELKGKQPGEVEVPVIGGHSGVTILPLLSQVPGVSFTEQEVADLTKRIQNAGTEVVEAKAGGGSATLSMGQAAARFGLSLVRALQGEQGVVECAYVEGDGQYARFFSQPLLLGKNGVEERKSIGTLSAFEQNALEGMLDTLKKDIALGKEFVNK

SEQ ID NO: 12104 - protein, 253 aa, Xylella fastidiosa Ann-1
MSESSEKTSTTHFGFRQVAAKDKKTLVAEVFTSVSRRYDLMNDLMSLGIHRAWKRYFVATAQVKSGDRVLDLAGGTGDIAMLLKNRVGAEGSIVLGDINASMLSVGRDRLIDRGVVARLDYVQCNAEALPFQDKCFDLVTMSFGLRNVTDKDAALREMFRVLKVGGQARVLEFSTVTAEWFKPIYDFHSFQVLPRLGRLFARDAASYRYLAESIRKHPPQEELQAMMGAAGFERCGYRNLTGGIVAIHSGYKY

SEQ ID NO: 12105 - protein, 410 aa, ASPERGILLUS NIDULANS FGSC A4
MTMMAGHPDLPSNGQNGDSNTHQQRQFATLAVHAGAPHDPTTGAVIAPESVGKPVGLYEYTRSSNPNRDNFEEAVASLEHAKYALAFSSGSATTATILHSLAPGSHVVSVSDVYGGTHRYFTKVAAAHGVNVSFSSCLELDVEKLIRPNETKLVWIETPSNPTLALVDIRKVAAVAHRHGVLVVVDNTFMSPYVQNPLDHGADVVIHSVTKYINGHSDVLMGVAAFNSDELKERFTFLQNAIGAVPSPFDCWLAHRGLKTLHLRAREATANATAVALALESSPHVISVNYPGLNSHPNREIAVKQHRKGMGGGMLSFRIKGGHKAAHLFCEYTKIFTLAESLGGVESLCEVPSSMTHAGIPKEEREAAGVYDDLVRMSCGIEDVEDLTADTMQALERAVAASQALENGSA

SEQ ID NO: 12106 - protein, 368 aa, Neurospora crassa
MSGTDYKFEGWLGFDKSSAHGNMQWGEFEPKPWEETDIDIKIECCGVCGSDIHTLRSGWGPTNYPCCVGHEVVGTVVRAGSKVEGGIKVGDRVGVGAQSDACRNRTDKHCKICADGNYNYCRVHHVGTYNGVYMNGGKSYGGYATYQRVPSFFAVKIPESMPSSHAAPMLCAGVTTYAPLKFHGVGPGKRVGVIGLGGLGHFGVMWAKALGADEVVVISRSSSKKADAMAMGATGFIATGEDPEWLNKNRSSLDIILCTASSADMPFNDYLFLLDLDGVFIQVGAPDDDLPRIKQMALIFNRIKLTGSLIGSPDDIREMFQLAVDKKVQPWISEIPMKEANKAIVDFEDGKPRYRFVLKNEDYTPVQA

SEQ ID NO: 12107 - protein, 194 aa, Triticum aestivum
  unsure (1)..(194): unsure at all Xaa locations
MAPTVMASSATSVAPFQGLKSTAGLPVSRRSNGASLGSVSNGGRIRCMQVWPIEGIKKFETLSYLPPLSTEASSKQVXDYLIRPKWVPCLRXSSKVGVIFREXNASPGYYDGRYWTMWXLPISGCTDAXQVINEVEEXKKGXLTVLRRVRQHRKCMRSCLKQRAARSGRLKVIQRAIMHAVPELLVPPLLLVSK

SEQ ID NO: 12108 - protein, 548 aa, Oryza sativa
MSAAHLLRHSRKLRTLRDALDYDRSALVRYFSAASASFPTKGGAAAGVEKRIGGARFPQCKQPGKELETFKVSLGGLNGRYACRRAPNNCIPTTITGLNGSLSCGQVSSARSFSSSADLPPHQEIGMPSLSPTMTEGNIARWLKKEGDKVSPGEVLCEVETDKATVEMECMEEGYLAKIIHGDGAKEIKVGEIIAVTVEEEGDLEKFKDYKPSTSAAPAAPSEPKAQPEPAEPKVKETEPSRTPEPKAPKTEEASQPGGRIFSSPLARKLAEDNNVPLSSVMGTGPDGRILKADIEDYLASVAKGGKREALAAPGLSYTDVPNTQIRKVTANRLLSSKQTIPHYYLTVDARVDNLIKLRGELNPLQESSGGKKISINDLVIKAAALALRKVPQCNSSWMSDFIRQYHNVNINVAVQTEHGLFVPVIRDADKKGLGTIAEEVKQVAQRARDNSLKPEDYEGGTFTISNLGGPFGIKQFCAIINPPQSAILAIGTAEKRVIPGSVDGQYEFGSFMSATMSCDHRVIDGAIGAEFLKAFKGYIENPNSMLL

SEQ ID NO: 12109 - protein, 148 aa, Hordeum vulgare
  unsure (1)..(148): unsure at all Xaa locations
MASKXILKEFKDLQKDPPTSCSAGPSGEDMFHWQATIMGPHDSPYAGGVFLVNIHFPPDYPFKPPKVSFKTKVFHPNINSNGSICLDILKEQWSPALTISKVLLSICSLLTDPNPDDPLVPEIAHMYKTDRSKYETTAXSWTQKYAMG

SEQ ID NO: 12110 - protein, 748 aa, Helicobacter hepaticus ATCC 51449
MANTFGYGGMTNHLGDMMFSKYILVIGANPAVNHPVSMVHILRAKEQGAKLVCIDPRFTKTAAKCDEFHRIRSGTDIAFAYGLLNHIIAKKLYDEQYLKERVYGYEDIIKEAQKFSPEVAADICGIPADEIRHIAEEMAAAKPASLIWNQGLTQHTIGTSNTRIMPILQMFLGNIGKNGGGVNILRGHDNVQGASDMNNLADSLPGYYGLGEPAWRHFCKHWGVEYEWMLGRFKDAEMMGKTGFAHSTWKFGVLDEENAANNGGTKLRALVVIGSGMTTVSLLDLQKKAMDMLDLVVFVDPYVNDLAIYSDRSDNLFMLPAASQMETSGSVAATNRSYQWRSKVMEPLFECRPDEEFLFGLAERLGFLKELQWRLYDIAKSKGREQFVWPEDATTELTQSIRSIGLQGMSPERLKAHQENWHLFDKVTLEGTGEFKGDYYGLPWPCWSDKHPGTPVMYNDTIPVMRGGMGFRVNWGVTSPDGQSMLTNRSLPNAKHIGGYAPVTAENAESLGISLSSEEKNAIEGSTFALGIGNNILVEKALEAGLCPYGNGKARANVWNWYDKIPLHREPLHSVRGDLVDKYPSFPDKPNLFRANVKYISRQKEKDWVKEFPINMLSGRLVAHMGTGAETRSAKYLAEVEGEMFVEIHPNKAAELKVKNGDLVWIYGTNGCKILVPAKLSVRVDENSIWLPQNFSGMDQGESRLDKYPEGTKPYAIGESANMISSYGYDYNSACPETKCGLCRIEKA

SEQ ID NO: 12111 - protein, 184 aa, Helicobacter hepaticus ATCC 51449
MSEVNDRRNARRSFLKLSALASVAGVSSALGNEGEKVLRKASEAELKEKYPQSQKIKTICTHCSVGCGVIAEVQDGVWVRQEVAQDHPISQGGHCCKGADLIDRARSETRLRYPLQKQNGQWTRLKYDEAMDKIATQLKQIREESGPDAVMFLGSAKCSNEQSYYIRKFAAFFGTNNIDHCARV

SEQ ID NO: 12112 - protein, 890 aa, Dechloromonas aromatica RCB
MLIETESGVVTGLRGDSEHPANRGRLCTKGATLNQTVNPTYRLQFPEKRLVRGQGGQRLSWELALDEAAERFATTIREYGPDSVAFYISGQLMTEDYYVFNKLAKGLIGTNNVDTNSRLCMSSAVAGYKQTLGADAPPCSYADILRAKLIFISGANPAVAHPIVFRYIEDAKVAYPDLKIIVADPRRSESAEIADLHLPIKPGSDIALFNGMLHVLINEDLVDRAYVEAHTSGFDALAEIVKNYSPDQVAALCGVPAEAIVQAARWFGASDASLSLYCQGLNQSAHGTHNNAGIIHLHLATGQIGKPGAGPFSLTGQPNAMGGREVGGLSNLLSAHRDLANPAHRAEMARFWGVPFVPATPGKSAVDLFKALKTGEVKAVWIACTNPAQSLPNQAAVREALQAAEYVVLQEAYGNTDTADYADLLLPASGWGEKHGTVTNSERCITRVLPAVKAPGEARHDWEIVVDFARRLGKKLDHAGADKLFPYADAEAIFNEHRESTRGRDLDITGLSYALLEAQGPQQWPYPEGASSGKVRLYEDGHFPTADGKARFVPVEHKPTADALSSELPISLLSGRMRDHWHGMSRTGTVPRLFNLEDEPLLAMHPCDMRHRGLESGDLAKVTNGRGEMVVRVTDRPGLVKGRAWMPMHWGNQFMNTPGANALASDATDPYSKQPELKHAAVQIVKMDLPYPLAVVRRCASQSAALELLQRARTVLGDYPYVTLGLYGRKSPLVVFRAATALPIGEQEVLDLDRLFGLDGADGAIVYIDATRKVAKKAIAQEGRLIGVRLVGETLAQAWLKQAMAEDELDASLIRFALAPTAKPPVSMAPRNIVCKCADVSDVQIRKELENGADLPKLQQNLKCGTFCGSCVPDIKRMLAEQTKKTAAAA

SEQ ID NO: 12113 - protein, 321 aa, Candida boidinii
MSSPLLTLNNGLKMPQIGFGCWKVDNATCAETIYEAIKVGYRLFDGAMDYGNEKEVGEGVNKAIKDGLVKREELFIVSKLWNNFHHPDSVKLAIKKVLSDLNLEYIDLFYMHFPIAQKFVPIEKKYPPNFYCGDGNKWSFEDVPLLTTWRAMEELVEEGLVKSIGISNFVGALIQDLLRGCKIRPAVLEIEHHPYLVQPRLIEYAKTEGIHVTAYSSFGPQSFVELDHPKVKDCTTLFKHETITSIASAHDVPPAKVLLTWATQRGLAVIPKSNKKERLLGNLKINDFDLTEAELEKIEALDIGLRFNDPWTWGYNIPTFI

SEQ ID NO: 12114 - protein, 238 aa, Synechococcus elongatus PCC 7942
MATFVLIHGAGSGAWVWHKVAPRLESQGHTVISPDLPGHGRNPQPIAEVTLARYADSVCDILQAQSEPVVLVGHSLGGAVISQAAEAYPDKIQTLVYLAGYLLRNGESPLSISQTDNESLMAGTTVFSEDQLSATCRPEALQELGYADCSAEDMALVRSLITPQAVAPLTTPVQVTAERMGRVPKVYILCTQDKVIGPTTQRRMAEAGGCDRLLTLDTSHNPYLSAPQAVAACLLSVL

SEQ ID NO: 12115 - protein, 539 aa, Arabidopsis thaliana
MASRIINHSKKLKHVSALLRRDHAVAVRCFSNSTHPSLVGREDIFKARLNYSSVERISKCGTGNVTMLSGISTTSTKLSSPMAGPKLFKEFISSQMRSVRGFSSSSDLPPHQEIGMPSLSPTMTEGNIARWLKKEGDKVAPGEVLCEVETDKATVEMECMEEGFLAKIVKEEGAKEIQVGEVIAITVEDEDDIQKFKDYTPSSDTGPAAPEAKPAPSLPKEEKVEKPASAPEAKISKPSSAPSEDRIFASPLARKLAEDNNVPLSSIKGTGPEGRIVKADVEDFLASGSKETTAKPSKQVDSKVPALDYVDIPHTQIRKVTASRLAFSKQTIPHYYLTVDTCVDKMMGLRSQLNSFQEASGGKRISVNDLVIKAAALALRKVPQCNSSWTDEYIRQFKNVNINVAVQTENGLYVPVVKDADKKGLSTIGEEVRFLAQKAKENSLKPEDYEGGTFTVSNLGGPFGIKQFCAVINPPQAAILAIGSAEKRVVPGTGPDQYNVASYMSVTLSCDHRVIDGAIGAEWLKAFKGYIETPESMLL

SEQ ID NO: 12116 - protein, 427 aa, Streptomyces avermitilis MA-4680
MTVIQESPVDTEAEILGLYRAHLSKGRATLAELFGSHMETASEGAWLTTSDGERFLNAGGYGVFIMGARHPIVMEEVERQLRTHPTATRILLEPTVARAAEALVSVLPDGLDRVHFALSGAEAVETGLKLARAGGRKRTISMRGGYHGKTLGALSATAKDVYQAPFRPLVPDFQHLPFGETDALEAELAAHPGEVCVILEPVQGEGGVIIPPAGYLKRVEELVRAHDGFLILDEVQSGFGRLGEWWGADTEGVVPDVLLTGKALGGGVMPVSAAVATRKAFRPFDKDPYVHTATFSGQPVLMAAVQGAIRAMKEERLVTRAMDLGAQLLPRIAEIAYRNIPELVVDVRGQGLLIGVELVEAGLAGELLIELFNHGVVANHSMNGSSVVRFTPPAVLSDTDVEFLLNSFDLATRDLVRGAAKMPEGGN

SEQ ID NO: 12117 - protein, 198 aa, Streptococcus pneumoniae
GIEDILVVTGKSKRSIEDHFDSNFELEYNLKEKGKTDLLKLVDETTGMRLHFIRQTHPRGLGDAVLQAKAFVGNEPFVVMLGDDLMDITDEKAVPLTKQLMDDYKRTHASTIAVMPVPHDEVSAYGVIAPQGEGKDGLYSVETFVEKPAPEDAPSDLAIIGRYLLTPEIFEILEKQAPGAGNEIQLTDAIDTLNKTQR

SEQ ID NO: 12118 - protein, 198 aa, Streptococcus pneumoniae
GIEDILVVTGKSKRSIEDHFDSNFELEYNLKEKGKTDLLKLVDETTGMRLHFIRQTHPRGLGDAVLQAKAFVGNEPFVVMLGDDLMDITDEKAVPLTKQLMDDYERTHASTIAVMPVPHDEVSAYGVIAPQGEGKDGLYSVETFVEKPAPEDAPSDLAIIGRYLLTPEIFEILEKQAPGAGNEIQLTDAIDTLNKTQR

SEQ ID NO: 12119 - protein, 402 aa, Pseudomonas putida KT2440
MANPGSPRRFARIDRLPPYVFNITAELKMAARRRGEDIIDLSMGNPDGATPPHIVEKLVQVAQREDTHGYSTSRGIPRLRRAISNWYKDRYEVDIDPESEAIVTIGSKEGLAHLMLATLDQGDTVLVPNPSYPIHIYGAVIAGAQVRSVPLVPGVDFFNELERAIRESIPKPKMMILGFPSNPTAQCVELDFFERVVALAKQYNVLVVHDLAYADIVYDGWKAPSIMQVPGAKDIAVEFFTLSKSYNMAGWRIGFMVGNPELVSALARIKSYHDYGTFTPLQVAAIAALEGDQQCVRDIAEQYRQRRNLLVKGLHELGWMVENPKASMYVWAKIPPEYAHLGSLEFSKKLLAETKVCVSPGIGFGDYGDDHVRFALIENQDRIRQAIRGIRQMFRADGLARK

SEQ ID NO: 12120 - protein, 400 aa, Pyrococcus furiosus DSM 3638
MSIRLPQEGKVIEVVNGSLKIPNEPIVAYIEGDGIGREVIPAAIKVVDKAVETAYKGKRRIVWWKLLAGKEALQKVGKLLPEETVKGIAEVKVALKGPMETPIGTGHRSINVALRKMFDLYANIRPIKYYGVPTVYPYADKVDLIIFRENTEDVYAGIEWEAYSREAQKLREFLKNEFGIEIREDSGITLKPISKFATQRIVRKAIKWAIEKGRKRVTIMHKGNVMKFTEGAFRNWAFEVAEKEFSEYVSIGKPEEGKILVDDKIADNMLQQIILRPWEYDIIVTPNLNGDYLSDAAAALVGGVGMAAGINVGDYIAIAEPVHGTAPDIAGKGIANPSAAILSAALLLEYLGWVEAAELIRASLRKTIEKGKVTPDLARGEKALSTEEFIQEVIKEIEGE

SEQ ID NO: 12121 - protein, 172 aa, Solanum tuberosum
MENYATIFPSASSSSSHHDEYISLMNSKSSISDDAKEELLFQGKNKAGFLGLMASMETPRDIITKKDEVIKSCKKKIKKPRCAFQTRSQVDILDDGYRWRKYGQKAVKNNKFPRSYYRCTHQGCNVKKQVQRLSKDEEVVVTTYEGMHSHPIDKSTDNFEHILSQMQIYTSF

SEQ ID NO: 12122 - protein, 105 aa, Triticum aestivum
MDPKLVEVTQLFDRFKAAFKASNFDVCSTLLSQLKVLLTKFPSLPPLFQQTPNAVEELKLAREIYEQAVILSVKMEDQDAFERDFCQLKPYYMDTCGIIPPSSEE

SEQ ID NO: 12123 - protein, 198 aa, Streptococcus pneumoniae
GIEDILVVTGKSKRSIEDHFDSNFELEYNLKEKGKTDLLKLVDETTGMRLHFIRQTHPRGLGDAVLQAKAFVGNEPFVVMLGDDLMDITDEKAVPLTKQLIDDYKRTHASTIAVMPVPHDEVSAYGVIAPQGEGKDGLYSVETFVEKPAPEDAPSDLAIIGRYLLTPEIFEILEKQAPGAGNEIQLTDAIDTLNKTQR

SEQ ID NO: 12124 - protein, 122 aa, Spirulina platensis
HDRNKGFWWSHMGWMLREIPADADVPRFTKDINEDPVYLFLQNYFIPIQVALGVVLYLLGGWPLVVWGIFFRIVVVFHCTWFVNSATHKFGYRTYQSNDNSKNCWWVALVTYGEGWHNNHHA

SEQ ID NO: 12125 - protein, 298 aa, Streptomyces sp. WA46
MIDVAVAEPGPGQVRIEVRAVGVNPFDHKMYSGAFGTDPANLPMRLGAEAAGVVTAVGADATGPAGPIQIGDEVIAYRAPGAYAAELIVPASSVVPKPAALSWEQAGGLMVTGVTAVHVLEAIGLREKDSVLIHGAAGGVGLMAVQLAVERGATVLGTASPAKHDVLRDLGAIPIAYGPGLADRVRAAAPQGVHAAADLVGTDEAVDVSVELVADRSRIASVAGFERGARAGIKLLGGGPGADPGTEIRTAARLQLTEAAEAGRLRVLIAASHPLREAAAAHRQIMTGHTTGKIVLVP

SEQ ID NO: 12126 - protein, 506 aa, Vibrio cholerae O1 biovar eltor str. N16961
MIYAQPGSDNAVITFKSHYDNFIGGQWVKPVSGEYFGNISPVNGQVYCQVARSTQADIDLALDAAHQVREAWAKTSVTERSNLLLKIADRIEANIEQLAVAECWENGKPVRETLAADLPLVVDHFRYFAGCIRAQEGSAAELDSHTASYHFPEPIGVVGQIIPWNFPMLMAAWKLAPALAAGCCVVLKPAEQTPTSILVLIEKIADLIPAGVLNVVNGFGSEAGQALATSQRIAKLAFTGSTQVGQHILKCAAQSLIPSTVELGGKSPNIYFPDIFDHEDTYLEKCIEGTLLGFFNQGEVCTCPSRVLVHESIYDRFVAKVAERAKGIKQGNPLDTATQVGAQASQEQFDKILSYLDIGRQEGAKVLFGGGVAKQEGELGQGYYIQPTLLQGHNKMRVFQEEIFGPVIAITSFKDEAEALALANDTEYGLGAGIWTRDQNLAYRMGRNIQAGRIWINCYHAYPAHAAFGGYKKSGIGRETHKMMLNHYQNTKNLLISYDVNPLGFF

SEQ ID NO: 12127 - protein, 486 aa, Pseudomonas sp. S-47
MKEIKHFISGAFVGSASGKLFDNVSPANGQVIGRVHEAGRAEVDAAVRAARAALKGPWGKMTVAERAEILHRVADGITARFGEFLEARMPGHRQAEVAGQPHRHSARRANFKVFADLLKNVANEAFEMATPDGAGALNYGVRRPKGVIGVISPWNLPLLLMTWKVGPALACGNCVVVKPSEETPLTATLLGEVMQAAGVPAGVYNVVHGFGGDSAGAFLTEHPDVDAYTFTGETGTGETIMRAAAKGVRQVSLELGGKNAGIVFADCDMDKAIEGTLRSAFANCGQVCLGTERVYVERPIFDAFVARLKAGAEALKIGEPNDPEANFGPLISHKPREKVPSYYQQAVDDGATVVTGGGVPEMPAHLAGGAWVQPTIWTGLADDSAVVTEEIFGPCCHIRPFDSEEEAIELANSLPYGLASAIWTENASRAHRVAGQIEAGIVWVNSWFLRDLRTAFGGSKQSGIGREGGVHSLEFYTELKNICVKL

SEQ ID NO: 12128 - protein, 144 aa, Arabidopsis thaliana
MADEDYNDVDDLGYEDEPAEPEIEEGVEEDVEMKENDDVNGEPIEAEDKVETEPVQRPRKTSKFMTKYERARILGTRALQISMNAPVMVELEGETDPLEIAMKELRQRKIPFTIRRYLPDGSFEEWGVDELIVEDSWKRQVGGD

SEQ ID NO: 12129 - protein, 333 aa, Mycoplasma gallisepticum R
MMAIQTQRIAILTSGGDSPGMNPAIYGLVQQAIINNIQPYLVYEGYKGLVEDQIVLANQQEVIDHFFDSGTFIYSARLVEFKDLEVRKKAVSNLKAKKIDTLVVIGGDGSYQGAKLLSEMGINVIVMPGTIDNDVSSSDYTIGFYSALEHITRTIQEIISTSVSHNRVSISEVMGRHCGDLAVYAALATKADLVITSENIKTTQEIVDLAAKRMLQDHKRTFTVIVCEHIYGEDGRDSLKTIAQQINDQLGIKTNLNILTYGQRGQVPTPMERILAMKFAIKAFECINEQRYGVVLGLSGDEIVAYNFQEALNKRNPSRIKLINLSNRINGGF

SEQ ID NO: 12130 - protein, 609 aa, Eremothecium gossypii
MSHSGAAVFKKVSGMLLIDEESNPAILTWRSTDGDKSHSVMLNTINKLQATPASSDKMMLRLVGKVSTAKRLKDEDGGEAEPKPVVHMFTFNNRIVMDNIKETLQHIISRYKDEEVYEEKRRKEGSDAPTPQAEAPLINTTALDDSLSREKLLVNLKLQQSLLKENRTLMKTFQEAVIKSGLPPQEFWATRIPLLRAFALATSQKTGPYNVLSTIKPVASSDNKVNVSVSREKILTIFQNYPIVKKAYDDNVPKNFKEQEFWARFFSSKLFRKLRGERIMQNDRGDMIIDRYLTLDQEFDRLDDEMLLHPIKKLLDLEGNQNDDPEKRGNRPHFTMLPGTDPNGNNDGSVDILKGMNRLSEKMIKSLENEYSRVNLQMQDLDKEEREEILFSDLEEEGKTEYEEIYLRQRSPTSETDTNPAMTSTSTAEDIKNEINSITGDLQGTLDLTAVGKINSQTAQRINRQVMKAVKVNAKQAKHLRFDSTMGAFLSSQTTDSQEANSNLPPDILESARVLHGTCCEFLKHFYNHFQSGEPKSGVIVKKLYGHLKECTHKVENLLTTASQSDSEQDVAALCSAYLNPALLSINLAIEKYDAAVEEIESYNKAEDV

SEQ ID NO: 12131 - protein, 239 aa, Zea mays
FSSRKDQEVLELLCCSFSYPSLTEQVLNSANISGDIYEHAVVLSVKLEDQDAFERDFCQLKPYYMDTCGIIPASPEEYPILGLNLLRLLVQNRIAEFHTELELLPVKALEHPCIKHAVELEQSFMEGAYNRVLSARQAVPHETYVYFIDLLAKTVRDEIAGCSEKGYDSLSVSDAKQMLMFSSDQDLHEYITEEHPEWEIKNGAVFFQKAKESQPCKEIPSLQLINQTLSYARELERIV

SEQ ID NO: 12132 - protein, 467 aa, Mycoplasma gallisepticum R
MVLNMYNYDLIVIGAGPGGYVAGEHAAKNGLKTLVIERGTYGGVCLNVGCIPTKTLLQSSKVKHYIEKAAEYGLDLVNNQLSVNWANILKRKEAVVNKLVNGVKTILKVAKADTIVGEARIVDGHTVTVNNQTFYITTKDIIVATGSSPRKLPLPGFDQGRAEGVIIESTKALELPQIPQSLVVIGGGVIGIEFAMLYASLGTKVTILQAVDRLCELLDQDASDFIAKRMKSLGVNVVYNAKILGYQNNAIIYEDNGTAYQLPSQYILESVGRVVNDQVFGSFNVARDDRNRIKLNDKLQTSTDSIYVIGDAAGQIMLAHYAYHQALYAVDTILNRKTKKLSSLTTPGCIYTYPEIATIGYTEQQLKEKNIEYVVSKMPMAVNGKAIADGSTEGFIKFMFGKKYGEILGCVLIASTASDMISEIALAMENELTVFELEQAIHPHPTIAEIISECAKQAIYNHFNKKH

SEQ ID NO: 12133 - protein, 440 aa, Mycoplasma gallisepticum R
MFEYKFTDVGEGLHEGVVAQIYVKVGDTIKEGDPMFSVETDKVTTDLPAPEGGKVTAILASVGQTVHVGEVMLVLNGDGSSAPAAAPATPAFVAPTPAVTPAPTPAEAAPSGGGGGGGASVVGEVKVSNTLFGLFGDQRAASTPTPAPTPAFAPTPVPVATPLAQAVASDLNVNLHNVTPANGAKIFSSDVFASAQQSSPAASVAANDNETYKEITSIRKAIAKAMTTAHEEIPATVLTFNFDVTKLVSYRKQVKDAVLASYNVKLSFLPFLLKAITKAVVAHPIFNSHYDKASNRLVLKKKINLGIAVDTADGLMVPNIKSAQDKSVIELAREVNNLAEKARSKKIGLADLADGTISVTNFGSIGALFGTPIIKFPEVAIIATGTVEEKLARTPENQIVIKQIMPITIAADHRWIDGADIGRFAKTLKEIVENLNGLLI

SEQ ID NO: 12134 - protein, 244 aa, Mesorhizobium loti MAFF303099
MTCLPSQSGKKLGLVIDLDTCVGCQACVTACKEWNTGGHMAPLTDIDPYGGHVDGVWFNRVHSYEHTTEMGGRTVNFPRSCLHCETPACVTVCPTGASYKRASDGIVLIDEDKCIGCKLCSWACPYGAREFDTDVGVMKKCTLCVDRIYNDNLAEEDRVPACVAACPTSARHFGDLGDPHSAVSQLVAERGGVDLMAELGYHPTNKYLPPRAHTQRAASVPAKALEPVRAEGGFLGWVDRMLSN

SEQ ID NO: 12135 - protein, 429 aa, Neurospora crassa
MLSSVRLVTRRAAVRSAFASPGRSLLAVRAASFWANVPQGPPDAILGITEAFKADTFDKKINLGVGAYRDDKGKPYVLPSVRKAEDKVIHSRMNKEYAGITGVPEFTKAAAVLAYGKDSSALDRLVITQSISGTGALRIGGEFLNRFFPGAKKIYIPTPSWANHGAVFRDSGLEVAQYAYYDKNTIGLDFEGLIRDLKAAPNSSIFLFHACAHNPTGVDPTPEQWKEIEAVVKDKGHYSFFDMAYQGFASGDIHKDAFAVRYFVEQGHNICLAQSFAKNMGLYGERVGAFSIVCADADEKKRVDSQVKILVRPLYSNPPIHGARIAAEILNTPELYEQWLTEVKEMADRIIKMRALLKENLEKLGSKHDWSHITSQIGMFAYTGLTPEQMEKLAKEHSVYATKDGRISVAGITSENVGRLAEAIFKVKG

SEQ ID NO: 12136 - protein, 976 aa, Mesorhizobium loti MAFF303099
MRHPPPRGANSAPSQRPLADTRAPDERDGVDTSPGISDSIAKTTCYMCACRCGIDVHIKDGKVRYINGNKDHPVNRGVICGKGSSGIMQHYSPARLKKPLLRTGPRGSGAFREIEWEEAFSIATDRLSAVRRTDPKKLAFFTGRDQSQSLTGWWASQFGTPNFAAHGGFCSVNMAAGGLYSIGGSFWEFGEPDWDNTRYFMLFGVAEDHDSNPIKIGLGKLKARGAKVVSINPCRTGYNAIADDWIGIRPGTDGLFVFALIHELLKAGRVDLDYLLRYTNAHVLVVQEPGAADDGLFVRDADGDPLAWDRMAKTAVKATDPEAKPALTGSFEVGGRRCAPVFQLIADRYLDDSYAPDAVAQRCGIPADTIRRIAAELAHVAFEQAIELPIAWTDWAGRRHETIKGRPVSMHAMRGISAHSNGFHSCRAIHLLQVLLGTVDVLGGFRFKPPYPRSAPPGPKPAGKIVKPMTPLDGMPLGFVCGPDDLLVDEDGTPTRIDKAYSWDAPLAAHGLMHTVIRNAWAGDPYPIDTLMMYMSNMAWNSSMNTVETIRMLTDHDEAGNYKIPFIIYSDAYYSETVPFADLVLPDTTYLERHDCISLLDRPISHADGPGDAIRHPVVEPDRDVRPFQSVLIELGARLGLPGFVNDDGAARYADYADYIVNHERTPGIGPLAGWRGKDGTSIGRGEANPDQLQRYIDNGGFWHHDFAQDQRYYKMANRSYLDFAVQMGFIPKAEPIIFQLYCEPLQRFRLAARGHGRVQPPEAERQRIETYMDPLPFWYMPFEEAVVDLEKYPLHALTQRPMHMYHSWGAQNAWLRQITSQNRLFVHHRTAGDLGLVDDDWVWIESINGKVKGQIKLVDGVNESTVWTWNAIGKRRGSWGLKDDAAESNRGFLLNHIIGDQTSADAQGKRYSNSDPVTGQAAWFDLRVRIVKCADEEAGFTEPQFERFDQPPHFEPSPDILRFGAKFRQAREAAQ

SEQ ID NO: 12137 - protein, 198 aa, Streptococcus pneumoniae
GIEDILVVTGKSKRSIEDHFDSNFELEYNLKEKGKTDLLKLVDETTGMRLHFIRQTHPRGLGDAVLQAKAFVGNEPFVVMLGDDLMDITDEKTVPLTKQLMDDYERTHASTIAVMPVPHDEVSAYGVIAPQGEGKDGLYSVETFVEKPAPEDAPSDLAIIGRYLLTPEIFEILEKQAPGAGNEIQLTDAIDTLNKTQR

SEQ ID NO: 12138 - protein, 329 aa, Triphysaria versicolor
MAGKLMRAVQYDGYGGGAAGLKHVEVPIPSPGKGEVLIKLEAISLNQLDWKLQNGMVRPFLPRKFPFIPATDVAGEVVRIGQDVKNFKPGDKVVAMLGSFGGGGLAEYGVASEKLTVHRPPEVSAAESSGLPIAGLTAHMALTQHIGLNLDKSGPHKNILITAASGGVGQYAVQLAKLGNTHVTATCGSRNFDLVKSLGADEVIDYKTPEGAALKSPSGKKYDAVIHCASPLPWSVFKPNLSKHGKVIDITPGPRVMLTSAMTKLTCSKKRLVTLLVVIKGEHLSYLVELMREGKLKTVIDSKFSLSKAEEAWAKSIDGHATGKIVVEP

SEQ ID NO: 12139 - protein, 396 aa, Bordetella avium
MSDTSAKHIDTLLQHLGSAPFNPDTGAAPVNLPSVRASTVRFQSLAKLEDAQRRKAAGERASTYGRMGMDTHAALEQVFAELEGGTHCYLASSGLAGISMVFLSLLSAGEHALVADCAYGPVHELHEAVLSRLGIDVTFFDAKADLASLVRPTTRLIFAEAPGSLLFEMLDMPALARFAKQHDLILATDNTWGSGYIYRPLTLGAQVSVIAGTKYVGGHSDLMLGAVVTNDEAIAKRLNRTQYALGYSVSADDAWLALRGVRTMPVRMAQHARHALEVCEFLQNRPEVVRLYHPAWPADPGHALWQRDCSGSNGMLAVQLGLSPQAARDFVNALTLFGIGFSWGGFESLVQLVTPGELARHQYWQGGSDALVRLHIGLESPADLIADLAQALDRAA

SEQ ID NO: 12140 - protein, 53 aa, Synechocystis sp. IPPAS 284
FVRLVLVWHCTWFVNSASHIFGYSTYKSQHNSKNCWWVALVTFGEGWHNNHHA

SEQ ID NO: 12141 - protein, 176 aa, Glycine max
  unsure (1)..(176): unsure at all Xaa locations
MAHSMISFRAVTTVNRARADMVAPFTGLKSMAGFSTRKTNNVITSIASNRGRVQCMHVWPPVGKKKTETLFYLPDLDDAQLAKEVECPVRKGWIPCYELEFEHAFVYREHNKSPXYYNGHYWTMXKLPIFDCTNTAQVWKELQETKTAYPNDFIHIIGFDDVLQMQVINYITYKPA

SEQ ID NO: 12142 - protein, 296 aa, Ralstonia eutropha JMP134
MAACGVCRTDLHVVDGDLSSPKPALIPGHEIVGRVDALGAGVVGLSIGARVGVPWLGHTCGQCRFCLSGRENLCDAPQFHGYTRDGGYAEYVVADASYCFRIPETYDDEHAAPLLCAGLIGFRTLRSAGDAQRIGIYGFGAAAHIVTQIAVAQGRTVYAFTRPGDQAAQTLATDVGAAWAGSSQDKAPATLDAALIFAPDGALVPAALAAVDKGGTVVCGGIHMSDIPSFPYRLLWEERRIVSVANLTRADGHGLMEAAATWPLHIRTTSYPLSSANAALDDLRAGRLAGAAVLRV

SEQ ID NO: 12143 - protein, 198 aa, Streptococcus pneumoniae
GIEDILVVTGKSKRSIEDHFDSNFELEYNLKEKGKTDLLKLVEEATGMRLHFIRQTHPRGLGDAILQAKAFVGNEPFVVMLGDDLMDITDEKAVPLTKQLMNDYEKTHASTIAVMPVPHEDVSSYGVIAPQDEGSNGLYSVETFVEKPAPEETPSDLAIIGRYLLTPEIFEILEKQAPGAGNEIQLTDAIDTLNKTQR

SEQ ID NO: 12144 - protein, 475 aa, Xanthomonas axonopodis pv. citri str. 306
MSSVSIDGAPDAGENTRFIILISCVATIGGFLFGFDSGVINGTVDGLKQTFQSTAAETGFEVASMLLGCAIGAFFAGRLADRWGRRAVLIISAALFLLSAIGAGASHSSAFFIFARVMGGFAVGAASVISPAYIAEVASARYRGRLATMQQIAIISGLFCAFLSNYLLANAAGASTEPLWAGQAAWRWMFWMQAVPSILFLLLLLVIPESPRYLVVKGRREQALVVLKRLYGNAAAQTKLGEISASMAADQHKPKFSDLINKATGKIRPIVWIGIGLAVFQQLVGINVVFYYGAVLWQAVGFSEQDALLINVLSGGLSIGACLVTVMLVDKIGRKPLLWIGSAGMAVSLALVTYAFATASLDPNGKLAMSDAMGMLALVAANVYVVFFNASWGPVMWVMLGEMFPNQIRGSGLAIAGAAQWTSNFAITVSFPILLGSIGLAGAYGIYTVAAFISVFFVLKYVYETKGKELEQMEG

SEQ ID NO: 12145 - protein, 430 aa, Pyrococcus furiosus DSM 3638
MENPYEIVGVVAREILDSRGNPTVEVDVYTHVGMGRAAVPSGASTGTHEALELRDGGKRYHGKGVRRAVENVNKIIAPELIGMDVRWQREIDALLLELDGTENKSNVGANAILAVSLAVAKAAANSLELPLYQYLGGVNAYVLPVPLSNVINGGVHAGNDLDFQEFMIMPIGADSFREAIRWVSETYHVLKKVIMEKYGKNAVNVGDEGGFAPPMKEVTEPLDVLIKAIEEAGYKPGDEIALALDVASSELFNEETGKYVVGGKEYDRGELLELYKDLTSTYPIVSIEDPFHEEDWEGFVMITKELGHKVQIVGDDLFVTNPKRLRKGIELGAANALLLKVNQIGTLSEAMDAAFTAFRAGYGVIVSHRSGETEDATIADLAVALNAGQIKTGAPARSDRNAKYNQLIRIEEELEGVAVYAGKRFRKVFF

SEQ ID NO: 12146 - protein, 198 aa, Streptococcus pneumoniae
GIEDILVVTGKSKRSIEDHFDSNFELEYNLKEKGKTDLLKLVDEATGMRLHFIRQTHPRGLGDAVLQAKAFVGNEPFVVMLGDDLMDITDEKAVPLTKQLMNDYEKTHASTIAVMPVPHEDVSSYGVIAPQDEGKDGLYSVETFVEKPAPEETPSDLAIIGRYLLTPEIFEILEKQAPGAGNEIQLTDAIDTLNKTQR

SEQ ID NO: 12147 - protein, 524 aa, Zea mays
  unsure (1)..(524): unsure at all Xaa locations
MEADAAAASGGLALLPAVLLLVALSTLVFSTWSNRNSRLPPXPMALPLIGHLHLIRPPPHRAFDRILARYGPLVYLRLGPSTHCVVAGTADXARDLLKHEASIPERPLTAVTRHLAYDDAGFAFAPYGPHWRFMKRLCMSELLGPRTVDQLRPVREAELAAVLEAARQAAAAREPIDVSRHLISMSNNAIMRMVASALPGHMTEAARDCAKHVAELVGAFNVEDYVGLCRGWDLQGLTRRTREVRDKFDALLEIMITGKEESRRRRHATTDTGGGTKDLLDILMDAAEDANAEVRLTRENIKAFVLDIFTAGSDTTATSVEWMLALLINHPACMDKLRAELDAVVGASRLVGEQDVPRLPYLQAVFKETLRLQPPAVFAQRETIEPVHVRGYVIPPKTSVFFNIFSIGRDPGXWEDPLQFRPERFMPGGAGAGXVDPKGQHMQLMPFGSGRRACPGMGLAMQAVPAFLAALVQCFHWEVPIPPGQSTAPPLYMEEAAGLVTARKNHLLLIPTPRLNPLPARAAT

SEQ ID NO: 12148 - protein, 506 aa, Rhodospirillum rubrum
MLYAAPGTADAIFAFKPRYDNFIDGTWQPPVRGEYFDNVTPITGKVFCKAARSTEEDITLALDAAHAAADRWGRTTAAERALILNRIADRLQDNLETLAYVESIDNGKPIRETLAADIPLAIDHFRYFAACIRAQEGSLSQIDETTIAYHFNEPLGVVGQIIPWKFPILMATWKLAPALAAGNCIVLKPAEQTPISILVLTELIADLLPPGVLNVVNGFGLEAGKPLASSKRIAKIAFTGETATARLIMQYASQNLIPVTLELGGKSPNVFFDDIASADDSFFDKAVEGFVMFALNQGEICTCPSRALIHESLYDRFIERALARVAVIKQGSPLDTETMIGAQASTEQMDKILSYMDIGREEGATVLAGGARAELGGELDGGYYVQPTVFKGNNSMRIFQEEIFGPVVAVTTFKDEDEALHLANDTHYGLGSGVWTRDGNRAFRFGRGIKAGRVWTNCYHLYPAHAAFGGYKQSGIGRENHHMMLDHYQQTKNLLVSYDPKAMGFF

SEQ ID NO: 12149 - protein, 293 aa, Mesorhizobium sp. BNC1
MKGIILAGGSGTRLHPITAAISKQMLPLYDKPMIYYPLSVLMLAGIREILVISTPHDLPAFRTLLGDGGSFGIELTFAEQPSPNGLAEAFVIGRSFIGSSACALVLGDNVFYGSGLAAKCRAAAARPSGATIFAYRVADPQRYGVVAFDPDTMLATEIEEKPRNPKSDWAVTGLYFYDNDVIDIAVDVKPSPRGELEITDVNRAYLKRGALTVERLGRGYAWLDTGTPDSLHEAASFVRTMEHRQGIKICCPEEIAMHMGWLSPEGAIARARRMKNDAYASYVIRCAQELENA

SEQ ID NO: 12150 - protein, 176 aa, Triticum aestivum
  unsure (1)..(176): unsure at all Xaa locations
MAPTVMASSATSVAPFQGLKSTAGLPVSRRSNGASLGSVSNGGRIRCMQVWPIEGIKKFETLSYLPPLSTEALLKQVDYLIRSKWVPCLEFSKVGFIFREHNASPGYYDGRYWTMWKLPMFGXCTDATQVINEVEEVKKEYPDAYVRIIGFDNMRQVQCVSFIAFKPPGCEESGKA

SEQ ID NO: 12151 - protein, 475 aa, Erwinia carotovora subsp. atroseptica SCRI1043
MMSTEIKAQVVVLGAGPAGYSAAFRAADLGLETVLVERYSTLGGVCLNVGCIPSKALLHVAKVIEEAKALAEHGIVFGEPKTDIDKIRLWKEKVINQLTGGLAGMAKGRKVKVVNGLGKFTGANTLEVDGENGKTTINFDNAIIAAGSRPIQLPFIPHDDPRVWDSTDALELKSVPERLLVMGGGIIGLEMGTVYHALGSQIDVVEMFDQVIPAADKDVVKVFTKRISKQFNLMLETKVTAVEAKEDGIYVTMEGKKAPAEPQRYDAVLVAIGRVPNGKNLDAGKAGVEVDDRGFIHVDKQMRTNVPHIYAIGDIVGQPMLAHKGVHEGHVAAEVISGKKHYFDPKVIPSIAYTEPEVAWVGLTEKEAKEKGISYETAIFPWAASGRAIASDCAEGMTKLIFDKETHRVIGGAIVGTNGGELLGEIGLAIEMGCDAEDIALTIHAHPTLHESVGLAAEIFEGSITDLPNPKAKKK

SEQ ID NO: 12152 - protein, 75 aa, Glycine max
  unsure (1)..(75): unsure at all Xaa locations
IYRIESYDVTSIPACIPMYLMSRLIKSLAFNWLISIXGSDKIFGRCVCFLNAPLKEXFHQETCRMIKALHKYDCL

SEQ ID NO: 12153 - protein, 207 aa, Olimarabidopsis pumila
MATFEDGSDLEAIQKHLFEDLLVCDGFMGDFDFDASFVSGLWCIEPQVPKQEPDSPVLDPDSFVNEFLQVEAESSPSSPELNTSPLSTYETDQSVKKAERFEEEEEARHYRGVRRRPWGKFAAEIRDPAKKGSRIWLGTFESDVDAARAYDCAAFKLRGRKAVLNFPLDAGKYEAPANSGRKRKRSDVQEELQRTQSNSSSSSCDAF

SEQ ID NO: 12154 - protein, 544 aa, Nostoc punctiforme PCC 73102
MIDIGQLAAQILTRVSLMTDTTTTTTSLNKFEKFKAQKDGLAIRDEIEKFAALGWEAMDETDRDHRLKWVGVFFRPVTPGKFMMRLRMPNGILTSSQMSVLAQVVQRYGDDGCADITTRQNIQLRGIRIEDLPDIFNRFHAVGLTTIQSGMDNIRNITGDPVAGLDADELYDTRELIQQIQDMLTNKGEGNPEFSNLPRKFNIAIAGGRDNSVHAEINDLAFVPAFKEANGQEFSKPPIFGFNILVGGFFSAKRCEAAIPLNAWVAPEDVVAVCRAVLEVFRDHGPRANRQKSRLMWLIDEWGLEKFRAEVDTRLGKSLLPAAAKDEIDWEKRDHIGVYKQKQPGLNYAGLNIPVGRLYAEDMFEIARLAEVFGSGEIRFTVEQNIVIPNISDSRLATFFTEPLLERFSINPGLLARSLVSCTGAQFCNFALIETKNRALEMIKALEEDLIFTNPVRIHWTGCPNSCGQPQVADIGLMGTKTRKNGKTLEGVDIYMGGKVGKDAHLGTCVTKGVPCEDLQPLLQDLLIKNFGAKLKQEALVISG

SEQ ID NO: 12155 - protein, 431 aa, Synechococcus elongatus PCC 7942
MIHEVFMPALSSTMTEGKIVEWVKAPGDRVEKGETVLIVESDKADMDVESFYEGYLATIIVPAGGNAPVGEAIALIAETEAEIEVAKQQAAGAGSAAATPATPAATAAPEPVAVSPEPVAAPTATRSDRLVASPRAKKLAKSLGVDLASLTGSGPHGRIVAADVEAAAGVTAKPAIATPVAPAVVTAPVAAPVATAPAAPAPTPAIAPGQFVPYSTFQQAVVRNMEASLNVPVFRVGYTITTDAIDSLAKQLKPKGVTITVLLAKAVAATLAKHPLLNARATETGVQYNEAINVAIAVAMDDGGLLTPVLGRADQTDLYSLARNWKDLVARSRTKQLKPEEYTTGTFTLSNLGMFGVDRFDAILPPGTGAILAIGASKPTLVATADGLFGVKRQMQVNLTCDHRHIYGAHAAAFLKDLADLIENRPESLTL

SEQ ID NO: 12156 - protein, 496 aa, Brassica juncea
MDPYKYRPASSYNSPFFTTNSGAPVWNNNSSMTVGPRGPILLEDYHLVEKLANFDRERIPERVVHARGASAKGFFEVTHDISNLTCADFLRAPGVQTPVIVRFSTVIHERGSPETLRDPRGFAVKFYTREGNFDLVGNNFPVFFIRDGMKFPDMVHALKPNPKSHIQENWRVLDFFSHHPESLNMFTFLFDDIGIPQDYRHMEGSGVNTYMLINKSGKAHYVKFHWKPTCGVKSLLEEDAVRVGGTNHSHATQDLYDSIAAGNYPEWKLFIQVIDPADEDKFDFDPLDVTKTWPENLLPLQPVGRMVLNKNIDNFFAENEQLAFCPAIIVPGIHYSDDKLLQTRVFSYADTQRHRLGPNYLQLPVNAPKCAHHNNHHEGFMNFMHRDEEVNYFPSRYDPVRHAEKYPTPPAVCSGKRERCVIEKENNFKEPGERYRSFTPESFDFRQERFIRRWIEALSDPRITHEIRSIWISYWSQADKTLGQKLASRLNVRPSI

SEQ ID NO: 12157 - protein, 492 aa, Brassica juncea
MDPYKYRPASSYNSPFFTTNSGAPVWNNNSSMTVGPRGPILLEDYHLVEKLANFDRERIPERVVHARGASAKGFFEVTHDISNLTCADFLRAPGVQTPVIVRFSTVIHERGSPETLRDPRGFAVKFYTREGNFDLVGNNFPVFFIRDGMKFPDMVHALKPNPKSHIQENWRVLDFFSHHPESLNMFTFLFDDIGIPQDYRHMEGSGVNTYMLINKAGKAHYVKFHWKPTCGVKSLLEEDAIRVGGTNHSHATQDLYDSIAAGNYPEWKLFVQIIDPADEDKFDFDPLDVTKTWPEDILPLQPVGRMVLNKNIDNFFAENEQLAFCPAIIVPGIHYSDDKLLQTRVFSYADTQRHRLGPNYLQLPVNAPKCAHHNNHHEGFMNFMHRDEEVNYFPSRYDPVRHAEKYPTPPAVCSGKRERCIIEKENNFKEPGERYRSFTPERQERFIGRWIDALSDPRITHEIRSIWISYWSQADKSLGQKLASRLNVRPNI

SEQ ID NO: 12158 - protein, 249 aa, Petunia x hybrida
MSRRYDSRTTIFSPEGRLYQVEYAMEAIGNAGSAIGISSKDGVVLVGEKKVTSKLLQTSTSSEKMYKIDDHVACAVAGIMSDANILINTARVQAQRYTFSYQEPMPVEQLVQSLCDTKQGYTQYGGLPPFGVSFLFAGWDKNFGFQLFMSDPSGNYAGWKAAAIGANNQAAQSMLKQDYKDDITREEAVQLALKVLSKTMDSTSLTSEKLELAEVFLSNGKVKYQACSPEKLNSMLVKSGLTQPSAEES

SEQ ID NO: 12159 - protein, 197 aa, Zinnia elegans
MSASRFIKCVTVGDGAVGKTCLLISYTSNTFPTDYVPTVFDNFSANVVVNGSTVNLGLWDTAGQEDYNRLRPLSYRGADVFILAFSLISKASYENVSKKWIPELKHYAPGVPIVLVGTKLDLRDDKQFFVDHPGATPITTAQGEELKKTIGAPEYIECSSKTQLNVKQVFDAAIKVVLAPPKAKKKKGKAQKACSIL

SEQ ID NO: 12160 - protein, 492 aa, Brassica juncea
MDPYKYRPASSYNSPFFTTNSGAPVWNNNSSMTVGPRGPILLEDYHLVEKLANFDRERIPERVVHARGASAKGFFEVTHDISNLTCADFLRAPGVQTPVIVRFSTVIHERGSPETLRDPRGFAVKFYTREGNFDLVGNNFPVFFIRDGMKFPDMVHALKPNPKSHIQENWRVLDFFSHHPESLNMFTFLFDDIGIPQDYRHMEGSGVNTYMLINKSGKAHYVKFHWKPTCGVKSLLEEDAVRVGGTNHSHATQDLYDSIAAGNYPEWKLFIQVIDPADEDKFDFDPLDVTKTWPENLLPLQPVGRMVLNKNIDNFFAENEQLAFCPAIIVPGIHYSDDKLLQTRVFSYADTQRHRLGPNYLQLPVNAPKCAHHNNHHEGFMNFMHRDEEVNYFPSRYDPVRHAEKYPTPPAVCSGKRERCVIEKENNFKEPGERYRSFTPERQERFIRRWIEALSDPRITHEIRSIWISYWSQADKTLGQKLASRLNVRPSI

SEQ ID NO: 12161 - protein, 741 aa, Archaeoglobus fulgidus DSM 4304
MDGADNRPHVHLFWLRILRSQKKKVIPSIFLRGAEMSEHVVKTTCKSCHGGCRVLVKVKSGKIVHIEGDPSSLTRGTMCPKGLASIKEVYNPSRLKYPLKRVGERGEGEWKRISWKEALDTIAEKMKEYIEEYGPSSILIGQGTGRGYNRYTFRFARSIGSPNVLLPAHFCYAPRLAAFGITVGGRLYCDYHGWGGEYPKTIVHWGKQLEYTNADGEMAVWFLRALEEAEHFILVDPKATPVAHRADLWLPVRPGTDAALALGMLNVIISEELYDKDFVEQWTHGFDRLRERVEEYSPDKVSRITWVPEDKIKLAAEWFATSRPGCIQIGQALEAGNNSIQTLRAIICLMAVTGNIERPGGMVNWVPPETGEMEEFALEVPPPEELPIGADRYKLLALPPFAMCHFESVCEDLLNGERRIKMMHLQGTNPVLAYANSKDVLKALLNVEFISVVDLYMSPTAKYADIVLPAAHWLETDDIYDMHPRFFVSAIVRAVEPVGEALPDNVIFNELGKRLAPKYWFSDVYEMLNYQLRKAGITWEEFKEIGVLARTGKEHYYKYKTNYWREGGGFPTPTGKIELYSTILENLNYDPLPHYREPNESPYSTPELSEKYPLILSTGGRVPYYFHSQYRQNPWLRELQPDPVALIHPETAEKYGIKDGDWIWIETPRGRIRQRARLFEAMNPRYVFAQASWYYPEKPDLGIFESNANVLTSNKPPFDPCIGSTTFRAMLCRIYRCDGGE

SEQ ID NO: 12162 - protein, 977 aa, Desulfovibrio gigas
  unsure (1)..(977): unsure at all Xaa locations
ATMALKTVDAKQTTSVCCYCSVGCGLIVHTDKKTNRAINVEGDPDHPINEGSLCAKGASTWQLAENERRPANPLYRAPGSDQWEEKSWDWMLDTIAERVAKTREATFVTKNAKGQVVNRCDGIASVGSAAMDNEECWIYQAWLRSLGLFYIEHQARIXHSATVAALAESYGRGAMTNHWIDLKNSDVILMMGSNPAENHPISFKWVMRAKDKGATLIHVDPRYTRTSTKCDLYAPLRSGSDIAFLNGMTKYILEKELYFKDYVVNYTNASFIVGEGFAFEEGLFAGYNKETRKYDKSKWGFERDENGNPKRDETLKHPRCVFQIMKKHYERYDLDKISAICGTPKELILKVYDAYCATGKPDKAGTIMYAMGWTQHTVGVQNIRAMSINQLLLGNIGVAGGGVNALRGEANVQGSTDHGLLMHIYPGYLGTARASIPTYEEYTKKFTPVSKDPQSANWWSNFPKYSASYIKSMWPDADLNEAYGYLPKGEDGKDYSWLTLFDDMFQGKIKGFFAWGQNPACSGANSNKTREALTKLDWMVNVNIFDNETGSFWRGPDMDPKKIKTEVFFLPCAVAIEKEGSISNSGRWMQWRYVGPEPRKNAIPDGDLIVELAKRVQKLLAKTPGKLAAPVTKLKTDYWVNDHGHFDPHKIAKLINGFALKDFKVGDVEYKAGQQIATFGHLQADGSTTSGCWIYTGSYTEKGNMAARRDKTQTDMQAKIGLYPGWTWAWPVNRRIIYNRASVDLNGKPYAPEKAVVEWNAAEKKWVGDVPDGPWPPQADKEKGKRAFIMKPEGYAYLYGPGREDGPLPEYYEPMECPVIEHPFSKTLHNPTALHFATEEKAVCDPRYPFICSTYRVTEHWQTGLMTRNTPWLLEAEPQMFCEMSEELATLRGIKNGDKVILESVRGKLWAKAIITKRIKPFAIQGQQVHMVGIPWHYGWSFPKNGGDAANILTPSVGNPNTGIPETKAFMVNVTKA

SEQ ID NO: 12163 - protein, 506 aa, Halomonas salina
MIYANPGSPESVVSFDARYGNYIGGEFVPPVKGQYFDNVSPVNGKPFCEIPRSTAEDIDKALDAAHAAAPAWGKTSAAERGNILLRIADRIEQNLELLAVAETWDNGKAVRETLNADLPLAVDHFRYFAGCIRAQEGTAADIDANTVAYHFHEPLGVVGQIIPWNFPILMAVWKLAPALAAGNCVVLKPAEQTPASILKLMELVGDLLPPGVVNVVNGYGAEAGQALATSTRIAKIAFTGSTPVGSHILKCAAENIIPSTVELGGKSPNIYFADIMDAEPEFIDKAAEGLVLAFFNQGEVCTCPSRALIQEDIYDAFMAKVMEKVATITRGNPLDTDVKVGAQASQEQFDKIMSYMEVAREEGAEFLTGGDKEHFDPAYDSGYYIQPTLLKGHNKMRVFQEEIFGPVVAVTTFKDEEEALAIANDTEFGLGAGVWSRDINVAFRMGRGIQAGRVWTNCYHQYPAHAAFGGYKKSGVGRETHKVALEHYQQTKNLLVSYDTNPLGFF

SEQ ID NO: 12164 - protein, 492 aa, Brassica juncea
MDPYKYRPASSYNSPFFTTNFGAPVWNNNSSMTVGPRGPILLEDYHLVEKLANFDRERIPERVVHARGASAKGFFEVTHDISNLTCADFLRAPGVQTPVIVRFSTVIHERGSPETLRDPRGFAVKFYTREGNFDLVGNNFPVFFIRDGMKFPDMVHALKPNPKSHIQENWRVLDFFSHHPESLNMFTFLFDDIGIPQDYRHMEGSGVNTYMLINKSGKAHYVKFHWKPTCGVKSLLEEDAIRVGGTNHSHATQDLYDSIAAGNYPEWKLFVQIIDPADEDRFDFDPLDVTKTWPEDILPLQPVGRMVLNKNIDNFFAENEQLAFCPAIIVPGIHYSDDKLLQTRVFSYADTQRHRLGPNYLQLPVNAPKCAHHNNHHEGFMNFMHRDEEVNYFPSRYDPVRHAEKYPTPPAICSGKRERCIIEKENNFKEPGERYRSFTPERQERFIGRWIDALSDPRITHEIRSIWISYWSQADKSLGQKLANRLNVRPSI

SEQ ID NO: 12165 - protein, 477 aa, Methylocystis sp. SC2
MSVQATHSGSARIDPRYDHAALAAARESDRFSLHTKHLNEMWVRVLKTIGYDVGFTRGLGPYLWDRKGDRYLDLLSGWGVFALGRNHPAVRDALVSVLDGELANLVQLDVSVLAGVLAEKLLGYAPWLEKVFFANSGAEAVEAAIKFARAATGRPGILHCAHSFHGLTYGSLSMNGDDIFKKGFGPLLPNAREVAFDDLDALERALAGRDVAAYFVEPIQGKGVNIPQEGYLLGAQALCRKYGTLFVADEIQTGIGRTGRFFAIDHYPGVEPDMIVVAKALSGGHVPVGAVLTRKWIFDKVFDRMDRAVVHGSTFSKNDLAMAAGVATLDVLKNERVIENAAKTGDRLLASFQRMAGGYELVADVRGKGLMIGVEFGPPKSFKLKAAWNLLETVNSGLFCQLISIPLFRDHKVLTQVAGHGNHTIKLLPPLTISDEDCDWIEQSFDAVIADAHKAPSAVWSLGKTLAEHAIKARMSG

SEQ ID NO: 12166 - protein, 418 aa, Magnaporthe grisea 70-15
MSLSNKLSITDVDVKGKRVLIRVDFNVPLDDNKNITNNQRIAGAVPTIKHALDNGAKTVILMSHLGRPNGSPNPKYSLKPVVSELEKLLGGKKVTFAPDCVGPEVEEIVNKAGEGDVVLLENLRFHIEEEGSAKDKEGNKTKADKAKVEEFRKGLTKLGDIYINDAFGTAHRAHSSMVGVDLPQKAAGFLMKKELDYFAQALESPKRPFLAILGGAKVSDKIQLIDNLLDKVNTLIVCGGMAFTFKKVLDNMAIGNSLFDEAGSKTVPELMKKAQEKGVKVVLPVDFITADKFAADAKTGSATDKEGIPEGWMGLDCGEKSVELFQSAIDESQTVLWNGPAGVFEFDAFAKGTKATLDAAVSGCGKGKIVIIGGGDTATVAAKYGVEDKLSHVSTGGGASLELLEGKELPGVTALSSK

SEQ ID NO: 12167 - protein, 311 aa, Azotobacter vinelandii
MSSLFAFPGQGAQQPAMLHQLPDEPLVRACLEEASDALGEDVRALDSAEALASTRAVQLCLLLAGVAGARLLLARGARPDYVAGLSVGAYPAAVVGGALELADAVRLVALRGELMERAWPGGHGMTAIMGLGPAELEPLLARVNGPDSPVFLANINADNQLVIAGSEAAMSAVGELARRSGAGAARRLAVSVPSHCALLAEPAARLAEAFAGVRLRRPALRYLSGSSARLLLDPEALRDDLAFNMCRVVDWRGTLRSAYERGVRLHVELPPGTVLSGLARRAMRQGAVIAFQGARLDTLDALLREEGCLDR

SEQ ID NO: 12168 - protein, 517 aa, Zea mays
MASHPPPAEPSSKSNKGQSEHEEIHVSSGGVLAYTDDDDCESRRPLLLRTPASAECYSVSAAVFPFLFPALGGLLYGYDIGATSGATISLKSSTFSGTTWYNLSSVQTGLVVSGSLYGALIGSVLAYTIADFLGRRKELILASISYFIGAFLTAVAPNFAIMVVGRFLYGIGIGLAMHAAPMYIAETAPSQIRGMLISLKEFFIVLGMLLGYIAGNLYVEVVSGWRYMYASSTPLCLIMGVGMCWLPSSPRWLLLCAIQGKGNLPETKENATRCLCRLRGQASPDLVSEQIDLILEELSYIDQEKQASFGEIFQGKCLTALIIGCGLVFFQQVTGQPSVLYYAATIFQSAGFSGASDATRVSILLGLLKLIMTGVAVLVVDRLGRRPLLIGGVSGITVALFLLSSYYTLLKDASYVAVIALLLYVGCYQLSFGPIGWLMISEVFPLRLRGRGLGVAVLVNFASNALVTFAFSPLEDLIGTGALFSGFGVIAVASLAFIFWIVPETKGLTLEEIEASL

SEQ ID NO: 12169 - protein, 198 aa, Streptococcus pneumoniae
GIEDILVVTGKSKRSIEDHFDSNFELEYNLKEKGKTDLLKLVDEATGMRLHFIRQTHPRGLGDAVLQAKAFVGNEPFVVMLGDDLMDITDENAVPLTKQLMNDYEKTHASTIAVMPVPHEDVSSYGVIAPQGEGINGLYSVETFVEKPAPEDAPSDLAIIGRYLLTPEIFDILEKQAPGAGNEIQLTDAIDTLNKTQR

SEQ ID NO: 12170 - protein, 341 aa, Ralstonia eutropha JMP134
MMTPLFTVSKEITMSMQALVLTRHNGPLELTTVPRPDAAPGQVLVRIAASGLNPLDTKIRAGAAAHARHPLPLVLGIDMAGTVEAVGAGVSAFKPGDEVYGMTGGVGGIQGSLAQYAAVDAALLAHKPANLSMREAAALPLAFITAYAGIVDRAHLQAGQTVLVQGGAGGVGHIAVQLARALGAEVFATASEANLDLVRQLGATPIDYRAQPVEAYVEAHTGGEGFDLVVDTVGGATLDTSFAAVKHFGHVVSALGWGTHALAPLSFREASYSGVFTLYPLLTGKHRAHHGEMLREATRLAEAGALKPVVDPRHFGLGTAEAGYEVVAAGTGRVKVVVDVR

SEQ ID NO: 12171 - protein, 198 aa, Streptococcus pneumoniae
GIEDILVVTGKSKRSIEDHFDSNFELEYNLKEKGKTDLLKLVDEATGMRLHFIRQTHPRGLGDAVLQAKAFVGNEPFVVMLGDDLMDITDENAVPLTKQLMNDYERTHASTIAVMPVPHEDVSAYGVIAPQGEGINGLYSVETFVEKPAPEDAPSDLAIIGRYLLTPEIFEILEKQAPGAGNEIQLTDAIDTLNKTQR

SEQ ID NO: 12172 - protein, 404 aa, Magnaporthe grisea 70-15
MVFEAIQPGPPDPMNLLKTTADADTSPDKVDLGVGIYRNEKGNYQELASVREAKVQLLQNDPGHDYECTTGNVDFIKHAAGVMFGRDSALLAAGKIASVQTISGTGAVHLAAQFISRFVHPSPTVYVGTPTWGNYKPLCELVGLQIVEFQQYDSEKRTLDFPAILAAVRSAPRASVFIFQACCHNPTGMDPTRAQWDELRAAVRDMGHFPVFDNAYQGLGDGLDEDAYVVRSWAAEGIEMFVCQSFSKNFALYGERCGVLHAFCPAGAGAARNVHDQLRCLIRWEFSSSPAYGSRLVTRILSSEELRSKWENELSVMRQRLKGNRELLFKLLTEEYKTPGNWQHILEEKGLFSYFRLSPAQCRALVDKHHIYLPTNGRINISGLNDANAKRVASKIDEVVRDTQ

SEQ ID NO: 12173 - protein, 358 aa, Nostoc punctiforme PCC 73102
MKNNDNFVLRNTWYYALPSNQIKPGMMISRIFLGEPVLLVRDQNGKVSAMRDICPHRAVPLSCGRFDGQEVECCYHGWRFNSAGRCTAIPSLVEEQQMDLSRFDVQSYEVREAQGNIWIYMADPDKSQPAASDMEIPVIPGFEERSLRGASPTPQFVEVMKFPCFVDHAVVGLMDPAHSPYVHRAWWWRSGQLHEEVKQFDASPYGFTMRRHRLPANGGRLYLLIGGGVPETEISFRLPSVRIEETTIGNHRVVNLTAVTPISDTETEVTFVLYSTLPWVGFFKPLLHVLAQTFLGQDRTVVEKQQIGLKYNPVLRLIKDSDMQAQWYYQLKREYARSVAEGREFVNPVKDQVLRWRA

SEQ ID NO: 12174 - protein, 525 aa, Cucumis melo
MASSMAAVGVLRLPTSSSSSSSSSNGGTNRARRTSLRSLSFGASQISGDKIDFRGFGLGSRRVSGGRVAPSIVSPKAVSDSKNSQTCLDPDASRSVLGIILGGGAGTRLYPLTKKRAKAAVPLGANYRKIDIPVSNCLNSNISKIYVLTQFNSASLNRHLSRAYAVIWWLQNEGFVEVLAAQQSPENPNWFQGTADAVRQYLWLFEEQNVLEYLVLAGDHLYRMDYERFIQAHRETDADITVAALPMDEKRATAFGLMKIDEEGRIIEFAEKPKGEQLKAMKVDTTILGLDDERAKEMPYIASMGIYVISKDVMLNLLRDKFPGANDFGSEVIPGATSIGMRVQAYLYDGYWEDIGTIEAFYNANLGITKKPVPDFTFYDRSSPIYTQPRYLPPSKMLDADITDSVIGEGCVIKNCKIHHSVVGIRTCISEGAIIEDTLLMGADYYETDADRRLLAAKGSVPIGIGRNSHIKRAIIDKNARIGENVKIVNGDNVQEAARETDGYFIKSGIVTVIKDALIPSGTII

SEQ ID NO: 12175 - protein, 625 aa, Erwinia carotovora subsp. atroseptica SCRI1043
MAIEINVPDIGADEVEVTEVLVKVGDKVEAEQSLITVEGDKASMEVPSPQAGVVKEIKVSVGDKVETGKLIMIFDSADGAADAAPAKAEEKKEAAPAAAPAASAAKEVNVPDIGGDEVEVTEVLVKVGDTVAAEQSLITVEGDKASMEVPAPFAGTVKEIKISNGDKVSTGSLIMVFEVAGSAPAASAEKTEAAPAAAPAASAAKEVNVPDIGGDEVEVTEVMVKVGDKIAAEQSLITVEGDKASMEVPAPFAGTVKEIKISTGDKVKTGSLIMVFEVEGAAPAPAAKQEAAAPAPTAKSAAAPAAKAEGKGEFAENDAYVHATPVIRRLAREFGVNLAKVKGSGRKGRILREDVQAYVKDAVKRAEAAPTAAAGGGLPGMLPWPKVDFSKFGEVEEVELGRIQKISGANLSRNWVMIPHVTHFDKTDITDLEAFRKQQNVEAEKRRLDVKITPVVFIMKAVAAALEQMPRFNSSLSEDAQRLTLKKYINIGVAVDTPNGLVVPVFKDVNKKGIVELSRELMAISKKARDGKLTAGEMQGGCFTISSLGGIGTTHFAPIVNAPEVAILGVSKSAMEPVWNGKEFTPRLMMPMSLSFDHRVIDGADGARFITIINNTLSDIRRLVM

SEQ ID NO: 12176 - protein, 437 aa, Nostoc punctiforme PCC 73102
MKKDVFRDAQRSKIGVLVTTHACNPWVSPIPNSQFPIPNTQYPIHSQGNMESLTSRMQDVQSPIIPVVGELIKNSPGTISLGQGVVHYNPPPEAIEFLSKFLADPANNLYKSVEGIPPLLTAIAGKLQAFNGIEINGENCIVVTAGSNMGFMNAILAITNPGDEIILNTPYYFNHEMAIAIAGCRAVLVATDENYQLRPEAIAQAITPKTRAIVTISPNNPTGVVYSEAALRQVNQICDTHRIYHISDEAYQYFTYNGVKHVSPGAFGKSKYTISLFSLSKAYGFASWRIGYMVIPKHLFVAIKKVQDTILICPPVISQYAALGALQAKEEYLQSNIGAIFQVRQLVLDSLNRLEGLCSITPANGAFYFFLKVNTQMDAFELVKRLIQEHKVAVIPGTTFGMDDGCYLRVAYGALQKETAKEGIERLVQGLETIVRS

SEQ ID NO: 12177 - protein, 474 aa, Pirellula sp. 1
MKTARHELVILGGGPAGYVAAIRAAQLGIDVACIDDNPRFGGTCVRVGCIPSKALLESSHLYEEAQHKFADHGLNVSNVEVDLDVMMKRKEKIVESLTGGIDMLFDRRGVTAYHGRGRLRDVDSIEITPSEGAAEDQPTLVTADQIMLCPGSVPAQLPFVEEDGDRIGNSTTALSFPEVPEELVVIGGGYIGLELGSVWNRLGSNVIVLEAFDRIMPGLDKEMATLAHRSFKKQGMDIRTGTFVASAKVDPKPGDKKPCVIKIKNGETIRCDRVLLATGRAPATKSMGLEEAGVKLDERGFIQVNHQFETSVTGIYAIGDCIGGAMLAHKAMEEGIVCVEQMAGIASEMNYEVIPAIVFTHPEIAMVGKTEEELKEAGIEYNKGVCPLGANGRARTLGDIDGRVKILADAATDRVLGVHIIGPRAGDMIAEAAAAMEFGASSEDIARTCHAHPTLSEAVHEAALAIDDRAIHTA

SEQ ID NO: 12178 - protein, 150 aa, Clarkia delicata
KGEVVNNHDELMSNFFAQPDALAYGKTPEQLKKENVSEHLIPHKTFTGNRPSLSILLPTLDAYRIGQLLGIYEHRVAVQGFVWGINSFDQWGVELGKSLATQVRKQLHASRVKGEPVEEGFNFSTKTLLTRYLQATSDVPADPSTLLPNI

SEQ ID NO: 12179 - protein, 504 aa, Xanthomonas axonopodis pv. citri str. 306
MTQTNGFDALHAHAQRLRGAAIPALLAAEPERPTQYARQVGPLYFNFARQKYDRAALDALFAIARERDLSGAFQRLFRGEQVNVTEQRAALHTALRGDLTDAPVASEAYATAEEVRQRMGSLIQQLEATDVTDIVSVGIGGSDLGPRLVADALRAPSGARFRVHFVSNVDGAAMQRTLATLDPARTAGILISKTFGTQETLLNGSILHAWLGGSERLYAVSANPERAAKAFDIAPGRVLPMWDWVGGRYSLWSAVGFPIALAIGFERFEQLLEGAAQFDAHVLNTPLEENVAVLHGLTAVWNRNLLGSATHAVMTYDQRLALLPAYLQQLVMESLGKRVKLDGSAVDSDTVSVWWGGAGTDVQHSFFQALHQGTSVVPADFIGTVHNDDPYAENHTALMANVLAQTEALANGQDSSDPHRSYPGGRPSTVILLDALTPQALGALISMYEHSVYVQSVMWGINAFDQFGVELGKQLASQLLPALKGESVDVADPVTRELLNKLRG

SEQ ID NO: 12180 - protein, 472 aa, Trichodesmium erythraeum IMS101
MYEKITPPTTGSKVTFSNGQPIVPDDPIIPFIRGDGTGLDLWPASQKVFDAAIATAYGDKRKINWFKIYAGDEACDKYGTFQYLPEDTLNAIKEYGIAIKGPLTTPIGGGIRSLNVALRQINDLYACVRPCRYYTGTPSPHKTPEKLDVIIYRENTEDIYLGIEWREGTDIASKLIDILNKDLIPATLEHGKKQIRFDSGIGIKPVSKTGSQRLVKRAIQNALRLPKSKQMVTLVHKGNIMKYTEGAFRDWGYELATTEFRQECVTERESWILSNKEENLNISSEENSRKIDPGYDALTPEKQAEICQEVEDVLAAIWDSHGHGKWKEKIMVNDRIADSIFQQIQTRPEEYSILATMNLNGDYLSDAAAAIVGGLGMGPGANIGDKCAIFEATHGTAPKHAGLDRVNPGSLILSGVMMLEYIGWQEAADLIKKGIEISISNGEVTYDLARLMEPSVPALKCSEFADAIIKHF

SEQ ID NO: 12181 - protein, 336 aa, GIBBERELLA ZEAE PH-1
MVSNTELPSRMRAAYIAQHNKPYALGDRPLPFIRDTDILVRVHAAGFCHSDLQALRGEFEKPAPIGLVPSHEIAGTIAKIGSSYRGDLKVGDRVGILNFKHACGSCVGCRLTTRKGEKLDPRFCNDRETAGFLHDGGFADYASADPETTVRLPDSISFQQAAPLTCAGATVWASLEAATSGLSKGETVAIVGIGGLGHLGVQFAKALGFRTIAVDSRQAGRKLAEEVENHKLKPDLVVDSSDTDCASNIIYDFTKGEGVAAAVVCTPSLEANRWALTILRIKGTLGILGLPQNPWQFDAAPLVFKELSIKSNYVAGKEATDRMMRILYRLTGSPAL

SEQ ID NO: 12182 - protein, 525 aa, Cucumis melo
MVAMDSCFVSLKSNTQLMKGNWGGLDRCENGFMVEKVRGGFNENVWIKSLKYEKKALKLTPNVAYAVTPNVSKQPMTIQVPTVPKVKANPKNVASIILGGGAGTHLFPLTKRSATPAVPAGGCYRLIDIPMSNCINSGINKIFVLTQFNSASLNRHISRTYFGNGVTFKEGFVEVLAATQTSGESGMYWFQGTADAVRQFIWVFEDAKNRNVENILILAGDHMYRMGYMDFVQNHIDRNADISISCAAVDDSRASDYGLVKLDSRGRIIQFSEKPKGANLNRMRVDTTSFGLSREESLKSPYIGSMGVYVFKTDVLLNLLKWRYPSSNDFGSEIIPAAIKDHNVQAFMFRDYWEDIGTIKTFYDANLALHGNVSKFEFYDPKTPFYTSPRFLPPTKIDRCQIVDAIISHGCFLRECSIQHSIVGERSRLDYGVELKDTIMMGADNYQTESEITGLLAEGKVPVGIGPNTKIRKCIIDKNAKIGKDVIIMNKDGVQEADRPEQGFYIRSGITIVMEKATIEDGTVI

SEQ ID NO: 12183 - protein, 198 aa, Streptococcus pneumoniae
GIEDILVVTGKSKRSIEDHFDSNFELEYNLKEKGKTDLLKLVDEATGMRLHFIRQTHPRGLGDAVLQAKAFVGNEPFVVMLGDDLMDITNDKAIPLTKQLMNDYEKTHASTIAVMPVPHEDVSSYGVIAPQGEGINGLYSVETFVEKPAPEEAPSDLAIIGRYLLTPEIFEILENQAPGAGNEIQLTDAIDTLNKTQR

SEQ ID NO: 12184 - protein, 429 aa, Clarkia delicata
AAHLKQKIDRMNNGDHINSTENRSVLHVALRAPRNSVICSDGKNVVPDVWNVLDKIKDFSERVRNGSWVGATGKELKDVIAVGIGGSFLGPLFVHTALQTDPEASKNARGRELRFLANVDPIDAARNISGLNPETTLVVVVSKTFTTAETMLNARTLREWISSALGVSAVAKHMVAVSTNLPLVEKFGIDPNNAFAFWDWVGGRYSVCSAVGVLPLSLQYSFAVVEKFLQGAHSIDQHFSSAPFEKNIPVLLGLLSVWNVSFLGYPARAILPYSQALEKLAPHIQQVSMESNGKGVSIDGLPLPFESGEIDFGEPGTNGQHSFYQLIHQGRVIPCDFIGVVKSQQPVYLKGEVVNNHDELMSNFFAQPDALAYGKTPEQLKKENVSEHLIPHKTFTGNRPSLSILLPTLDAYRIGQLLGIYEHRVAVQG

SEQ ID NO: 12185 - protein, 518 aa, Cucumis melo
MHKISSQEKNQCFGFWGDSSLGRNGRWKQIQRNASSRNNSDSSSSSRARSLHPELLILFSCSEVNEETTTLQAPIFEAPRADPKKVASIILGGGAGTRLFPLTSQRAKPAVPIGGCYRLIDIPMSNCINSGIEKISSNAVNSFSLNRHLARIYNFGNGVNFGDGFVEVLAATQTSGETGKKWFQGTADAVRPFIWLFEDAQTKNVEHTLILSGDHLYRMDYMDFVQRHIDTNADITVSCIPMDDSRASDYGLMKIDDTGRIIHFSEKPKGSDLEEMQVDTAVLGLSDEDARKNPYIASMGVYIFRTDLLLKLLTWSYPACNDFGSEIIPAAVKDYKVQAYLFNDYWEDIGTVKSFFDANLALTEQPPKFEFYDPKTPFYTSPRSCPPSKVEKCRIVDAIISHGCFLRECTVEPLIVGVRSRLEYGVELKDTMMMGAYYYQTESEIASLLAEGKIPIGIGENTKIRNCIIDKNAKIGRNVVIANTDDVQEADRPEEGFYIRSGITVTLKNATIKDGTII

SEQ ID NO: 12186 - protein, 125 aa, Arabidopsis thaliana
NHLGQVFDKLLNQIGESEEFELPEWLNKGKPTPYIFIRRNIYLTEKVKRRVEDDGIFCSCSSSSPGSSSTVCGSNCHCGMLFSSCSSSCKCGSECNNKPFQQRHVKKMKLIQTEKCGSGIVAEEE

SEQ ID NO: 12187 - protein, 233 aa, Triticum aestivum
  unsure (1)..(233): unsure at all Xaa locations
MTSRSGPGAMARRRTGRRSITAEIRRPRMGAGGRGGSPRPREMFVCNLPRRCGVDELLELFGPYGTVLSVEVSRDAETGISRGCGFVTMRSLAEARTAINALDGFDLDGREMFVKLAAHVVASRRNPSLSHTPPMKDHIFESRYKIYVGNLAWSVQPQHLREHFTQCGTVVSTRLLTDRKGGRSRVYGFLSFSSAEELEAAXQLNXTEFHGRDIIVREXHVKSPDTLSQTLES

SEQ ID NO: 12188 - protein, 80 aa, Clarkia delicata
KGEVVNNHDELMSNFFAQPDALAYGKTPEELKKENVSEHLIPHKTFTGNRPSLSILLPTLDAYRIGQLLAIYEHRVAVQG

SEQ ID NO: 12189 - protein, 288 aa, Triticum aestivum
  unsure (1)..(288): unsure at all Xaa locations
ASTSLLFTSHKEERIQGERATPPSPAPAEPRFSYRRAKPNRINPPRAPVDATAAAAGGRDGTQRTLKPYVTGNLVIAMKYKDGVIMACDTGASYGSTLRYKRVERIKAVVKHILILGSXGEFSDFQEILRYXLDELTLNDHMWDDGNSLGPKEXHAYLHXVMYNRXRNKFDPLWNSQALVGGRTYLGMVNMIGYXFEENHIATGFGNXHMAIPILRGEWRXDMTFEEAVKLIEKCLLVLLYRDRSSINKFQIAKITTEGSTIYPPYALKTNWGFAAFENPSKGAVGTW

SEQ ID NO: 12190 - protein, 180 aa, Bacillus subtilis subsp. subtilis str. 168
MMKHDIEKVLISEEEIQKKVKELGAELTSEYQDTFPLAIGVLKGALPFMADLIKHIDTYLEMDFMDVSSYGNSTVSSGEVKIIKDLDTSVEGRDILIIEDIIDSGLTLSYLVELFRYRKAKSIKIVTLLDKPSGRKADIKADFVGFEVPDAFVVGYGLDYAERYRNLPYIGVLKPAVYES

SEQ ID NO: 12191 - protein, 371 aa, Agrobacterium tumefaciens str. C58 (Cereon)
MDGTPISPTARAKASSSDCNRGILLKTHRIALIPGDGIGQSVTDAAWQVLNAVAKTSGFVLEGTEFPWSCAFYKETGAMMPKDGIETLRGFDAIMLGAVGWPAEVPDSVSLHGLLLPIRKAFVQYANIRPHRLLSGVQGPLKADGFDILCIRENTEGEYSGAGGRVHQGTEDEVAVETSIFTRKGVERILRFGFEQAQKRRGKLASITKSNAQKYSMVFWDEVTHKLAAEYPDVEVSSYHIDAMAARMVMAPESLDVVVASNLFGDILTDLGAAIQGGLGFAASANINPDRSAPSMFEPVHGSAPDIAHLGIANPIAAIWSGAMMFEHLGEKDAAAKIMAALETATGRGIGTVPGKDKTDTITAAVLAALA

SEQ ID NO: 12192 - protein, 554 aa, Glycine max
  unsure (1)..(554): unsure at all Xaa locations
MGSSGFSWKLADHPKLPKGKTVAVVVLDGWGEATPNEYNCIHKAETPCMDSLKKGAPERWRLVRAHGTAVGLSTGDGMGNKNFQRVSLWLARDAILSGKFDQVRVNLPNGDMVGHTGDIEATVVACKAADAAVKMILDAIEQVGGIYVVTADHGNAEDMVKRDKSGKPLLGKDGIIENLTTRSLEPVPIAIGGHGLAPGVRFRNDVPTGGLANVAATVMNXMDSRLEAPYKFTNALEAVKKLRAEPKANDQYLPPFVIVDESGKPVGPIVDGDAVVTFNFRADRMTMIAKALEYENFDKFDRVRYPKIRYAGMLEYDGELKLPSHYLVSPPEIDRTSGEYLVYNGIRTFACSETVKFGHVTFFWNGNRSGYFNAELEEYVEIPSDSGITFNEQPLMKALQIAEKARDAILSGKFDQVRVNLPNGDMVGHTGDIEATVVACKAADAAVKMILDAIEQVGGIYVVTADHGNAEDMVKRDKSGKPLLGKDGKIQILTSHTLEPVPIAIGGPGLAPGVRFRNNVPTGGLANVAATVMNLHGFEAPSDYETTLIEVVDN

SEQ ID NO: 12193 - protein, 674 aa, Erwinia carotovora subsp. atroseptica SCRI1043
MNRFVIASTQDCMGCHACEIACVISHNDEQYPDSTAVFQPRIKAFNTPTLRAAVTCRHCEDAPCASVCPTQALIKKDNSIQLVQEKCIGCKSCVLACPFGAMSMVTNPMDNSAIAHKCDLCADRPEGQACVEACPTQALQLISEHTLTARRQEKQQLMALRSAAHWQRETPVLKTLTTHPLNKRKNWPRRDAEKKPLTQRTSTFDEIYHGFSVQQTEDQADRCLSCGKRAVCEWTCPLHNNIPELLSLAKQGRIFEAVELSHQTSSLPEICGRVCPQDRLCEGACTLGKEYGAITIGNIERYITDTAMAMGWSPDMTRVVPSGKRAAIVGAGPAGLACADVLARNGVQAVVFDRHPEIGGLLTFGIPSFKLDKDVLIHRRKVFSTMGIEFQLNTEVGKDISLAQLLDDYDTVFLGVGTYRSMKANIDNEDAPGVFDALPFLIANTKHVMGLPELDDEPYISMAGKRVVVLGGGDTAMDCLRTSVRQGAISVTCAYRRDEANMPGSKKEVKNSREEGVDFMFNVQPQKICLNEQGEVCGISLVRTELGEPDASGRRRPRPIPSSEFVQPAEAVITAFGFQSHSMPWLEDADIGLDNWGHITAPLDSQTPCQTNHPRIFAGGDAVRGADLVVTAIADGRKAALGMIETMGLTAVTGAIPAHPQRPEMNATREELRS

SEQ ID NO: 12194 - protein, 299 aa, Streptococcus pyogenes MGAS8232
MTKIVECIPNFSEGQNQAVIDGLVATAKSIPGATLLDYSSDASHNRSVFTLVGDDQSIQEAAFQLVKYASENIDMTKHHGEHPRMGATDVCPFVPIKDITTQECVEISKQVAERINRELGIPIFLYEDSATRPERQNLAKVRKGQFEGMPEKLLEEDWAPDYGDRKIHPTAGVTAVGARMPLVAFNVNLDTDNIDIAHKIAKIIRGSGGGYKYCKAIGVMLEDRHIAQVSMNMVNFEKCSLYRTFETIKFEARRYGVNVIGSEVIGLAPAKALIDVAEYYLQVEDFDYHKQILENHLLG

SEQ ID NO: 12195 - protein, 181 aa, Zea mays
MAYSMLSSAAVVTSPAQATMVAPFTGLKSSSAFPVTRKANNDITSIVSNGGRVSCMQVWPPIGKKKFETLSYLPDLTEVELGKEVDYLLRNKWIPCVEFELEHGFVYREHGSTPGYYDGRYWTMWKLPLFGCTDSAQVLKEVQECKTEYPNAFIRIIGFDNNRQVQCISFIAYKPPSFTGA

SEQ ID NO: 12196 - protein, 395 aa, Zea mays
MERSQRQSPPPPSPSSSSSSVSADTVLVPPGKRRRAATAKAGAEPNKRIRKDPAAAAAGKRSSVYRGVTRHRWTGRFEAHLWDKHCLAALHNKKKGRQVYLGAYDSEEAAARAYDLAALKYWGPETLLNFPVEDYSSEMPEMEAVSREEYLASLRRRSSGFSRGVSKYRGVARHHHNGRWEARIGRVFGNKYLYLGTFDTQEEAAKAYDLAAIEYRGVNAVTNFDISCYLDHPLFLAQLQQEPQVVPALNQEPQPDQSETGTTEQEPESSEAKTPDGSAEPDENAVPDDTAEPLTTVDDSIEEGLWSPCMDYELDTMSRPNFGSSINLSEWFADADFDCNIGCLFDGCSAADEGSKDGVGLADFSLFEAGDVQLKDVLSDMEEGIQPPAMISVCN

SEQ ID NO: 12197 - protein, 213 aa, Caulobacter crescentus CB15
MFEPPSADAILAARRSLAAADPALATVEAVTPPFAWRVGLGGFPGLLKMIVQQQVSLASAAAIWARVEAGLPEMTPEIVADHDEAYLRTLGLSQPKARYARAIAEAHLSGVCDFDALRALSDEEAIAALTAIKGVGRWTAEVFLMFTQGRLDLFPGGDVALQEAMRWVDRAETRPTEKQAYARAELWRPYRGVAAHLLWACYGAVKRREIAPF

SEQ ID NO: 12198 - protein, 174 aa, Triticum aestivum
WIPRAAGIRHEAQRLCFLSLLLLLLLAAAASATADAAAAEEFTEELLLRPLPDRKALAHFHFRSSAPPASAAGRHHHLFPKAISQLVQKFHISELELSFTQGRWNYEQWGGYDPMSTNNAKPPGVELWAIFDLPLAEIDATWKNLTHTLSGLFCASINFLESSTAFSAPRWGFK

SEQ ID NO: 12199 - protein, 384 aa, Photorhabdus luminescens subsp. laumondii TTO1
MTKFDTKTVHAGYTPDHTGAVMPAIYATSTYAQSAPGQHTGYEYSRSGNPTRDALESAIAELENGSRGYAFSSGLAASSTVLELLDKDSHLVAVDDLYGGTYRLLEKVRSRTAGLRVTYVEANDISGLEAAIRPDTKMIWVETPTNPLLKLADLTAIAQIAQRHSIISVADNTFASPYLQRPVDLGFDIVVHSATKYLNGHSDVIAGLAVVGKNAELAEKLGFLQNSVGGVLDPFSSFLVLRGMRTLALRMQRHIDSASKIAHWLEQQPQIETVFYPGLASHPQHELAKRQMKGFGGMISVHLKGDDDYARRLIQELKLFTLAESLGGVESLISQPFSMTHASIPLEKRLASGITPQLVRISVGIEDAEDLIADLAQALEKAAQ

SEQ ID NO: 12200 - protein, 443 aa, Rhodobacter capsulatus
MTTSQFRPGVHPGRLPPEGYCTAFADVAPPLTAHQAQVAAARCYFCAEAPCTTACPSDIDVPLFIRQILTGTPEAAARTILSQNIMGGMCARVCPTETLCEGACVREAAEGMPVEIGALQRFATDRLQAAGVHPFTRAPRTEKSVAVVGAGPAGLACAHRLAMLGHEVTVYDARLKPGGLNEYGIAAYKAPGGFAAREVAWLLQIGGIAVLENWKLGRNGSVADLLAEHDAVFLGMGLAGVNALTIPGAEHATPATEFIAHLRQAGDLATVPVGRRVVVIGGGMTAVDAAVQAKLLGAETASIVYRRSQAEMPASAHEQEHAQKNGVRIVPNAAPVAIRKDDQGYEVEFARTETQGGKLVQLDDTLRIKADQIFTAIGQTLGPVPEGLTITGGKIEIDAQGRTGMAHVWAGGDCATGGEDLTVTAVAQGRDAAEDIHAFLMGA

SEQ ID NO: 12201 - protein, 80 aa, Clarkia delicata
KGEVVNNHDELMSNFFAQPDALAYGKTPEQLKKENVSEHLIPHKTFTGNRPSISILLPTLDAYRIGQLLAIYEHRVAVQG

SEQ ID NO: 12202 - protein, 526 aa, Clarkia delicata
VEFDNIFLDYSRQQASPDTISKLYKLADAAHLKQKIDCMYNGDHINSTENRSVLHVALRAPRNSAICSDGKNVVPDVWNVLDKIKDFSDRVRNGSWIGATGKELKDVIAVGIGGSFLGPLFVHTALQTDPEASKNARGRELRFLANVDPIDVARNISGLNPETTLVVVVSKTFTTAETMLNARTLREWISSALGPSAVAKHMVAVSTNLPLVEKFGIDPNNAFAFWDWVGGRYSVCSAVGVLPLSLQYGFAVVEKFLQGAHSIDQHFSSAPFEKNIPVLLGLLSVWNVSFLGYPARAILPYSQALEKLAPHIQQVSMESNGKGVSIDGLPLPFESGEIDFGEPGTNGQHSFYQLIHQGRVIPCDFIGVMKSQQPVYLKGEVVNNHDELMSNFFAQPDALAYGKTPEQLKKENVSEHLIPHKTFTGNRPSISILLPTLDAYRIGQLLAIYEHRVAVQGFVWGINSFDQWGVELGKSLATQVRKQLHGSRVKAKPVEGFNFSTKTLLIRYLEATSDVPADPSTLLPNI

SEQ ID NO: 12203 - protein, 413 aa, Methylobacillus flagellatus KT
MSTKIKVPTTGEKISVNADNSLNVPDHPIIPFIEGDGIGVDITPPMRHVVDSAVAKAYGGKRAIAWMEVYAGEKAVKTYGDNTWLPDETLKAVKDYVISIKGPLTTPVGGGIRSLNVTLRQELDLYVCLRPIQYFQGVPSPVKHPEKTNMVIFRENTEDIYAGIEWAAGTDEVKKVVDFLSDMGVRKKIRFPEASAIGIKPVSIDGSKRLVRKAIQYAIDNNRKSVTIAHKGNIMKFTEGGFKTWGYEVAKEEFGAVEIDGGPWCKLPNGIIIKDCIADAFLQEILLHPADYDVVATLNLNGDYISDALAAQVGGIGIAPGANISDTVAMFEATHGTAPKIAGKDIANPSSLILSAEMMLRHLGWTEAADLVINGVAKAIQAKRVTHDFSSQMEGATQVGSAEFGAEIVKHMS

SEQ ID NO: 12204 - protein, 550 aa, Rhodopseudomonas palustris CGA009
MAAKVSPLAGKTVDPNSLVNVPRLVTAYFAGKPDPAVATERVAFGTSGHRGSSLNNAFNESHIVAVSQAVCDHRRAAGITGPLYIGIDTHALAEPALVSALEVFAANEIDVVIDERGGYTPTPVISHAILTHNRGRTDGLADGVVVTPSHNPPEDGGFKYNPPNGGPADTDITSAVEKAANAMLENGLKGIKRISYDRARKASCVHRRDYITPYVEDLANVVDMEAIRSSGVKLGIDPLGGAAVHYWQPIIERYKLDAKVVSDAVDPTFRFMTADWDGKVRMDCSSPYAMARLIGMRNDFDVAFANDTDADRHGIVTRSSGLMNPNHYLSVAIAYLFAHRPHWGRDAAIGKTAVSSAMIDRVASKIGRKVVETPVGFKWFVDGLIGGSFGFAGEESAGASFLRRDGSVWTTDKDGIILGLLAAEITAVSKADPGELYQRLTAELGAPFYARIDAAASPAQKALFKTLTAEKLGVKQLAGEPVTATLTKAPGNGQSIGGVKVTTANGWFAARPSGTEDVYKIYAESFVSADHLSKIQHEAQAALSAMFAAG

SEQ ID NO: 12205 - protein, 207 aa, Arabidopsis arenosa
MASFQESSDLEAIQSHLFEDLLVCDGFMGDFDFDASFVSGLWCIEPQVPKQEPDSPVLDPDSFVNEFLQVEGESSSSSPELNSSSSSTYETDQSVKKAERFEEEEEARHYRGVRRRPWGKFAAEIRDPAKKGSRIWLGTFESDVDAARAYDCAAFKLRGRKAVLNFPLDAGKYEAPANSGRKRKRSDVQEELQRTQSNSSSSSCDAF

SEQ ID NO: 12206 - protein, 391 aa, Streptococcus criceti
MKFETSHLLKKLPKQFFADLVTKVNAKIAQGADVINLGQGNPDRPTYDFIVKALQDSAAKPASHKYSLFRGNPPFKEAAADFYKANYQVDLDSQTEICVLGGSKIGLVELPWALMNPGELLLLPDPGYPDYLSAVALGQVDCETYPLLAENDFLPDLTAIPEESARRAKFIYINYPNNPTGAVATPAFYESLVDWAKKYEVGVVSDFAYGALGYQGYKNPSFLSTPGAKDVGIELYTFSKTFNMAGWRLAFAAGNADMIEALNLIQDHLFVSIFPAIQDAGVAALSDPRAKEAIAALNQRYDQRREAFVQAAAQIGWQAFPSKGSFYAWMPVPEGFNSQNFADLLLEEAHVAVAPGIGFGQEGDSYVRIGLLVEPDHLAQAVERIGQLDLF

SEQ ID NO: 12207 - protein, 192 aa, Xylella fastidiosa Ann-1
MNMLNVLRFPVLALALAFVSSGVLADVGSLLDLDYRPLAGKETVNLQRLYGGKVLLVVNTASKCGFTPQYEGLEALHQKLSPLGFAVLGFPSNDFKGQEPGDEQQIQEFCTLTYGVKFPMFQKVHVKGDEVTPLYQRLTQTTGVAPGWNFHKYLIARDGHVVAQFDSRTRPDDPILLEAIKRELAKSVQVVH

SEQ ID NO: 12208 - protein, 198 aa, Zea mays
QSFPGLVVLYGGVVKKKWAVNSAFMALYAFAAVWICWVTWAYNMSFGDRLLPLWGKARPALSQGGLVGQAGLPATPAAEPLYPMATVVYFQCVFAAITLVLVAGSLLGRMSFAAWMLFVPLWLTFSYTVGAFSVWGGGFLFQWGVIDYCGGYVIHLSAGFAGFTAAYWVSRSIDRSSANNACVQRAVFISELNSYMPA

SEQ ID NO: 12209 - protein, 391 aa, Actinobacillus pleuropneumoniae serovar 1 str. 4074
MSVIKMADLDLAGKRLFIRADLNVPVKDGKVTSDARIRATIPTLKLALQKGAKVMVTSHLGRPTEGVFEEANSLQPVVDYLNASDLGVPVRLVRDYLDGVEVAENEIVVLENVRINKGEKKNDPELAKKYAALCDVFVMDAFGTAHRAEGSTYGVAEYAPVACAGPLLAAELDALGKALKEPQRPMLAIVGGSKVSTKLTVLDSLSKIADQLIVGGGIANTFIAAEGHPVGKSLYEADLIPEAKRLAAATNIPVPVDVRVGTEFSEIAPATEKAVSEVQADESIFDIGDKSAEELANIIKSAKTILWNGPVGVFEFPNFRKGTEVISNAIAEATANGAFSIAGGGDTLAAIDLFGIADKISYISTGGGAFLEFVEGKVLPAVEILEKRANG

SEQ ID NO: 12210 - protein, 253 aa, Pantoea cedenensis
  unsure (1)..(253): unsure at all Xaa locations
GAAGGIGQALALLLKTQLPAGSDLSLYDIAPVTPGVXXDLSHIPTAVNIKGFCGEDGTPALKGADVVLISAGVARKPGMDRSDLFNVNAGIVRNLIEQVANTCPKALIGVITNPVNTTVAIAAEVLKKAGVYDKNRLFGVTTLDIIRSNTFVAELKGKNPAELNVPVVGGHSGVTILPLLSQVPGVTFSQQEVVDLTKRIQNAGTEVVEAKAGGGSATLSMGQAAAKFGLSLVRAINGESNVVECAYVEGDGQ

SEQ ID NO: 12211 - protein, 178 aa, Zea mays
  unsure (1)..(178): unsure at all Xaa locations
CGFWTIKSSAAVWKNYYGVYVLKGGLIMLEDYHLVLDLAEIHIQWMPXSVEYECRNCAYAFFYVAHDVYHIKCADSLRARGRKTSGIGRFSTAEHDRGGAETFGDPRAFAVKFYTREGXFDIACNNMPVFFIRDVMKFPDMLHAFKPNPKTNLXENWRIVDFFSSHPESLHMFTFLFD

SEQ ID NO: 12212 - protein, 256 aa, Pantoea oleae
  unsure (1)..(256): unsure at all Xaa locations
GAAGGIGQALALLLKTQLPAGSELSLYDIAPVTPGVAVDLSHIPTAVSIKGFSGEDATPALQGANVVLIXXGVARXPGMDRSDLFNVNAGIVRNLIQQVADTCPQALIGVITNPVNTTVAIAAEVLKKAGVYDKNKLFGVTTLDIIRANTFVAELKGKNPGELNVPVVGGHSGVTILPXLSQIQGVSFSEQEVSDLTKHIQNAGTEVVEAKAGGGXXTLSMGQAAARFGLSLVRALNGESNVVECAYVEGDGQYAR

SEQ ID NO: 12213 - protein, 264 aa, Glycine max
  unsure (1)..(264): unsure at all Xaa locations
MDSLVESGWQYLVSNFSDFQLACIGSFIVHETVFFLSGLPYILLERTGLLSNYKIQTKHNTPEAQGKCIAWLLFYHSCVNFPLMMFSYRVFKFMGMQSSFPLPSWYYYXKVVSAQILFFFIIEDFVFYWGHRILHTKWLYKNVHSVHHEYATPFGLTSEYAHPAEILFLGFATFIGPALTGPHLITLWLWLVLRVIETVEAHCGYHFPWSPSNFLPLYGGADFHDYHHRLLYTKSGNYSSTFVYMDWIFGTDKGYRKLKALKET

SEQ ID NO: 12214 - protein, 394 aa, Methylocystis sp. SC2
MSEEKRKARRKLKPATLVTQAGRAPFDHFGFVNPPIYRGSTVLFPTVAALEALRQPYTYGTKGTPTTRALEQGWSEIAGAADTVLTPSGLAAIGLALLTATQAGAHALIVDSAYQPTRIFCDGLLARFGVKVDYYDPLIGGGVAAMMKPETTAVLVESPGSLSMEVQDIPAIAAAAHAHGACVIADNTWATPLLFPPHERGCDLVIDAGTKYLSGHADLLMGLVSANSAWAKRLRATFNAFSMGSSPDDAALALRGMRTMALRLREQERAALDVAQWLENRPEVSRVLHPGLATHPGHALWRRDFTGASGVFSVILKATSKKAVAAFVDGLELFGIGFSWGGYESLVLPFDCSSYRTATRWTPEGPTLRFSIGLEDVADLKSDLEAGFARLNAH

SEQ ID NO: 12215 - protein, 341 aa, Glycine max
MASAASPTTFSLLHSATPSSSSTATSASPSPSRVQLTSSLRARPLRRLGFAAADPLLAASVAARVAAVRGGGKGARGVVSMAKKSVGDLSAADLKGKKVFVRADLNVPLDDNQNITDDTRIRAAIPTIKHLIQNGAKVILSSHLGRPKGVTPKYSLAPLVPRLSELIGIQIVKAEDSIGPEVEKLVASLPDGGVLLLENVRFYKEEEKNDPEHAKKLASLADLFVNDAFGTAHRAHASTEGVTKYLKPSVAGFLLQKVVPASAIPDGWMGLDIGPDSVKSFSEALDTTQTIIWNGPMGVFEFDKFAVGTEAIAKKLADLSGKGVTTIIGGGDSVAAVEKVG

SEQ ID NO: 12216 - protein, 256 aa, Pantoea toletana
GAAGGIGQALALLLKTQLPAGSELSLYDIAPVTPGVAVDLSHIPTAVKIKGFSGEDATPALKGADVVLISAGVARKPGMDRSDLFNVNAGIVRNLIEQVASTSPKALIGIITNPVNTTRAIAADVLKKAGVYDKNKLFGVTTLDIIRANTFVAELKGKQPEDLNVPVVGGHSGVTILPLLSQIPGVSFSEQEVADLTKRIQNAGTEVVEAKAGGGSATLSMGQAAARFGLSLVRALKGESNVVECAYVEGDGQYAR

SEQ ID NO: 12217 - protein, 256 aa, Pantoea endophytica
  unsure (1)..(256): unsure at all Xaa locations
GAAGGIGQALALLLKTQLPSGSELSLYDIAPVTPGVAVDLSHIPTAVKIKGFSGEDARPALQGADVVLISAGVARXPGMDRSDLFNVNAGIVKNLVQQIAEVCPKACIGIITNPVNTTVAIAAEVLKKAGVYDKNKLFGVTTLDIIRSNTFVAELKGKQPTEVEVPVIGGHSGVTILPXLSQIPGVSFTEQEVADLTKRIQNAGTEVVEAKAGGGSATLSMGQAAARFGLSLVRXLQGEKGVVECAYVEGDGQYAR

SEQ ID NO: 12218 - protein, 488 aa, Bacillus anthracis str. A2012
  unsure (1)..(488): unsure at all Xaa locations
MNPNNRLTTNQGAPVGDNQNSRTAGRRGPVLLEDYHLVEKLAHFDRERIPERVVHARGAGAHGVFVTKNSMKKYTKAAFLQNEGTETPVFVRFSTVIHGQGSPETARDPRGFAVKFYTEEGNYDIVGNHLPVFFIRDAIKFPDMVHSLXPAPDTNIQTPDRYWDFMTLSPESTHMMTWVFSDYGTPASYREMEXFGVHSFKWINAEGKIVYIKYHWKPQQGVRNLSAKEVQEVQGKDFNHATRDLFDAIEKGNYPKWDLHVQVMQLEETDSLDFDPLDPTKVWPEDRFPLMEVGTMTLNRNPKNFFAEVEQVAFSPSATVNGIEPSEDKLLQGRLFSYPDTQRYRLGANYLQIPVNCPYAAVHNQQRDGAMQINQNPSTINYEPSRHAENPVEDPAYRDSTMKVEGYVSREKIDKPNDFKQAGERYRSFSKEEQDNLIANLTSDLKDVNERTKLLAVCNFFRADQEYGMRLAQALNVDITQYVGNAPK

SEQ ID NO: 12219 - protein, 337 aa, Fragaria vesca
  unsure (1)..(337): unsure at all Xaa locations
NLCPLNFTFAIHRLTMAAAPSESIPSVNKAWVXSEYGKTSDVLKFDPSVAVPEIKEDQVLIKVVAASLNPVDFKRALGYFKDTDSPLPTIPGYYVAGVVVKVGSQVTKFKVGDEVYGDLNETALVNPTRFGSLAEYTAADERVLAHKPKNLSFIEAASLPLAIETAHEGLERAELSAGKSVLVLGGAGGVGTHIIQLAKHVFGASKVAATASTKKLDLLRTLGADLAIDYTKENFEDLPEKFDVVYDAVGETDKAVKAVKEGGKVVTIVGPATPPAILFVLTSKGSVLEKLKPYLESGKVKPVLDPTSPYPFTKVVEAFGYLESSRATGKVVVYPIP

SEQ ID NO: 12220 - protein, 256 aa, Pantoea endophytica
  unsure (1)..(256): unsure at all Xaa locations
GSAGGIGQALALLLKTQLPSGSELSLYDIAPVTPGVAVDLSHIPTAVKIKGFSGEDARPALQGADVVLISAGVARXPGMDRSDLFNVNAGIVKNLVQQIAEVCPKACIGIITNPVNTTVAIAAEVLKKAGVYDKNKLFGVTTLDIIRSNTFVAELKGKQPTEVEVPVIGGHSGVTILXXLSQIPGVSFTEQEVADLTKRIQNAGTEVVEAKAGGGSATLSMGQAAARFGLSLVRALQGEKGVVECAYVEGDGQYAR

SEQ ID NO: 12221 - protein, 176 aa, Caulobacter crescentus CB15
MNDLPKPEVLISEAEIAERVQKLAEQIAPRIDDDTVVVCLLTGGLWFAADLTRALWKAGRDVRFDALWLASYHDERKSSGRCEVRADLQRPLVGRRALVVDDVFDTGLSLSEAARLVKDAGASEVLTAVFARKPWPKDRGMEPDFVAWEAPARYLVGYGLDDEGKSRGLPYIGAMD

SEQ ID NO: 12222 - protein, 206 aa, Glycine max
  unsure (1)..(206): unsure at all Xaa locations
MELVAESERTLYPYVTGSSVVAIKYKDGILMAADMGGSYGSTLRYKSVERIKPIGKHSLLGASGEISDFQEILRYLDELILYDNMWEDGNSLGPKEVHNYLTRVMYNRRNKFNPLWNALVLGGVKNGQKYLGMVNMIGINFEDNHVATGLGNHLARPILRDEWHENLTFEEGVPFLXKCMPGLVYGDPSAVNLIPMCGVADERATV

SEQ ID NO: 12223 - protein, 744 aa, Emericella nidulans
MATSITAGLQKAQQAVQDTATKNKKIVDISHDTVNVHTDQEQRTDFGVAITDPDHWLRVTNETHSGPSLLEDHIARERIHRFDHERIPERVVHARGTGAYGNFTLKESIEDLTYAGVLTDTSRNTPVFVRFSTVQGSRGSADTVRDVRGFAVKFYTDEGNWDIVGNNIPVFFIQDAIKFPDFVHAVKPEPHNEVPQAQTAHNNFWDFVYLHPEATHMFMWAMSDRAIPRSYRMMQGFGVNTFSLVNKEGKRHFVKFHWIPHLGVHSLVWDEALKLAGQDPDFHRKDLMEAIDNKAYPKWDFAIQAIPEEDQDKFEFDIFDATKVWPEEQVPLRVVGELELNRNIDEFFPETEQVAFCTSHIVPGIDFSDDPLLQGRNFSYQDTQISRLGVNWEEIPINRPVCPFLNHNRDGAKRHRITKGTVNYWPNRFEANPPASDKGFKSHPAPITGRKRRDLTPKFKEYHNQAQLFYNSLSEVEKVHVKKAFSFELDHCDDPIVYERLAGQRLAEIDLPLAQAVAEMVGAPIPTKALRDNHGKTSVRLSQFDFTPKAPGIISRRIAIIIGDGYDKIAFNGMKAAILAAASAPLRHWHQTSAIYAQGEDKNSSKGVIPDHMYDGMRSTMFDATFIPGGSHIETLQKNGQIRYWIAETFGHLKALGAMGEAAQLVKEVLGNVMGVQIAGADSAEPVEWYGVVTARGPESAESLSEGFKVLKDAGDFTSKFFYQISQHRNWQRELDGLASTVAF

SEQ ID NO: 12224 - protein, 429 aa, Pseudomonas putida KT2440
MSKSLQAIRGMNDILPEQSPLWRYFEGTVAGLLDTYGYSQIRTPIVEFTELFKRSIGEVTDIVEKEMYTFEDRNGDSLTLRPEGTAACVRAVLEHGITGNGQVQKLWYIGQMFRHERPQKGRYRQFHQIGVEVFNLDGPDIDAELIMLTWRLWGLLGIQDAVKLELNSLGTSEARARYRDALVEFLSARLEQLDEDSQRRLKSNPLRILDSKDQNTQAVLVGAPKLEDYLDEESRVHFEGLKARLDAAGIPFVINTKLVRGLDYYSKTVFEWVTDKLGAQGTVCAGGRYDGLVEQMGGKPTTGVGFAMGIERLILLLETLGKVPESISRQIDVYLCAFGEQAELAGLRLSEGLRDRLPGLRLAVNAGGGSFKSQFKKADKSGALFALILGDDELAKQEIGLKPLRGQGEQQNIAWDALAEHLETAIAQA

SEQ ID NO: 12225 - protein, 231 aa, Escherichia coli O157:H7 EDL933
MFRKLAAECFGTFWLVFGGCGSAVLAAGFPELGIGFAGVALAFGLTVLTMAFAVGHISGGHFNPAVTIGLWAGGRFPAKEVVGYVIAQVVGGIVAAALLYLIASGKTGFDAAASGFASNGYGEHSPGGYSMLSALVVELVLSAGFLLVIHGATDKFAPAGFAPIAIGLALTLIHLISIPVTNTSVNPARSTAVAIFQGGWALEQLWFFWVVPIVGGIIGGLIYRTLLEKRN

SEQ ID NO: 12226 - protein, 80 aa, Clarkia delicata
KGEVVNNHDELMSNFFAQPDALAYGKTPEQLRKENVSEHLIPHKTFTGNRPSLSILLPTLDAYRIGQLLAIYEHRVAVQG

SEQ ID NO: 12227 - protein, 237 aa, Triticum aestivum
  unsure (1)..(237): unsure at all Xaa locations
VEQVLAIEESFKHRVTNVVFMGMGEPMLNLTAVLEAHQCLNKELKIGQRMMTISTVGVPNTISKLASHKLQXSTLAVSLHAPNQRLRETIVPSAKAYPLEALMDDCKNYFLETGRRVSFEYTLLAGINDEKAHAEELAALLHACGGGYHVNLIPYNPVEGSEYKRPYRKAIQAFVDALESRKITVSVRQTRGLDANAACGQLRNEFQKNPLLESSPPFEPNQLLESFTPSESSLVPA

SEQ ID NO: 12228 - protein, 382 aa, Pseudomonas putida KT2440
MIRSKLPNVGTTIFTTMSQLAVQTGALNLSQGFPDFNGPQALLDAVGRHVAAGHNQYSPMTGLPALRQQVAAKVERLYGARVDADQEVTITPGATEAIFCAIQAVVHAGDEVIVFDPCYDSYEPSVELAGGRCVHVQLSDGDFRIDWQKFSDALSPRTRMVILNSPHNPSGALITREDLDQLAALIADRDIYLVSDEVYEHLVYDGVRHASVLAHEQLYSRAFVVSSFGKTYHVTGWKTGYVIAPPALSAELRKVHQYVNFCGVTPLQCALADFMAGHPEHIDELPAFYQAKRDLFCGLLDGSRFNFTRTTGTYFQLVDYSQIRPDLNDVDMSLWLTREHGVATIPVSVFYQQPIPEQRLVRLCFAKREETLRQAAERLCAI

SEQ ID NO: 12229 - protein, 831 aa, Ralstonia eutropha JMP134
MKVSRRDFIKQTAIAATASVAGIPLGTEAANFVTDSEVTKLKWSKAPCRFCGTGCGVTVAVRDNKVVATQGDPQCEVNKGLNCVKGYFLSKIMYGQDRLTKPLLRMKNGKYDKNGEFAPVTWDQAFDEMERQFKRVLKEKGPTAVGMFGSGQWTVWEGYAASKLYKAGFRSNNIDPNARHCMASAVQGFMRTFGMDEPMGCYDDFEAADAFVLWGSNMAEMHPILWTRITDRRLSHPKTRVAVLSTFTHRSFDLADIPIIFTPQTDLAMLNYIANYIIQNNKVNKDFVNKHTVFKEGVTEIGYGLRPDHPLQKAAKNAANPGDSKPITFDDFAKFVSKYDADYVSKLSGVPKDKLRQLAELYADPNVKVMSLWTMGFNQHTRGSWVNNMVYNVHLLTGKIATPGNSPFSLTGQPSACGTAREVGTFSHRLPADMVVTNPKHREEAERIWKLPPGTIVEKPGYHAVLQNRMLRDGKLNAYWVQVNNNMQAAANIMEEALPGYRNPANFIVVSDAYPTVTALSADLILPSAMWVEKEGAYGNAERRTQFWHQLVDAPGDARSDLWQLMEFSKRFKVEEVWPAELVAKKPEYKGKTLFDVLYRNGQVDKFPIKEVSTEYHNAEAQAFGFYVQKGLFEEYASFGRGHGHDLAPFDRYHEERGLRWPVVNGKETRWRYREGSDPYVKAGTGFQFYGNPDGKAVIFALPYEPPPESPDKEYPFWLATGRVLEHWHSGSMTRRVPELYRAFPNAVVFMHPEDAKAMGLRRGVEVEVVSRRGRMRSRVETRGRDAPPRGLVFVPWFDASQLINKVTLDATCPISLQTDYKKCAVKIVKV

SEQ ID NO: 12230 - protein, 258 aa, Zea mays
  unsure (1)..(258): unsure at all Xaa locations
MGIGAVSDELLGTFVPIAVYWLYSGLYVALDGVGRLDGYRLHTREEAATKNVVSRAAVVRGVLLQQVFQVAVXLTLFAVIGDESGTGQKQPPALIIALQFITAMVVMDTWQYFMHRYMHINKFLYKHIHSKHHTLVVPYSFGALYNHPLEGLILDTIGGALSFLVSGMTPRTAIFFFSFATIKTVDDHCGLWLPGNILQALFSNNSAYHDIHHQLYGNKYNFSQPFFVMWDKILGTYMPYSXXXXXXXXXESKPAKLD

SEQ ID NO: 12231 - protein, 527 aa, Clarkia delicata
VEFDNIFLDYSRQQASPDTINKLYKLADEAHLKQKIDRMYNGDHINITENRSVLHVALRAPRNSAICSDGKNVVPDVWNVLDKIKDFSERVRNGSWVGATGKELKDVIAVGIGGSFLGPLFVHTALQTDPEASKNARGRELRFLANVDPIDAARNISGLNPETTLVVVVSKTFTTAETMLNARTLREWISSALGVSAVAKHMVAVSTNLPLVEKFGIDPNNAFAFWDWVGGRNSVCSAVGVLPLSLQYGFAVVEKFLQGAHSIDQHFSSAPFEKNIPVLLGLLSVWNVSFLGYPARAILPYSQALEKLAPHIQQVSMESNGKGVSIDGLPLPFESGEIDFGEPGTNGQHSFYQLIHQGRVIPCDFIGVVKSQQPVYLKGEVVNNHDELMSNFFAQPDALAYGKTPEQLRKENVSEHLIPHKTFTGNRPSLSILLPTLDAYRIGQLLAIYEHRVAVQGFVWGINSFDQWGVELGKSLATQVRKQLHASRVNGEPVEEGFNFSTKTLLTRYLKATSDVPADPSTLLPKI

SEQ ID NO: 12232 - protein, 163 aa, Ralstonia eutropha JMP134
MRRPTLACCVLALSLRAIAAPLTDAELDARVHALSEQLRCLVCQNQTLADSNAELAVDLRRQIREQLRQGASDEAVKQYLVQRYGDFVLYKPPLKPLTWLLWFGPLLLLLVVLAALWRPRARRVAPAGPLDDAERRRLAELLDEPPPQRSPRSIDTLPPLSPP

SEQ ID NO: 12233 - protein, 770 aa, Rhodopseudomonas palustris CGA009
MHSGLDNSAELRVSDFDPITLAGGTRTEVLPGAIQPHAALLALAPADLTIVHAAGATASLLGAAAELLPGTAASTAFSSDQIARLQALATAERWIERPQHAFTLNAPDATPIDVIVHHASGLLVVELDPRREPAPENSLALVQSMIRRARPAPNLQGFCDAMAAELRSVTGFDRVMVYRFARDGSADVIAEARGPETSPFLGLRDPQPDISNQPGSISRIRVQPDVHAPAAPLWPAHSPRNGLALDLSFSATRSASPEHRLYLAQLGVAASLSLSLVVEGELWGLIVCHHATPRFLPYRMREACALFAEMASLQLETRLAADQLAARLRSTRIHEELVTRMSQESDLAEGLIRFYPNLLDFIPAAGVGLWIDGQFTGIGATPGPAQVAAMMGWLHGVPHDGVYHTDCLALAYPPAKAFAGCASGLLALSLSNTPHNYVLWFRPEVVRVVTWAGMPNKPVGVDAGAPRTPKGCASSWQESVRLHGEPWLDTDVDAAHRLRESLLDVVLRRIDGIARERRSAQLLQEQLMRQVELGLSRSKDVAKTLQEEKRRRVLVEADLSKVLRRTVEDQEAERLRIARELHDTLGQSLTLLQLGFDKLGQAAGDNPELQQRIAEMKSLTADVGRQANRLAWEIRPTALDDLGIQTAIQNLLDSWSEKSSIEFDLHMTLGSRRLPSPVETTLYRVLQEALTNVVRHASARHVSVILQLGDDQVTMIVEDDGCGFVTAGRKPPSGRLGLLGIRERLSLVGGSLEIESAPGKGTALYARIPL

SEQ ID NO: 12234 - protein, 307 aa, Clarkia epilobioides
  unsure (1)..(307): unsure at all Xaa locations
AAHLKQKIDRMNNGDHINSTENRSVLHVALRAPRNSVICSDGKNVVPDVWNVLDKIKDFSERVRNGSWVGATGKELXXXXXXXXXXXFLGPLFVHTALQTDPEASKNARGRELRFLANVDPIDAARNISGLNPETTLVVVVSKTFTTAETMLNARTLREWISSALGVSAVAKHMVAVSTNLPLVEKFGIDPNNAFAFWDWVGGRYSVCSAVGVLPLSLQYSFAVVEKFLQGAHSIDQHFSSAPFEKNIPVLLGLLSVWNVSFLGYPARAILPYSQALEKLAPHIQQVSMESNGKGVSIDGLPLPFES

SEQ ID NO: 12235 - protein, 487 aa, Oryza sativa
  unsure (1)..(487): unsure at all Xaa locations
MGASASASLRHHLLLRRRPRFPLGPSPTFRTSSLPRRHQRLFASAPSSSTVENGEPSSPVEPSDGASVVDVNPPRGTRDFPPEDMRLRTWLFDQFREVSRVMAFEEVDFPVLESEALFIRKAGEEITQQLYNFEDKGGRRVVLRPEITPSLARLVIKQGKSVSLPLKWFTIGQCWRYERMTRGRRREHYQWNMDIFGMPKVRAESELLQAIILLFERLGITSSDVGIRVSSRKVLQAVLNMYSIPEHLFTEVCVIVDKLGKLTREEIEKKLVTIGLSSEAVLGIIEVLSLKSLPKLEEVXGSDVEAVADLKKLFSFAEQYGYADWICFDASVVRGLAYYTGIVFEAFDRDGKLRAICGGGRYDRLLSTFGSEDIPACGFGFGDAVIVELLKEKGLLPDLSRQIDDIVFPLDEELEGPACSVASSLRRQGRSVDLVEDKRLKWVFKHAERINAGRLILVGKSEWERGMVRVKILSTREEFEVKAGELQ

SEQ ID NO: 12236 - protein, 476 aa, Rhodopseudomonas palustris CGA009
MVNRMQFYIDGAWVDPVVKKSTPVVNPATEEAMYEVALGSKADVDKAVAAAKRAFETFSVTSREERIALLEKVVAIYKSRMKEIGAAISDEMGAPLPMAEKMQAGAGLGHIMSTLDVLKNYQFEEPLGSAMIVREPIGVVGMITPWNWPLNQIACKVAPAIAAGCTMVLKPSEFTPTSALLFAEILHEAGVPKGVFNLVNGLGPEVGAAMSEHPDIDMISFTGSTRAGIDVAQRAAPTVKRVSQELGGKSPNVILEDADLTKAVTGGVMHMFNNSGQSCNAPSRMIVPLSKMKEVAAIAKGVAEKTKAGDPRGEGTTIGPVVNRIQWDKIQTLINKGIEEGATLVAGGPGLPEGVNKGFYVRPTVFADVTKDMTIAREEIFGPVLVIMGAKDENEAVELANDTPYGLAGYVSAGSVDRARAVGRKIRAGNVNLQGVPNERTAPFGGYKQSGNGREWGKFGLEEYLEVKAIAGFNAA

SEQ ID NO: 12237 - protein, 519 aa, Arabidopsis thaliana
MSGAITCSAADLATLLGPNATAAADYICGQLGTVNNKFTDAAFAIDNTYLLFSAYLVFAMQLGFAMLCAGSVRAKNTMNIMLTNVLDAAAGGLFYYLFGYAFAFGGSSEGFIGRHNFALRDFPTPTADYSFFLYQWAFAIAAAGITSGSIAERTQFVAYLIYSSFLTGFVYPVVSHWFWSPDGWASPFRSADDRLFSTGAIDFAGSGVVHMVGGIAGLWGALIEGPRRGRFEKGGRAIALRGHSASLVVLGTFLLWFGWYGFNPGSFTKILVPYNSGSNYGQWSGIGRTAVNTTLSGCTAALTTLFGKRLLSGHWNVTDVCNGLLGGFAAITAGCSVVEPWAAIVCGFMASVVLIGCNKLAELVQYDDPLEAAQLHGGCGAWGLIFVGLFAKEKYLNEVYGATPGRPYGLFMGGGGKLLGAQLVQILVIVGWVSATMGTLFFILKRLNLLRISEQHEMQGMDMTRHGGFAYIYHDNDDESHRVDPGSPFPRSALLLAFNFQLFGNLLPFKYCLGFGFEI

SEQ ID NO: 12238 - protein, 177 aa, Fusobacterium nucleatum subsp. vincentii ATCC 49256
MKKLITDLDLNNKKVLMRVDFNVPMKDGKITDENRIIQALPTIKYALEHNAKLILFSHLGKVKTEEDKATKSLKAVAEKLSELLGKNVIFIPETRGEKLESAINNLKSGEVLMFENTRFEDLDGKKESKNDPELGKYWASLGDVFVNDAFGTAHRAHASNVGISENIGNGNSANWFS

SEQ ID NO: 12239 - protein, 138 aa, Zea mays
KLVFSAKVKDTYFRKKELTKVGKNCSFNSESGRPKGFTPKFSLAPLVGRLSELLGIQVQKADDVIGPEVEKLVAALPNGGVLLLENVRFYKEEEKNDPEFAQKLASLADLYVNDAFGTAHRAHASTEGVTKFLQPSVA

SEQ ID NO: 12240 - protein, 171 aa, Fusobacterium nucleatum subsp. vincentii ATCC 49256
MFTFLKSQEGKNIGASLVEDDKLDLAKDLLEKSNRKIVLPVDTVVANEFKNDTEFSTVDIDNIPDNKMGLDIGEKTVKLFDSYIKTAKTVVWNGPMGVFEMPNFAKGTIGVCESIANLTDAVTIIGGGDSAAAAISLGYADKFTHISTGGGASLEFLEGKVLPGVEAISNK

SEQ ID NO: 12241 - protein, 228 aa, Brucella melitensis biovar Abortus
MLNKLSAEFFGTFWLVFGGCGSAILAAAFPELGIGFLGVALAFGLTVLTMAYAVGGISGGHFNPAVSLGLTVAGRLPAKDLIPYWVAQVLGAIAAAAILYVIASGKDGFSAGGLASNGYGELSPGGYSMMAGLLIEIILTAFFIIIILGSTSSLAPAGFAPIAIGFGLTLIHLVSIPVTNTSVNPARSTGVALFADRAALSQLWLFWVAPLVGAVIGAIIWKGLLGRD

SEQ ID NO: 12242 - protein, 361 aa, Schedonorus arundinaceus
MGSVDASEKTITGWAARDATGHLSPYTYNLRRTGAEDVVLKVLYCGICHTDLHQTKNHLGASKYPMVPGHEVVGEVVEVGPEVSKYSVGDVVGVGVIVGCCRDCRPCKANVEQYCNKKIWSYNDVYTDGKPTQGGFASAMVVDQKFVVKIPAGLAPEQAAPLLCAGVTVYSPLKHFGLMTPGLRGGILGLGGVGHMGVKVAKSMGHHVTVISSSNKKRAEAMDDLGADAYLVSSDEAQMAAAMDSLDYIIDTVPVKHPLEPYLALLKMDGKLVLMGVIAEPLSFVSPMVMLGRKTITGSFIGSIEETEEVLRFCVEKGLTSQIEVVKMDYLNQALERLERNDVRYRFVVDVAGSNIDDTAA

SEQ ID NO: 12243 - protein, 105 aa, Treponema pallidum subsp. pallidum str. Nichols
MERGNPIAVERRRFCVMSAKIYVGNLNYATTEAGLASLFSQFGEVLSVAVIKDKLTQRSKGFGFVEMESAESAELVINELNEKEFEGRRLRVNYAEEKPRFPFKN

SEQ ID NO: 12244 - protein, 316 aa, Oryza sativa
MGGLYIPRPIVEVAPSTRGRLDYVTIRDTPPVPPMADGKVACKHLVLVHGACIGGWTYFKVATRLRSAGYRVTAPDLGASGVDPRPLREVPTFRDYTAPLLGLLGSLPPGEKVVLVGHSLGGINVALAAELFPDKIAAAVFLCAFMPDHTSRPSHVLEKDAEGKLPTSMLFGPQIAQERLMQLCSPEWRRFLSPIGALPHLHRRSLSSSSGCRRRPAPLKIRRDVTLAGSLLRVSSMFVEDLQKQQPFTEGRYGSVRKVYVVVNQDLAIPEGFQRWMIGNSPVDEVKEIDAADHLVMLSRPDELARCLADIAESYA

SEQ ID NO: 12245 - protein, 514 aa, Arabidopsis thaliana
MDTATTTCSAVDLSALLSSSSNSTSSLAAATFLCSQISNISNKLSDTTYAVDNTYLLFSAYLVFAMQLGFAMLCAGSVRAKNTMNIMLTNVLDAAAGAISYYLFGFAFAFGTPSNGFIGRHHSFFALSSYPERPGSDFSFFLYQWAFAIAAAGITSGSIAERTQFVAYLIYSTFLTGFVYPTVSHWFWSSDGWASASGSDNNLLFGSGAIDFAGSGVVHMVGGIAGLCGALVEGPRIGRFDRSGRSVALRGHSASLVVLGTFLLWFGWYGFNPGSFLTILKGYDKSRPYYGQWSAVGRTAVTTTLSGCTSALTTLFSKRLLAGHWNVIDVCNGLLGGFAAITSGCAVVEPWAAIVCGFVASWVLIGFNLLAKKLKYDDPLEAAQLHGGCGAWGLIFTGLFARKEYVNEIYSGDRPYGLFMGGGGKLLAAQIVQIIVIIGWVTVTMGPLFYGLHKMNLLRISAEDEMAGMDMTRHGGFAYAYNDEDDVSTKPWGHFAGRVEPTSRSSTPTPTLTV

SEQ ID NO: 12246 - protein, 361 aa, Schedonorus arundinaceus
MGSVDASEKTITGWAARDATGHLSPYTYNLRRTGAEDVVLKVLYCGICHTDLHQTKNHLGASKYPMVPGHEVVGEVVEVGPEVSKYSVGDVVGVGVIVGCCRDCRPCKANVEQYCNKKIWSYNDVYTDGKPTQGGFASSMVVDQKFVVKIPAGLAPEQAAPLLCAGVTVYSPLKHFGLMTPGLRGGILGLGGVGHMGVKVAKSMGHHVTVISSSDKKRAEAMDDLGADAYLVSSDEAQMAAAMDSLDYIIDTVPVKHPLEPYLALLKMDGKLVLMGVIGEPLSFVSPMVMLGRKTITGSFIGSIEETEEVLRFCVEKGLTSQIEVVKMDYLNQALERLERNDVRYRFVVDVAGSNIDDTAA

SEQ ID NO: 12247 - protein, 304 aa, Bacillus anthracis str. A2012
MMFKLMFAILTPALISGAFAERMRFSAFLIFILLWTTIVYNPVAHWVWGVGGWLRELGALDFAGGNVVHITSGVAGLVLAIFLGKRKNINGTSPHHLPFTMLGAGLLWFGWFGFNVGSALSLNDVALTAFINTNIAAAASALTWMLSEWFFQSKPTAMGAACGAVSGLVAITPACGFVTPFSALLIGAIGGVLCFGAVFFLKTKFGYDDTLDAFGCHGIGGTWGGIATGLFATTTVNGDGANGLFYGNAALLFKQFVAIGATYAFTIIMTYAIIKAINFFLPVRVDEHEEHMGLDISMHGRESL

SEQ ID NO: 12248 - protein, 256 aa, Pantoea endophytica
  unsure (1)..(256): unsure at all Xaa locations
GAAGGIGQALALLLKTQLPSGSELSLYDIAPVTPGVAVDLSHIPTAVKIKGFSGEDARPALQGADVVLISAGVARXPGMDRSDLFNVNAGIVKNLVQQIAEVCPKACIGIITNPVNTTVAIAAEVLKKAGVYDKNKLFGVTTLDIIRSNTFVAELKGKQPTEVEVPVIGGHSGVTILPLLSQIPGVSFTEQEVADLTKRIQNAGTEVVEAKAGGGSATLSMGQAAARFGLSLVRXLQGEKGVVECAYVEGDGQYAR

SEQ ID NO: 12249 - protein, 256 aa, Pantoea endophytica
  unsure (1)..(256): unsure at all Xaa locations
GAAGGIGQALALLLKTQLPSGSELSLYDIAPVTPGVAVDLSHIPTAVKIKGFSGEDARXALQGADVVLISAGVARKPGMDRSDLFNVNAGIVKNLVQQIAEVCPKACIGIITNPVNTTXXIAAEVLKKAGVYDKNKLFGVTTLDIIRSNTFVAELKGKQPTEVEVPVIGGHSGVTILPLLSQIPGVSFTEQEVADLTKRIQNAGTEVVEAKAGGGSATLSMGQAAARFGLSLGSRPAGEKGVVECAYVEGDGQYAR

SEQ ID NO: 12250 - protein, 512 aa, ASPERGILLUS NIDULANS FGSC A4
MGFMLRKPDDAAGSAAPAILIGLFVAFGGVLYGYDTGTISGILAMKYWRRQFSTGYVNPNDHIPDVTSSQSSMIVSLLSAGTFFGALTAAPVADYFGRRIAMILDCFVFCFGVVLQTAATAIPLFVAGRFFAGFGVGLLSATVPLYQSETAPKWIRGTIVGAYQLAITIGLLLAAIVNNSTKDRNDTGCYRIPVAVQFAWAIILVVGMIILPETPRFLIKQDNHEAAIKSLARLRRLDINDLAVVEELEEIKANHEYELSVGKASYLEILRGSIVTVYYGTTFFQHSGINNSFVITLITNIVNVVSTLPGLWMVEKWGRRPLLLFGAVGMCVSQFIVAIVGTTTDSGVANKVLIAFVCVYIFFFASSWGPVAWVVTGELFPLKARAKCLSITTAANWLLNWAIAYATPYMVDSGPGNANLQSKVFFIWGGFCLIAGIFVWTCIYETKGLTLEEVDELYAKVPVAWRSKGFVPSVHYTDVRDVAAGRKGSGLAELEADAQAKQISEHVEKASV

SEQ ID NO: 12251 - protein, 476 aa, Pseudomonas putida
MTQKFDVVVIGAGPGGYVAAIKAAQLGLKTACIEKYTDAEGKLALGGTCLNVGCIPSKALLDSSWKYKEAKESFNVHGISTGEVKMDVAAMVGRKAGIVKNLTGGVATLFKANAFTSFQGTGKLLAGKKVEVTKADGTTEVIEAENVILASGSRPIDIPPAPVDQNVIVDSTGALEFQAVPKRLGVIGAGVIGLELGSVWARLGAEVTVLEALDTFLMAADTAVSKEAQKTLTKQGLDIKLGARVTGSKVNGNEVEVTYTNAEEQKITFDKLIVAVGRRPVTTDLLAADSGVTIDERGYIFVDDYCATSVPGVYASVTWYAGMMLAHKASEEGIMVVERIKGHKAQMNYDLIPSVYYTHPEIAWVGKTEQALKAKVEVNVGTFPFAASGRAMAANDTGGFVKVIADAKTDRVLGVHVIGPSAAELVQQGAIAMEFGTSAEDLGMMVFSHPTLSEALHEAALAVNGGAIHVANRKKR

SEQ ID NO: 12252 - protein, 56 aa, Pseudomonas putida
NIIQRPMAINGQVVIRPMMYLALSYDHRLIDGKEAVTFLVTIKNLLEDPSRLLLDI

SEQ ID NO: 12253 - protein, 259 aa, Zea mays
MMSGRSGGRDAEGEWEVRPGGMLVQRRDGEAAGPVIRIRVSHGANFREVVVPAQATFGELKRILVQTTGLEPERQRLFFRGKEKSDREFLHTAGVKDGAKLLLLEKPAPANIEQKVEPVIMDESMMKACAAVARVRVEVDKLSAKVCDLEKNVLGGRKVEDKEFVVLTELLMMQLLKLDGIEAEGEARAQRKAEVRRVQSLVETLDKLKARNANPFSDHNKAVSVTTQWETFENGMGSLSAPPPRVSSTQANTDWEQFD

SEQ ID NO: 12254 - protein, 1352 aa, Streptomyces avermitilis MA-4680
MTTTPEAERTRTAEQVRTVCSYCGVGCGIVLDVGTGPDGRRTVLKASGDKEHPANRGRLCTKGATTADMLAAPGRLTSALVRDDRGAEPVPAPVDEAVRETARRLRAIVDEHGPDAVAFYVSGQMSLEAQYLANKLAKGFVRTNQIESNSRLCMASAGTGYKLSLGADGPPGSYDDLDKADVFLVIGSNMADCHPILFLRLLERVKAGAKLIVVDPRRTATAAKADLFLQVRPGTDLALLNGLLHLLYENGHTDAEFIARHTEGWEAMPDFLADYPPATVSEITGIPEDDIRAAARLIGEAGEWTSCWTMGLNQSTHGTWNTNALVNLHLATGAICRPGSGPLSLTGQPNAMGGREMGYMGPGLPGQRSVLVDEERAFVEELWELAPGTIRADGVGRGTVEMFRKMADGDIKACWIICTNPVASVANRKTVIEGLEAAEFVVTQDVFADTETNAYADVVLPGALWTESPGVLVNSERVLTLARPVVEPPGEATADWRLIAAVAREMGYTEGFAYESAEQVFEEIKRAWNPKTGWDLRGVTYERLRSTPVQWPAARADGPARNPVRYVADGLVFPTASGRAVFHARPHLPAAELPDDDFPFVLNTGRVQHQWHTLTKTGKVAKLNKLNPGPFVEVHPRDAAALGVVDGDSVEVASRRGRAVLPAVVTDRVQPGCCFAPFHWNDLFGEYLSINAVTSDAVDPLSFQPEFKVCAVALARVASPPSALPVRSLDAAPPAPDGGLTASSAPAGQAEIFGLTPGPPPVLTARERQYLTGFLAGLGSGAPGVPVLPAEAPFSAEHALWVNGVLAGMYSRAATAEAPAKPPGREVVVLWASQTGNAEEFAAATAERLTATGHRATLVGMDDTDVAQLPRTADLLLITSTFGDGDAPDNGSGFWDALSAEAAPRLDGVRYAVLAFGDSSYDDFCGHGRRLDTRLDELGAVRLAPRTDCEPDYEPYAGAWLDQVLGALGTKTDAPKPARPRKPEPAIARLTGNRLLSLPGAGKEVRRFTFDTSGTGLTYEAGDALGVRPVNSPDLVDEWLSVTGLDHSTPVAVEGVGEVPFAQALHRHLDITHITPDLLRFVSEHAHDNRELKKLLRPDNKDGLAQWSWGRQAVDVVAEHPVRATAEEWAEVFKRLQPRLYSISSSPLVDPHLVSLTVSVVRYEDRLGRPRGGVCSPFLADAEHHTPVPVFVQRSPHFRPPADSSTPMVMVGPGTGVAPFMGFLQERRALGHRAPNWLFFGEQHRATDFYYEEELTALLADGTLTRLDTAFSRDQRAKVYVQDRIREHGPELWHWLQNGARFYVCGDASRMAKDVDRALRDIAVTHGGLTEAEATAYVKQLAAEKRYVRDVY

SEQ ID NO: 12255 - protein, 256 aa, Pantoea agglomerans
  unsure (1)..(256): unsure at all Xaa locations
GAAGGIGQALALLLKTQLPAGSELSLYDIAPVTPGVAVDLSHIPTAVAIQGFSGEDATPALQGADVVLISAGVARKPGMDRADLFNVNAGIVRNLIEQVATTAPKALIGVITNPVNTTVAIAAEVLKKHGVYDKNRLFGVTTLDIIRANTFVAALKGKQPDQVEVPVIGGHSGVTILPLLSQVKGVXFSDQEVADLTKRIQNAGTEVVEAKAGGGSATLSMGQAAARFGLSLVRALKGEANVVECAYVEGEGEHAR

SEQ ID NO: 12256 - protein, 286 aa, Triticum aestivum
  unsure (1)..(286): unsure at all Xaa locations
VNTYTLISRDGKAHLVKFHWKPTCGVKCLLDDEAVTVGGTCHTHATKDLTDSIAAGNYPEWKLFIQTIDADHEDKFDFDPLDVTKTWPEDIIPLQPVGRMVLNKNIDNFFAENEQLAFCPAITVPGIHYSDDKLLQTRIFSYADTQRHRLGPNYLMLPVNAPKCAHHNNHHDGLMNFMXRXXEVNYFPSRFDPTRHAEQYPIPPRVLSXXREKCIIEKENNFKQAGERYRSFDPARQDRFLQRWVDALTDARVTHEIQGIWVSYWSQCDTSLGQKLASRLKIKPSM

SEQ ID NO: 12257 - protein, 462 aa, Ustilago maydis 521
MSARPQNVGIKAIEIYFPRRCISEDELEDFDGVAKGKYTIGFGQKYMACTDDREDINSFALSVVSGLLEKNNIDPRSIGRLDVGTETIIDKSKSVKTVLMDLFAPSGNMNIEGIDSKNACYGGTAALFNAINWVESSSWDGRDAIVVAGDIAIYAEGSARPVGGAGSVAMLIGPDAPLVFEPAHGTHMSNYWDFYKPNLSSEYPEVDGPETIQTYLGCLDKAYDAYRLRAAKLKSGAANGHSDASSLASIKVDDFDYTLFHSPYSKLVQKGFGRLLYNDFFSDPKNEKYASIPANFAELDRKSTITNKDVEKAFAAFGKEAQQTKLEPGMNTVRRCGNMYTASLYGGLVSLLSNIPSQEIQGKRILLYSFGSGAAASMFAIRINGSTEQIVKAVDLKNRLDSMKVVPCQTYVEALKTREATHNAVNHKPVGQLENLWPGAYYLENVDHMYRRTYGRIPTNAN

SEQ ID NO: 12258 - protein, 498 aa, Zea mays
MSTCAADLAPLLGPAAANATDYLCGQFADTASAVDATYLLFSAYLVFAMQLGFAMLCAGSVRAKNTMNIMLTNVLDAAAGALFYYLFGFAFAFGTPSNGFIGKQFFGLKHLPRTGFDYDFFLYQWAFAIAAAGITSGSIAERTQFVAYLIYSAFLTGFVYPVVSHWFWSADGWAGASRTSGPLLFGSGVIDFAGSGVVHMVGGIAGLWGALIEGPRIGRFDHAGRSVALKGHSASLVVLGTFLLWFGWYGFNPGSFTTILKSYGPAGTVHGQWSAVGRTAVTTTLAGSVAALTTLFGKRLQTGHWNVVDVCNGLLGGFAAITAGCSVVEPWAAVICGFVSAWVLIGANALAARFRFDDPLEAAQLHGGCGAWGVLFTGLFARRKYVEEIYGAGRPYGLFMGGGGKLLAAQIIQILVIAGWVSCTMGPLFYALKKLGLLRISADDEMSGMDLTRHGGFAYVYHDEDPGDKAGVGGFMLKSAQNRVEPAAAVAAATSSQV

SEQ ID NO: 12259 - protein, 256 aa, Pantoea agglomerans
  unsure (1)..(256): unsure at all Xaa locations
GAAGGIGQALALLLKTQLPAGSELSLYDIAPVTPGVAVDLSHIPTAVAIQGFSGEDATPALQGADVVLISAGVARKPGMDRADLFNVNAGIVRNLIEQVATTAPKALIGVITNPVNTTVAIAAEVLKKHGVYDKNRLFGVTTLDIIRANTFVAALKGKQPDQVEVPVIGGHSGVTILPLXSQVKGVSFSDQEVADLTKRIQNAGTEVVEAKAGGGSATLSMGQAAARFGLSLVRALKGEANVVECAYVEGEGEHAR

SEQ ID NO: 12260 - protein, 317 aa, Pirellula sp. 1
MSRRCQIATLALNRCPFPLVVFLSCRMSVPNVDPSHQSNASANEATRPSPAAEGLDKSGERVREMFRQIAPRYDVMNHLLSLNIDKWWRRKAVQTLKIKGDDPILDLCCGTGDLAIAIADSAGSDVQVIGSDFCHAMLEIARVKESKRTRDTAGGSGRHTIPFLEADSMALPFDDDAFQCVTVAFGLRNIADTDQGLSEMARVCKPGGQVLVLEFSQPTLPVLKQAYNFYFRHVLPRIGQWMARNDKSAYEYLPESVGKFPCGDALAGRMRDVGLQHVTFRPLTLGVATIYVGEKPGGKTDHAEMAAHREREALVAT

SEQ ID NO: 12261 - protein, 581 aa, Bacillus subtilis subsp. subtilis
MTWRKSYERWKQTEHLDLELKERLIELEGDEQALEDCFYKDLEFGTGGMRGEIGAGTNRMNIYTVRKASAGFAAYISKQGEEAKKRGVVIAYDSRHKSPEFAMEAAKTLATQGIQTYVFDELRPTPELSFAVRQLNAYGGIVVTASHNPPEYNGYKVYGDDGGQLPPKEADIVIEQVNAIENELTITVDEENKLKEKGLIKIIGEDIDKVYTEKLTSISVHPELSEEVDVKVVFTPLHGTANKPVRRGLEALGYKNVTVVKEQELPDSNFSTVTSPNPEEHAAFEYAIKLGEEQNADILIATDPDADRLGIAVKNDQGKYTVLTGNQTGALLLHYLLSEKKKQGILPDNGVVLKTIVTSEIGRAVASSFGLDTIDTLTGFKFIGEKIKEYEASGQYTFQFGYEESYGYLIGDFARDKDAIQAALLAVEVCAFYKKQGMSLYEALINLFNEYGFYREGLKSLTLKGKQGAEQIEAILASFRQNPPQKMAGKQVVTAEDYAVSKRTLLTESKEEAIDLPKSNVLKYFLEDGSWFCLRPSGTEPKVKFYFAVKGSSLEDSEKRLAVLSEDVMKTVDEIVESTAK

SEQ ID NO: 12262 - protein, 205 aa, Trichodesmium erythraeum IMS101
MKNFTPLKTTPRLLVVATGNLGKVVEMQEYMADLNLQLELKPKDLEIEETGKTFLANACLKASEVAKVTEKWAIADDSGLAVDALDGKPGIYSARYAPTVAEQIERVLRELKDSQNRQAKFVCALVIARPDGTIALKAEGICYGEILYSTRGNGGFGYDPIFYVPSEKKTFAEMSPETKRSLSHRGKAFQILLPQIKEIFAIESV

SEQ ID NO: 12263 - protein, 575 aa, Glycine max
MEVLLLCGQERHTKRAFVSFPVFLPRLSLCLCYLLRSSLLLSNMALVNPFLCTTRTSLPLRVSGPPNQVLPRWTLCSQYSFKTSSLRSKQLRCGATADIKADHAVLVGPTSEEERKGDYDWTQEWYPLYLTQNVPEDAPLGLRVFDKQLVLFKDGNGQFRCYEDRCPHRLAKLSEGQLIDGRLECLYHGWQFEGEGKCVKIPQLPADAKIPRAACVKTYEVRDSQGVIWVWMSLKTPPNVSKLPWFENFARPEFQDISTIHELPYDHSILLENLMDPAHIPISHDRTDWTAKREDAQPLCFEVTERTHIGFAGWWGREKDGSMPNFLRFEAPCVLQNNREIVDKNGEINYFNGCEKTTEGGQGKSMLIVRFGGTKRSPLAKVFPKWYLHQNASKVFEQDMGFLSSQNEILLKEKVSTKELYLNLKSSDTWVAEYRKWMDKAGHGMPYHFGHSTISLPKEPAVVEHAPAGLVAGQSASSPTKGGIGTMHAPNFANRYFRHVIHCKGCRTVVKAFEAWKNALSAVAIALTALAILLSGRQWKVLLLASAALCSVGVYACSTAIAMNTTNFIRTHRRL

SEQ ID NO: 12264 - protein, 96 aa, Zea mays
TADHGNAEYMSDESGNPWTAHTTNPVPFILVEGEGRKIPGHGGEVKLREGGKLADIAPTILDILQLPVPAEMTGKTLIDQPLVEIKANRTPVNLSR

SEQ ID NO: 12265 - protein, 197 aa, Brassica rapa
MGRKKLEIKRIENKSSRQVTFSKRRSGLIEKARQLSVLCDASVALLVVSSSGKLYSFSAGDNLVRILDRYGKQHAGDLKALNLQSKALSYGSHNELLELVDSKLVESNVGGVSVDTLVQLEGVLENALSLTRARKTELMLKLVDSLKEKEKLLKEENQALAGQKEKKNLAGAEADNMEMSPGQISDINLPVTLPLLN

SEQ ID NO: 12266 - protein, 428 aa, Streptomyces avermitilis MA-4680
MPSIDVVVAREILDSRGNPTVEVEVGLDDGSTGRAAVPSGASTGAFEAIELRDGDPNRYQGKGVEKAVLAVIEQIGPELVGYDATEQRLIDQAMFDLDATDNKGSLGANAILGVSLAVAHAASEASDLPLFRYLGGPNAHLLPVPMMNILNGGSHADSNVDIQEFMIAPIGAESFSEALRWGAEVYHTLKKVLKTKGLSTGLGDEGGFAPNLESNRAALDLIIEAIKQAGYIPGEQIALALDVAASEFYKDGKYEFEGKSRSAAEMTEYYEELVSAYPLVSIEDPLYEDDWAGWKVITDKLGDKVQIVGDDLFVTNPERLARGIEEGSANALLVKVNQIGSLTETLDAVELAQRNGFKCMMSHRSGETEDVTIADLAVAVNCGQIKTGAPARSDRVAKYNQLLRIEEILDDAAEYAGRSAFPRFRSAN

SEQ ID NO: 12267 - protein, 425 aa, uncultured bacterium 583
MQIKQIKAREVLDSRGNPTVEADVILNNGVFGRAMVPSGASTGQREALELRDGDKNRYLGKGVTQSVININHEINDALVDMKISNQQDIDQKMIDMDGTETKSRLGANSILAVSLACAHANANNNKQSLFRSFNFSETYQLPVPMMNIINGGEHANNSIDIQEFMIIPAGAPSFKEALRYGAEVFHHLKKLLDQGGFNTAVGDEGGFAPDLSSNEEALKVILKAIESAGYEAGKDIFIGIDAASSEFYNNGTYNLTSEGLKLSNEEFTSYLASWVEKYPIISIEDGMDENDWVGWEMLTKKLSDKVQLVGDDLFVTNSKILAKGIENNIANSILIKVNQIGTLTETFNAMKMASNAGYTCVMSHRSGETEDTTIADLSVATSCGQIKTGSLSRSDRLAKYNRLLRIEEELGDDAYYPGLSTFKHL

SEQ ID NO: 12268 - protein, 197 aa, Brassica rapa
MGRKKLEIKRIENKSSRQVTFSKRRSGLIEKARQLSVLCDASVALLVVSSSGKLYSFSAGDNLVRILDRYGKQHADDLKALNLQSKALSYGSHNELLELVDSKLVESNVGGVSVDTLVQLEGVLENALSLTRARKTELMLKLVDSLKEKEKLLKEENQALAGQKEKKNLAGAEADNMEMSPGQISDINLPVTLPLLN

SEQ ID NO: 12269 - protein, 361 aa, Schedonorus arundinaceus
MGSVDASEKTITGWAARDTTGHLSPYTYTLRRTGAEDVVLKVLYCGICHTDLHQTKNHLGASKYPMVPGHEVVGEVVEVGPEVSKYSVGDVVGVGVIVGCCRDCRPCKANVEQYCNKKIWSYNDVYTDGKPTQGGFASAMVVDQKFVVKIPAGLAPEQAAPLLCAGVTVYSPLKHFGLMTPGLRGGILGLGGVGHMGVKVAKSMGHHVTVISSSNKKRAEAMDDLGADAYLVSSDEAQMDAAMDSLDYIIDTVPVKHPLEPYLALLKMDGKLVLMGVIAEPLSFVSPMVMLGRKTITGSFIGSIEETEEVLRFCVEKGLTSQIEVVKMDYLNHALERLERNDVRYRFVVDVAGSNIKDADA

SEQ ID NO: 12270 - protein, 197 aa, Brassica rapa
MGRKKLEIKRIENKSSRQVTFSKRRSGLIEKARQLSVLCDASVALLVVSSSGKLYSFSAGDNLVRTLDRYGKQHAGDLKALNLQSKALSYGSHNELLELVDSKLVESNVGGVSVDTLVQLEGVLENALSLTRARKTELMLKLVDSLKEKEKLLKEENQALAGQKEKKNLAGAEADNMEMSPGQISDINLPVTLPLLN

SEQ ID NO: 12271 - protein, 361 aa, Schedonorus arundinaceus
MGSVDASEKTITGWAARDTTGHLSPYTYTLRRTGAEDVVLKVLYCGICHTDLHQTKNHLGASKYPMVPGHEVVGEVVEVGPEVSKYSVGDVVGVGVIVGCCRDCRPCKANVEQYCNKKIWSYNDVYTDGKPTQGGFASAMVVDQKFVVKIPAGLAPEQAAPLLCAGVTVYSPLKHFGLMTPGLRGGILGLGGVGHMGVKVAKSMGHHVTVISSSNKKRAEAMDDLGADAYLVSSDEAQMAAAMDSLDYIIDTVPVKHPLEPYLALLKMDGKLVLMGVIAEPLSFVSPMVMLGRKTITGSFIGSIEETEEVLRFCVEKGPTSQIEVVKMDYLNHALERLERNDVRYRFVVDVAGSNIKDADA

SEQ ID NO: 12272 - protein, 197 aa, Brassica rapa
MGRKKLEIKRMENKSSRQVTFSKRRSGLIEKARQLSVLCDASVALLVVSSSGKLYSFSAGDNLVRILDRYGKQHAGDLKALNLQSKALSYGSHNELLELVDSKLVESNVGGVSVDTLVQLEGVLENALSLTRARKTELMLKLVDSLKEKEKLLKEENQALAGQKEKKNLAGAEADNMEMSPGQISDINLPVPLPLLN

SEQ ID NO: 12273 - protein, 377 aa, Streptococcus mutans UA159
MKIDKYSAILGSAIGFPEMEGLTDTRPLANLPFDGKYRLIDFQLSNLANAGIRSVYGIFRGQNIRSIFDHIRSGREWGLNTLLSHYFLGFYNTPEDSIYADKDYYDQILTYLKRSGSDQTIYMSCDILCNIDLQQVIHLHNANKRNITVVYKKLPINAISAANDILEIDETDTVTGRRDSQSGNETEKMSAGIYIVNTSWLIEQMEKENQKEEPINLRFLLRDLTVAEKALAFEYTGYLANISSIQSYYNANMDMLESQKFYSLLYSNQKVYTKVKNEEATYFAVDSTVKNAQFASGSIIKGTVDHSIISRNCHIANHSRVVNSVVFPKVSIGDGAVVENAILDKNVKIAPGVIIRGTGDKPIVIAKASEVVEDIIQ

SEQ ID NO: 12274 - protein, 381 aa, Streptococcus mutans UA159
MHMKNEMLALILAGGQGTRLGKLTQSIAKPAVQFGGRYRIIDFALSNCANSGINNVGIITQYQPLALNSHIGNGSSWGLDGINSGATILQPYSATEGNRWFQGTSHAIYQNIDYIDSINPEYVLILSGDHIYKMDYDDMLQTHKDNMASLTVAVIDVPLKEASRFGIMNTDSNDRIVEFEEKPEQPKSTKASMGIYIFNWDRLRTMLVDAEKNNIDMSDFGKNVIPAYLESGERVYTYNFNGYWKDVGTIESLWEANMEYIGEDNDLHSRDRSWKIYSKNLIAPPNFITEEAHVKDSLVVDGCFVSGKVEHSILSTNVQVKEGAQIKDSFIMSGAVIGEGAKITRAIVGEGAKIGEDVEIDGTEEVQVIGYNEVVGVPNED

SEQ ID NO: 12275 - protein, 522 aa, Zea mays
MARNNEGHLELPEMDQIQPKNIPHNESLPLGQKLLLHHGSDAPLRIGHSSHGNMGLRINDLPSSSRTVQTLGYRVGNPGTSHAPFVHFHAGSSGSHLPDPAVNYPHRSEEGFAPVGSHMDNRRAAMKRKGPSVHPAGISATGYYVGSSSSTQPSNSVQPNAAPLAEPFLRQIPLSIDQSGWDIQHLIHQEGFQRNVRARHSSIPLVPRSASTYPLNINSVHVPSFGSTASASSSAPVEMNQVPVSLPTRTLPSGAPGMTSRVPTGRAYYPVVGSSSSSSSVGAVPTIHGSSGAAMFANGGYVPSSVHAGTVPIFPNPAPATSSGSRAMPHQMVIQSHPAATSAATSSTSMRTAQPSLPARTAAASRHARHVSAGLANNGRYRRARSSYYRLHPLMVEAERFMMDHLVFYESRAAAADPHRDMRLDIDNMSYEDLLALGEAMGNVNTDLADEKISECVKEVVCCSSDHTQMDQDDGSCAICLEDYRDKDALGILKCRHDFHAGCIKKWLQTKNSCPVCKAAAA

SEQ ID NO: 12276 - protein, 185 aa, Pseudomonas syringae pv. tomato str. DC3000
MSADIEHIRQIMREADCLYTEAEVDAAIARVGAQINAELADRNPVVFCVMNGGLIFSGKLLTHLNFPLEASYLHATRYRNETTGGDLFWKAKPEVSFIDRDVLIIDDILDEGHTLGAIIDFCKHAGARAVHTAVLIDKDHDRKARPDLKADYVGLPCIDRYIFGFGMDYKGYWRNAAGIYAVKGM

SEQ ID NO: 12277 - protein, 367 aa, Oryza sativa
MGSMTIGAKYKTTLKDPGTTGVLRMNEDKFTFTPHDPRSAMKLNVDFRSIKGHKFNKVDGSKPAPPLLNLSKDSDKGGGYMFEFDNVTNRDLSRDFVAKVLGKQQGTIPPKPNVPPENSVTSTGEEQLSAAEMQRRMKLLQEDRAEYLLRTKNTVAATAEAAEDEELAIFLKNDDILAKEARLKIKRVDPTLDMEADAGDDYIHLPDHGIIRDGSKETIDNDGELARRTLSQDLNRHAAVVLEGRSSDVELTDTKTVAEAIARSKKEPPSSSISDDTNHERLVKVARMTEIEDLQAPRSLPYAPLCIKDPREYFDSQQANALRSLGGNNDGRHAHQKLMMKAAFEDHVDIQITCDWRYVAMRKPLHI

SEQ ID NO: 12278 - protein, 466 aa, Pseudomonas fluorescens PfO-1
MSNYDVVILGGGPGGYNAAIRAGQLGLKAACVEGRATLGGTCLNVGCMPSKALLHASELYEAALGAEFANLGIEVKPTLNLAQMMKQKDESVSGLTKGIEFLFRKNKVDWIKGWGHIDGPGKVSVTGDQGSRIELTAKDIVIATGSEPTPLPGVEIDNKRILDSTGALSLSEVPKHLVVIGAGVIGLELGSVWRRLGAQVTVVEYLDRICPGVDGEAGKTLQRSLSKQGISFKLSSKVTSATSSANGVQLSVEPAAGGSAEILEADYVLVAIGRRPYTQGLGLENVGLSTDKRGMLANKQHRTEAPGVWVIGDVTSGPMLAHKAEDEAMACIEQIVGKAGEVNYDLIPNVIYTRPELASVGKTEEQLKAEGRAYKVGKFPFTANSRAKINHETEGFAKVIADERTDEVLGVHLVGPSVSEMIGEFCVAMEFSASAEDIALTCHPHPTRSEALRQAAMNVEGMATQM

SEQ ID NO: 12279 - protein, 404 aa, Anabaena variabilis ATCC 29413
MVYQPAAGARDLLPLDVAQKRWIEDKLQQVFHRWGYHRIITSTLERMDTLMAGEAIQRQMVIQLQNSEDEELGLRPELTASIARAVVTRMTNLRHPQRLYYNANVFRRIWENRHNRQQEFYQAGVELLGVGGLLANAEVLLLAGNCLTALGLQDWHLILGEAGITRSLLDAFPINLRAKVRSAIAHLDRITIDTLPLTDELRERARIMLDLRGNSTDVLQKVSSLNLDAEQQEAVNNLQSLVELLESGGKFPIILDLSLIQTIDYYTGIVFEIVNNTDSQARVLGRGGRYDQLLGLYHPQGENIPGIGFVLNIEDLYQVLLTTQQLPQETPASDWLVVPENPKAHSAAFAHAQKLRESPDLVRVELDLGGTDIPAIQQYARDRRIAQIAWIKADGSLIIEKVSQ

SEQ ID NO: 12280 - protein, 382 aa, Synechococcus elongatus PCC 7942
MRVDFNVPLDGNGKITDDTRIRAALPTIRYLSESGAKVILVSHFGRPKGKPVESMRLTPVAERLSELLGRPVVKTTDAVGAGAEAQVAATSNGQVVLLENVRFHAEEEANDAEFAKALASLADIYVNDAFGAAHRAHASTAGVTEYLSPCVAGYLLEKELQYLQAAIDNPQRPLAAIVGGSKVSSKIGVIETLLDKCDKLLIGGGMIFTFYKAQGLSVGGSLVEEDKLDLARSLMAKAQEKGVQLLLPVDVVVADKFAPDANAKTVAIDAIPDGWMGLDIGPESVKQFEEALADCRSVIWNGPMGVFEFDQFAVGTEAIARSLAGLTRKGATTIIGGGDSVAAVEKVGVASEMSHISTGGGASLELLEGKVLPGVAALDDAA

SEQ ID NO: 12281 - protein, 423 aa, Eremothecium gossypii
MVNQRVVHLCAKRSFSLTASMQKYFVDVYAKPDLVLTRGRGSRLFDDVNKREYIDFVAGIAVTSLGHSDPAIAEVIAAQSATLVHTSNLFHNSEALKFAEKLVESTKRFGGQQDAEKVYFCNSGTEANEAALKFSRRRALRTDPQKQGFIAFENSFHGRTMGSLSVTSKAKYRLPFGDMVPHVTFLNIHDPVEKLVSFIVENAPKTAAMILEPIQGEGGVHRVPEDKLVALGRLCKKHDIVLIYDEIQCGLGRTGKLWAHSNLPADAHPDIFTTAKALGNGFPMGATVVNSKVNEVLSVGDHGTTYGGNPLACAVGNHVLDRIAQQPFLDDVKAKANVFTAGLLALQKKYPFIREIRGDGLLIGVEFTVDVSDIISKSRERGLLITAAGPNTLRIIPALTIEEDTIRQGLEILESVVGEISSS

SEQ ID NO: 12282 - protein, 492 aa, Glycine max
MDPYKNRPSSAFNSPFWTTNSGAPIWNNNSSLTVGSRGPILLEDYHLVEKLANFDRERIPERVVHARGASAKGFFEVTHDISHLTCADFLRAPGVQTPLIVRFSTVIHERGSPETLRDPRGFAVKFYTREGNFDLVGNNFPVFFVRDGLKFPDMVHALKPNPKSHIQENWRILDFFSHHPESLHMFSFLFDDVGIPQDYRHMDGFGVNTYTLINKAGKAVYVKFHWKTTCGEKCLLDDEAIRVGGSNHSHATQDLYDSIAAGNYPEWKLYIQTLDPENEDRLDFDPLDVTKTWPEDVLPLQPVGRMVLNKNIDNFFAENEQLAFCPAIIVPGVYYSDDKLLQTRIFSYADTQRHRLGPNYLQLPANSPKCAHHNNHHDGFMNFMHRDEEVNYFPSRYDPVRHAERVPVPPRTLGGKREKCMIEKENNFKQPGERYRSWPSDRQERFVRRWVDALSDPRVTHEIRSIWISYWSQADRSLGQKIASHLNLKPSI

SEQ ID NO: 12283 - protein, 337 aa, Neurospora crassa
MSSSSKFRSSHHYHSQSVSSILGRHDSTSPGAELQRRPTTTSSYTSSGSASRRVPRDNGTRSSDGTVSTMMSTTSSTGRESAATTAMTEGPAYSKKVVVVGDGGCGKTCLLISYSQGYFPEKYVPTVFENYITYPTHPPTGKTVELALWDTAGQEEYDRLRPLSYPETDLIFVCFAIDCPNSLENVMDKWYPEVLHFCPYTPLILVGLKSDLRNKKTCIDMLKTQGLTPVTTEQGLAVAKKMGAQYMECSSKEMKGVEEIFEQAILTVVANDRKTLEQEAANGMLGVGAGSGSGKGSGISFSSGDKAGSGIGPVKAAGVGGTIVPKTRKKKRKCGMM

SEQ ID NO: 12284 - protein, 93 aa, Oryza sativa
  unsure (1)..(93): unsure at all Xaa locations
MAGTIVCGTARQILDCKCIPTDTAHACCSDGTFARAAGPTGASSGVYEALELTDGGSDYLGXGLCKAVDNLCSVIVSALISKDPASHADLDNF

SEQ ID NO: 12285 - protein, 502 aa, Pseudomonas sp. Y2
MTRSLTMNSSLSAIDGLRLPHQMLIGGQWVSAQSGKTLNVYNPATGDILTEVPDGDVEDVNAAVESAAGTLRSDTWRRMPPSARERILLRLADLLEVHGDELARLETLNNGKLLIYSKLMEVGASAQWLRYMAGWATKLTGSTLDLSLPLPPEVRSRASTQRVPVGVVAAIIPWNFPLLMAVWKIAPALACGNTVVLKPAEETPLTALRLAELAMEAGLPAGALNVVTGRGETAGDALVRHPKVAKVAFTGSTEVGRIIGSACGRSLKAVSLELGGKSPVIVLADCDPQEAAEGAAAAIFFNHGQVCTAGSRLYVHESIYEDVIQRLAVIGESIVVGSGLEQGVHMGPMVSKKHHENVLRHIRNGIEDGADLICGGTEAPCAQGFFVKPTIFANREKKDIRLLSQEVFGPVLVATPFSDIAEVVNEANRSVYGLGASIWTNDLSAALRINDELEAGTVWVNTHNMVDPNLPFGGFKDSGVGREHGAAAIEHYTTTRSLVIAY

SEQ ID NO: 12286 - protein, 232 aa, Glycine max
VRTAARRRQKGIVPISSFLFFLITYAKPILLLLSQKNNISCYLPDYKHHLEPCLSLPNCLWSYYFHPFFIHASLAEMVCEDLPKEVCAFSVASSGKRCLLETEKAADGGVEYQCRTSEVVVERMADYIETDQCVEACGVDRNSVGISSDAFFEPQFTGKLCSPACYQKCPNIVDLFFNLAAGEGVFLPELCEKHKTNPRRAMVELVSSGAAPGPVSDVSEAIIASAPAPSAL

SEQ ID NO: 12287 - protein, 237 aa, Pichia anomala
VGGHEGAGVVVAKGANVTNFEIGDYAGIKWLNGSCQSCEYCEKSFESNCPKADLSGYTHDGSFQQYATADAVQAAKIPKDADLAEVAPILCAGVTVYKALKTADLDAGQWVAVSGAGGGLGTLAIQYAKALGLRVLAIDGGDEKGELVKSLGAEVYIDFTKTKDIVKDIIEATNGGPHGVINVSVSEKAIEQSTEYVRPCGTVVLVGLPAGAVARAQVFGAVVKSVSIKGSYVGNRA

SEQ ID NO: 12288 - protein, 247 aa, Pichia anomala
NGSCMTCEYCQNAFESNCAKADLSGYTHDGSFQQYATADAVQAAQIPKGTDLAQISPILCAGITVYKALKTANLKAGDWVAISGAGGGLGSLAVQYAKAMGYRVLGIDVGADKGELAKSLGAEEYVDFKASKNVVEEIQEKTKGGPQGVINVSVSDAAISQSTQYVRPTGSVVLVGLPPKSVIHSDVFSHVVKSISIKGSYVGNRADSREAIEFFTRSLVHSPIKVVGLSELPKVYELMDQGKILGR

SEQ ID NO: 12289 - protein, 425 aa, Pseudomonas putida KT2440
MSKTNESLMQRRVAAVPRGVGQIHPIFVDTAKNSTVIDVEGRELIDFAGGIAVLNTGHLHPKVVAAVQEQLTKVSHTCFQVLAYEPYVELCEKINKLVPGDFDKKTLLVTTGSEAVENAVKIARAATGRAGVIAFTGGYHGRTMMTLGLTGKVVPYSAGMGLMPGGIFRALFPSELHGISVDDAIASVERIFKNDAEPRDIAAIILEPVQGEGGFLPAPKELMKRLRALCDQHGILLIADEVQTGAGRTGTFFAMEQMGVAPDLTTFAKSIAGGFPLAGVCGKAEYMDAIAPGGLGGTYAGSPIACAAALAVIEVFEEEKLLDRSKAVGERLTAGLREIQKKYPIIGDVRGLGSMIAVEVFEKGTHTPNAAAVGQVVAKAREKGLILLSCGTYGNVLRILVPLTAEDALLDKGLAIIEECFAEIA

SEQ ID NO: 12290 - protein, 264 aa, Zea mays
SSVADLYVNDAGGTAHRAHASTEGVTKYLKPAVAGFLMQKELDYLVGAVANPKKPFAAIVGGSKVSTKIGVIESLLAKVDILILGGGMIYTFYKAQGYSVGKSLVEEDKLELATSLIEKAKAKGVSLLLPTDIVVADKFAADAESKIVPATAIPDDWMGLDVGPDATKTFDEALDTTKTVIWNGPMGVFEFQKFAAGTEAIAKKLAELTTTKGVTTIIGGGDSVAAVEKAGLADKMSHISTGGGASLELLEGKTLPGVLALDDA

SEQ ID NO: 12291 - protein, 502 aa, Solanum melongena
MDLSKYRPSSAYDTPFLTTNAGGPVYNNVSSLTVGPRGPVLLEDYHLIEKLATFDRERIPERVVHARGASAKGFFEVTHDVSHLTCADFLRAPGVQTPVICRFSTVVHERGSPESIRDIRGFAVKFYTREGNFDLVGNNVPVFFNRDAKSFPDTIRALKPNPKSHIQENWRILDFFSFLPESLHTFAFFYDDVCLPINYRHMEGFGVHAYQLINKAGKAHYVKFHWKPTCGVKSMTEEEAIRVGGTNHSHATKDLYDSIAAGNYPEWKLFIQIMDPEDVDKFDFDPLDVTKTWPEDILPLMPVGRLVLNRNIDNFFAENEQLAFNPGHIVPGVYYSEDKLLQTRIFAYADTQRHRIGPNYMQLPVNAPKCAHHNNHRDGAMNFMHRDEEVDYLPSRFDPCRPAEQYPIPSCVLTGRREKCVIPKENNFKQAGERYRTWEPDRQDRYINKWVESLSDPRVTHEIRSIWISYLSQADKSCGQKVASRLLSSLQCEEDEENSWKC

SEQ ID NO: 12292 - protein, 315 aa, Zea mays
  unsure (1)..(315): unsure at all Xaa locations
APRGVEPRLFVARAAGPAQQAADAKACSALCSPAARAVPAMESFGVPPAPVAAPEKRKKPLDLKDPVPAAAAAAANGGGATKASPAAKWAEKKKLVGGDAGYVLEDVPHLTDYLPQLPTYPNPLQDNPAYSVVKQYFVNPDDTVTQKIVVHKTSARGTHFRRAGPRQRVYFQPDEVNAAIVTCGGLCPGLNTVIRELVCGLYDMYGVTSVVGIEGGYKXGFYFKNTVALTPRSVNGIHKRGGTVLGTSRGGHDTAKIVDCLQDRGINQVYIIGGDGTQKGASVIYEEVRRRGLKCAVVGVPKTIDNDIAVSSAPP

SEQ ID NO: 12293 - protein, 811 aa, Salmonella typhimurium LT2
MKITNPEALMAASLSRRSLVKTSAIGSLALASSAFTLPFSRIAHAAADLASGNVAEKAVWSSCTVNCGSRCLLRLHVKDDTVYWVESDTTGNDEYGNHQVRACLRGRSIRRRMNHPDRLKYPMKRVGKRGEGKFERISWDEALDTIGDNLKRILKDYGNEAVHVLYGTGVDGGNITNSNVPYRLMNACGGYLSRYGSYSTAQISAAMSYMFGGNDGNSPDDIANTKLVVMFGNNPAETRMSGGGVTYYVEQARERSNARMIVIDPRYNDTAAGREDEWLPIRPGTDGALAAAIAWVLITEDLIDKPFLDKYCIGYDETTLPASAPRNAHYKAYILGQGDDGIAKTPQWAAQITSIPAEKIIQLAREIGSAKPAYICQGWGPQRHSNGEQTARAIAMLSVLTGNVGINGGNSGVREGTWDLGVEWFSMLENPVKTQISVFTWTDAIDHGAEMTATRDGVRGKDKLDVPIKFLWCYASNTLINQHGDIAHTHEVLQDDSKCEMIVGIEHFMTASAKYCDILLPDLMPTEQEDLISHESAGNMGYVILGQPATSPKFERKPIYWTLSEVAKRLGPDVYQTFTEGRTQHEWVKYLHAKTKARNPEMPDYEEMKQTGIFKKKCPEEHYVAFRAFREDPAANPLKTPSGKIEIYSERLATLANTWELKKDEIIHPLPAYTPGFDGWDDPLRQRYPLQLTGFHYKARTHSSYGNIDILQQACPQEIWINPIDAQARGIQHGDTVRVFNQNGEMLIPAKVTPRILPGVTAIGQGAWLNADMFGDKVDRGGSINILTSHRPSPLAKGNPSHSNLVQVEKA

SEQ ID NO: 12294 - protein, 813 aa, Salmonella typhimurium LT2
MMPGEKQQTGVSRRTLVKSAALGSLALAAGGVSLPFGMRTAAAAVQQAMRNEEDKIVWGACSVNCGSRCALRLHVKDNEVWWVETDNTGDDVYGNHQVRACLRGRSIRRRINHPDRLNYPMKRVGRRGEGKFERISWQEALDTISASLKKTVETYGNEAVYIHYSSGIVGGNITRSSPAASPVKRLMNCYGGSLNQYGSYSTAQISCAMPYTYGSNDGNSTSDIENSKLVVMFGNNPAETRMSGGGITWFLEQARERSNARMIVIDPRYTDTAAGREDEWIPIRPGTDAALVAGIAWVLINENLVDQPFLDNYCIGYDEKTLPADAPPNGHYKAYILGQGEDGIAKTPQWASHITGIPADRIIKLAREIGSVKPAYICQGWGPQRQANGEQTARAIAMLPILTGNVGIHGGNSGARESTYTITIERLPVLENPVKTAISCFSWTDAIARGPEMTALRDGVRGKDKLDVPIKFLWNYAGNTLINQHSDINKTHEILQDEAKCEMIVVIDNFMTSSAKYADILLPDLMTVEQEDIIPNDYAGNMGYLIFIQPATTPKFERKPIYWVLSEIARRLGDDVYQRFTEGRTQAQWLQYLYAKMQARDPALPAYDDLKKMGIYKRKDPNGHFVAYKKFREDPQANPLKTPSGKIEIYSSKLAHIASTWELAEGDVISPLPIYTPTFEGWDDPKRSTFPLQLFGFHYKSRTHSSYGNIDVLQAACRQEVWINPLDAQKRGIANGDKVRVFNDRGEVRLPAKVTPRILPGVSAMGQGAWHNADMAGDKIDHGACINTLTTLRPSPLAKGNPQHTNLVEIEKI

SEQ ID NO: 12295 - protein, 958 aa, Bordetella parapertussis 12822
MLETVIKRDRDLGTPARESAQLVTLTIDGQPVSVPAGTSVMRAAAEAGINIPKLCATDSLEPFGSCRLCLVQIEGRRGYPASCTTPVEAGMVVQTENARLRDLRRGVMELYISDHPLDCLTCPANGDCELQDMAGVVGLREVRYGYDGENHLAEAKDESNPYFTYDPSKCIVCNRCVRACEETQGTFALTISGKGFASRVSPGQDQPFMDSECVSCGACVQACPTSTLQEKSIIMLGQAEHSVITTCAYCGVGCGFKAEMKGEEVVRMVPWKDGQANRGHSCVKGRFAWGYTTHKERVLKPMIRQRITDPWREVSWEEAIGHAASEFRRIQAAHGRDAIGGITSSRCTNEETWLVQKLVRAAFGTNNVDTCARVCHSPTGYGLKQTLGESAGTQTFDSVMHTDVVIVMGANPSSAHPVFASRLKRRLREGALLIVIDPRRIELVSAPHVKADFHLQVRPGTNVALLTAMAHVIVTEGLVAESFVAERCEAPSFDMWREFVARAENSPEAMQEVTGVPAQLVRGAARLYATGGNGSIYYGLGVTEHSQGSTTVMAIANLAMATGNIGREGVGVNPLRGQNNVQGSCDMGSFPHELPGYRHISDDAVRGEFERDWGVTLQPEPGLRIPNMFEAALGGSFLGLYCQGEDIVQSDPNTQHVAAALSAMECIVVQDLFLNETAKYAHVFLPGSSFLEKDGTFTNAERRISRVRKVMRPRNGMADWEITMALSNALDYPMHYAHPSEIMDEIARLTPTFAGVTYEKLDRLGSIQWPCNEDAPEGTPTMHIDEFVRGRGRFMLTKYVATDERSTRRYPLLLTTGRILSQYNVGAQTRRTPNVMWHGEDVLEIHPHDAQERGVADGDWVGIQSRAGETVLRATLTDRVQPGVVYTTFHFPESGANVVTTDNSDWATNCPEYKVTAVQVTRVSQPSEWQRQWSRFADVQQKLLHERARETEPALANK

SEQ ID NO: 12296 - protein, 154 aa, Glycine max
KDAREGDDNLSTVHHELHFTVQECIDALGEVIYHIETYDVTTIRASTPMFLMSRKIKSLGVKMVISGEGSDEIFGGYLYFHKAPNKKEFHEETCRKIKALHLYDCLRANKATSAWGVEARVPFLDKSFISVAMDIDPQWKMIKRDSVQIEKWVT

SEQ ID NO: 12297 - protein, 426 aa, Streptococcus pyogenes MGAS8232
MKLQKPKGTQDILPGDAAKWQYVESVARDTFSQYNYGEIRTPMFEHYEVISRSVGDTTDIVTKEMYDFYDKGDRHITLRPEGTAPVVRSYVENKLFAPEVQKPVKLYYIGSMFRYERPQAGRLREFHQIGVECFGAANPATDVETIAMAYHLFEKLGIKDVTLHLNSLGSPESRAAYRQALIDYLTPMRDQLSKDSQRRLDENPLRVLDSKEKEDKLAVEKAPSILDYLDEESQAHFEAVKDMLEALNIPYVIDTNMVRGLDYYNHTIFEFITSVEGSDLTICAGGRYDSLVGYFGGPETPGFGFGLGLERLLMVIEKQGITLPIETEMDVYLAVLGDGANSKALELVQAIRRQGFTAERDYLGRKIKAQFKSADTFKAKLVMTLGESEVEAGKAVIKNNRSRQEVEVSFEDMMTNFANISEQLLS

SEQ ID NO: 12298 - protein, 481 aa, Arabidopsis thaliana
MALKALDYDTLNENVKKCQYAVRGELYLRASELQKEGKKIIFTNVGNPHALGQKPLTFPRQVVALCQAPFLLDDPNVGMLFPADAIARAKHYLSLTSGGLGAYSDSRGLPGVRKEVAEFIQRRDGYPSNPELIFLTDGASKGVMQILNCVIRGNGDGILVPVPQYPLYSATISLLGGTLVPYYLDESENWGLDVANLRQSVAQARSQGITVRAMVIINPGNPTGQCLSEANIREILKFCYNEKLVLLGDEVYQQNIYQDERPFISSKKVLMEMGSPFSKEVQLVSFHTVSKGYWGECGQRGGYFEMTNLPPRVVEEIYKVASIALSPNVSAQIFMGLMVNPPKPGDISYDQFARESKGILESLRRRARLMTDGFNSCKNVVCNFTEGAMYSFPQIRLPTGALQAAKQAGKVPDVFYCLKLLEATGISTVPGSGFGQKEGVFHLRTTILPAEDEMPEIMDSFKKFNDEFMTQYDNNFGYSKM

SEQ ID NO: 12299 - protein, 394 aa, Pseudomonas putida KT2440
MWYNGLLDLSAWQLVGITLLMTHVTIVSVTVYLHRYSAHRALELNGALKHFFRFWLWLTTAQNTREWTAVHRKHHAKCETPDDPHSPVYKGLGTVLRKGAELYREEARNPETLRIYGKNCPDDWIERNLYSRYKLGGIALMAVIDLLLFGTIGITIWAVQMMWIPFWAAGVVNGLGHALGYRNFECRDAATNLVPWGIVIGGEELHNNHHTYPNSAKLSVKRWEFDMGWAWIRLFCLLRLAKVQRVAPIAHRVAGKASLDMDTAMAILNNRFQIMAQYRKLVIGPLVKQELARVDASVRHRFRRAKRLLSRETSLLEDRHHVRIESMLAHSQALKTIYEKRLALQQIWARTSANGHDMLAAMKDWVHEAETSGIQALRDFAAQLKTYSLRPTGA

SEQ ID NO: 12300 - protein, 405 aa, Caulobacter crescentus CB15
MSTATSSTTSQHHIMGVYNRAPLAFERGRGARLISTEGEEYLDCVAGIATNGLGHAHPALVEVLKAQAEKLWHVSNIYRIPEQEELADALCANSFADVVFFTNSGTEAVECALKTARKYHSANGQPERIDIYGFDGSFHGRTYAAVNASGNPSYVDGFGPRLPGYSQLTFGDHDAIKAAIASPTTAAIIVEPVQGEGGARSIPTQCLVGLRQLCDEHGVLLIYDEVQCGMGRTGKLFAYEWAEGGEPHIMAVAKALGGGFPIGACLATTEAAKGMTVAAHGSTFGGNPLAMAVGKAALEIIKSPETLDNVKTVSGFFTQQLNGLKDRFPDVIVDVRGKGMLIGVKLIPNNRDFMVLARDEKLLIAGGGDNCVRLLPPLNLTIEEASEAIAKLEKACEAARAKAAA

SEQ ID NO: 12301 - protein, 264 aa, Rauvolfia serpentina
MHSAANAKQQKHFVLVHGGCLGAWIWYKLKPLLESAGHKVTAVDLSAAGINPRRLDEIHTFRDYSEPLMEVMASIPPDEKVVLLGHSFGGMSLGLAMETYPEKISVAVFMSAMMPDPNHSLTYPFEKYNEKCPADMMLDSQFSTYGNPENPGMSMILGPQFMALKMFQNCSVEDLELAKMLTRPGSLFFQDLAKAKKFSTERYGSVKRAYIFCNEDKSFPVEFQKWFVESVGADKVKEIKEADHMGMLSQPREVCKCLLDISDS

SEQ ID NO: 12302 - protein, 431 aa, Euglena gracilis
MPVIKTVKARQILDSRGNPTVEVDVILDNGLLGRGAVPSGASTGEYEAVELRDGDKAVYLGKGVLKSVEAVNTIVAPKLVGLDPTEQLKIDNLMRELDGTPNKGKIGANGILGVSMAVCRAAALVKGVPLYRHIGDLHGNKTFQMPVPMCNIINGGKHADNKIDFQEFMVMPVGAANFSEGLRWCAEIFHHLKSILKKAGHVTSVGDEGGFAPNLDNDEALDFVIAAIKAAGFEPGKQIAIALDCASSELFDEGDRKGYKYWKSNPDRLFSAAEMIEKYAGWVAKYPIVSIEDPLDQNDWDGYVNMTKQLGGKIQIVGDDFFVTNPTRFKKGIELAACNSILIKVNQIGTVSETLECIKMAQAAGYTAVASHRSGETEDAFIADLAVGTAAGQIKTGSLSRTDRMAKYNQLIRIEEELGGEAKWTTAMLRK

SEQ ID NO: 12303 - protein, 989 aa, Bordetella bronchiseptica RB50
MLLTKKTSGAAAGASESHFIQSLRRGMAQALPTMDRRTFLRRSGLGVGAGLAATQLALVKRAEAAEGDGKVAIGNTKIEVRRTVCTHCSVGCAVDAVVENGVWVRQEPVFDSPINLGAHCAKGASVREHGHGEHRLRYPMKLVNGKYQRISWDTAYEEITAKLMQLRKESGPDSVYWIGSSKHNNEQSYLLRKFVSFWGSNNCDHQARICHSTTVAGVANTWGYGAMTNSYNDMQNSKVALYIGSNAAEAHPVSMLHMLHAKETGCKMIVVDPRFTRTAAKADQYVRIRSGTDIPFLFGLLYHIFKNGWEDQAYIDARVYGMDEVKADILAKWSPDKVEEACGVDEATMYSVAKTMHENRPGTLVWCMGQTQHSIGNAMVRASCIVQLALGNVGKSGGGANIFRGHDNVQGATDVGPNPDSLPGYYGLAEGSWKHFANTWGVDYEWIKGRYASPAMMTKPGITVSRWIDGVLENPDLIDQDTNLRAVFYWGHAPNSQTRGLEMKRAMDKLDLLVVVDPYPSATAAMAAMPGKAEDLNPNRAVYLLPAATQFETNGSCTASNRSLQWREKVIDPLWESRTDHMIMHQLAEKLGFGKELSKNYKMQKVKGMDEPVVEDILREINASVWTIGYTGQSPERLKAHMRNMHVFDVKTLRAKGGKDAETGYDLTGDYFGLPWPCWGNPSLKHPGTANLYDTSLHVMDGGGNFRANFGVERNGVNLLAADGSHSKGADLTTGYPEFDHVLLKKLGWWEDLTPEEQKAAEGKNWKTDPSGGIIRVTMKVHGCHPFGNARARAVVWNFPDAIPQHREPIYGTRPDLVAKYPTHNDLKTFWRLPTLYTSLQQKNVAEKLYEKFPIILTSGRLVEYEGGGEETRSNPWLAELQQESFVELNPKAAADRGIRNGDRVWVLTPTGARLNVQALVTERVGPDTAFMPFHFSGHWQGVDMLASYPEGAAPIVRGEAVNTGTTYGYDSVTMMQETKTTICNIEKA

SEQ ID NO: 12304 - protein, 170 aa, Zea mays
  unsure (1)..(170): unsure at all Xaa locations
YDKNLGRIEKWVLRKAFDDEEHPYLPEHILYRQKEQFSDGVGYNWIDGLKSFTEQQVTDEMMNSAAQMFPYNTPVNKEAYYYRMIFERLFPQPIIQETVPWGPSIACSTPAAIEWVEQWKASNDPSGRFISSHDSAATDRTXTSWRWSTATGTXANGTVNGNDVAVAIAV

SEQ ID NO: 12305 - protein, 485 aa, Euglena gracilis
FFSILPIMANNTADIQYLRQHNIPELVNDLIQQLVTTKPAQPVAFLRDVLSKRKAVIKVVKARQILDSRGNPTVEVDVILDNGVVGRGAVPSGASTGEYEAVELRDGDKKVYLGKGVLKSVNAVNTLVAPKLIGLDPANQREIDELMKQIDGTPNKGKIGANGILGVSMACCRAAALTQGIPLWKHIANLHGNKDNFQLPVPMCNIINGGKHADNKIDFQEFMIMPIGAKSFSEGLRWVTEIFHTLKALLKKAGHVTSVGDEGGFAPDLSNDEALEFVMKAIKAAGYTPGTQIGVALDCASSELFDEGGRKGYKFWKSNPSKLFSAQEMIDIFCRWCDEYPIVSIEDPLDQNDWDGYVNMTKKMGRRTQIVGDDFFVTNPARFSKGIGMNACNAILIKVNQIGTVSETLECIKMAQAHGYGSIASHRSGETEDAFIADLAVGTGCGQIKTGSLSRTDRMAKYNQLIRIEEELGAQAKWTTKHLVR

SEQ ID NO: 12306 - protein, 528 aa, Trichodesmium erythraeum IMS101
MESKALWQRYIDWLYYHEGLGFYVDISRIKFDDSFVEIMKPKFEKAFQEMKKLEEGKIANPDENRMVGHYWLRDLDIAPTKEIKNEISTTLEAIETFAKKVHSGEIKPSSAPKFTDILSIGIGGSALGPQFVAEALGLDDPPMEIHFIDNTDPAGIDRVLHKLSDRLKSTLVIVISKSGGTPEPRNGMIEVKAAFASQNLNFATQAVATTTPSSKLGQIAKSEGWIDIIPMADWVGGRTSELSSVGLLPAALQGIDIRAMLAGAKEMDKVTRTHEIKGNPSALLALSWYAAGKGHGEKDMVVIPYKDSLLLLSRYLQQLVMESLGKEKDLDGKVVNQGIAVYGNKGSTDQHAYVQQLRDGVLNFFVTLIEVLEDREGTSPEVEPGVTSGDYLSGFIQGTRQALYENDRDSITVTIPKVNPYNLGALIALYERAVGFYGSLVNINAYHQPGVEAGKKAAAAVLELQHKVINILKQEKSPLSLEELSEKAGAGDQIETIYKILRHLAANKRGIVFHGNVGQPDKLGVSYN

SEQ ID NO: 12307 - protein, 424 aa, Adiantum capillus-veneris
DLEPYLGLHYPATDIPQASRFLFMKNRVRMICDCRAIPVKVIQDRELRQPLSLAGSTLRAPHGCHSQYMANMGSAASLVMAVLVNDNEEGSSSRSHKPKPRKLWGLVVCHHTNPRAVAFSLRSACEFLMQVFGLQLNMEVELAAQMREKHILRTQTLLCDMLLRDAPIGIVSESPNIMDLVKCDGAALYYGKKFWLLGTTPTEPQIRDLAEWLLDVHRDSTGLSTDSLADAGYPGAAALGDAVCGMAAAKITSRDFLFWFRSHTAKEIKWGGAKHDPEDRDDGRKMHPRSSFKAFLEVVKRRSLPWEDVEMDAIHSLQLILRGSFQDIDDSDTKTMIHARLNDLKLQGMDELSTVANEMVRLIETATAPIFAVDAGGFINGWNAKIAELTGLSVEEAMNRSLVGDLVVEDSAEIVERLLCLALQ

SEQ ID NO: 12308 - protein, 259 aa, Lycopersicon esculentum
MANKLRLEGKVAIITGAASGIGEASARLFVEHGARVVVADIQDELGQKVVDSIGSDKASYRHCDVTDEKQVEETVAYAVEKYGTLDIMFSNVGTLNFCSVLDMDVLAFDETMAINVRGSALAVKHAAKVMVDKKIRGSIICNASLEGILAGAASLAYIASKHAVVGIIKAAARELGPHGIRVNGVSPYGIATPLVTKAYGLDAALLEEAIYGNGHLKGVKLSTMHVAQSALFLASDESAYTSGQNLAVDGGLSSILKLQ

SEQ ID NO: 12309 - protein, 292 aa, Vibrio cholerae
MKGIILAGGSGTRLYPITRGVSKQLLPIYDKPMIYYPLSTLMLAGIRDVLIITTPEDNESFKRLLGDGRDFGIHLQYAIQPSPDGLAQAFLIGEEFIGNDSVCLVLGDNIFYGQSFSKTLRHAASREHGATVFGYQVKDPERFGVVEFDEQMRAISIEEKPSKPKSNYAVTGLYFYDNRVVELAKQVKPSVRGELEITTLNEMYLIDGSLNVELLGRGFAWLDTGTHESLHEASSFVETVQHIQGLKIACLEEIAWRNGWLTSEQLLECAKPMLKNDYGQYLERLVKEERHG

SEQ ID NO: 12310 - protein, 317 aa, Photorhabdus luminescens subsp. laumondii TTO1
MTDKLTSLRKLTTVVADTGDIAAMKLYQPQDATTNPSLILNAAQIPEYRKLIDEAIAWAREQSDSREQQIVDASDKLAVNIGLEILKLIPGRISTEVDARLSYDSERSVAKAKRLIKLYNEAGISNDRILIKLASTWQGIRAAEQLEKEGINCNLTLLFSFAQARACAEAGVYLISPFVGRILDWYKANSDQKEFAPHEDPGVISVTEIYQYYKQHGYDTVVMGASFRNSGEILELAGCDRLTIAPALLKELSEAQGEVERKLGYAGEIKARPEPLNEAQFYWEHHQDAMATEKLADGIRKFAIDQGKLEKMISDLL

SEQ ID NO: 12311 - protein, 269 aa, Shigella flexneri 2a str. 2457T
MEKKIGFIGCGNMGKAILGGLIASGQVLPGQIWVYTPSPDKVAALHDQFGINAAESAQEVAQIADIIFAAVKPGIMIKVLSEITSSLNKDSLVVSIAAGVTLDQLARALGHDRKIIRAMPNTPALVNAGMTSVTPNALVTPEDTADVLNIFRCFGEAEVIAEPMIHPVVGVSGSSPAYVFMFIEAMADAAVLGGMPRAQAYKFAAQAVMGSAKMVLETGEHPGALKDMVCSPGGTTIEAVRVLEEKGFRAAVIEAMTKCMEKSEKLSKS

SEQ ID NO: 12312 - protein, 353 aa, Oryza sativa
MAHRRIALAVLVTLLLSAFRPCLAQQSNDDTSKHHRSATAGGFTPTTVVVLVALITAFVLLTVFSVLINRCAQARAPPRRAFRSTASHQPVGGAAAASRASRGLDKEVVEAFPTAVYGDVKARMAAKSGPLECAVCLAEFADSDELRVLPACCHVFHPDCIDPWLAAAVTCPLCRANLTAPPVSLAAAESSDLTAPEEAVQEEESEELDEASLMATFTPESVIDFGATHDHEFDRAGYPHYRRTQSAMDAAPDRHTLRLPEHVMKELAADRRHRRAASLAGYPDSVERTPRWLTSLWRSVSWQRQSRADWDAGEEHGGSKRVHPVAGAQDETPSGSGSDGSKENSDSDALNRV

SEQ ID NO: 12313 - protein, 456 aa, GIBBERELLA ZEAE PH-1
MSSRPQNIGIKAIELYFPSQYVDQVELEKFDGVSAGKYTIGLGQTKMSFCDDREDIYSFALTATSKLLKNYNIDPNSIGFLEVGTETLLDKSKSVKSVLMQLFGDNTNIEGVDTINACYGGTNAVFNAINWVESSAWDGRDAIVVAGDIALYAKGNARPTGGAGAVALLIGPNAPIVAEPGLRGTYMQHAYDFYKPDLTSEYPYVDGHYSVNCYSKALDAAYRAYCKREAKQANGTNGVTNGDASTKTGLDRFDYMAFHSPTCKLVQKSYARLLYHDYLANADSPVFAEVAPELRDMDYEKSLTDKVVEKTFMTLTKKRFQERVNPAIQVATNCGNMYCGSVWSGLASLISVVDNKDLEGKRIGLFSYGSGLAASFLSFRINGSVDKISDVLNIPSRLESRRAVPPETYDQMCDLRKQAHLQKDYTPKGDPSTILPGTYYLTKVDDMFKREYAIKE

SEQ ID NO: 12314 - protein, 631 aa, Clostridium butyricum
MKKYRVNVQGMTCSGCEQHVAVALENMGAKAIEVDFRRGEAVFELPDDVKVEDAKNAIADANYHPGEAEEFQSEQKTNLLKKYRLNVEGMTCTGCEEHIAVALENAGAKGIEVDFRRGEALFELPYDVDIDIAKTAITDAQYQPGEAEEIQVQSEKRTDVSLNDEGNYDYDYIIIGSGGAAFSSAIEAVALNAKVAMIERGTVGGTCVNVGCVPSKTLLRAGEINHLAKNNPFVGLHTSASNVDLAPLVKQKNDLVTEMRNEKYVNLIDDYGFELIKGEAKFVNENTVEVNGNQITAKRFLIATGASSTAPNIPGLDEVDYLTSTSLLELKKVPNRLTVIGSGYIGMELGQLFHNLGSEVTLIQRSERLLKEYDPEISEAITKALTEQGINLVTGATYERVEQDGDIKKVHVEINGKKRIIEAEQLLIATGRKPNTESLNLHAAGVEVGSRGEIVIDDYLKTTNSRIYSAGDVTPGPQFVYVAAYEGGLAARNAIGGLNQKVNLEVVPGVTFTSPSIATVGLTEQQAKEKGYEVKTSVLPLDAVPRALVNRETTGVFKLVADAKTLKVLGAHVVAENAGDVIYAATLAVKFGLTVGDLRETMAPYLTMAEGLKLAVLTFDKDVSKLSCCAG

SEQ ID NO: 12315 - protein, 465 aa, Microbulbifer degradans 2-40
MIESQYDLVVIGSGPAGQKAAIQAAKAGKSVALIEQTRELGGSCVHRGTIPSKTLKENALRVKNMRSNAELSHFQLREDVELATLIDRLNEVLAEHDSYMRRQLERNEITLIHGRAKFLSPNQLEVTKLQQEAECISAANIIIASGSHPRQPPNIHIDHEYIFDSDSILSMMYLPKSLTVLGGGVIASEYASIFQALGVKVTMIDRYPRPLGFLDDDLTDVFIQAFEQMGGTWVGNTVVEECHWNNVDSVETVCADGNIYKSEKLLCAAGRLANVKDLHIEQAGLALNDAGLISVDGQLRTSVPHIFAAGDVIGPPSLASASMEQGRRASCNALDISVGKMHSMIPTGIYSIPELSSVGLSETQARKTHGDVLVGKAKFDEIARGQISGVQNGMLKIVCDAQGEKVLGVMIVGEGATELVHVGQMALLHEADVDLFVDCIFNFPTLAEAYRVAALQIIGQRNAKR

SEQ ID NO: 12316 - protein, 352 aa, Methylobacillus flagellatus KT
MTKAISYAAHDPKSPLAPFSFERRQVGANDVQIEILFCGVCHSDLHQARNEWGNSIFPVVPGHEIVGRVTQVGSNVKKFKVGDLAGVGCMVDSCNACPDCAEGLEQYCNHAVFTYNSPDKHMPGQVTYGGYSNLIVVDERFTLKISDKLDLAATAPLLCAGITTYSPLRHWNVGPGQKVGIVGLGGLGHMGVKFAKALGAHTVLFTTSPSKVEDAKRLGADEVIISKDPEQMQQHLQSFDFILNTVAAPHDLDQFMALLKRDGSMCLVGVPDSPHPSPSVANLIFKRRKLAGSLIGGIKETQEMLDFCAEHNITSDIELIPIQEINNAFERMLKSDVKYRFVIDIASLRQAA

SEQ ID NO: 12317 - protein, 420 aa, Streptomyces chrysomallus
MTITPPALSVFETLESEVRSYCRGWPAVFDRAQGARLTDEDGHSYLDFFAGAGSLNYGHNNPVLKRALIDYIERDGITHGLDMATTAKRAFLETFQNVILRPRDLPYKVMFPGPTGTNAVESALKLARKVKGRESVVSFTNAFHGMSLGSLAVTGNAFKRAGAGIPLVHGTPMPFDNYFDGTVPDFLWFERLLEDQGSGLNKPAAVIVETVQGEGGINVARAEWLRALQELCLRQVMLLIVDDIQMGCGRTGGFFSFEEAGIVPDIVTLSKSISGYGLPMSLCLFKPELDIWEPGEHNGTFRGNNPAFVTAAAVLDAYWADGQMEKQTLARGEQVEQTLLAICAEEPTAQFRGRGLVWGMEFEDKARASAVCARAFELGLLLETSGPQSEVVKLLPPLTITPEELDEGLRTLARCVRETA

SEQ ID NO: 12318 - protein, 164 aa, Lactobacillus delbrueckii subsp. lactis
RLRILVMNYPTNPTGVMYSQEELDALAAVIKDRPTFVLCDEIYSELNYDQEHASMAKSLRSQAIVLNGVSKSWAMTGYRIGIMAAPQEITDQLAKVHQFITTTEPTPMQDAAEEAFKNGDRDAREMKAAFKERRDYLYQALTETGFEVVKPQGAFYIWAKIPAG

SEQ ID NO: 12319 - protein, 607 aa, Bacillus cereus ATCC 10987
MCGITGWVNWNKDLSNEHVILEKMAHSIQHRGPDAEGFWFSPRAAFAHRRLIVIDPEGGAQPKTFRAGDYTYALTYNGEIYNFRELREQLRKCGHTFETHSDTEVLLHAYLEWKEDCVQHLNGIFAFALWDDQKQQLFLARDHLGVKPLFYTERNDSIIFGSEIKALLAHPSVPTEIDADGINEIFGLGLFRTPGCGVFKHIEEVRAGHSITFTRDKKVVTKYWNLESKAHTDSTEDTASHILSILQDTVKRQLIADVPLVCMLSGGLDSSGITALAGKEFAAENKTLHTYSIDFVNSAKDFELTFARTGLDAPWVKRVSEHVGTSHHDIIVNAEELANHLFVPLRAKDLPSAGEMETSLYLLFCEMKKDATVALSGESADEVFGGYPWFHQEELLYVDKFPWLTNWKNTSPLLLHEVSNQCNLEEYIDTRFQEAILEVPTLKGESKKSAKQRQMFYLFLTRFLPFLLDRKDRMSMAVGFEVRVPLCDYRLVEYLWNVPFNIKSIDNIEKGILRRALKPALPDDVRNRRKSAYPTSQDPHYLQTIRHLSLDMCSNKNNPIFSLINHSTLLAIADQSNKDINNFEARSAMEYMLQVNEWLKTYHIHIA

SEQ ID NO: 12320 - protein, 687 aa, Saccharomyces cerevisiae
MTDITPVLCNDVDVNGNNVNDDVSSNLKRPIDQGDPSNGLAEEENPANNQLHLKKARLDGDALTSSPAGLAENGIEGATLAANGENGYNATGSGPEDEQQGLKKEEGGQGTKQEDLDENSKQELPMEVPKEPAPAPPPEPDMNNLPQNPIPKHQQKHALLAIKAVKRLKDARPFLQPVDPVKLDIPFYFNYIKRPMDLSTIERKLNVGAYEVPEQITEDFNLMVNNSIKFNGPNAGISQMARNIQASFEKHMLNMPAKDAPPVIAKGRRSSAQEDAPIVIRRPQTHNGRPKRTIHPPKSKDIYPYESKKPKSKRLQQAMKFCQSVLKELMAKKHASYNYPFLEPVDPVSMNLPTYFDYVKEPMDLGTIAKKLNDWQYQTMEDFEREVRLVFKNCYTFNPDGTIVNMMGHRLEEVFNSKWADRPNLDDYDSDEDSRTQGDYDDYESEYSESDIDETIITNPAIQYLEEQLARMKVELQQLKKQELEKIRKERRLARGSKKRGKRSKGRSGSKNASSKGRRDKKNKLKTVVTYDMKRIITERINDLPTSKLERAIDIIKKSMPNISEDDEVELDLDTLDNHTILTLYNTFFRQYESSSGASNGLDGTSGVTRDASSLSPTSAGSRKRRSKALSQEEQSRQIEKIKNKLAILDSASPLSQNGSPGQIQSAAHNGFSSSSDDDVSSESEEE

SEQ ID NO: 12321 - protein, 251 aa, Rubrivivax gelatinosus
MNEPTPLSRSFGYQSVDEREREQRIRRVFSAVAARYDLMNDLMSFGIHRLWKRRFVRMAAPQAGQHIVDLAGGTGDVAALMAAADRRVTVVDPSAEMMAVGQARGHAHVDWQVGSAEQLPLADASVDTLTISFGIRNATRIDVALREIHRVLKPGGRFLCLEFSTPAWWLRPFYNLFSFTVIPRLGAWIANSPEAYTYLVESIRRFPDQRGFAAMISAAGFESVRWHDLSFGIACVHVGTRAAAATPAGTA

SEQ ID NO: 12322 - protein, 720 aa, Petunia integrifolia subsp. inflata
MMTEVHDAGRPRVVIFNGSQLQREAIIPFASRSSCFHHQLCSRGHLLIIFLLLVSPFNDAAVDVDGDDNDNLIIDHVPDAKSSSEALLNFKSSLSTSSPRGHEVLGSWIPSNSPCSGNNGNWLGVLCYEGDVWGLQLENLDLSGVIDIDSLLPLHFLRTLSFMNNSFKGQCLIGISLEPSSHCTCPIIASPVRSRMMLPGYDLSQEALFGKQPIQRQHPHLPGYLLPQVFELSLENNRFTGSIPHFPPNVLKVLNLSNNQLEGPIPPALSLMDPTTFSGNKGLCGKPLESACNSPSQEANNPDSRNSSTISGQSSTDVIRKSPTRLSKVMLIVAVCLVVLCLLIVLILIIRRRSHSSSQNPQPVESNYSNNDRDQNAFTSSAPDDHVTLSGNSTYSNNQHSNSNKAEAPTAAVVGKLSFVRDDRPRFDLQDLLRASAEVLGSGNLGSSYKALLMDGQAVVVKRFKQMNHVAKEDFHEHMRRLGRLTHPNLLPLVAYYYRKEEKLLVYDYASNGSLASHLHGNQSRLDWSSRLKIVKGVAKALAYLHNELPSLALPHGHLKSSNVLLDKYLNPVLMDYTLVPLVNLAQVQHLLVAYKAPEYAQQGRITRKTDVWSLGILILETLTGKFPTNYLALSTGYGTELATWVDTIIRDNESAFDKEMNTTKDSQGQIRKLFDIGVACCQEDLDTRWDLKEVVQSIQSLNDKDHGHSNSDQMHDAGV

SEQ ID NO: 12323 - protein, 492 aa, Oryza sativa (japonica cultivar-group)
MDPYKHRASSGSNSTFWTTNSGAPVWNNNSALTVGERGPILLEDYHLIEKLAQFDRERIPERVVHARGASAKGFFEVTHDISHLTCADFLRAPGVQTPVIVRFSTVVHERGSPETLRDPRGFAVKFYTREGNFDLVGNNMPGFFIRDGMKFPDMVHAFKPSPKTNMQENWRIVDFFSHHPESLHMFSFLFDDVGIPLNYRHMEGFGVNTYTLINKDGKPHLVKFHWKPTCGVKCLLDDEAVTVGGTCHSHATKDLTDSIAAGNYPEWKLYIQTIDPDHEDRFDFDPLDVTKTWPEDIIPLQPVGRMVLNKNIDNFFAENEQLAFCPAIIVPGIHYSDDKLLQTRIFSYADTQRHRLGPNYLMLPVNAPKCAYHNNHHDGSMNFMHRDEEVNYFPSRFDAARHAEKVPIPPRVLTGCREKCVIDKENNFQQAGERYRSFDPARQDRFLQRWVDALSDPRITHELRGIWISYWSQCDASLGQKLASRLNLKPNM

SEQ ID NO: 12324 - protein, 404 aa, Vibrio vulnificus CMCP6
MQNIGMSSKLDNVCYDIRGPVLKHAKRMEEEGHKILKLNIGNPAPFGFDAPDEILVDVIRNLPTSQGYCDSKGIYSARKAVVQHYQRKGIRSLDVEDVYVGNGVSELIVMAMQALLNNGDEMLVPAPDYPLWTAAVALSGGKAVHYLCDEQADWYPDLDDMRKKITPKTRGIVLINPNNPTGAVYSRDFLLEVIEIARQHKLMIFADEIYDKVLYDGAVHTSVATLTDDVLVMTFNGLSKAYRVCGFRGGWMFMTGPKHLAQGYVNGLDMLASMRLCANVPMQHAIQTALGGYQSINELILPGGRLLEQRDRAWELINQIPGVSCVKPKGAMYLFPKIDTKKYSIKDDQKMVFDFLVQEKVLLVQGSGFNWPKPDHFRIVTLPHIEDLETAIGRFERFLHGYSQ

SEQ ID NO: 12325 - protein, 461 aa, Chloroflexus aurantiacus
MVREVIMPKFGFTQETAEIVRWIKREGDLVDIGEPIVEVTTDKVNMEVEAPARGVLGNVRYREGDVVPVTEVIAYIMPLEEVGVQSASQSGTDHHMVVNSAPSQRSEPKATPLAERVARTVGLSLDRIQGSGPNGRILRRDVENTLRQLSMNKVRAVPAARRLAREAGIDISKVKGTGPHHRVQSSDVQNYLATRSSLDATFTTSGPIKQPEDVVTSSTITGDTQTQSGYRKLPLTGMRRTIARRLQRSAQEAPHIQLEVRVDVTEVEALRAKANRHHLDEQPKVSLTAIFVKSAAWALKRHPYLNAWLQSIGHEEQIVLVDEINIGIAVALEQGLIVPVIRKANEKGILQIAREIDDLSQRARTDKLRPDEVVDGTFSISNLGMFGIERFSAIINPPQVAILAVGAVCREVVADENNGISVRPLVKLTLCVDHRVVDGAVAAAFLHDLKVVLEDPQVMLL

SEQ ID NO: 12326 - protein, 315 aa, Hordeum vulgare subsp. spontaneum
MATAGKVIKCKAAVAWEAGKPLSIEEVQVAPPQAMEVRVKILYTALCHTDVYFWEAKGQTPVFPRILGHEAGGIVESVGEGVTELVPGDHVLPVFTGECKDCAHCKSEESNLCDLLRINVDRGVMIGDGQSRFTINGKPIFHFVGTSTFSEYTVIHVGCLAKINPEAPLDKVCVLSCGISTGLGATLNVAKPKKGSTVAIFGLGAVGLAAMEGARMAGASRIIGVDLNPAKYEQAKKFGCTDFVNPKDHTKPVQEVLVEMTNGGVDRAVECTGHIDAMIAAFECVHDGWGVAVLVGVPHKEAVFKTHPMNFLNEK

SEQ ID NO: 12327 - protein, 328 aa, Rhizobium leguminosarum
MPFTFEGKAAMMERALGSAGISILCQDARLSIFYAENLPPHFAALFMPGGSDAALFGDAHGRYLTALKHKVLETGIPNNAEVEIDVDGERRTYELKIQRTGERGVHGLLSVMTEVTESRHREKVLKSLLRELSHRSKNLLAIIQGIATQTARNTLSLDSFLLKFRGRLQSLSNSQDLITDSSWRGAYLFELAEKQFAPYWPETAGSMPIYGINAHLTPNAAVHLGLALHELIVNSASFGAISGGAASITLNCREAMINDRKAIEVAWAEVLHDQSEVHEFSDNSFGRTVLERVVPSSVNGKAELNLVPGRIEYRLTIPETEFEIFKRV

SEQ ID NO: 12328 - protein, 1151 aa, Populus balsamifera subsp. trichocarpa
MASQSQRQSNQRQHQNQAAQSSGTSNMRQHHHATESVSKAIAQYTVDAQLHAVFEQSGGSGKSFDYSQSVRTTSQSVPEEQITAYLSKIQRGGHIQPFGCMIAVDEGSFRVIAYSENAKEMLGLTPQSVPSLDKQEILSDGTDVRTLFRPSSSAMLEKAFGAREIILLNPIWIHSKNSGKPFYAILHRIDVGIVIDLEPARTEDPALSIAGAVQSQKLAVRSISQLQSLPGGDIKLLCDTVVESVRELTGYDRVMVYKFHEDEHGEVVAENKRADLEPYIGLHYPSTDIPQASRFLFKQNRVRMIVDCHATPVRVIQDEALMQPLCLVGSTLRAPHGCHAQYMANMGSIASLAMAVIINGNEEEAIGGRNSTRLWGLVVCHHTSARCIPFPLRYACEFLMQAFGLQLNMELQLASQLSEKHVLRTQTLLCDMLLRDSPTGIVTQSPSIMDLVKCDGAALYYQGQYYPLGVTPTEAQIKDIVEWLLALHGDSTGLSTDSLADAGYPGAASLGNAVCGMAVAYITKRDFLFWFRSHTAKEIKWGGAKHHPEDKDDGQRMHPRSSFKAFLEVVKSRSLLWENAEMDAIHSLQLILRDSFRDVEATNSKAVVHAQLEDTELQGMDELSSVAREMVRLIETATAPIFAVDVDGCINGWNAKVAELTGLSVDKAMGKSLVHDLVYKEYEETVDKLLHRALRGEEDKNVEIKLRTFGSEHQKKALFVVVNACSSKDYMNNIVGVCFVGQDVTGQKVVMDKYVHIQGDYKAIVHSPNPLIPPIFASDENTCCLEWNTAMEKFTGWSRGEVIGKMLVGEVFGSCCQLKGSDALTKFMIALHNAIGGQDTDKLPFSFFDRNGKYVQALLTANKRVNMEGEIVGAFCFLQIASNELQQALKVQRQQEKKCSARMKELAYICQEIRNPLSGLRFTNSLLENTDLTEDQKQFLETSAACEKQILKITRDVDLESIENGLLELEKAEFLFGSVINAVVSQAMLLLRERNLQLLRDIPEEIKTLVVYGDQARIQQVLADFLLNMVRYAPSSAGWVEIHVCPTLKQISDGHTLVHMEFKYALLNSFACLPPELVQDMFHSSRWVTQEGLGLSMCRKILKLMNGEVQYIRESERCYFLVILEVPMPNKCERYNCKKCCRLGCLVCNVY

SEQ ID NO: 12329 - protein, 1146 aa, Populus balsamifera subsp. trichocarpa
MASQSQRQSNQPVHNQAQSSGTSNMRQHHHATESVSKAIAQYTVDAQLHAVFEQSGGTGRSFDYSKSVRTTNQSVPEQQITAYLSKIQRGGHIQPFGCMIAADEQSFRVIAYSENAKDMLGLTPQSVPSLEKQEILFVGADVRILFRPSSAVLLEKAFGAREITLLNPIWIHSKNSGKPFYAILHRIDVGIVIDLEPARTEDPALSIAGAVQSQKLAVRAISQLQSLPGGDIKLLCDTVVDSVRELTGYDRVMVYKFHEDEHGEVVAENKRVDLEPYIGLHYPSTDIPQASRFLFKQNRVRMIVDCHAIPVRVIQDEALMQPLCLVGSTLRAPHGCHAQYMENMGSIASLAMAVIIYGNDEEAIGGRNSMRLWGLVVCHHTSARCIPFPLRYACEFLMQAFGLQLNMELQLASQLLEKHVLRTQTLLCDMLLRDSPTGIVTQSPSIMDLVKCDGAALYYQGQYYPLGVTPTETQIKDIVEWLLTLHGDPTGLSTDSLADAGYPGAAFLGDAVCGMAVAYIAERDFLFWFRSHTAKEVKWGGAKHHPEDKDDGQRMHPRSSFKAFLEVVKSRSLPWENAEMDAIHSLQLILRDSFRDAEATNSKAVVHTQLKDMELQGMDELSSVAREMVRLIETATAPIFAVDVDGRINGWNAKVAELTGLSVEEAMGKSLVHDLVYKEYEEIVDKLIHRAVKGEEDKNVEIKLRTFCSEHQKKAVFVVVNACSSKDYMDNIVGVCFVGQDITGQKVVMDKYVLIQGDYKAIVHSPNPSIPPIFASDENTCCLEWNTAMEKLTGWSRGEVVGKMLVGEVFGSCCRLKGPDALTKFMIALHNAIGGIDTDKLPFSFFDRNEKNVQTLLTANKRVNMEGDIIGAFCFLQIASPELQQTLKVQKQQEKKSFARMKELAYICQEIKNPLSGIHFTNSLLENTDLTEDQQQFLETSAACEKQILKIIRDIDLESIENGSLELEKAEFLLGSVINAVVSQAMLLLRERNLQLLRDIPEEIKTLAVYGDQARIQQVLADFLLNMVRYAPSSAGWVEIHVCPTLKQISDGHTLVHTEFKYLERVLQTRMLGLQHPLRSFLNFKLTLVMLHREGMVPKIQFQGLSVCQGRLIWLSYPENTTVTLYPLTIWFLLLYRRQSRSITHT

SEQ ID NO: 12330 - protein, 358 aa, Bordetella bronchiseptica RB50
MTHQIAVLPGDGIGPEIVEQAERVLKALDLPLELRQAPVGGAAFDQFEHPLPPATLELAQGSHAVLFGAVGDWKYDTLPREFRPEQAILGLRKALGLFANLRPAILYPELASASSLKPEIVSGLDILIIRELTGDIYFGTPRGVRTAADGAFAGEREGYDTMRYAESEVRRIARIGFESARKRNKKLCSVDKANVLETSQFWRDLVIEVSRDYPDVELSHMYVDNAAMQLVRNPRQFDVIVTGNLFGDILSDEAAMLTGSIGMLPSASLNAAGQGLYEPSHGSAPDIAGQGIANPLATILSAAMLLRYSLNLAPQADRVEAAVRKVLADGLRTADIHEAGTTKVSTSQMGDAVLKALG

SEQ ID NO: 12331 - protein, 163 aa, Glycine max
  unsure (1)..(163): unsure at all Xaa locations
IESNRFYLTRWLSDHTVLQFSSSFSSSSEILPAKVHPLDMLNICECYVRHPNQTDRVIGTILGSDLPDGTRNIRNYYADLHNQCIXQCPLDLEYHHNMLISHQKLKPKEIILIWYSTXHGVTDDNALIHXYYSGQVPNSIHLTDETGCTIGAGTSKAYGCNKL

SEQ ID NO: 12332 - protein, 292 aa, Vibrio cholerae
MKGIILAGGSGTRLYPITRGVSKQLLPIYDKPMIYYPLSTLMLAGIRDVLIITTPEDNESFKRLLGDGRDFGIHLQYAIQPSPDGLAQAFLIGEEFIGNDSVCLVLGDNIFYGQSFSKTLRHAASREHGATVFGYQVKDPERFGVVEFDEQMRAISIEEKPSKPKSNYAVTGLYFYDNRVVELAKQVKPSARGELEITTLNEMYLNDGSLNVELLGRGFAWLDTGTHESLHEASSFVETVQHIQGLKIACLEEIAWRNGWLTSEQLLECAKPMLKNDYGQYLERLVKEERHG

SEQ ID NO: 12333 - protein, 309 aa, Helicobacter pylori J99
MQYALLFPGQGSQCIGMGKSFYESHTLAKELFERASNVLKVDMKKTLFEENELLKESAYTQPAIYLVSYIAYQLLNKQANGGLKPVFALGHSLGEVSAVSLSGALDFEKALKLTHQRGKMMQEACANKDASMMVVLGVSEESLLSLCQRTKNVWCANFNGGMQVVLAGVKDDLKALEPTLKEMGAKRVVFLEMSVASHCPFLEPMIFKFQELLEKSLKDKFHFEIISNATNEAYHNKSKAVELLSLQLTQPVRYQDCVKSNNDRVDVFFELGCGSVLKGLNKRLSNKPTISVGDNKGLDEAIEFLEEYV

SEQ ID NO: 12334 - protein, 322 aa, Candida tenuis
MSASIPDIKLSSGHLMPSIGFGCWKLANATAGEQVYQAIKAGYRLFDGAEDYGNEKEVGDGVKRAIDEGLVKREEIFLTSKLWNNYHDPKNVETALNKTLADLKVDYVDLFLIHFPIAFKFVPIEEKYPPGFYCGDGNNFVYEDVPILETWKALEKLVAAGKIKSIGVSNFPGALLLDLLRGATIKPAVLQVEHHPYLQQPKLIEFAQKAGVTITAYSSFGPQSFVEMNQGRALNTPTLFAHDTIKAIAAKYNKTPAEVLLRWAAQRGIAVIPKSNLPERLVQNRSFNTFDLTKEDFEEIAKLDIGLRFNDPWDWDNIPIFV

SEQ ID NO: 12335 - protein, 432 aa, Synechocystis sp. PCC 6803 [sequence omitted]

SEQ ID NO: 12336 - protein, 367 aa, Triticum aestivum
  unsure (1)..(367): unsure at all Xaa locations
MGKGGKGEAAAAVAGEGENMAAWLVAKNTLKIMPFKLPPLGPYDVRVRMKAVGICGSDVHYLKEMRIAHFVVKEPMVIGHECAGIIEEVGDGVKHLAVGDRVALEPGISCWRCRHCKGGRYNLCDDMKFFATPPYHGSLADQIVHPGDLCFKLPDNVSLEEGAMCEPLSVGVHACRRADVGAEKSVLIMGAXGPIGLVTMLXARAFGAPRIVIADVDDHRLSVAKSLXGADAVVKVSGNTEDLAGEIERIQAAMGGDIDVSLDCAGFSKTMSTALEATRPGGRVCLVGMGHNEMTVPLTSAAIREVDVVGIFRYKDTWPLCLEFLRSGKIDVKPLITHRFGFSQGEVEEAFEVSARGRDAIKVMFNL

SEQ ID NO: 12337 - protein, 538 aa, Oryza sativa (japonica cultivar-group)
MGLPGAEPPAASGGGLPGFFGGKSKYVRMDDVLPQEQEEDGVGGGGGGVRVRRSHSSRRYVFACSVFASLNSVLLGYDVGVMSGCILFIQRDLHINEVQQEVLVGCLSFISLLGSLAGGRTSDAVGRKWTIGLAAIVFQAGAAVMTLAPSFEVLMVGRLLAGVGIGFGVMIAPVYIAEISPAASRGSFTSFPEIFINLGILLGYISNYAFSGLPDHVSWRVMLAVGILPSVSIAFALLVIPESPRWLVMKNRADEAREVLLKVTDSEDEAKERLAEIEAAAAVASAGKYGDKTVWQELTRPSPVIRRMLITGLGIQCFQQITGIDALVYYSPTIFRDAGITTESQLLVATVAVGFFKTAFIALAIVLIDRVGRKPLLYVSTVGMTACLVVLAATLAALAHGSASRSAGIAVAILTVCGDVAFFSVGIGPICWVMSSEIFPLRLRSQAAALGAVMNRVTSGAVAMSFLSVCRAISVAGAFSVFAVISALSVVFVYRYVPETSGKTLEEIELLFGGGGGDGEAARGEVELGDGEHLVHKG

SEQ ID NO: 12338 - protein, 1572 aa, Ustilago maydis 521
MSSPPQKANRRAPQASAPPTLSHTPTSSATAAASATASATPMQATPSSLRSPTVSQPFIYPMRSAVSIKPLKNDLSTSHPPDAPISAAKSASRPASAEGPKSSPTKFPTFKPPPSAPHASHQAHHPEEVHNVTDPATADITVPVNKDESLCDHPEHLTTTRFEHVKTDEGHMILTGRGGKLARCEDEPIHIPGAVQSFGCMIVVRISPDGEMLVRQASENSAAILGMSPSYLFSLPTFLDLFDDDQADLLWDNIDTLDQSSQDLAESGPTVFQLRGYDMASYDERVSRGVQRNRWNTWCGAHIPDRRNDGQAELTVVLEFELVDDLTNPISTSSPPATPLDDRESHSGNGPGLGLAAGWIRPDQPTSSRQDSSPVTIGTVLSSSNASSVGPRAGLEGLAYTPSPNELHESTHAIHKPLKALSRMRRNAEIKSQTRSRRPAVLPNAGGADGTGGILDLFGILSQVNDQLAAQADLNEFLKVLVGIIRDITLFSRVMIYQFDEAWNGQVVCELVDWNDSHDLYRGLHFPATDIPAQARALYKINKVRLLYDRDQPTARMICRDQADLDFPVDMTHAFIRAMSPIHIKYLTNMGVRSSMSVSITAFGELWGLISLHNYGAHGKRVSFPIRQLLRLIGESVSSNIERLSYTRRLSARKLINTLPTDQNPSGYIISNAEDLLTLFDADYGVIAVGNEAKILGPLNASQEVLAVTEFLRLKKFEHLVTSQDVHRDFPDMVLSTGLHVIAGLLVVPLSGSGVDFIAFLRKAQLRHVNWAGKPFKEGKEGEAILEPRKSFKVWSETVEGTCRAWKDEELETASVLCLVYGKFISVWRQREQALHYNQLNRLLLSNASHEVRTPLNHIINYLELALDSKLDEDTRENLSKSHLASKSLLFVINDLLDLTKQEIGNELFLQEPFDLAATVREAVEMHEWEAKRRKIDFSVTTNPDVCLVLGDKNRVRQVITNTVTNSVKYTRAGQIIVSMRKRNEDEREADLPDGCDMEVELVVSDTGEGIPQEKLEVIFREFEQVESVIAQPGRQDLSEPEGSEASLLRTEPSDSGLGLGLAIVARVVKNLGGQLRVDSQVGEGTSFTYYIPFCSAETTTPTEMPPIGSSGGSGTKRSSDTISMRRSTSMGSGSASSAGRSEIDSLVEAIQQPVLRDQATSEDVVARRRTAEGVSPGLIHGSKIVSAGSIHRPEYAAQRTRSFDSGSHPVEGSGIPVRSVKINPQALDANDRADRRPASSSAFLLSATTHARPVKPSHTSAAESFKAEVEQRFRDKVPQLAQATLPVDASKLRSCQMADKEATVSPTTRAKSGVEAPQNEAVSPDCGDVHMAKRSSDERRSSSSSSVAKRRLAVMRGLHKAPGGRGEKIAPLRVLVVEDDPINRMILKKRLGLDGHTTLLAVNGEEGVRQFEQDAKEIDVILMDLQMPICNGQEACIRIRDLEHKWAERGEQADRPASQILNGRVPILAVSATLVPQMRQEMVDIGMDGWLLKPIDFARLGALLKGLLHPEDRVANHWRSGYVWEKGGWLSEPAQRSVLVAPSAVSEMIGHSSSNASNANPLSPPLSSPSA

SEQ ID NO: 12339 - protein, 433 aa, Oryza sativa
MTEGKIVSWTASEGDRLAKGDPVVVVESDKADMDVETFHDGFLAAVLVPAGESAPVGSAIALLAESEDEIPAAQSKAASLSSSSSSSPPPPPPQESTPPPPPPPPPAPVAAAVSAPAPPSPASQGGLRVVASPYARKLAKDLNVDLNSITGSGPGGRIVAKDVEAAAAAPKKAAPVAAARPDVPLGSTVPFTTMQGAVSKNMVESLAVPTFRVGYTFTTDALDALYKKIKPKGVTMSALLAKATAMALVQHPVINSSCRDGKSFTYNSSINIAVAVAIDGGLITPVLPDADKLDIYSLSRKWKELVDKARAKQLQPHEYNSVYVKIDSVLIKLQTHYSAFDEMQKKTCTFTISNLGMFGVDRFDAILPPGTGAIMAVGSSQPTLVGTKGGSIGIKNQMQVNVTADHRVIYGADLAAFLQTLSKIIEDPKDLTF

SEQ ID NO: 12340 - protein, 194 aa, Ustilago maydis 521
MSELRRKLVIVGDGACGKTCLLIVFSKGTFPEVYVPTVFENYVADVEVDGRHVELALWDTAGQEDYDRLRPLSYPDSHVILICFAVDSPDSLDNVQEKWISEVLHFCHSLPIILVGCKKDLRHDPKIVDELRKTSQRPVSAEEGMAVAQKIGAVRYLECSAKTGEGVREVFEHATRAALVQRSRGSRKKGCTVL

SEQ ID NO: 12341 - protein, 141 aa, Triticum aestivum
  unsure (1)..(141): unsure at all Xaa locations
VXYITAXKFDKDANTGYATDKDGIPDGWQGLDCGEESVKLYKEAIADAKTILWNGPAGVFEFEKFASGTKATLDAVVDAVQKDGKIVIIGGGDTATVAKKYGVEDKISHVSTGGGASLELLEGKELPGVTALSSWAGKASL

SEQ ID NO: 12342 - protein, 249 aa, Geobacillus thermoleovorans
MSIEQKTAIVTGGANGIGKAIARAFAKQGANVVIIDRDIQNGEAFAAQLQSDGFEAIFVAADVRKVDDIERFVQEAAGRFGRIDYLINNAGVSRWKSPYELTVEEWDDVLSTNLRSAFFASREAAKYMRRNAKGGAIVNIASTRALMSEPNSEAYAASKGGLVAMTHALAVSFADDRIRVNCISPGWIETGDYGQLRDIDHRQHPAGRVGKPDDIARACLYLCDEENDFITGVNLVIDGGMTRKMIYIE

SEQ ID NO: 12343 - protein, 411 aa, Methanosarcina mazei Go1
MSVNRPRGTRDFLPADTARRRYVESVMRNVVLNWGYSEIITPTFEHLDLFTLKSGEGIIGELYNFTDKGGREMTLRPELTAPVMRFYVNELQPFPKPLKLFYFENCFRYERPQKGRFREFWQFGVELIGSGKSDSDAEVIALASALLKAVGIKGDMKLGNLAVIRTLLKGLEPEIVSNVMRLVDKKEYAGLEALLDEIGAEEQLKSDLFRLIHLQGRYILPEVKGIVGNIPELVSFEKTLKLLDAYGVDYSLDFGIARGLDYYTGMVFEVYAEGLGAQKQVCGGGSYQLIQLFGGGDVPSTGFGIGFDRIMEICPLVPPAQKSLVVVSKPDTHLEAVKVATELRNYLPVQIDLMERNFKAQLSYANTINADYVIIVGEKELEAGKLTLRDMVSGEQELLTLEEIIEKISGQ

SEQ ID NO: 12344 - protein, 395 aa, Methanosarcina mazei Goe1
MTDKIINSGNLEAGYDSVIDKDSKYVMQTYGRQPLVLSKGKGAVVQDIYGKEYIDCVAGIAVNNVGHCHPTVVKAIQAQAEKLIHVSNLYYTEIQAEFAETLASITGMECVFFCNSGAEAVEAAMKLARVATGKSAFVAAEHSFHGRTIGALSVTHKSMYRDPFMPPVSSKTSFVPYSDADAIRKAISEDTAAVVLEPIQGEGGVNVPDPGYLKEVREICDETGTLLIFDEVQTGFGRTGTWFCKEQFGVEPDIMSMAKAIGGGFPMGAIAARSGLSFGRGQHASTFGGGPLACAAALASIQAIKEEKLLERSKEMGAYFTKKLSGMARDDIVEVRGKGLMIGVEIKYPCGKFVDFAREHGVLVNCTSDSVLRLVPPLVITKEQIDSVVDVLEQA

SEQ ID NO: 12345 - protein, 315 aa, Hordeum vulgare subsp. spontaneum
MATAGKVIKCKAAVAWEAGKPLSIEEVEVAPPQAMEVGVKILYTALCHTDVYFWEAKGQTPVFPRILGHEAGGIVESVGEGVTELVPGDHVLPVFTGECKDCAHCKSEESNLCDLLRINVDRGVMIGDGQSRFTINGKPIFHFVGTSTFSEYTVIHVGCLAKINPEAPLDKVCVLSCGISTGLGATLNVAKPKKGSTVAIFGLGAVGLAAMEGARMAGASRIIGVDLNPAKYEQAKKFGCTDFVNPKDHTKPVQEVLVEMTNGGVDRAVECTGHIDAMIAAFECVHDGWGVAVLVGVPHKEAVFKTHPMNFLNEK

SEQ ID NO: 12346 - protein, 588 aa, Mycobacterium tuberculosis H37Rv
MSFVVAVPEALAAAASDVANIGSALSAANAAAAAGTTGLLAAGADEVSAALASLFSGHAVSYQQVAAQATALHDQFVQALTGAGGSYALTEAANVQQNLLNAINAPTQALLGRPLIGDGAVGTASSPDGQDGGLLFGNGGAGYNSAATPGMAGGNGGNAGLIGNGGTGGSGGAGAAGGAGGSGGWLYGNGGNGGIGGNAIVAGGAGGNGGAGGAAGLWGSGGSGGQGGNGLTGNDGVNPAPVTNPALNGAAGDSNIEPQTSVLIGTQGGDGTPGGAGVNGGNGGAGGDANGNPANTSIANAGAGGNGAAGGDGGANGGAGGAGGQAASAGSSVGGDGGNGGAGGTGTNGHAGGAGGAGGAGGRGGWLVGNGGNGGNGAAGGNGAIGGTGGAGGVPANQGGNSALGTQPVGGDGGDGGNGGTGGTGGRGGDGGSGGAGGASGWLMGNGGNGGNGGTGGSGGVGGNGGIGGDGAGGGNATSTSSIPFDAHGGNGGAGGDAGHGGTGGDGGDGGHAGTGGRGGLLAGQHANSGNGGGGGTGGAGGTHGTPGSGNAGGTGTGNADSTNGGPGSDGLGGDAFNGSRGTDGNPG

SEQ ID NO: 12347 - protein, 452 aa, Oryza sativa
MGNSEVGHNALGAGRIFAQGAKLVDLALASGKIYDGEGFNYIKECFDKGTLHLIGLLSDGGVHSRLDQVQLLLKGASERGAKRIRVHILTDGRDVLDGSSVGFVETLESDLSQLRDKGIDARIASGGGRMYVTMDRYEVLGEAPYKFQNAVEAVKTLRAETKASDQYLPPFVIVDESGKSVGPVVDGDAVVTFNFRADRMVMLAKALEYADFDKFDRVRVPKIRYAGMLQYDGKYLASHSLSSDTKNIDCETVKFGHVTFFWNGNRSGYFDETKEEYVEIPSDIGITFNVKPNMKALEIAEKARDAILSGKFDQVRVNLPNGDMVGHTGDIEATVVACKAADEAVKIILDAIEQVGGIYLVTADHGNAEDMVKRNKSGQPLLDKNGGIQILTSHTLQPVPVAIGGPGLHPGVKFRSDIQTPGLANVAATVMNFHGFEAPADYEPTLIEVVDN

SEQ ID NO: 12348 - protein, 231 aa, Papaver nudicaule
MGRGKIEIKRIENSTNRQVTYSKRKNGILKKAKEITILCDAHVSLVIFSSTGKMNEYCSSPLIKQLDRYQKASGNKLWDAKHEYLSAEVDRVKKENDNMQIELRHLKGEDLTPLNPRELIPIESALDDGIVGVKAKIKEHYRALKKRTRMLEEDNKRLLTRLSQQQMEIHGRVEMDTMENTGYNNNNQKADGTRDYPAHNDNHHQVPFGFQVPPMQPNLTTVTTTTTTNNK

SEQ ID NO: 12349 - protein, 567 aa, Synechocystis sp. PCC 6803
MSKPLIAALHFLQFLYMTSRINPLAGQHPPADSLLDVAKLLDDYYRQQPDPENPAQLVSFGTSGHRGSALNGTFNEAHILAVTQAVVDYRQAQGITGPLYMGMDSHALSEPAQKTALEVLAANQVETFLTTATDLTRFTPTPAVSYAILTHNQGRKEGLADGIIITPSHNPPTDGGFKYNPPSGGPAEPEATQWIQNRANELLKNGNKTVKRLDYEQALKATTTHAHDFVTPYVAGLADIIDLDVIRSAGLRLGVDPLGGANVGYWEPIAAKYNLNISLVNPGVDPTFKFMTLDWDGKIRMDCSSPYAMASLVKIKDHYDIAFGNDTDGDRHGIVTPSVGLMNPNHFLSVAIWYLFSQRQQWSGLSAIGKTLVSSSMIDRVGAMINRQVYEVPVGFKWFVSGLLDGSFGFGGEESAGASFLKKNGTVWTTDKDGTIMDLLAAEITAKTGKDPGLHYQDLTAKLGNPIYQRIDAPATPAQKDRLKKLSPDDVTATSLAGDAITAKLTKAPGNQAAIGGLKVTTAEGWFAARPSGTENVYKIYAESFKDEAHLQAIFTEAEAIVTSALG

SEQ ID NO: 12350 - protein, 535 aa, Oryza sativa (japonica cultivar-group)
MGLRATEAATGNGGGMRSLPDFLGRKSKYVRMDDVLPDEQGDGGGGGGVVRVRGGGGSGRYVFACSVFASLNHVLLGYDVGVMSGCIIFIQKDLHISEVQQEVLVGCLSFISLLGSLAAGRTSDAVGRKWTIGLAAAVFQAGAAVMTLAPSFAVLMMGRLLAGIGIGIGIMVAPVYISEITPATLRGSYASFPEIFISLGILLGYVSNLAFSGLPDHINWRVMLAAGIVPSISVAFVLLVIPESPRWLVMQGRAAEARAVLLKVTDGEDEAQERLAEIEEAARVTATGNGKAVWRELLRPSPVIRRMLVTGIGVQLFQQITGIDALVYYSPTIFRDAGITTESQLLAATVGVGLSKTVFIVIAIVLVDRVGRKPLLYVSTAGITACLAALAASLSLLAHGALPRAAAIGAAILTVCGFVAFFSVGIGPINMVLSSEIYPLRLRAQAVALGFAVNRLTSGAVAMSFLSICGAVSVAGAFAAFAAISALSVVFVHVFVPEMSGKSLEQIESLFGAGAGAGEVELGDAEHLVQGKEMS

SEQ ID NO: 12351 - protein, 540 aa, Triticum aestivum
  unsure (1)..(540): unsure at all Xaa locations
MDPYKVCTPPILPQPTRSRQLAGPDRRFGCPCRPAIRSSDALGFPGFLCCSQHRPTSGANSGYWTTNSGAPVWNNNNALTVGQRGPILLEDYXLIEKLAQFDRERIPERVVHARGASAKGFFEVTHDVSQLTCADFLRAPGVQTPVIVRFSTVVHERGSPETLRDPRGFAVKFYTREGNFDLVGNNMPVFFIRDGMKFPDMVHAFKPSPKTNMQENWRIVDFFSHHPESLHMFTFLFDDVGIPLNYRHMDGFGVNTYTLISRDGKAHLVKFHWKPTCGVKCLLDDEAVTVGGTCHTHATKDXTDSIAAGNYPEWKXFXXQTIDADHEDKFDFDPLDVTKTWPEDIIPLQPVGRMVLNKNIDNFFAENEQLAFCPAITVPGIHYSDDKLLQTTIFSYADTQRHRLGPNYLMLPVNAPKCAHHNNHHDGLMNFMHRDEEVNYFPSRFDPTRHAEQYPIPPRVLSGCREKCIIEKENNFKQAGERYRSFDPARQDRFLQRWVDALTDARVTHEIQGIWVSYWSQCDASLGQKLASRLKIKPSM

SEQ ID NO: 12352 - protein, 380 aa, Helicobacter pylori J99
MRMQTKLIHGGINEDATTGAVSVPIYQTSTYRQDAIGRHKGYEYSRSGNPTRFALEELIADLEGGVKGFAFASGLAGIHAVFSLLQSGDHVLLGDDVYGGNFRLFNKVLVKNGLSCTIIDTSDLSQIKKAIKPNTKALYLETPSNPLLKITDLAQCASVAKEHNLLTIVDNTFATPYCQNPLLLGTDIVAHNGTKYLGGHSDVVAGLVTTNNEALAQEFDFFQNAIGGVLGLQDSWLLQRGIKTLGLRMEAHQKNALCVAEFLEKHPKVERVYYPGLPTHPNHELAKAQMRGFSGMFSFTLKNDSEAVAFVESLKLFILGESLGGVESLVGIPALMTHACIPKAQREAAGIRDGLVRLSVGIEHEQDLLEDLDQAFAKIS

SEQ ID NO: 12353 - protein, 443 aa, Rhizobium sp. NGR234
MYRTNTPNLENYWMPFTANRQFKAAPRLLASAEGVYYRDIDGNQVLDGTAGLWCVNAGHARKEISQAVERQLNTLDFAPSFQMGHPIAFQFAEKLAEIAPGEPGKKLDRIFYTGSGSESVDTALKIAIAYQRAIGQGTRTRLIGRERGYHGVGFGGISVGGLVNNRRVFPQVPGADHLRHTHDLARNPFTKGGLPEHGAELADDLERLVALHGAETIAAVIVEPVAGSTGVLLPPKGYLERLRATADKHGILLIFDEVISGFGRLGAPFAVDYFGVTPDIITTAKGLTNGVVPMGAVFTSSKVHDALMHGPEAQIELFHGYTYSGHPVACAAGLAAMEIYEKEALLTRASELATYWEDAVHGLRSRKNVIDIRTIGLVAGIELASRSEAAGARAYDVFVDCFKRGLLIRVTGDIIALSPPLTIEREQVDELMSILADALDRAD

SEQ ID NO: 12354 - protein, 162 aa, Pseudomonas syringae pv. tomato str. DC3000
MSAFHDIRLKALGGQELPLADFKNKVVLVVNVASKCGLTPQYAALENLYQQYRDKGLVILGLPCNQFAGQEPGTEQEIAEFCQLNYGVTFPLGEKLDVNGPNRHSLYRLLAGEGAEFPGDITWNFEKFLVGKNGGVSARFSPRTAPDDPAVIQAIEKALAHN

SEQ ID NO: 12355 - protein, 370 aa, Rhizobium sp. NGR234
MKSRAAVAWAANKPLSIETIEIGGPKTGEALIEIMATGVCHTDAYTLSGLDSEGKFPAILGHEGAGIVREVGPGVTSLRPGDHVIPLYTPECRECKTCLSQRSNLCTSIRATQGQGLMPDRTTRFSCDAGEIFHYMGCSTFSNFTVLPEIAIAKVREDAPFDKICYIGCGVTTGIGAVIHTAKVWPGANVAVFGLGGIGLNVIQGARMVGADRIIGVDLNPAKAEMARRFGMTDFVNPNEVGTGKVVEAIQDLTGGGVDFSFDATGNTNVMRQALECCHRGWGESIIIGVAEAGKEISTRPFQLVTGRVWKGTAFGGARGRTDVPQIVDWYMEGKINIDDLITHTMPLDEINTAFDLMHEGKSIRSVVLF

SEQ ID NO: 12356 - protein, 160 aa, Ustilago maydis 521
MAAENAPMELDSPSTKQPRFQVKKWNAVCLWSWDIQVEDRLLLVVQCQTDAIGCWDVAVDLALDRLPHQCAICRNHIMDLCIECQANQGSATTEECTVAWGQCNHAFHFHCISRWLKTRQVCPLDNRDWELQNFNSLAPFILTRLALILLAPAHSNRYGR

SEQ ID NO: 12357 - protein, 235 aa, Hordeum vulgare subsp. spontaneum
MATAGKVIKCKAAVAWEAGKPLSIEEVEVAPPQAMEVRVKILYTALCHTDVYFWEAKGQTPVFPRILGHEAGGIVESVGEGVTELVPGDHVLPVFTGECKDCAHCKSEESNLCDLLRINVDRGVMIGDGQSRFTINGKPIFHFVGTSTFSEYTVIHVGCLAKINPEAPLDKVCVLSCGISTGLGATLNVCKTKKGFHGGHFRSWSCRTGCHGRGQDGWGIKDHWCGFEPCKIRTS

SEQ ID NO: 12358 - protein, 454 aa, Vibrio vulnificus YJ016
MQRLCCRPLNLTFIFEREETLMSKIVKVLGREIIDSRGNPTVEAEVHLEGGFVGMAAAPSGASTGSREALELRDGDKARFLGKGVLKAIEAVNGAIADALVGKDAKDQAAIDAIMIELDGTENKSKFGANAILAVSLANAKAAAASKGMPLYEHIAELNGTAGQFSMPLPMMNIINGGEHADNNVDIQEFMIQPVGAKTLKEAVRMGAEVFHNLAKVLKSKGYNTAVGDEGGFAPNLKSNAEALEVIAEAVAAAGYVLGKDVTLAMDCAASEFFDKEAGIYNMKGEGKTFTSEEFNHYLAGLVEQFPIVSIEDGLDESDWAGFAHQTQLLGDKIQLVGDDLFVTNTKILAEGIEKGIANSILIKFNQIGSLTETLAAIKMAKDAGYTAVISHRSGETEDATIADLAVGTAAGQIKTGSMSRSDRVAKYNQLIRIEEALGERAPFNGLKEVKGQA

SEQ ID NO: 12359 - protein, 272 aa, Actinobacillus pleuropneumoniae serovar 1 str. 4074
MNHQKLAFIGTGNMAYAIIQGLLKSHYPASQIIACNKSNLVRRAELQAVGIATNFTNRAAVEQAEVVVLAVKPQMMAEVCSEFSAVDFSNKTVISVAAGISVARLEQLLPTAKNIIRTMPNTPSLIGEGMTGLFAKKSVNSTACQFAESLMSAVGKCYWVEQEQQINHIIAVTGSSPAYFFRFMEAMQQSAMQMGFSEADARLLVQQAALGAAKLVEANPNTPLSTLRENVTSKGGTTAKALEVFEQHALAETVDQAMWAAIHRAEEMEQQL

SEQ ID NO: 12360 - protein, 359 aa, Candida albicans SC5314
MSLLLKRLSPIKQSYSKVLAIRTMSIPSTQYGFFYNKASGLNLKKDLPVNKPGAGQLLLKVDAVGLCHSDLHVLYEGLDCGDNYVMGHEIAGTVAELGEEVSEFAVGDRVACVGPNGCGLCKHCLTGNDNVCTKSFLDWFGLGYNGGYEQFLLVKRPRNLVKIPDNVTSEEAAAITDAVLTPYHAIKSAGVGPASNILIIGAGGLGGNAIQVAKAFGAKVTVLDKKDKARDQAKAFGADQVYSELPDSVLPGSFSACFDFVSVQATYDLCQKYCEPKGTIVPVGLGATSLNINLADLDLREITVKGSFWGTSMDLREAFELAAQGKVKPNVAHAPLSELPKYMEKLRAGGYEGRVVFNP

SEQ ID NO: 12361 - protein, 315 aa, Hordeum vulgare subsp. spontaneum
MATAGKVIKCKAAVAWEAGKPLSIEEVEVAPPQAMEVRVKILYTALCHTDVYFWEAKGQTPVFPRILGHEAGGIVESVGEGVTELVPGDHVLPVFTGECKDCAHCKSEESNLCDLLRINVDRGVMIGDGQSRFTINGKPIFHFVGTSTFSEYTVIHVGCLAKINPEAPLDKVCVLSCGISTGLGATLNVAKPKKGSTVAIFGLGAVGLAAMEGARMAGASRIIGVDLNPAKYEQVKKFGCTDFVNPKDHTKPVQEVLVEMINGGVDRAVECTGHIDAMIAAFECVHDGWGVAVLVGVPHKEAVFKTHPMNFLNEK

SEQ ID NO: 12362 - protein, 666 aa, Fagus sylvatica
MSLAGTESSEDGSGHAEPPDPDVLEIDPTCRYIRYKDVLGKGAFKTVFKAFDEADGLEVAWNQVRIDDVLQSPDDLERLYSEVHLLKSLKHSNIVKFYNSWIDDKNKTVNIITELFTSGNLRQYVSFLLIALLKFLILFYGDISLVVSGCNPWFRYCKKHKKVDMKALKGWARQILTGLNYLHSHSPPIIHRDLKCDNIFINGNQGEVKIGDLGLATVMEQANAKSVIGTPEFMAPELYDEDYNELADIYSFGMCMLEMVTFEYPYSECRNSAQIYKKVSSGIKPVALSKVKDPAMKQFIEKCLVPASQRLSAKELLMDPFLQVNRLAKNRPLPLPDIVLPKMGAFDNSVYGGSYPVCVEIQRAKKGNFFWIKGEGNDEDSVSLILRIADQNGRARNIHFLFYLVSDTAISVSSEMVEQLELADQNVMFIAELIDLLLMNLVPKWKPCVRIDHLVAPNGIRTHEAHQEASQLPKHGEKLVKSHQNVCAVAHPSSPPSSTNSISSGGSIQPVPSSTNSISSGGSIQSVRESPDNVKLEEIMSHDNFGLQSATVTEDQCSEMSYISATSTEFDDKNSSIDSYMSAEMGPVDLNRYRLDRGVRESPSKAEMGASPDYNSKDMDLESSLVTFSAYPINADQGGVEELRMELEVIELQYQEAIKEMSQEKT

SEQ ID NO: 12363 - protein, 181 aa, Brassica napus
MASSMLSSATVVSSPAQAAMVAPFTGLKSSAAFPVTRKTNTDITSIASNGGRVNCMKVWPPVGKKKFETLSYLPDLTDVELAKEVDYLLRNKWIPCVEFELEHGFVYREHGNTPGYNDGRYWTMWKLPLFGCTDSAQVLKEVQECKTEYPNAFIRIIGFDNNRQVQCISFIAYKPPSFTGA

SEQ ID NO: 12364 - protein, 291 aa, Rhodopseudomonas palustris CGA009
MKIRKAVFPVAGLGTRVLPATKAMPKEMLTIVDRPLIQYVVDEAREAGIEHFVFVTGRNKGMIEDHFDRQFELDVTLEKRNKKSEMEILARDQPEAGAMSFTRQQAPHGLGHAVWCARDIVGNEPFAVVLPDELVLNTPGCLKQMIQAAEKLGDKANVIAVEEVPADKTHQYGICGVGKRDGKMFEIDGMVEKPAPGTAPSNLSISGRYILQPEIFQILATQERGAGGEIQLTDAMIGLSKTQKFYGVEFEGERHDCGSKAGFLRANIAFAMQRDDLRAGLIEDMKRYLEK

SEQ ID NO: 12365 - protein, 506 aa, Vibrio parahaemolyticus RIMD 2210633
MIYAQPGSENAIVNFKSHYDNFIGGEWVKPTGGEYFDNISPINGQAYCKVARSGEADINLALDAAHNIKAKWAKTSVTERSNILLKIADRIEQHLEELAVAETWENGKPVRETLAADLPLVVDHFRYFAGCIRAQEGSAAELDEHTASYHFPEPIGVVGQIIPWNFPMLMAAWKLAPALAAGCCVVLKPAEQTPTSILVLMEKIGDLLPPGVINVVNGFGSEAGQALATSNRIAKLAFTGSTQVGNHILKCAADNLIPSTVELGGKSPNIYFSDIFDYEDEYLDKCIEGTLLGFFNQGEVCTCPSRVLVHEAIYDKFVEKLTERAQLIKQGNPLDTDTQVGAQASQEQFDKILSYLEIGREEGAKVVFGGGVSEQPESISQGYYIQPTMLEGHNKMRIFQEEIFGPVIAITKFKDEAEALEIANDTEYGLGAGVWTRDANVAYRMGRNIEAGRIWINCYHAYPAHAAFGGYKKSGIGRETHKMMLDHYQNTKNLLISYSIDPLGFF

SEQ ID NO: 12366 - protein, 427 aa, Marinococcus halophilus
MMQNDLSVFNEYESEVRSYVRGFPTVFHQAKGYKLWDLDGKEYVDFFSGAGALNYGHNDENMKQKLLTYIQEDGVTHSLDMATKAKGEFIDAFQNIILKPRNMDYKIMFPGPTGANSVESALKLARKVTGRTNVVSFTNGFHGMTIGALSVTGNKFKRNGAGMPLSNTSTLPYDQFLKESNNSIEYIENFLDNGGSGLDKPAAFIVETVQGEGGLNAASSEWLRSIEKICRERDIKLILDDVQAGVGRTGTFFSFEPAGIKPDFVCLSKSIGGNGSPLAITLVAPEYDKFAPGEHNGTFRGNNFAFVTGTEALNYWKDDRLEKNVQEKSERITSFLDDMIKKHPEMKGVRKGRGFMQGIMSPIEDLADNIAGRCFEHGLIMETAGAEDEVFKLFPPITIDDEGLERGLSILQQAIEEVTAESNLVAK

SEQ ID NO: 12367 - protein, 413 aa, Vibrio cholerae O1 biovar eltor str. N16961
MMSSIIPSHPNLTWMCFMFEKVVAAPADPILGLTEEFKKDPRTDKINLGVGIYKNEAGETPVLATVKKAEAALLESEKTKSYLTIEGTAEYGLAVQKLLFGANSDIVTQKLAKTAQAPGGTGALRVAGEFIKRQLGDVKVWISNPTWANHHGVFNAAGLETTQYAYYDAKAKDKDFAAMLADLEQAEKGDVVLLHGCCHNPTGIDPTEQEWEVLAKLVADKGLLPLFDFAYQGFASGVEEDAAGLRIFAKYNSEILVASSFSKNFGLYNERVGAFTLVAPSTTVAETAFSQVKAIIRSIYSNPPAHGAAVVTYILNNPELRAEWEAEVAEMRERIQEMRVLFVNTLKEVGVDADFSFIERQNGMFSFSGLSKEQVARLKSELGIYIVGSGRISVAGMTKSNMLPLCQGIAAVM

SEQ ID NO: 12368 - protein, 249 aa, Burkholderia fungorum LB400
MGVHPSHVVGEKYIAAIVDGSQALAMLLPALGERQSAADVLATVDGLLFTGSYSNVEPHRYGGQPSTPGTLHDAARDATTLPLMRAAIEAGVPVLAVCRGFQEMNVVFGGTLHQSVHAVDGLNDHRENKEDDLDVQYAPSHSITLTQGGLLQRLAGGTNEARVNSLHGQGVERLGVGLTAEATAPDGLIEAVSVKDARAFALGVQWHPEWKHASDALSTAIFRAFGDACRDRMRTKAGYGAASAAATHA

SEQ ID NO: 12369 - protein, 504 aa, Bixa orellana
MESTGRAPLGNGRIGNPGGLVVPEIKFTKLFINGRFVDNVSGQTFDTRDPRTGDVLATIAEADKDDLDLAVKNAREAFDHGPWPRMSGYERARIMTKFADLVEAFIEELAALDTADAGKTLSMGKAVDIPAAVQIMRYYAGAADKLHGQPLKMNQDTQGYTLKDPIGVVGHIIPWNYPTMMFFLKNAPALAAGCTMVVKPAEQTPLSALFYAHLARMAGVPDGVVNVVPGFGPTAGAAVSSHMDVDSVSFTGSQEVGRAIMRAAAQSNLKNVSLELGGKSPVIIFDDADVDMAVSLSQLACFTNKGEICVATSRVYVQEGIYDALVKKIVEAAREWRFDTKANMGPQVDKKQFERVLKYIDLGKREGATLLTGGKTNGDKGYYIQPTIFLDVREDMNIAQDELFGPVMALMKFKTVDEAIQKANCTKYGLAAGIVTKELNLANTVSRSIRAGAVWVNCYFGFDPDAPFGGYKMSGFGKDRGVLAIDQYLKAKTVNTAIPNSPWY

SEQ ID NO: 12370 - protein, 359 aa, Nicotiana sp.
MGICDPIHQLGMWDDFNSSFPSTSATMILEVDKCLEDQIPIMEKRLDNETEDTSHGTVGTSNRYEPETSKPVEKVLRRLAQNREAARKSRLRKKAYVQQLENSKLKLIQLEQELERARKQGMCVGGGVDASQLSYSGTASSGTAVFDMEYGHWVEEQTRQTNDLRIALHSQIGEAELRIIVDGYLNHYFDLFRMKATAAKADVLYIMSGMWKTSAERFFMWIGGFRPSELLKVLTPHLELLTEQQLREVCNLTQSCQQAEDALSQGMVKLHQILAEAVAAGRLGEGNYTLPQMGPAIEKLEDLVRFVNQADHLRQETLQQMSRILNTCQAAQGLLALGEYFERLRVLSSQWATRLREPT

SEQ ID NO: 12371 - protein, 295 aa, Bdellovibrio bacteriovorus HD100
MKGIILAGGAGSRLYPMTRVMTKQLQSIYDKPMIYYPLSILMLGGIKDILLITSPDDQPLFKKLLGDGSQFGIKLSYVVQEKPNGLPEAFVLGEDFIGNDDVCLMLGDNLFYGDLTFFRDAIKAQKEKAGGLNGRVFAYYVADPSAYGVVEFDKNTKKVKSIEEKPKAPKSQYAIPGLYLFDKTVAKRAKALKPSPRGETEIVDLILSYHNEDTLGVEMMYRGLAWLDTGTPRSLLDAASFIGAIEERQGMKVACLEEVAYRMKFITLDQLQKITADLPKCSYRSYLEKIITEEI

SEQ ID NO: 12372 - protein, 418 aa, Zea mays
  unsure (1)..(418): unsure at all Xaa locations
FFWGSIQLLLKGVSERGAKKIRVHILTDGRDVLDGSSIGFVETLENDLLELRAKGVDAQIASGGGRMYVTMDRYENDWDVVKRGWDAQVLGEAPYKFKSALEAVKTLRAQPKANDQYLPPFVIVDDSGNAVGPVLDGDAVVTINFRADRMVMLAKALEYADFDNFDRVRVPKIRYAGMLQYDGELKLPSRYLVSPXIDRTSGEYLVKNGIRTFACSETVKFGHVTFFWNGNRSGYFDATKEEYVEVPSDSGITFNVAPNMKALEIAEKARDALLSGKFDQVRVNLPNGDMVGHTGDIEATVVACKAADEAVKIILDAVEQVGGIYLVTADHGNAEDMVKRNKSGKPLLDKNDRIQILTSHTLQPVPVAIGGPGLHPGVKFRNDIQTPGLANVAATVMNLHGFEAPADYEQTLIEVADN

SEQ ID NO: 12373 - protein, 314 aa, ASPERGILLUS NIDULANS FGSC A4
MSRRSLWGSLRLVSKRQFAVSEAQYRCFSCSLRTQNQSKSDKDRMTHFGFTNIPEHEKESMVGKVFSSVASSYDTMNDLMSMGIHRLWKDHFVRSLNPGSALPSRDNDSAEKGWNILDIAGGTGDIAFRMLDHATNINHDYHTRVKIADINPDMLAEGKKRSIQTPYYNSERLSFMQGNAEHMPSIPDNSVDLYTVVFGIRNFTDKQAALVEAYRVLKPGGVFACMEFSKVDNPLFNAVYKQWSFSAIPLIGQLVAGDRESYQYLVESIEKFPSQEEFRGMIQKAGFMIPGRGFENLTGGIAAIHKGIKPLSRA

SEQ ID NO: 12374 - protein, 178 aa, Glycine max
MASSMISSPAVTTVNRAGAGMVAPFTGLKSMAGFPTRKTNNDITSIASNGGRVQCMHVWPPIGKKKFETLFYLADPDDAQLAKEGEYPLKKGWIPCLEIQVEHRFVYREHNRAPRYYHGRLWTMWKLAMFGCTDASQGVKELQEAKTAYPNGFIRIIGFDNVRQVQWINFIGYKPPGF

SEQ ID NO: 12375 - protein, 162 aa, Triticum aestivum
  unsure (1)..(162): unsure at all Xaa locations
MAPSVMASSATTVAPFQGLKSTAGMPVARRSGNSSFGNVSNGGRIRCMQVWPIEGIKXFETLSYLPPLTVEDXLKAVXVPAPSNWVPCPDSSKGPVCPTVENHRXPGYYQRKYWTIWNCQGSVDRXTQXLKDPRRQKGSPILTVKLKLFNPKTPGSGEKPQK

SEQ ID NO: 12376 - protein, 315 aa, Hordeum vulgare subsp. spontaneum
MATAGKVIKCKAAVAWEAGKPLSIEEVEVAPPQAMEVRVKILYTALCHTDVYFWEAKGQTPVFPRILGHEAGGIVESVGEGVTELVPGDHVLPVFTGECKDCAHCKSEESNLCDLLRINVDRGVMIGDGQSRFTINGKPIFHFVGTSTFSEYTVIHVGCLAKINPEAPLDKVCVLSCGISTGLGATLNVAKPKKGSTVAIFGLGAVGLAAMEGARMAGASRIIGVDLNPAKYEQAKKFGCTDFVNPKDHTKPVQEVLVEMTNGGVDRAVECTGHIDAMIAAFECVHDGWGVAVLVGVPHKEAVFKTHPMNFLNEK

SEQ ID NO: 12377 - protein, 226 aa, Petroselinum crispum
MVKIAIGSIGDSFTHGSLKCYLAEFIATLLFVFAGVGSAIAFNNLTADAGLDPAGLVAIAVAHAFALFVGVSIAANISGGHLNPAVTFGLAVGGHITLITGFFYWIAQLLGATVASFLLIFVNGGKAVPIHGVGAGLGAAEGVVFEIIITFALVYTFYATAADPKKGSLGTIAPIAIGFIVGANILAAGPFSGGSMNPARHSGQLLLAETFLDTGSTGLVLSLEEA

SEQ ID NO: 12378 - protein, 315 aa, Hordeum vulgare subsp. spontaneum
MATAGKVIKCKAAVAWEAGKPLSVEEVEVAPPQAMEVRVKILYTALCHTDVYFWEAKGQTPVFPRILGHEAGGIVESVGEGVTELVPGDHVLPVFTGECKDCAHCKSKESNLCDLLRINVDRGVMIGDGQSRFTINGKPIFHFVGTSTFSEYTVIHVGCLAKINPEAPLDKVCVLSCGISTGLGATLNVAKPKKGSTVAIFGLGAVGLAAMEGARMAGASRIIGVDLNPAKYEQAKKFGCTDFVNPKDHTKPVQEVLVEMTNGGVDRAVECTGHIDAMIAAFECVHDGWGVAVLVGVPHKEAVFKTHPMNFLNEK

SEQ ID NO: 12379 - protein, 394 aa, Zea mays
MASTVTFSPVSTQAGLIHKPRNLGATSYAGLKVPSFGSESSFLGRNASLRAAVTTRIVPKAKSGSQISPQASYKVALLGAAGGIGQPLGLLIKMSPLVSELHLYDIANVKGVAADLSHCNTPAQVLDFTGPSELASCLKGVDVVVIPAGVPRKPGMTRDDLFNINASIVKSLVEAVADNCPEAFIHIISNPVNSTVPIAAEVLKQKGVYNPKKLFGVTTLDVVRANTFVAQKKNLKLIDVDVPVVGGHAGITILPLLSKTRPSVTFTDEEAEELTKRIQNAGTEVVEAKAGAGSATLSMAYAAARFVESSLRALAGDPDVYECTFIQSEATDLPFFASRVKLGKSGVESIVSADLEGVTECEAKALDALKAELKGSIEKGVAFASKQQEAAASV

SEQ ID NO: 12380 - protein, 2804 aa, Magnetococcus sp. MC-1
MTGHFVGNEGVIEAKGSGSGDGGQVTLISAQHTLTTVNSVIDVSGGADSGSGGVVQIRSANRATFDGVVKADAGQNGGDGGLVDVSSEGEVQLIGKVVGLAPRGRNAKLVIDPKHIEINDAGGGAYNSTTVQFDDSQSGTTVITAASINAQVADVVLQANTDITVTTAINIANAGTGLTLQAGRSILINADLTTNNGVVTLTANDHTALSADRDAGVASIAMASGTTINAGSAAVNMTIDASGHGLMGDITAYNVTSSGAVALDSAGSIIVNGPNFASGSTSIGLTADNDVTVGSALTTGSLTIAAGRSVALNSNVTTTSTVNIKANDSTQTLANRGSGDGAISMAAGTTLNGGSAAITLTVDSTNASTAGGITIDLVTTDGNLTVSSHDAITEIDADSEVDLRGDILSLTTTDTNGAYIGAPGTSTTDYLEVHAKTRVDVTTNNGSVALASPGYLSGTVDWFGAAPTDDIGTTDIDESKIVNLNLGTVNVGTATFMLVVTDGGILDGLAGTGTNITAGSANLTTNGGESVVAGAIVLGNDGTRGGSIGDATHALKTELGILTASSSNGSVYIDEASGILINSINANQKGVTAKVNSSYAVVVTTLDGQTETGTNNVTVTAAGDIIIGTASATSTVTLTSTAGNIYDNNDATNNILAKNVVLNAGLNMGLSGDVLELTTESATLTATNGGVYFAMGVPSTVASVTAGGGHDVVINASDGVLSLGMVSAVGGSVTIDGGTGSILDNNGATANIIANSASIKSDKGAGTASDALETTVDTLAVEITGSGKSFYIDESDALTSINAKVNNGSTNLNFTGGSFAFNATTGAFSSTGVGSVTFENTGGGVAIGTVTATGGSATITASTAITDATSAITADTVVLTAGTSIGASGSTIKSTATTLTYLASAGSIYAQESDGATVNAKAVGTGKNIEFATTTGNLTIGTISAKGSVTLTATAGSVLSGGTSSSATGATVVLSAGTAIGASGASVNTVAANLSATASAGGVYLSNAGDVTLTTAVATGAGFQLSNTGALVLNGVTAAGQAVSLTASGAITDGNGATNNISAESLTLVGLSIGSTATNGAVDTQVNSVTATTTSGGIYLNELGSGGLTITAATAVGSDANVSITGAGDIALGVITAKGDDVTLVSAGKITDNNGAANNVTADILNVTGPNGVEGLETSITQLSSTGSTDIVNAGAMAITKASLEGGSSSFIAESLTILDMAGDTATIANNTSLTLQTTTGNIVFLDTNDTIVAQGSGTVTINAGTTDKSGAVAIIGNITTANQNISITADSHITIGLLNAGIGDVSVSSDYGVVLDGNSTAVNVIARNFSLSGTTPTVRQAELHTTNSIANAHAHDSEVAAKLTLLEANTAAMDIMSTAESTANYSLTLASSAYDTAQAEVDRLAPIENGLKITTYVLDGVSIALSTAASAIEVAAGAAQAIPFSGDAGSEAAAAVTGLAANVAGIAAYAIGIAHSEIAGQLDDAEDLAFNKDAEMYAAKSTLTDAIANHQAYKEATSISQAAYDAAVIERNHNWQVARQAVLAEDASSTAGTLALPFGIQISGQLDVNAVNSDVVLAITGPAVLNSMSATKTAGTGIMSITATDNISVVGALVADDYIRLETTGQIINGNAGHSLTASKFVGVAGTGIGASGGLNTSVTTMAASTTTGDVTVTNNKALTLGTVDGVSGITTAGNIVIAATSPLTVSNNVTTSGGTVALTAGNSANSGDDFTLSANTTISAASTVTLTAGDNVAVESGAQITGTTVTITANNTGDGEADGVNGGATIAGNINASSLVLSGGGVNHSGTITSAGSVNISATSTAASSVNGITLGSVTAGGQIDVVSSNKLVMNQNVTTTSGAVVLTAGDSSASGDDLTLAAGKTISSGDNTITLTSGDNMSIGAAAQITGTTLVLAANHEGAGVADGVSGSMVLAGNLSGQTVTISGAGLTHTGSITSNSTVSVNVNSAATSAISGISLAAVTAGGQIDVTSSHALTLTQNVQSTGGPITITAGLQTTSVDNLTVDAGVTVQSSAGVAFSAGDSMTFGLGSQVTGTGITLIADKAGDGDGDGVSGSINLYGNVNGSSVDVSAAGFRQTGTITSSGDVDIAVVSTLSSPYNGIALGTISAAGHSVKISATGTATAGIADNNGAATNVTAADLAMVANGGVGASADALETQVSNLAATGGSGGVTISNSGDLSLTTVEGVTSFSAADGALSLVTTGNLLISDGFVQGAGLTVTLQATGGNINETNSGAAADVVGNIITLTTTGLGNGVGDVANRLELNAQVLNVTTDKGDVYLHDTAGGVAVGLITTGTTEGTRVDMMVSNGGVTEDPGHGHAPKIIADELYLNVTGHGFGIGHVDNDLNVDLTTFVNVTTEGGSIYMADADYGFYVDLVSTNSASTNIAMGTELRLVSLEGSIEESPTRSDAAVDLKAERVVLLAQGENDNIGTVEDAIEIKAANLFSETESGARSSLVAPDGDSPIVEAPGQSANALLIDGDFVGGDDSNLFQEIQSTGNRVGGDIGGGAGGGFGGAGGAGGGFGGAGGDFGGAGGGLVSDAGGFGGEGAPGGDAGGFGGEGAPGGDAGGFGGEGAPGGDAGGFGGEGAPGGDAGGFGGEGAPGGDAGGFGGEGAPGGDAGGFGGEGAPGGDAGGFGGEGAPGGDAGGFGDEGAPGGDAGGFGGEGAPGGDAGGFGGEGAPGGDAGGFGGEGAPGGDAGGFGGEGAPGGDAGGFGGEGAPGGDAGGFGGEGAPGGGPGGDAGGIGGTDGAGGDRGGPGGTDGAGGDTGSPGSGDGDVNKQGEGG

SEQ ID NO: 12381 - protein, 315 aa, Hordeum vulgare subsp. spontaneum
MATAGKVIKCKAAVAWEAGKPLSIEEVEVAPPQAMEVRVKILYTALCHTDVYFWEAKGQTPVFPRILGHEAGGIVESVGEGVTELVPGDHVLPVFTGECKDCAHCKSEESNLCDLLRINVDRGVMIGDGQSRFTINGKPIFHFVGTSTFSEYTVIHVGCLAKINPEAPLDKVCVLSCGISTGLGATLNVAKPKKGSTVAIFGLGAVGLAAMEGARMAGASRIIGVDLNPAKYEQAKKFGCTDFVNPKDHTKPVQEMLVDMTNGGVDRAVECTGHIDAMIAAFECVHDGWGVAVLVGVPHKEAVFKTHPMNFLNEK

SEQ ID NO: 12382 - protein, 315 aa, Hordeum vulgare subsp. spontaneum
MATAGKVIKCKAAVAWEAGKPLSIEEVEVAPPQAMEVRVKILYTALCHTDVYFWEAKGQTPVFPRILGHEAGGIVESVGEGVTELVPGDHVLPVFTGECKDCAHCKSEESNLCDLLRINVDRGVMIGDGQSRFTINGKPIFHFVGTSTFSEYTVIHVGCLAKINPEASLDKVCVLSCGISTGLGATLNVAKPKKGSTVAIFGLGAVGLAAMEGARMAGASRIIGVDLNPAKYEQAKKFGCTDFVNPKDHTKPVQEVLVEMTNGGVDRAVECTGHIDAMIAAFECVHDGWGVAVLVGVPHKEAVFKTHPMNFLNEK

SEQ ID NO: 12383 - protein, 703 aa, Xanthomonas axonopodis pv. citri str. 306
MAKSPSKSAQVPAVSPAASATPDVSRGTGDELHQKAGGTHPQLTTNQGIPVGDNQNSLRATPRGPTLLEDFILREKITHFDHERIPERIVHARGSAAHGYFELTKSLSQYTTAKIFTEVGEKTPLFTRFSTVAGGAGSVDTPRDVRGFAVKFYTKEGNWDLVGNNIPVFFIQDAMKFPDLIHAVKMEPDRGFPQAASAHDTFWDFISLTPESMHMIMWAMSDRTIPRSLRTIEGFGIHSFRFLNEKGESTFVKFHWRPKLGLQSTIWDEAVKIAGADQDFHRRDLFEAIQRGDFPEWELGVQLFTEAQAETFPFDHLDSTKVIPEELIPLQIVGRMVLDRWPDNFFAETEQVAYCPANIVPGIDFSNDPLLQGRLFSYLDTQLSRLGGPNFHQIPINAPKCPFANNQRDGHMQMGVPKGRVAYEPSSLQADAPREALRGFPSHATPAEEGAKGRVRAESFADHYSQARLFFRSQTAPEQAHIASALVFELSKVETAHVREAIVGHLRHIDQELAQRVADGMGMTALPPAPPAAVAPIDMPLSPALQVIGKMKDTLKGRTVGILIHDGSDAAAIKAVRKAAEAAGATVKIVAPKLGGAKLNDGKQLAADGQLAGTPSVVFDAVAVLLSSEAAKLLTRESAALDFVSFAWAHLKAIAFDEGAQLLLKAGNVGKDAGVVPAADTKAFIAAAKTRQWAREPKVRMLA

SEQ ID NO: 12384 - protein, 214 aa, Mesorhizobium sp. BNC1
MERIETAADIRRGLDALVLLDRRLGPVRAVAGAVPLRRGPPGFHSLASVIVSQQVSRASADAIFARLSQLVKPLTPDGFLAAGESVMVKAGLSRAKQRTLTALSAALRDKALDLDDLGNLPPADAMEALTVIPGIGPWTAQVYLLVAAGHPDIFPAGDIALQAAVGHALALDARPKANQLALIAEPWSPWRSVAARLFWAYYREIRGAEAAPAA

SEQ ID NO: 12385 - protein, 455 aa, Geobacillus stearothermophilus
AIETETLVVGAGPGGYVAAIRAAQLGQKVTIVEKGNLGGVCLNVGCIPSKALISASHRYEQAKHSEEMGIKAENVTIDFAKVQEWKASVVKKLTGGVEGLLKGNKVEIVKGEAYFVDANTVRVVNGDSAQTYTFKNAIIATGSRPIELPNFKFSNRILDSTGALNLGEVPKSLVVIGGGYIGIELGTAYANFGTKVTILEGAGEILSGFEKQMAAIIKKRLKKKGVEVVTNALAKGAEEREDGVTVTYEANGETKTIDADYVLVTVGRRPNTDELGLEQIGIKMTNRGLIEVDQQCRTSVPNIFAIGDIVPGPALAHKASYEGKVAAEAIAGHPSAVDYVAIPAVVFSDPECASVGYFEQQAKDEGIDVIAAKFPFAANGRALALNDTDGFLKLVVRKEDGVIIGAQIIGPNASDMIAELGLAIEAGMTAEDIALTIHAHPTLGEIAMEAAEVAL

SEQ ID NO: 12386 - protein, 731 aa, Mycobacterium tuberculosis H37Rv
MSFVIANPEMLAAAATDLAGIRSAISAATAAAAAPTIQVAAAGADEVSLAISALFGQHAQAYQALSAQATIFHDQFVQALTSGGNLYAAAESHTVEQMVLNAINAPTQTLFGRPLIGDGANGTAENPDGQNGGLLFGNGGNGFTQTTAGVAGGNGGSAGLIGNGGAGGGGGAGAAGGLGGNGGWLYGNGGAGGIGGAGTGTGGHGGAGGAGGRAWLWGTGGAGGAGGDGGWLFGDGGAGGTGGNGGSGFNSLTSSVGGAGGAGGHAGLFGAGGTGGTGGIGGQNTETGPAASNGGAGGAGGGGGYLVGDGGAGGTGGAGGKNSSGGATLTGGTGGTGGAGGAAGWLYGSGGAGGAGGAGGLNNAGGATGGTGGTGGAGGSGAWLYGNGGAAGAGGNGGNNTSAGTGGVGASGGTGGNAGLIGAGGHGGAGGAGGNQTGGVGNGGAGGNGGAGGAGGQLYGNGGDGGNGGAGGANIAGGNGSDGGAAGHGGAGGSARLIGAGGHGGDGGAGGNTAGRRADAIAGTGGDGGNGGNGGLLSGNAGAGGHGGAGGSSTATTTTGTPPTGATGGNGGNGGAGGTAGFTGSGGIGGNGGAGGTGGNAGVALSVGSTGGLGGNGGSGGLGGGGGSLFGNGGAGGVGATGGNGGSGIGPASVGGNGGKGGVGAAGGLAGQIGNGGSGGSGGAGGNGGTGDTAGNGGNGGAGAVGGNAQLIGNGGNGGGGGNGGTGADGT

SEQ ID NO: 12387 - protein, 99 aa, Glycine max
MVFWEGYVSDELMGTFAPIVLYWVYAGFYHLLPPLDRYRLHTRRDEEKKNLVPFSTVVKGVLLQQLVQAIVALFLVSSSTFQLIYANSICPNFVVNIVF

SEQ ID NO: 12388 - protein, 200 aa, Nicotiana plumbaginifolia
MASSSHNNLNAKLVLLGDMGAGKSSLVIRFVKGQFLEFQESTIGAAFFSSTLAVNNATVKFEIWDTAGQERYHSLAPMYYRGAAAAIIVYDITSSDSFARAKKWVQELQKQGNPNMVMALAGNKADLEDRRKVTAEEARLYAEENGLFFMETSAKTAVNVNAIFYEIAKRLPRAQPAQNPAGMVLVDRAAEGTRATSCCT

SEQ ID NO: 12389 - protein, 164 aa, Arabidopsis thaliana
LKDPSKPPAKAQVVGWPPVRNYRKNVMANQKSGEAEEAMSSGGGTVAFVKVSMDGAPYLRKVDLKMYTSYKDLSDALAKMFSSFTMGSYGAQGMIDFMNESKVMDLLNSSEYVPSYEDKDGDWMLVGDVPWPMFVESCKRLRIMKGSEAIGLAPRAMEKFKNRS

SEQ ID NO: 12390 - protein, 372 aa, Serratia marcescens
MKSRAAVAFGPGKPLEIVEIDVAPPQKGEVLVKITHTGVCHTDAFTLSGDDPEGVFPAVLGHEGGGIVVEVGEGVTSLKPGDHVIPLYTAECGECKFCKSGKTNLCQAVRATQGKGLMPDGTTRFSYNGEPIYHYMGTSTFSEYTVCAEISLAKVNPQAPLDKVCLLGCGVTTGIGAVHNTAKVKEGDSVAVFGLGGIGLAVIQGAAQAKAGRIIAVDTNPEKFKLAGEMGATDFVNPNDYDKPIQDVIVELTDGGVDFSFECIGNVNVMRAALECCHKGWGESVIIGVAGAGQEIRTRPFQLVTGRVWRGSAFGGVKGRSQLPGMVEDAMAGKIRLDPFITHRLPLEKINEAFDLMHEGKSIRTVIHFGDK

SEQ ID NO: 12391 - protein, 255 aa, ASPERGILLUS NIDULANS FGSC A4
MSRRYDSRTTIFSPEGRLYQVEYALEAISHAGTALGILAKDGIVLAAEKKVTSKLLEQDTSAEKLYTLNDNMICAVAGMTADANILINYARQAAQRYLITYGEEIPCEQLVRRLCDLKQGYTQHGGLRPFGVSFIYAGYDHLREFQLYQSNPSGNYGGWKATSVGANNASAQSLLKQDYKEDCDLKEACAMAVKVLSKTMDSTKLSSEKIEFATVGKTKEGKIYHHLWNADEINALLKEHGLAKVDDEPEAGDIK

SEQ ID NO: 12392 - protein, 519 aa, Zea mays
  unsure (1)..(519): unsure at all Xaa locations
MQFSSVLPLEGKACMSPVRRGSGGYGSERMRINCCSIRRNKALRRMCFSARGAVSSTQCVLTSDAGPDTLVVRTSFRRNYADPNEVAAVILGGGTGTQLFPLTSTRATPAVPIGGCYRLIDIPMSNCFNSGINKIFVMTQFNSASLNRHIHRTYLGGGINFTDGSVEVLAATQMPGEAAGWFQGTADAVRKFIWVLEDYYKHKAIEHILILSGDQLYRMDYMELVQKHVDDNADITLSCAPVGESRASDYGLVKFDSSGRVIQFSEKPKGAALEEMKVDTSFLNFAIDSPAEYPYIASMGVYVFKRDVLLDLLKSRYAELHDFGSEILPKALHEHNVQAYVFTDYWEDIGTIRSFFDANMALCEQPPKFEFYDPKTPFFTSPRYLPPTKSDKCRIKDAIISHGCFLRECAIEHSIVGVRSRLNSGCELKNTMMMGADLYETEDEISRLLAEGKVPIGVGENTRISNCIIDMXCQGWKERLHNKQRGRPRSRPAGRRILXIRSGIVVVLKNATIKDGTVI

SEQ ID NO: 12393 - protein, 455 aa, Candida albicans SC5314
MLRTYSKSLLKTSTTIKKSFSFNTATLSLPTYKKYSTSVPDANDESHTGKFINSISKPYSVTTYARPNLVLTHGKGSYIYDLEDRKYIDFTSGIAVTCLGHSYEPITQLIKDQSEKLIHCSNLYYNLPAGELSNKLIVKTKEFDGMKDASRVFLCNSGTEANEAALKFARKYGKSINPEKYEFITFENSFHGRSMGALSVTPNPKYQEPFSPLIPGVKIAKPNDIESVKQVINKDKTCAVIIEPLQGEGGVNIIDESFLIELRKLCDENNVLLIYDEIQCGLGRTGKLWAHSWLSPEAHPDIVTIAKALGNGFPIGATMITEKVEKSLNVGDHGTTYGGNPLASTVGSYIVDHIGDKEFLQQVENKSQIFLEGLNKIAEENPNLIEKVKGKGLLLGLQFKENVDIGEIVAKCRQHGLLIITAGMNTIRLVPALNIPDQTIKDGLEILTQSIKEVN

SEQ ID NO: 12394 - protein, 615 aa, Mycobacterium tuberculosis H37Rv
MLYVVASPDLMTAAATNLAEIGSAISTANGAAALPTVEVVAAAADEVSTQIAALFGAHARSYQTLSTQAAAFHSRFVQALTTAAASYASVEAANASPLQVALDVINAPAQTLLGRPLIGNGADGSTPGQAGGPGGLLYGNGGNGAAGGPNQAGGAGGNAGLIGNGGAGGAGGVGAVGGKRGTGGLLFGNGGAGGQGGLGLAGINGGSGGQGGHGGNAILFGQGGAGGPGGTGAMGVAGTNPTPIGTAAPGSDGVNQIGNGGNTDLTGGAGGDGNAGSTTVNGGNGGTGGAARNSSGGTGNSFGGAGGAGGDGANGGDGGAGGEALTEGGATAVSGAGGKGGNAEASGGAGGNGGKGGFAQATTSVTGGNGGNGGNGHDSNAPGGAGGSGGVGGDGGRGGLLAGNGGTGGAGGNGGTGGAGAPGGAGGAGGKADIANSLGDNATVTGGNGGTGGDGGSALGTGGAGGAGGLGGHGGAGGLLIGNGGAGGAGGLGGAGGAGGAGGEGGAGGAGGEAIPGGASTNSAGGDGGAGGTGGNGGDGGAGGAPGLGGAGGAGGWLIGQSGSTGGGGAGGAGGAGGAGGAGGSGGAGGHGDTTSGKNGSSGTAGFDGNPGQPG

SEQ ID NO: 12395 - protein, 315 aa, Hordeum vulgare subsp. spontaneum
MATAGKVIKCKAAVAWEAGKPLSVEEVEVAPPQAMEVRVKILYTALCHTDVYFWEAKGQTPVFPRILGHEAGGIVESVGEGVTELVPGDHVLPVFTGECKDCAHCKSEESNLCDLLRINVDRGVMIGDGQSRFTINGKPIFHFVGTSTFSEYTVIHVGCLAKINPEAPLDKVCVLSCGISTGLGATLNVAKPKKGSTVAIFGLGAVGLAAMEGARMAGASRIIGVDLNPAKYEQAKKFGCTDFVNPKDHTKPVQEVLVEMTNGGVDRAVECTGHIDAMIAAFECVHDGWGVAVLVGVPHKEAVFKTHPMNFLNEK

SEQ ID NO: 12396 - protein, 307 aa, Pseudomonas aeruginosa PAO1
MTSKLEQLKQYTTVVADTGDFDAIARLKPVDATTNPSLLLKAAALPRYAEHLRQATAGSGGDAGLACDRFAVAVGKDILGVIPGRISTEVDARLSFDSEATLARAHRLIELYDEQGIDRERVLIKIASTWEGIRAAEILEREGIQTNLTLLFSFAQAVACADAGVFLISPFVGRIYDWYKKSENRDYAGAEDPGVQSVSRIYRYYKANGYKTVVMGASFRNLGQIEQLAGCDRLTISPDLLQQLADAQGELPRLLLPGEGEPRQVLDESAFRWQMNEDAMATEKLAEGIRLFARDQEKLEYQLATRH

SEQ ID NO: 12397 - protein, 339 aa, Ustilago maydis 521
MAANIPSFTLNTGAKLPSVGMGCWQGQPGPGRDNELVDALVRAIKVGYRHLDTATGYRNEAEVGQAVRQSGVARSEIFVTTKLRPGGVHDVVQELENSLNELGIDYIDLWLLHWPQGFTKDDGGFGTGESFGLEHQKHLGPTFNETWAKMEDVFLNSHKGKVKAIGVSNFSIKNLEILAKTSKVTPAVNQIEAHPYLPEHELVKYCKHKSIHVTAYSPLGQYNASIHEDKDLNEIAKKHDVTAATVALSWAVQRGTSVAPKSTNEKRMKQNITLIKLTDEEMKQVDVISQDPTRSTRLNYFVVNKETGTVLGWTMDEMGWEVGFLEEPGKSTKRIAERK

SEQ ID NO: 12398 - protein, 485 aa, Triticum aestivum
  unsure (1)..(485): unsure at all Xaa locations
MMGRKALDYEELNENVKKVQYAXVRGELYLRASELQKEGXKRIIFTNVGKPARPEPVTPLTFPRQVVALCQGVPFXRDDPNVGLIFPADAIATAKHYLLXSRPGGLGAYSDSRGIPGVRQIVAEFIQRRDRYSSDXQLILLIVSNSRVVMQILNYMIRNERGKYLVPXVPQYPLYTANSCLLDGSLVPYYFEEEANXGLDLVSTRQSVAEARSKGITVRAMVIINPGNPTGQCLSEANIRELLNFCYQENLVLLADEVYQQNVYQDERPFISARKVMFDMGPPVSREVQLISFHTVSKGYWGECGQRGGYFEMTNIPPKTVDEIYKVASIALSPNVPGQIFMGLMVNPPKPGDISYLKYSAESKSILESLRRRAQIMTDGFNSCRNVVCNFTEGAMYSFPQIRLPQRAMDVAKSAGKAPDVYYCLKLLEATGISTVPGSGFGQKEGVFHLRTTILPAEEDMPAIMSSFKKFNDSFMEQYQNHSRL

SEQ ID NO: 12399 - protein, 455 aa, Mycobacterium tuberculosis H37Rv
MSTTQLINPATEEVLASVDHTDANAVDDAVQRARAAQRRWARLAPAQRAAGLRAFAAAVQAHLDELAALEVANSGHPIVSAEWEAGHVRDVLAFYAASPERLSGRQIPVAGGVDVTFNEPMGVVGVITPWNFPMVIASWAIAPALAAGNAVLVKPAELTPLTTMRLGELAVEAGLDEDLLQVLPGKGTVVGERFVTHPDIRKIVFTGSTEVGKRVMAGAAAQVKRVTLELGGKSANIVFHDCDLERAATTAPAGVFDNAGQDCCARSRILVQRSVYDRFMELLEPAVHSIVVGDPGSRATEMGPLVSRAHRDKVAGYVPDDAPVAFRGTAPAGRGFWFPPTVLTPKRGDRTVTDEIFGPVVVVLTFDDEADAISLANDTAYGLSGSIWTDDLSRALRVARAVESGNLSVNSHSSVRFNTPFGGFKQSGVGRELGPDAPLQFTETKNVFIAVGEEM

SEQ ID NO: 12400 - protein, 308 aa, Mycobacterium tuberculosis H37Rv
MDLSASRSDGGDPLRPASPRLRSPVSDGGDPLRPASPRLRSPVSDGGDPLRPASPRLRSPLGASRPVVGLTAYLEQVRTGVWDIPAGYLPADYFEGITMAGGVAVLLPPQPVDPESVGCVLDSLHALVITGGYDLDPAAYGQEPHPATDHPRPGRDAWEFALLRGALQRGMPVLGICRGTQVLNVALGGTLHQHLPDILGHSGHRAGNGVFTRLPVHTASGTRLAELIGESADVPCYHHQAIDQVGEGLVVSAVDVDGVIEALELPGDTFVLAVQWHPEKSLDDLRLFKALVDAASGYAGRQSQAEPR

SEQ ID NO: 12401 - protein, 284 aa, Streptococcus agalactiae NEM316
MKGIILAGGSGTRLYPLTRAASKQLMPIYDKPMIYYPLSVLMLAGIKEILIISTPQDLPRFEDMLGDGSELGISLSYAEQPSPDGLAQAFIIGEEFIGDDHVALVLGDNIYHGPGLSAMLQRAASKESGATVFGYQVKDPERFGVVEFDTDMNAISIEEKPAQPKSNYAVTGLYFYDNDVVEIAKNIKPSPRGELEITDVNKAYLDRGDLSVELMGRGFAWLDTGTHESLLEAAQYIETVQRMQNVQVANLEEIAYRMGYITREQVLELAHHLRKMSMVNTYFV

SEQ ID NO: 12402 - protein, 303 aa, Zea mays
  unsure (1)..(303): unsure at all Xaa locations
MAASVALSSGHRMPAVGLGVWRMEKADIRGLIHTALRVGYRHLDCAADYQNEAEVGDALAEAFQTGLVKREXNSDHGHVLEACKDSLKKLQLDYLDLYLIHFPVATRHTGVGTTSSALGDDGVLDIDTTISLETTWHAMEELVSXXLVRSIGISNYDIFLTRDCLAYAKIKPAVNQIEVHPYFQRDSLVKFSXKHGICVTAHTPLGGSTANTEWFGSVSCLDDPVIKSLAEKYGKTPAQLVLRWGLQRNTVVIPKTSKLERLQENFEVFDFDISGEDMEKMKAVDRKYRTNQPAKFWGIDLFA

SEQ ID NO: 12403 - protein, 552 aa, Solanum tuberosum
  unsure (1)..(552): unsure at all Xaa locations
XQVSGHRRYAAVYSEVQNSRLDHPLPLPSVLGSPFKVVDGPPSSAAGHPEEIAKLFPSLYGQPHVSLVPDDSGDVAMNQILKIGVVLSGGQAPGGHNVISGIFDYLQTHCKGSTMYGFRGGPAGVMKGKYVVLTPEFIYPYRNQGGFDMICSGRDKIETPEQFKQAEETAKKLDLDGLVVIGGDDSNTNACLLAENFRSKNLKTRVIGCPKTIDGDLKSKEVPTSFGFDTACKIYAEMIGNVMIDARSTGKYYHFVRLMGRAASHITLECALQTHPNVTLIGEEVFAKKLTLKNVTDYIADVVCKRAESGYNYGVILIPEGLIDFIPEVQQLIAELNEILAHDVVDEAGVWKKKLTPQCLELFELLPLAIQEQLLLERDPHGNVQVAKIETEKMLIQMVETELDQRKQKGAYNAQFKGQFHFFGYEGRCGLPSNFDSTYCYALGYGAGSLLQSGKTGLISSVGNLAAPVEELTVGGTALTALMDVERRHGKFKPVIKKAMVELEGAPFKKFASKREEWALNNRYINPGPIQFVGPVANKVNHTLLLELGVDA

SEQ ID NO: 12404 - protein, 338 aa, Pantoea agglomerans
QITAKRFLIATGASSTAPNIPGLDEVDYLTSTSLLELKKVPNRLTVIGSGYIGMELGQLFHNLGSEVTLIQRSERLLKEYDPEISEAITKALTEQGINLVTGATYERVEQDGDIKKVHVEINGKKRIIEAEQLLIATGRKPNTESLNLHAAGVEVGSRGEIVIDDYLKTTNSRIYSAGDVTLGPQFVYVAAYEGGLAARNAIGGLNQKVNLEVVPGVTFTSPSIATVGLTEQQAKEKGYEVKTSVLPLDAVPRALVNRETTGVFKLVADAKTLKVLGAHVVAENAGDVIYAATLAVKFGLTVGDLRETMAPYLTMAEGLKLAVLTFDKDVSKLSCCAG

SEQ ID NO: 12405 - protein, 229 aa, Zea mays
  unsure (1)..(229): unsure at all Xaa locations
MVCLDASKRIAGTLIICAFGISTQPNPGAGRGAKLRKLAGELNPLQDASGGKKISINDLVIKAAALALRKVPSXCTAPWMNDFIRQSHNVTINVAVQTEHGLFVPAIRDADKKGLGAIAEEVKQLAQKARDNSLKPADYEGGTFTVSNLGGPFGIKQFCAIINPPQSAILAIGSAEKRVIPGSADGQFEFGSFMSATLSCDRRVIDGAIGPEFLKAFKGYIENPTSMLL

SEQ ID NO: 12406 - protein, 280 aa, Oryza sativa
MELMASMKKPELWRKAAEIIKQGENSEQDGGSKSSSNNHPMFSVQFAQKVIAEILGTFFLIFAGCAAVAVNKRTGGTVTFPGICITWGLAVMVMVYSVGHISGAHLNPAVTLAFATCGRFPWRRVPAYAAAQVAGSAAASAALRALFGGAPEHFFGTAPAGSDVQSLAMEFIITFYLMFVVSGVATDNRAIGELAGLAVGATVLVNVLFAGPISGASMNPARTIGPAIILGRYTGIWVYIAGPVFGAVAGAWAYNLIRFTDKPLREITMTASFIRSTRRN

SEQ ID NO: 12407 - protein, 459 aa, Botryotinia fuckeliana
MSSPSGSSQASGAGKANGALNKAFPHIDLDGHNLPPSPAPSSPHNGRRYALATELVYTETKDQYGASSMPIYQSATFKQNLAGGGSEYDYTRSGNPTRTHLERHLAKIMNANRALVVGSGMGALDVITRVLRPGDEVITGDDLYGGTNRLLTYLAANTGIIVHHVDTTTPDKVKAVLGPKTAMVLLETPTNPLIKIVDIATIARTAHELNEKALVVVDNTMLSPMLCNPLDLGADIVYESGTKYLSGHHDIMAGVLAFNDPAIGDKMYFTINSTGCGLSPNDSFLLMRGIKTLAIRMERQQTNAQAIAEFLETHGFRVRYPGLKSHPQYDLHWSMARGAGAVLSFETGDVALSERIVEAAKLWGISVSFGCVNSLISMPCQMSHASIDAKTRKERQMPEDIIRLCVGIEDVNDLIDDLSRALVQAGAVKVTLDGFHAIDAAQAIAEVPIAESDAAAAPL

SEQ ID NO: 12408 - protein, 257 aa, ASPERGILLUS NIDULANS FGSC A4
MATTTITHSGRLHGKVAIVTGAGSGFGYGIAKKFVEEGAKVIVADISEKNGQAVAAELGSKFIYTDVTRRDDWQALLQATLDEYKTLDIVVNNAGATYSNKPTTEVTDADFDLCVNVNVRSIYLSTSVIVPYFLEHNRPGCFIQVSSTAALRPRPGLTWYNASKAAVSNATKTMAVEYGPKKIRFNCVCPVVGSTGMTHLFLGKPDTEENRAAFVSTIPLGRPSTPADVANTCSFLASDEAGFITGVELEIDGGRCV

SEQ ID NO: 12409 - protein, 1006 aa, Oryza sativa
RHHRGSDPLAAAAGSGEEAAVTCPIYVKPFPSELAVSDHLVGCLVVAGGACPYAATYLAGDPLAFVMEVVKKLLGSLPAHAPKNFLTRPNKIAVRICTQRHGGRQAAQQAAVCATAAARRHGPPGRQHVQYAVRYPKRSSNPGHRPFRRRRKGAWVAEPHEEMPAQKRPLQPADSDDSDGHVPVGRAASSRGGGGGVSHESDGEDAARRAREPPRDQRDGDPDEGDGGGGDGSGGGSDSESSLNGAGDKDDSYALQAYKKYRDRFVSLRRRLLQDRLDRSPQRPSRWMKFSRRVTRHLPLLHTPTYMRRAATAAGRTKSATQHDPPSEPDPALRRLASVFHLTQLTFFDQSRTQTSGMEAHPLPWPVAATATQLVRDSEYSRGSSFQQRKEKYGRRPACMPRWIAATAARSYGQRARMPAQKRRLSSSPSSRPRDHVETNGMTGASKAAAGSGGGGGGGSGGGVPLPPRGGSAAAAAAKRAADPQPQREGGEFFVASTSRPPISPAAGRDMHVAFGVSVRIWLRGLCVSMGLADSDAEFGGGVDGDSESSQSDGDMDDPPRGATTRILAPVRRIVLRWFCEMPPCRPELVHNSEISRNTKGGPMPYLFRNNECPACRTHCASRRSLRDDPNYDALIAALYPDIDKYEEEELAFSEEERSRNKKIQATIEETIRRQSEAVGKKRSTAKATATVFARKYRRNMRTRGRGKTIAPDIAPTGSDNEDREEGNAIDTTKESSSADDRSSDLMPKRGRKRPASRASPARTIGSSDHVFEENDELIGGKESFTTSPLRGEMLAWGKNGTRSQTRHGSVGGSNGRMAKGGRVAKLVDHLRTTDDMDKEFIALQLSRQVEELDIFMRIDHCNGSVTTQDCTTGVAKMRLSDGLERIREDKLLSELHPSFTSHHGDLRLPVRHGDARVGGQHGVQRVHCPHGVHRLHHPHDTGKRKAPSLVPPPERAEYLEKDSNEEDEDLQGSTCTSRPSVLRRISPNAVKKLTPDNGWFFVTGI

SEQ ID NO: 12410 - protein, 394 aa, Bifidobacterium longum DJO10A
MSAEYNAKFANTDIATRAIHAGQEPDPTTGAVVTPIFATSTFKQDGVLGLRGGHDYSRSINPTRTSFDEQLAAVEGGKYALSFSSGLAAIDVLLRSTIKPGDNILLGNDVYGGTYRLLSKVFVPWGVGLDVVDITDLKAVETALASKHYQYVWVETPSNPLLNITDIAATTEVAHKYGTKVAVDNTFASPALQHPLADGADVVVYSTTKYIGGHSDVVGGAVVVNDEETREKVAFLQNAAGAVPSPFDSWLDIRGLKTLDLRVKRHSANALKVAEWLESQPSDVIERVWYPGLESHPGHEIAARQMHGGFGGIVSVQLAAGAEAAKHFVDHTQIFTLAESLGGVESLIEVPAAMTHASVAGTTLQVPANLVRISVGIENADDLIADLKQALDRI

SEQ ID NO: 12411 - protein, 520 aa, Ostreococcus tauri
MVKTASSSSGRFESRASASMTSRAREMEQTLEVQAEGEGVEDEMREIAVDARAPRVRRDRAKTASRELKRRFQSRDARCVILAGGADETNPLTRRRARSAVHLAGTYRVIDFPMTNLINSGMRQLYVLTQFNSHSLVTHVNKAFPSELFGGEVNGFVEVLPTSQTREHGETWSLGSADCVARHLSSGSLTKYTYEMRMEDECLRQLGSLDECLMSELDGTTIILSAEALYSMNFAELLEQHFLKGADVTIATCNQISSDQANAFGILDVDEMTAQVNCFIEKPTKAQLEEFMQCTTEELESCKLDANMGVYVFNNSALLELLTASKSGVAPGGPTRVRLGYDVKAFRHSDYWKPLRSLRDLYEANISIAVGGDAASLLTHGRQVYTKPNFLPPTTFHGSVYTEKTIFSDGCLVQDGSRIVNSVIGACTSIDKNVDLEGVVVVGRDEIMKRSGGVNSVPDIGANTIIRKCIIDSDATIGANVRIVNAAGIEELDRTDEGYVITEGIVTILGGAIIPDGFVI

SEQ ID NO: 12412 - protein, 452 aa, Ostreococcus tauri
MAGTNTPVTAALGAAAANDGMDNVLSIILGGGAGTRLYPLTKKRAKPAVPLGANYRLIDIPVSNCINSDINKVYCLTQFNSASLNRHLAQAYNTNIGTHTRQGFVEVLAAQQSPVNKAWFQGTADAVRQYLWLFEESKCEEYLILSGDHLYRMDYRPFIMKHRETEAAITVAALPCDEKRASSFGLMKIDNTGRVIEFAEKPKGAELQAMKVDTTVLGLDADKAQEMPFIASMGIYVFDAKKMRECLLENFKEADDFGGEIIPMAAQMGLKVQAFLYEGYWEDIGTVDAFFHANLSCNDPNPAFNFHEMNAPIYTQSRFLPPSKVQDCEIERSTIGDGCFITKAKLKNVMVGLRSTVNANCDLEDTLVMGADYYETYDEAKTSALPGGVPIGIGAGTKIRKAIIDKNARIGENCQILNEAGVMDKDCENEGYIIRDGIIVVIKDAVIKPGTV

SEQ ID NO: 12413 - protein, 364 aa, Zea mays
  unsure (1)..(364): unsure at all Xaa locations
MPAGISATGYYVGSSSSTQPSNSVQPNAAPLAEPFLRQIPLSIDQSGWDIQHLIHQEGFQRNVRARHSININSVHVPSFGSTASASSSAPVEMNQVPVSLPTRTLPSGXTGRAYYPVVGSSSSSSSVGAVPTIHGSSGAAMFANGGYVPSSVHAGTVPIFPNPAPATSSGSRAMPHQMVIQSHPAATSAATSTSMRTAQPSLPARTAAASRHARHVSAGLANNGRYRRARSSYYRLHPLMVEAEKRFMMDHLVFYESRAAAADPHRDMRLDIDNMSYEDLLALGEAMGNVNTGLADEKVSECVKEVVCCSSDHTQMDQDDGSCAICLEDYRDKEALGILKCRHDFHAGCIKKWLQTKNSCPVCK

SEQ ID NO: 12414 - protein, 502 aa, Nicotiana tabacum
APLLQQLCSGTESKRMFMAKTLSEIELSDQLKLCLIENGALKPLLELLSHSNTDMKSIAVKALQSLSTVTQNGQLMVKEGVSDLLFELLFCHTLSNEIREHVAATIMQLAMSTNSQRSEDVQVSLLESLDDIFKLFSLVSLTGSNVQQSILRIFQAMCQSPAGSDIRTKLRQISIKVLVYLCELDDRKVRADAVKLFYLLAKDGNDDTLLEHVNSTCIGNLVQIIRTSDNEEETAAALGIISYLPQDCSMSQHLLDAGALDVILDCLRGRNEHALPRNEVVENAAGALCHFTLPTNPETQKQVAEAGFITLLVSLLGSGSSLTKKNAATCLKQLSESSCILSKPARKNWMLSCCIASPTHGCPVHLGICSVESTFCLVEANALRPLAEVLDDPDPAASEASLDAILTIIEGAQLQNGSKLLAEANAIAPIIKLLSSSSIVLQEKALKALERIFRMIEMKQKYGISAQMPLVEITQKGRNDMKSLAAKVLAHLNVLPEQSSFF

SEQ ID NO: 12415 - protein, 436 aa, Magnetococcus sp. MC-1
MKSIKRTLLPAAALAMGSILPATAWAEDTLDSGNTAWMLTSTALVLFMTLPGLALFYAGMVRSKNVLSVLMQCFAIAGVMSILWAIYGYSLAFSSAADAGVNQFIGGMGDFFLKSVKADSLSGSIPTSVFVTFQMTFFIITPALIVGGFAERMKFSSMLVFMALWGTIVYLPICHAVWGGGFMAEDGVLDFAGGTVVHINAGVAGLVAALVLGKRRGYPTTAMPPHNLSLTVTGAAMLWVGWFGFNAGSELAADGTAGMAMLVTQLAAATAAIVWMALEWMKHGKPSVLGIATGAVAGLVAITPASGTAGPMGGILIGLAAGFFAFIGATSIKRALGYDDSLDAFGVHGIAGIVGAILTGVFADASLGGSGLAEGKTIMSQVAVQTTSVGYTIVYCAVATFIILKVLDVIMGLRVDDEAEEMGLDLAEHDERGYNI

SEQ ID NO: 12416 - protein, 460 aa, Triticum aestivum
  unsure (1)..(460): unsure at all Xaa locations
MAGLLHLHSTLLPSASLLRQRGGAQAVPRRRRACRVEAKIREIFMPALSSTMTEGKIVAWNAAEGDRLAKGDPVVVVESDKADMDVETFHNGFLAAVLVPAGESAPVGSAIALLAESEEEIPLARSQAASFSSSAAASPPAPQETVAQEASPAPPPPPPPGPVAVSAPAPPSPATQGGXRVVASPYAKKLAKELSVDLFAVTGSGQXGGRVVAKDVEAAAAAPKKAAPVPAARPDVPLGSTVPFTTMQGAVSKNMVESLAVPAFRVGYTITTDALDALYKKIKAKGVTMTALLAKATAMALVQHPVVNSSCRDGQSFTYNSSRTRGVAVAIDGGLITPVLQDADKLDIYSLSRKWKELVDKARAKQLQPQEYNSGTFTLSNLGMFGVDRFDAILPPGTGAIMAVGSSQPTVVGTKDGRIGIKSQMQVNVTADHRVIYGSDLAAFLQTLSKIIEDSKDLTF

SEQ ID NO: 12417 - protein, 469 aa, GIBBERELLA ZEAE PH-1
MADSDGEYVGDMSDDDLMDHRVSNDNPQATKGKSSKSRKGDSARAWEVSKRTWETGLPDEDQDGVLSINVLEAEKRKRLLRDTTPLQRGIIRHMVLVLDMSFAMTEKDLLPTRYRLMLSYAVAFVREFFEQNPISQLGIIGMRDGVAVRVSDVGGNPAEHLDKLKGLESQDPQGNPSLQNALEMCRGALFHAPSHGTREVFIIYGALLSSDPGDIHETIGNLITDRIRVSIVGLSAHLAICADLCSRTNAGDESQYNIAMDEVHFRELFLAATTPPVTRTVAQSTASLLMMGFPSRTLVPNGTTSYCACHNRPCREGYLCTRCGARVCRIPSECPSCDLTLILSTHLARSYHHLFPLRNWIEVPWAKATTSAGCFSCLAPFPEPPKNKGHDKSKEDSGAPKTAKGVSESGRYACEVCGQHFCIDCDVFAHEVVHNCPGCQSLVSKTDGAAASGEQNGTATHTNGDVAMT

SEQ ID NO: 12418 - protein, 101 aa, Triticum aestivum
  unsure (1)..(101): unsure at all Xaa locations
MAPTVMASSATSVAPFQGLKSTAGLPVSRRSNGASLGSVSNGGRIRCMQVWPIEGIKKFETLSYLPPLSTEALLKQVDYLIRSKXWVPCLEVQQRSGFIFR

SEQ ID NO: 12419 - protein, 771 aa, Mesorhizobium sp. BNC1
MGQAQKILHSSHWGIFFAVVENGRIVDIEPFKGDPAPSPLLASIPEWTNAETRVLRPMVREGWLRAHDAGRPQDNRDRRGKDEFIEVSWPQAIELIASEINRVRTELGNSSIFAGSYGWTSAGRFHHAASQIKRLLNLVGGYTGHVDTYSIAAGPVLLRFVLGNDFASGGRGTTLDTVVENTQTLLVFGALSPRTAQNEAGGVAKHKLEGYLRQIADRGIRVILISPCRDDVPEFLNAEWWPIRPGTDAALLLALTRELVRSGRADLDFLNRYCSGSERFLSYLAGETDGQEKTAEWAEAITGIPGAAIRGLAPTIADTRTMITLSWALQRADHGEQPYWAAIALAAAAGQIGLPGGGFGFGFGSVSGNGSPYGVIQAPALPQLKNPIRSFIPVARIADMLLNPGQPFDYSGASYTYPDARLIYWAGGNPFHHHQDLNRLDRAWAIPETVIVQDPVRTATVDRADIVLPACTTLERCDIGASRRSDYIVAMKKVVDPIGEARSDYAIVSEIARALGVEAQFTEGRDEMGWLRHLYENSRTDAAERLNWDMPAFDEFWTRGWVQVPMLSKQVYLADFRQDPEKHPLGTGTGRIILSSETLETHGYDDFLPYPAWIPPRPEVGQGPLYLLTPQPQGRLHSQLDGGVASLAEKTDGLERLRINTTDARALGIESGVTVLIRNDRGRCLAAADVSDDVMPGVVCLPTGSRLQFAADGSDLEISGNPNVLTADIPASSFSQGCAAQSCRVWVERWKAPEHSGLETGQRGSKHENET

SEQ ID NO: 12420 - protein, 371 aa, Oryza sativa (indica cultivar-group)
MNPQEFQFFQGVEQEMLLLSHGGGGAAAAASDDVLAYHVGVLRDKVQQLEPLVGMVVVSPAAPHGQLRRDAAAMAASSACSVLQEITAAASAVAHRLEQASAASSASFRRGVAFADDAHAAGGEQMFAAGAHGGGQGGDDEAGASLFHHHGPPAVGAPTVFRAGATTTAAASSSGGGDDDGDGDGEVDVVELEASYLLARYTHYCQVCGKGFKRDANLRMHMRAHGDEYKTAAALTSTGAGMRAAARRCSYSCPAEGCRWNRRHPRFQALKSVVCAKNHYRRSHCPKMYVCGRCGGKQFAVLSDLRTHEKHCGELRWLCSCGTFFSRKDKLMGHVALFAAGHAPVPVAPEASPSTTTTGTTTDRSHRNTCG

SEQ ID NO: 12421 - protein, 561 aa, GIBBERELLA ZEAE PH-1
MAGRTGSIHGLTGKALIIFVSLGVFLFGYDQGVMSGIITGPYFIDYFGHPSKAYVGTMVAILEIGAFITSLMVGRIGDIIGRRRTIFYGSCVFFIGGALQTLATSMPMMMAGRFVAGFGVGALSTIVPVYQSEISPPHNRGKLACIEFTGNIVGYATSVWVDYGCGYIENDYSWRIPLGLQCIMGALLGLGSLVIVESPRWLLDNDHDEEGMVVIANLYGGGDIHDPKARDEYREIKMNVLLQRQEGERTYKDMFRRYKTRVFIAMSAQALAQLNGINVISYYAPYVFESAGWVGHDAVLMTGFNSLTYLMSTIPPWYLVDRWGRRKILLSGATAMAISLSLISYFLFLDIKWTPRLVVLFVMIYNAAFGYSWGPIPWLYPPEILPLSIRSKGASLSTATNWAANWLVGEMTPILQEWIKWRMYLVHAFFCVVSVVVVYFIYPETCGVRLEDMDSLFGDASTVAGTPSLHGTETGSLIRGGSPVGSSRGLIGPSSAIPGLSLDPPTVDDDNKSQMQSGADERSVGGWLSRVVGRNRSDSGSSAQGRYAPLGQQEEGRRNDR

SEQ ID NO: 12422 - protein, 215 aa, Xanthomonas axonopodis pv. citri str. 306
MEAAFAHVSRRDRALGAWMKRIGPIAPQPGWHKPFDPVDALARAILFQQLSGKAASTIVARVEVAIGAQRLHADTLGRIDDAALRACGVSGNKALALRDLARRESEGEIPSLRRLAFMDEEAIVQALVPVRGIGRWTVEMMLMFRLGRPDLLPIDDLGVRKGAQRVDKQEQMPTPKELAVRGERWGPYRTYAAFYLWKIADFSVATKVPTPRSQE

SEQ ID NO: 12423 - protein, 201 aa, Glycine max
MAAARGLVLSRPVTFVTANAKKLEEVRAILGNSIPFQSLKLDLPELQGEPEDISKEKARMAAVQVNGPVLVEDTCLCFNALKGLPGPYIKWFLQKLGHEGLNNLLMAYDDKSAYALCVFSFAAGSNSEPITFSGKTPGKIVPPRGPNDFGWDPIFEPDGYDQTYAQMPKEEKNKISHRSKSLALVKSHFAEAGYTFDIKNV

SEQ ID NO: 12424 - protein, 316 aa, Piromyces sp. E2
MVKVAVLGAAGGIGQPLSLLLKSHPQVTELNLYDIVNSPGVAADLSHICTKAKVTGYKGQENLDAALAGCDIVVIPAGIPRKPGMTRDDLFNINAGIVKGLAEGIAKNCPKAFVCIISNPVNSTVPICAEVFKKAGTYDPKRLFGVTLLDMVRSSTFVSECKGTSPADTKVTVIGGHSGVTIVPLLSQVKGLTFTQEEVEALTHRIQFGGDEVVKAKDGAGSATLSMAYAAARFVDSLIEGAFMKKPVIECAYVESPLAVDDGCSFFASAIELGPSGAEKILPIGPLSEYEQGLYKACVEQLKANIAKGVNFVNQA

SEQ ID NO: 12425 - protein, 561 aa, Serratia marcescens
MTTLKITGMTCDSCAAHVKEALEKVPGVQSALVSYPKGTAQLAIEAGTSSDALTTAVAGLGYEATLADAPPTDNRAGLLDKMRGWIGAADKPSGNERPLQVVVIGSGGAAMAAALKAVEQGAQVTLIERGTIGGTCVNVGCVPSKIMIRAAHIAHLRRESPFDGGMPPTPPTILRERLLAQQQARVEELRHAKYEGILDGNSAITVLHGEARFKDDQSLIVSLNEGGERVVMFDRCLVATGASPAVPPIPGLKESPYWTSTEALASDTIPERLAVIGSSVVALELAQAFARLGSKVTALARNTLFFREDPAIGEAVTAAFRAEGIEVLEHTQASQVAHMDGEFVLTTTHGELRADKLLVATGRTPNTRSLALEAAGVAVNAQGAIVIDKGMRTSSPNIYAAGDCTDQPQFVYVAAAAGTRAAINMTGGDAALDLTAMPAVVFTDPQVATVGYSEAEAHHDGIETDSRLLTLDNVPRALANFDTRGFIKLVIEEGSGRLIGVQAVAPEAGELIQTAVLAIRNRMTVQELADQLFPYLTMVEGLKLAAQTFSKDVKQLSCCAG

SEQ ID NO: 12426 - protein, 112 aa, Glycine max
  unsure (1)..(112): unsure at all Xaa locations
ARVPFVDKEFIRVAGNIDPEGKMINKDEGRIEIWTLQMTFDDEDHPYMAKHILYNHNEQSSDGVGYGXIDGLKAYDEQHATDRFMLNTGHTITCNTYTANELYHYRMISERV

SEQ ID NO: 12427 - protein, 573 aa, Shewanella oneidensis MR-1
MNTHLQLQIQHWLKNDPDPSTQAQLQALIDSGNEAELAARFAGRLEFGTAGLRGVVGAGPMGMNRLVIRQTSAGLGAYLLEQIHDVAERGVVIGYDGRHDSYTFAHDTASVLTAMGIKVRLTAKVAPTPLVAFGVKHFNAAAGIVVTASHNPPQYNGYKVYWENGAQIIPPHDSGIAAKIEQAATQAIPFMELDDAIKQGKLIWLNDDYYETYRRGVMHAKVLQNHTAPEKVSLAYTAMHGVGADMAETVLKDAGFTQVYSVAAQREPDGDFPTVNFPNPEEKGAMDLVIAEAKKHSAMLACANDPDADRFAVAVRKDDGEYQMLTGDQVGVLFGHYLLSHASADQRLVGTTIVSSSLLSKIANGFGVESYTTLTGFKWLMNVGIAQSQPDNQFLFAYEEALGYTVGNMVWDKDGLSALVAFAQLTAELAAKGQTIWDRLEQIYREQGFHLNAQASIALKPETPNIGAYLREHPPLTIGEHAVVSTDDLKALSRRFADGKVENINLPASDVLTYRLSNGARVIVRPSGTEPKIKCYYEVVEPMTAQDTLATAQARATQAMEAFISAHQASLPK

SEQ ID NO: 12428 - protein, 391 aa, Vibrio vulnificus YJ016
MRGHIMSVIKMTDLDLAGKRVFIRADLNVPVKDGKVTSDARIIASLPTIKLCLEAGAKVMVTSHLGRPTEGEYAEEFSLQPVVNYLNDALDCEVKLAKDYLDGLELNAGELVVLENVRFNKGEKKNDEELSKKYAALCDVFVMDAFGTAHRAQASTHGVGMFAEVACAGPLLAAELEALGKAMSNPERPLVAIVGGSKVSTKLTVLESLSKIADQLVVGGGIANTFIAAEGHNVGKSLYEADLVETAQKLMKECAIPVATDVACAKAFDENAEAEIKHVSEVQDDDMIFDLGPDSTAALAEIIANAKTILWNGPVGVFEFKNFEAGTKGISEAIAQSPAFSVAGGGDTLAAIDKFGIKADVSYISTGGGAFLEFVEGKVLPAVEMLEARAK

SEQ ID NO: 12429 - protein, 335 aa, Nepenthes alata
YQWAFAIAAAGITSGSIAERTQFVAYLIYSSFLTGFVYPIVSHWFWSVDGWASASRASNLLLGSGVTDFAGSGVVHMVGGVSGLWGALIEGPRIGRFDRSGRSVILRGHSGSLVVLGTFLLWFGWYGFNPGSFLTILKAYGNNGGYFGQWSAVGRTAVTTTLAGSTAALTTLFGKRLLVGHWNVTDVCNGLLGGFAAITSGCSVVDPWAAIICGFVSSWVLIGFNKLAEKVKYDDPLEAAQLHGGCGMWGLIFTGLFATKKYVSEVYGGSPDRPHGLFMGGGGKLLAAQLIQIVVIFGWVTATMGPLFYGLKWLKLLRVKSEHEMAGMDMTSHGG

SEQ ID NO: 12430 - protein, 369 aa, Magnaporthe grisea 70-15
MAAQKLQTAAVLTDPGPEAKFTVSRIPIPTPGPNELLVRLSCTSVCHSDVSMARGFLGPPNSILGHEGVGRVVAAGSNAVYLIGGEGDASSLIGRRIAVGLLRDLCGTCDYCLAPPEHASESRCSARIFSGLSLDGTLAQYVLVRARYAQFLPASLDAVPDEHVAPVMCGGLTAYRALKVGGPVAGSWVAVSGAAGGVGAFAVAYARAMGCRVVGLDVGEARRAYVLAQGAEAYVDATGADPQAEVKRVTGGAGANMIVVAAGVAAAYDAAMGMLAPFGTLVCVGMPPPGTAVKFDPFEIISYGYKIVGSVTGTRVDVLEALDFVKRGLVVPKVRRAQLSDIQSIIQEVSRSEGEGKFVIDLKDHASAL

SEQ ID NO: 12431 - protein, 311 aa, Haemophilus ducreyi 35000HP
MSNFAMVFPGQGSQAVGMLAELATEFPIVEQVFAEASEVLGYDLWALVQHGTAEELSQTQRTQPALLAASVAIYRVWQQKYPELKPAMMAGHSLGEYSALVCAGVLNFQDAIKLVELRGNAMQQAVPAGSGAMYAIIGLENNLIINACQQAQLELGEVVSAVNFNSPGQVAIAGSKTAVEKAAELCKTAGAKRALPLAVSVPSHCSLMKPAAEELAAALQNISLNPPRIPVIHNVNVAVETDVDAIRERLVEQLYSPVRWSETIEKMAEQGIDTLFEMGPNKVLTGLAGRIAKQLTAKAINDIASLAAVQA

SEQ ID NO: 12432 - protein, 460 aa, Magnaporthe grisea 70-15
MATTKSAFLHRSLKEFPAQVVEAKDKTLVFSDGTKVLDSTCGAAVACIGYNNDLSERVKQAMIRQMDKFPYCNSFFGHEVGEQLAQELMDGTGGAMSKAYIVNSGSEAMEGTMKMARQYFLELQPPQPSRINFIAREGSYHGTTLGALSMSGHVGRRSKFLDLLLPNVARVSRCDAYRGMKEGQSVAEYVEQLADELDKKFQELGPETVCAFVAEPVVGATLGCVPAVPGYFEAMRKVCDKYGALLILDEVMSGMGRSGTLHAWQQEGVVPDIQTIGKGLGGGYAPVAAFMINHRVADTLESGTGEFMHGHTYQGHALGCAAALEVQRIVREENLIDNVKQRGVQLEKLLQQHLGNHPNVGNIRGKGLFWGIEFVADKASKEPFPRSVDLANKVNRAGVKEFGVSLYPGTGTKDGVLGDHVILAPAYNCTADEIEEIVIKTKETVARVLRVKNAETATSA

SEQ ID NO: 12433 - protein, 178 aa, Gloeobacter violaceus PCC 7421
MGEFFTQVGNILGIVTILAAAVTLVAWLTKQKWRFRAFGTTAFLVVLTSGVWTLAILPSIVRPKVPGAEKFSIVFDRGANRAVIVVAPTITVAALATTLRQAAVDLRSTGRSLAGGGTFLIQARTVVHPRPGVTRVLYVGSLERKAGQTQEQEPAIKVDEAALAEARRIAGETAKPVK

SEQ ID NO: 12434 - protein, 539 aa, GIBBERELLA ZEAE PH-1
MDKQIESIKDKLDECGAVTEEHAGMSMALEPYGPSGFRGLFSSPYVAACAAFSAIGGLLFGYDQGVISVTLVMDHFLERFPEVSDDAPGAGFKKGLMTAMITLGAFIGAINQGWIADWISRKRSLMVAVVIFTVGSTLQTAAINYAMLVVGRFIGGIGIGQLSMVVPLYISEISPPEIRGSLLVFEQLSIVIGIVVAFWITYGTKLPFLLQILPGLLLGFGAIFLPYSPRWLASKDREEEALLNLAKLRALPESDPRVQREILDIIAEARFQASALRERHPNLTQRTDLGGKIRLALFSRADCFKPGCWRRTLVGAGLMFFQQFTGINALIYYSPTLFGTMGLGFEMQLIMSGVLNVTQLVGVLTSLWTMDRFGRRSILLVGSLLMFVPHLIIAILVGVFSKDWPSHTAEGWTSVAFLLCYMFTFGASWGPVPWAMPAEVFPSSLRAKGVAISTCSNWINNFIIGLITPPLVRSTGFGAYVFFAVFCLLSFVWVWFSVPETNGKSLEEMDEVFNDRTGTADIAKKDRIMADLYTERQNR

SEQ ID NO: 12435 - protein, 295 aa, Glycine max
  unsure (1)..(295): unsure at all Xaa locations
MALVNPFLSPPRTPLSLRVSAPPNQALLRWTLCSQYSFKPSSLRSKHAMCGATADIKAAPLADGEADHAVLVGPASEDERKGDYDWTQEWYPLYLTLNVPEDAPLGLRVFDKQLVLFKDGNGQFRCYEDRCPHRLAKLSEGQLIDGRLECLYHGWQFEGEGKCVKIPQLPADAKNPSAACVXTYEVRDSQGVIWVWMSLKTPPNVSKLPWFENFARPEFQDISTIHELPYDHSILLENLMDPAHIPISHDRTDWTAKREDAQPLCFEVTERTHRGXAGWWGREKDGSMPNFLRFE

SEQ ID NO: 12436 - protein, 331 aa, GIBBERELLA ZEAE PH-1
MVSFKVFRGTPEGKIVADNVERELENHEVFIETTHSGVCGTDKLYMTSGVVLGHEGVGIVKAVGSAVTNVKNGDRVGFGYTHQICGHCDNCCTDRDQYCRDRQIYGFSDFNNGSFSYGAVWDSKTVCPIPEGYDSADAAPLLCAGSTVWTCLTQYGLRPLESVGIVGIGGLGHLAIKLAAAMGNHVVVFSSSESKRQEAMDYGASEFHVYKSGDKAPEGLKPVKHLLLCGSANIDYSGLASIVDYDGSIYPLTAALEATPVPLTELSLKGIRIQGSLVGSRDSVRKLLEFVARKNITPTTMKYSLNEEGIEKALHDLKDGKVRYRAVLVKE

SEQ ID NO: 12437 - protein, 482 aa, Ralstonia metallidurans CH34
MTETYRNYIDGEWCDSASGRTVDNVNPADTRDIVSRHAASDARDAAAAVAAAAAAFDGWKKTPIGKRAKILNDAAAHLEANADTIATELTREEGKALNLARDEVMRSAQTLRFYAVEGQTFSGESYPNDDPDMLVYSLREPLGVVTVISPWNFPVSIPARKIAPALITGNTVVFKPSSDAPLSGYRLAEAFVRAGIPKGVLNFLTGSAAEVGPTIVESREVRAVSFTGSTSAGEQIHKSVPMTTRTQMELGGKNPLIVMEDADLDRAVDLAVKGGLSLSGQACTGTSRILVMRDVKQAFTEKLVAKVKALKIGSGMTAGMDLGPLATRKQLETVLSYIAIGKQEATLLCGGEQLSDGDFAHGYYVAPTVFTDVTQSMRIAREEIFGPVLAIIEVDSYADAIAQANDTEYGLSAAIATRNPRYMHDFTRDIESGTVKINRTTTGNLVNAPFGGLKRSSTSTFRESGRAGLEFYTQIKTVYQGI

SEQ ID NO: 12438 - protein, 441 aa, GIBBERELLA ZEAE PH-1
MKSVVFKGVKQVALEDRPKPMIQDPTDIIVKVKYTAFELHVFRGHQPSGTGFIMGHEFTGVIDQVGSAVKSLEVGDAIVSPFTVSCGECFFCKRGYSSRCDKSLLFGTVLLDGAQAEYVRIPYAQSTVMKAPKEVEDLKLCLMADIFPTGCYAASNGLDSLDKERVQESIVVLIGCGPVGICALIAALEYKPKAILAVDGIESRLSLAKDLGAEPWNYLTQKQDLEKRVKDLSDGRGADVIIEVVGHSSALDMGFKLLRPWGIISSVGVHNGEIPWTGNEAYGKNLTIKMGRCPVRSIFENSLKLLAKKQHLLEFMTATVMPLSNAPEGYELFDSMKVQKVIFDAEKIRSAFLMIKPDVASSDATDIRFEMKRNGDSYILNGILSSGSDDLRCDVYIVVGKIDASNPNTHRRQFVFLVPVRFPGVAVHHILNVFSAGRTLS

SEQ ID NO: 12439 - protein, 446 aa, Streptococcus agalactiae NEM316
MYQTQTNKEKFVLFLKLFIPVLIYQFANFSATFIDSVMTGQYSQLHLAGVSTASNLWTPFFALLVGMISALVPVVGQHLGRGNKEQIRTEFHQFLYLGLILSLILFLIMQFIAQPVLGSLGLEDEVLAVGRGYLNYMLIGIMPLVLFSICRSFFDALGLTRLSMYLMLLILPFNSFFNYMLIYGKFGMPRLGGAGAGLGTSLTYWAIFIVIIIVMSLHPQIKTYHIWTLERIKAPLIIEDIRLGLPIGLQIFAEVAIFAVVGLFMAKFSSIIIAAHQAAMNFSSLMYAFPLSISTALAITISFEVGAERIQDANTYSRIGRLTAVGITSGTLLFLFLFRENVAAMYNSDPHFVAITAQFLTYSLFFQFADAYAAPVQGILRGYKDTTKPFMIGAGSYWLCALPLAVILEKNSQLGPFAYWIGLITGIFVCGLFLNQRLQKIKKLYY

SEQ ID NO: 12440 - protein, 499 aa, Arabidopsis thaliana
MARKMLVDGEIDKVAADEANATHYDFDLFVIGAGSGGVRAARFSANHGAKVGICELPFHPISSEEIGGVGGTCVIRGCVPKKILVYGATYGGELEDAKNYGWEINEKVDFTWKKLLQKKTDEILRLNNIYKRLLANAAVKLYEGEGRVVGPNEVEVRQIDGTKISYTAKHILIATGSRAQKPNIPGHELAITSDEALSLEEFPKRAIVLGGGYIAVEFASIWRGMGATVDLFFRKELPLRGFDDEMRALVARNLEGRGVNLHPQTSLTQLTKTDQGIKVISSHGEEFVADVVLFATGRSPNTKRLNLEAVGVELDQAGAVKVDEYSRTNIPSIWAVGDATNRINLTPVALMEATCFANTAFGGKPTKAEYSNVACAVFCIPPLAVVGLSEEEAVEQATGDILVFTSGFNPMKNTISGRQEKTLMKLIVDEKSDKVIGASMCGPDAAEIMQGIAIALKCGATKAQFDSTVGIHPSSAEEFVTMRSVTRRIAHKPKPKTNL

SEQ ID NO: 12441 - protein, 492 aa, Lycopersicon esculentum
MDPSKYRPSSAYDTPFLTTNAGGPVYNNVSSLTVGPRGPVLLEDYYLIEKLATFDREKIPERVVHARGASAKGFFEVTHDISHLTCADFLRAPGAQTPVICRFSTVVHERGSPESIRDIRGFAVKFYTREGNFDLVGNNVPVFFNRDAKSFPDTIRALKPNPKSHIQENWRILDFFSFLPESLHTFAFFYDDVCLPTDYRHMEGFGVHAYQLINKEGKAHYVKFHWKPTCGVKCMSEEEAIRVGGTNHSHATKDLYDSIAAGNYPEWKLFIQTMDPEDVDKFDFDPLDVTKTWPEDLLPLIPVGRLVLNRNIDNFFAENEQLAFNPGHIVPGIYYSEDKLLQTRIFAYADTQRHRIGPNYMQLPVNAPKCGHHNNHRDGAMNMTHRDEEVDYLPSRFDPCRPAEQYPIPSCVLNGRRTNCVIPKENNFKQAGERYRSWEPDRQDRYINKWVESLSDPRVTHEIRSIWISYLSQADKSCGQKVASRLTVKPTM

SEQ ID NO: 12442 - protein, 1124 aa, Mougeotia scalaris
MSSSKRSQSSGRSSTQTRIQNRVTQASADAKLSTAFEVSSSSGGDSFDYTKSVTASLNPTEPLAAKSVTAYLQRMQRGSIIQSFGCMMAVEPGTFRIIAYSENVSEMLGVTPQSVPTGDHQNAIGIGTDVRSLLSPSSVSVVEKAVAANDVSMMNPIAVYSLATQKLFFAILHMNDVGLVIDLEPISSSSDSAMFSAGAVQSHKLAAKAISRLQSLPGGDICGLCDVVVEEVRELTGYDRVMAYKFHDDEHGEVVAEIRRSDLEPYLGLHYPATDIPQASRFLFIKNRIRMICDCTSPQVKVVQDSRIPQEMSLAGSTMRGVHGCHTQYMMNMGSTASLVMSVTINDTNEIAGGPGMKGRKLWGLIVCHHSTPRHIPFPIRSACEFLMQVFGLQLNMEVELAAQHREKHILRTQTLLCDMLLRDAPMGIVSQSPNVMDLVKCDGAALLFGGRCWLLGISPTQEQVKDIATWLISSHTDTTGLSTDSLVDAGYPKARELGVDVCGMAAARITENDFLFWFRGHAQKEVKWAGAKDGGSEEDGSRMHPRSSFKAFLEVVKQRSLPWEDVEMDAIHSLQLILRGSFQDIEDKEDRKIVHARLKEMHLQGMEELSSVASEMVRLIETATAPILAVDTAGCVNGWNFKISELTGLSIPEVMGKSLVKDLTHPSSKDTVEKLLYMALNGEEEQNVEIRLKTWGMQQGKGPVILMVNACASRDVSEKVVGVCFVAQDVTGEKIVQDKFTRIQGDYTTIVRSHNSLIPPIFGSDESGFCVEWNPAMERLSGVKREEAIGKMLTRELFGGILRLKNVDGLTKFMIVLNAAMSSHDTDKFPFTFYDRSGKIVEVLLTTSKRCNSEGVVTGVFCFLHTASSELQQALTVQKAAERVAEVKAKELAYIRQEIQNPLDGIHFARSFMEHTVLSEDQKQLIETSATCEKQLRRILADMDLASIEKGYLELETGEFSMATVMNSVVSQGMIQSTQKNLQLYCDTPPDFKSLSVFGDQVRLQQVLADFLLNAVQFTPPSGWVEIKVEPVVKKLPGGVSVANVDFRVSHPGEGLPEDLIDQMFDRADARVKSQEGLGLSICRKLVRLMNGEVQYRREGERNFFLLQLELPLAQRDDQASMK

SEQ ID NO: 12443 - protein, 297 aa, Nepenthes alata
DQFDDTDPREKIKKGSFFNWFYFSVNIGALISSSLIVWVQENLGWALGFGIPAISMGIAIASFFSGTALYRLQKPGGSPLTRMCQVLVASFRKSKLALPEDSNLLYETSDENSVIEGGRKLEHTNDLKCLDKAAVVSDKEIKCEDFSNPWRLCTVTQIEELKILIRMFPIWATGIVFSAIYAQMSTMFVEQGEVMDRTIGSFTIPAASLSMFDTISVIFWVPVYDKILVPLARKSTGKQRGFSELQRMGIGLFISILSMAAAALVEMKRLQLAKELGLVDEDVAVPLSIFWQIPPYF

SEQ ID NO: 12444 - protein, 457 aa, Zea mays
MAPANVGAAQAPSADRRLSTLVGHLLPSSPRRAAADTSATSTLESFPTMASQGSSVFAALEQAPEDPILGVTVAYNKDPSPVKVNLGVGAYRTEEGKPLVLNVVRRAEQMLINNPSRVKEYLPITGLAEFNKLSAKLIFGADSPAIQENRVATVQCLSGTGSLRVGGEFLARHYHERTIYIPQPTWGNHPKVFTLSGLNVRSYRYYDPATCSLHFKGLLEDLGSAPSGSIVLLHACAHNPTGVDPTIEQWEQIRQLMRSKSLLPFFDSAYQGFASGSLDKDAQSVRMFVADGGELLMAQSYAKNMGLYGERVGALSIVCRSADVAVRVESQLKLVIRPMYSNPPLHGASIVATILRDSEMFNEWTLELKAMADRIINMRQQLFDALKSRGTPGDWSHIIKQIGMFTFTGLNSEQVAFMRQEYHIYMTSDGRISMAGLSMRTVPHLADAIHAAVTQLK

SEQ ID NO: 12445 - protein, 475 aa, Ostreococcus tauri
MSERRIARGRDARARVVTRMDASAAEAPMRSPNAIANTKTVAAVILGGGAGTRLYPLTKSRAKPAVPIGGAYRLIDVPMSNCLNSGISKVYILTQFNSASLNRHLARTYNFGNGIMYGGNGFVEVLAATQTPGQGGKEWFQGTADAVRQYSWLFNDVKNKDVEDIVILAGDHLYRMDYMKFVEAHRESNADISVGTLPIDEARASDFGLMKIDSTGRIVEFTEKPKGDALQAMKVDTTVLGLTADEAKEKPFIASMGIYVFKKSALVKFLEKDYPEDNDFGGEIIPRAAADGAKVQAYLFNDYWEDIGTMKSFFEANLNLAKDPPNFEFYNAEAPIYTSPRFLPPAKVERCHVKESIISHGASLADCQVEESIIGLRSVVNKGCRIKRAMIIGADFYESDEKKASLLASGEVPVGIGEGTIIENAIIDKNARVGKNCVITNAAGVEDLADEERGVFIRNGIITILRNCTIPDGTI

SEQ ID NO: 12446 - protein, 475 aa, GIBBERELLA ZEAE PH-1
MRLLTRPSSCAIARGLCRNSTFPCSISRASVSTLHAKINSPPPRIVRSEGCWLETHQGHRILDASSGASVVSIGHNDSRVKEAIIAQLDQVAYCYNPFFTTEAAEKISRFLTDSTDGHMSKVFVVSSGTEAVEAALKIARQYFTELPTPQPNRTKFIARKQSYHGNTLGSLSVGGHKARRGVYEPVLATNVSHVSPCYPYREMKEGETEEQYVERLAKELDDEFKRVGPDTVCAFIAETVSGTSLGCAPAVPGYFKAMREVCDRHGALLIMDEVMSGMGRTGTLHAWEQEGVVPDLQTVAKGLGAGYMPVGALLVGNKVANTLEQGSGAFSHSQTYQGHPVACAAAFSVQMAMKEDKMLQNTQEVGKVLGKKLKERLAGHKNVGDVRGRGLFWGLEFVRDKDTKEPFPLDDQIAGKLHKAGLTSDHGISLIPATGNVDGMQGDMVIVSPPLTVTKEEVDMVVDRIEKVVTSVLGS

SEQ ID NO: 12447 - protein, 161 aa, Ustilago maydis 521
MVSFYDLKAKKPSQEDYTFDQLKGKVVLVVNTASKCGYTPQFAELEELNKKYADQGLQIIGFPCNQFAGQDPGSDESIGEFCQRNYGVTFPMMAKSDVNGSNTNEVFQFLKKEKAGILGTEMIKWNFTKFLIDKEGNVIERYGSNTKPSAIAPAIEKLLSQ

SEQ ID NO: 12448 - protein, 408 aa, Bordetella bronchiseptica RB50
MTDTTSPRRLQTRLLHAGKKPAYDGGAPVNPPVVRASTVIFDNVAQQRDLRARRSGERLFTYGARGNPTNFALEDAVSELEGAYRTKLFPTGLAAIAMALLSYLKPGDHLLMSDAVYEPARKLVHSFLAPYQIRCTFFAADGSDVQDKLEPATRMIYAECPGSLVYEMCDLPRLAEIAHRHGALLACDNTWGSGCQYRPLALGADVSIMAATKYLSGHSDVMMGTVATTEAAWPALSERSDAFGMTVSPDDAYLVLRGIRSLAARLAMHERHALRIAGYLQERPEVRTVFCPALPGHPGHDIWRRDCTGTNGLLSFELQAGFDRAAAEQWIDSLALFGLGASWGGYESLVTLADLGAARSVADWSGRGVVVRLHIGLEDPQDLIADLDQAFAAIGPAGRHNTVSRSEA

SEQ ID NO: 12449 - protein, 203 aa, Triticum aestivum
  unsure (1)..(203): unsure at all Xaa locations
KKKYGQDATNVGDEGGFAPNIQENKEGLELLKTAIEKAGYTGKVVIGMDVAASEFYSDKDQTYDLNFKEENNDGSQKISGDSLKNVYKSFVSEYPIVSIEDPFDQXDDWVHYAKMTEEIGEQVQIVGDDLLVTNPTRVAKAIKEKSCNALLLKVNQIGSVTESIEAVKMSKRAGWGVMTSHRSGETEDTFIADLAVGFVHGSD

SEQ ID NO: 12450 - protein, 272 aa, Vibrio vulnificus YJ016
MEHKNIAFIGAGNMVRAIVSGLVADGYPADKITATAPSETRRLPLEQQFGIQTTSDNFMAATQADVIVLSVKPQMMEEVCKPLQSVDFSNKLVISIAAGINCARLNEMLATQLNLVRVMPNTPSQLGLGMSGLYAPVSVAEQDRHFAEQLMQAVGKTCWVDEESGINHVIAAAGSAPAYFFLFMEAMQAEAMAQGFDKQTARLLVQQSALGAASMVVENPDTELATLRENVTSKGGTTAEALRTFNEHQLSDIVAKAMQAAVARAQEMEKLF

SEQ ID NO: 12451 - protein, 946 aa, GIBBERELLA ZEAE PH-1
MTTFDYFSHVELPTPTLSPEEACALLHQQFGIAANLRPLGSQQDQNFLVLTAAHTEPLGVLKISNPAFSGSEIEMQDAAAIAVARAEPSLRIPHVIEGPRGAMSGWWQTSQGRLHCRIISFVSGTTLTGSHYLSPAVVQRLGELSAAVSLALATETHPAAGRTLQWDLQHAERVIVTITATEPDVDVRALTAQASQHALSLLRPISDRLPRQLGHFDVTDDNVLRPDGNALSLPDAVIDFGDVVESWAVAEIAITVSSMLHHADACYRTVLPAIVAFNRRRRLSDDEITALWPLVVLRGVVLVLSGRQQVRLDVNNEYAKRALDRESTILRRATEVPLEVVTAQIRHTLGLPVGIAPRWSGKSILAAPRSVEVLDGSTLSTLADDGAWLQNDAVERAAQHLLAQGADMVVLPALRPVLLGAPARTQQLPSTVPTSAAAWFASAATLEIPANLCVRQAGTALPVGVATVAAGSRIDVLLTALDQANVPTAIPAVDLPGWSVVIGDATEALGVTPPTNDVDDKGLLERREAVVAEVQEHYYARPPQIERGWREYLMDVDGRVYLDMVNNVASVGHAHPRISAAIARQTRLLNTNSRFHYAAITRYAERLAAQLPDPLDTVFFVNSGSEAVDLAIRLALAATQRQHVVAMAEAYHGWTYASDAVSTSIADNPHALQTRPDWVHTVEAANAYRGRYRGAEASKNYAADAVARLQSLAAEGHAPAAFLSETYYGNAGGIALPDGYLREVYAAVRNMGGVTIADEVQVGFGRLGSWFWGFQQQAVVPDIVAVAKSIGGGFPLGAVITSRTIADQYRSQGYFFSSTGGSPLSSVVGLTVLDIIQEEQLQENARVIGACLKTRLQALGKRHPLIGTVHGDGLYLGLEFVRDRTSLEPATKETRAICNRLLELGVIMQPTGDHQNVLKIKPPLCITQQSVDYFVNMLDYVLLKGF

SEQ ID NO: 12452 - protein, 466 aa, Vitis vinifera
MALATRRFFNTICRGTRSFGALPEGIPSSSQHLINLEYEYSAHNYHPIPIVFSQAKGSTIWDPEGKKYLDFLSAYSAVNQGHCHPKVLKALVEQAERLTLSSRAFYNDRFPIFAERLMNMFGYDMVLPMNTGAEGVETALKLARKWGYEKKKIPKDQAIIVSCCGLLHGRTLAVISMSCDNEATRGFGPLLPGHLKVDFGDEVALEKIFEENGDRIAGFLFEPIQGEAGVIIPPDGYLKAVRELCSKFNILMIADEIQSGLGRSGRMLACDWAEVRPDVVILGKALGGGVIAVSAVLADKDVMLSIQPGEHGSTFGVNPLASAVAVASLDVITEEGLSERSDQMGQELRNQLMKIHQLFPNLIKEVRGKGLFNAVELNSKALFPVSAYDICLKLKERGVLAKPTHDTIIRLTPPLSISLDELQEGSNALRDVMEFDVPKMQKAKHKRVPQTTTNICDRCGRNMDDS

SEQ ID NO: 12453 - protein, 259 aa, Haemophilus ducreyi 35000HP
MIKDTQSTAENQANETTHFGFKTVAKEEKQQLVANVFHSVAAKYDLMNDLLSFGIHRIWKRFTIDCSGVRKGQKVLDLAGGTGDFSAKFSRIVGETGQVVLADINSSMLEVGRDKLRNLGVVGNINYVQANAEHLPFADNTFDCVVISFGLRNVTDKDKALKSMYRVLKPGGRLLVLEFSKPIFDPISQLYNFYSFNILPKVGGIVVNDAESYRYLAESIRMHPKQDELKTMMEHAGFESVNYYNLSAGIVALHRGYKF

SEQ ID NO: 12454 - protein, 369 aa, Gloeobacter violaceus PCC 7421
MQVKAAVAMEAGKPLQIESVELEGPKAGEVLVEIKATGICHTDAFTLSGADPEGLFPAILGHEGAGVVVEVGPGVTSVKLGDHVIPLYTPECRQCEYCLSRKTNLCQAIRTTQGRGVMPDGTSRFSLGGEPLYHYMGTSTFSNFTVLPEIAVAKIREDAPFDKVCYIGCGVTTGVGAVLYTAQVEPGANVVVFGLGGIGLNVIQGCRMVGADKIIGVDTNPAKKELAEKFGMTHFVNPKEVEGDLVPYLVELTKGGADYSFECIGNVNVMRQALECCHKGWGVSVIIGVAGAGQEIRTRPFQLVTGRIWKGSAFGGARGRTDVPKIVDWYMEGKINIDDLITHVLPLGEINQAFDLMHEGKSIRTVVTF

SEQ ID NO: 12455 - protein, 375 aa, Mesorhizobium sp. BNC1
MRTRAAVAVAAGKPLEIMEVDLDGPREGEVLVEVKATGICHTDDFTLSGADPEGLFPAILGHEGAGVVVDVGPGVTSVKKGDHVIPLYTPECRQCPSCLSRKTNLCTAIRATQGQGLMPDGTSRFSLNGEKVHHYMGCSTFSNFTVLPEIAVAKVNPDAPFDKICYIGCGVTTGIGAVINTAKVEIGSTAIVFGLGGIGLNVIQGLKLAGADMIIGVDLNNDKKEWGERFGMTHFVNPKEVGGDLVPYLVNLTKRGADTIGGADYTFDCTGNVTVMRQALEAAHRGWGESIIIGVAGAGQEISTRPFQLVTGRVWKGTAFGGARGRTDVPKIVDWYMDGKIEIDPMITHILSLDEINKGFDLMHSGESIRSVVVY

SEQ ID NO: 12456 - protein, 206 aa, Schizosaccharomyces pombe
MNANINRYDYLFKLLLIGDSGVGKSCLLLRFADDTYTESYISTIGVDFKIRTFELEGKTVKLQIWDTAGQERFRTITSSYYRGAHGIIIVYDVTDQDSFNNVKQWLQEIDRYAVEGVNRLLVGNKSDMVDKKVVEYSVAKEFADSLNIPFLETSAKDSTNVEQAFLTMSRQIKERMGNNTFASSNAKSSVKVGQGTNVSQSSSNCC

SEQ ID NO: 12457 - protein, 501 aa, Arabidopsis thaliana; identical to SEQ ID NO: 227

SEQ ID NO: 12458 - protein, 485 aa, Burkholderia cepacia
MLKKSTTSSTANMCRVSVGSRSSSPLNNAVIAKVHEAGRAEVDAAVAAAQAALKGAWGRMSLAQRVEVLYAVADGINRRFDDFLAAEVEDTGKPMSLARHVDIPRGAANFKIFADVVKNVPTEFFEMPTPDGVGAINYAVRRPVGVVGVICPWNLPLLLMTWKVGPALACGNTVVVKPSEETPQTAALLGEVMNTAGVPPGVYNVVHGFGPNSTGEFLTSHPDVNAITFTGETGTGEAIMKAAADGARPVSLELGGKNAAIVFADCDLDKAIEGTLRSCFANCGQVCLGTERVYVERPIFDRFVSRLKKGAEGMQLGRPEDLATGMGPLISQEHREKVLSYYKKAVEAGATVVTGGGVPEMPEALKGGAWVQPTIWTGLGDDSVVAREEIFGPCALVMPFDSEEEVIRRANDNDYGLARRIWTTNLSRAHRVAGAIEVGIAWVNSWFLRDLRTAFGGSKQSGIGREGGVHSLEFYTELKNVCIKL

SEQ ID NO: 12459 - protein, 539 aa, GIBBERELLA ZEAE PH-1
MNSNQLDPRQHPLEAIGAAIGAEEQTELQTRSSNFQGADEGPASVIAKVSGAQSGGKREDGSSDLPNNKGTPRPNPTYSKTVGGLPLVSDTFLLQKQQHFNRSKTLERVVHSCGAGAFGYFECTRDVTELTKANFLSSVGEKTPVFVRFSTATLGREFPDASRNPRGFAIKFYTKEGNYDIVGLNFPVFFCRDPIQGPDVIRSQSRNPSNFLLDHDALFDFLANNPEANHAGIMLFSDHGTPQGWRFSHGYGCHTFKWVNADGEFMYVKYHFIAKHGQKQFADSEAMQMCGEDPDYSKRDLWEAIEKGEDIEWMVHVQIMDPRQADPDTLGFDPFDATKIWPRSEFRMKELGRLVLNKNPENFHRDVEQAVFSPGSMVPGIEDSPDPLLQFRMFLYRDAQYHRVGTNLHQIPVNCPFMAKSYASPFDGPMHVDTDRAGSKQYPLNSFAHKFRPDTDEAPYEVNDNFIKYLAQVYIISVDYAQGIYNLLDEPRFEFSKVKKLGETKFAEAADDWYKEPKFRDKPGSKLVGYPPEIAVYQP

SEQ ID NO: 12460 - protein, 474 aa, Oryza sativa
MNLAGFLATPATATATRHEMPLNPSSSASFLLSSVRRSLVASLRKASPAAAAALSPMASASTVAAENGAAKAAAEKQQQQPVQSTLGPGVTVAKRLEKFKTTIFTQMSMLAIKHGAINLGQGFPNFDGPDFVKEAAIQAINAGKNQYARGYGVPELNSAIAERFLKDSGLQVDPEKEVTVTSGCTEAIAATILGLINPGDEVILFAPFYDSYEATLSMAGANVKAITLRPPDFSVPLEELKAAVSKNTRAIMINTPHNPTGKMFTREELEFIATLCKENDVLLFADEVYDKLAFEADHISMASIPGMYERTVTMNSLGKTFSLTGWKIGWAIAPPHLTWGVRQAHSFLTFATCTPMQAAAAAALRAPDSYYEELRRDYGAKKALLVNGLKDAGFIVYPSSGTYFVMVDHTPFGFDNDIEFCEYLIREVGVVAIPPSVFYLNPEDGKNLVRFTFCKDDETLRAAVERMKTKLRKK

SEQ ID NO: 12461 - protein, 398 aa, Rhodopseudomonas palustris CGA009
MTKTFRTLDDVDVKGKRVLLRVDLNVPMDAGKVTDTTRLERVMPTITELSGKGAKVILLAHFGRPKGRDDKNSLKPVAAALADVIKKPVGFADDCIGEPAAKAIAAMADGDILCLENTRFHPEEEKNDPAFVAKLAELGDIWVNDAFSAAHRAHATTEGLGHKLPAYAGRTMQAELVALNKALEAPVKPVIAIVGGAKVSTKIDLLENLVTKVQALVIGGGMANTFLHAQGVKVGKSLCEKDLAPTALRILDKAEAANCAIILPVDATVAYHFEANAPSFAYGLDAIPDDAMILDVGPRSIERIHAAIDDAATLVWNGPVGAFELTPFDKGTVEAAKHAAKRTKAGKLVSVAGGGDTVAALNHAGVADDFTYISTAGGAFLEWMEGKPLPGVEVLQVK

SEQ ID NO: 12462 - protein, 85 aa, Triticum aestivum
VTEAIQACKLAQERGWGVMVSHRSGETEDTFIADLVVGLCTGQIKTGAPCRSERLAKYNQLMRIEEELGDEARFAGHNWRNPSVL

SEQ ID NO: 12463 - protein, 355 aa, Streptomyces halstedii
MKALVLSGGSGTRLRPITHTSAKQLVPVANKPILFYVLESIAEAGITDVGIVVGHTAPEVQDAVGDGSAFGVDVTYIAQDEPLGLAHAVRISRDYLGDDDFVMFLGDNFIIDGVTGLVDRFRDERPDAQILLTRVPDPRAFGVAVLDEQGRVIGLEEKPEHPRSDLALAGVYFFTPLIHEAVWAVKPSWRGELEITDSIQHLIDTGADVRSHIIDGYWKDTGNVVDILEVNRIILESVETAIDGDVDADSEIIGRVVIEKGATVKGSRIVGPALIATGTEIRDSYVGPFTSVAENCRIHDSELEFSIMMRDSSLTGIRRIEASLIGRHVHGTAVPRVPNAHRLVLGDHSTFQISS

SEQ ID NO: 12464 - protein, 652 aa, Zea mays
MVPPLLQRVGCLGPSMGRRLALASATGQVIDAVGGEATTRKKLRVQELSRTPLPPPPPKKRIFLRHCRLPSARVASRRGVSGAMNVPVVDPYQGEFPETIEEYLHHGTMKCIAFNRKGTLLAAGCSNGSCIIWDFETRGLAKEFRDKDSTAPITSVSWSRYGHRLLASATDKSLTLWDVPTGEKIARITLQQTPLRASLQPGSPTPSICLACPLSSAPLLVDLNTGSTTVLPVSVSENGNPPAPNPRNKFADGTPPFTPTAATFDKHGALIYVGNSKGEILIIDSKSIQVHAIVPIPGGSVVKDIVLSRDGQYLLTNSNDRVIRVYRNILPVKGSREEIRNISSNSNEYGSHYDKLKANGTSCLILSCELLDAITKIQWKAPCFSGNGEWIVGASANKGEHRLQIWNQAGRLVKMLEGPKEALIDLAWHHVEPTIATVSVTGFVYIWAKEHVENWSAFAPDFVELEENEEYAEREDEFDLNPREEQAEKVVIDEDADVDIETSEKNTVFSDVEDSVDEISYLPAIPYPDSPDEQPEKCLGSSKLEDSNHSGSPSSMDAVQNGQAIPPASSPMEVDNSTAEDPEEGPNSKRKRRLSVKGLELQQSEKGKKGSTKNKSLGKSTKSSAKKMESANGNSSAFDDEATEDDEINIDS

SEQ ID NO: 12465 - protein, 429 aa, uncultured bacterium pCosAS1
MTTDDLAFDRQHIWHPYTSMTQPLPVYPVVEAHGCELTLASGEQLVDGMSSWWAAIHGYNHPRLNAAMKAQIDRMSHVMFGGITHQPAVDLCRRLVAMTPETLECVFPADSGSVAVEVAMKMALQYWHAKGESRQRFITFRNGYHGDTFGAMSVCDPDNSMHSLWKGYLPENLFAPAPQSRFDGAWDEMDMVGLAPLMAAHRHEIAAVILEPIVQGAGGMRMYHPEWLKRIRRMCDREGILLIADEIATGFGRTGKLFACEHAGITPDILCLGKALTGGTMTMSATLTTRQVAETISNGEAGCFMHGPTFMGNPLACAVASESLALLESGEWQDQVAAIESQLQEELAVARDSEFVADVRVLGAIGVVETTHPVNMAALQRFFVARGVWVRPFGKLIYLMPPYVIRPDQLSKLTRAVVDAVQAPAHFTR

SEQ ID NO: 12466 - protein, 253 aa, Zea mays
MDVKCRRLEGKVAIVTASTMGIGLAIAERLGLEGAAVVISSRKQKNVNEAVEGLRAKGITAVGAVCHVSDAQQRKSLIETAVKNFGHIDILVSNAAANPSVDSILEMKESVLDKLWDINVKASILLIQDAAPHLRKGSSVIIISSIAGYNPEQGLTMYGVTKTALFGLTKALAGEMGPDTRVNCVAPGFVPTRFASFLTENETIRKELNERTKLKRLGTVEDMAAAAAFLASDDASYITAETIVVAGGVQSRL

SEQ ID NO: 12467 - protein, 400 aa, Crocosphaera watsonii WH 8501
MSKKTIANLSAADLAGKRVLVRVDFNVPFDNGSITDDTRIRAALPTIKELISNGAKVILCSHMGRPKGKVVDSMSLTPVAARLGELLGQKVTMCDDCVGESVTAAIGGLENGQVALLENLRFHSEEEGNDPEFAKQLAANADLYVNDAFGTAHRAHASTEGVTHYLSPSVAGYLIEKELQYLQAAIENPQRPLVAIIGGSKVSSKIGVIETLLEKCDKLIIGGGMIFTFYKARGLNVGKSLVEDDKLELAKSLEAKAKEKGVDFLLPSDVVLADNFAPDANAKTTSIDNIEDGWMGLDIGPDSIKLFQDALSDCKAVIWNGPMGVFEFDKFAAGTEAIARTLAELTGTGTTTIIGGGDSVAAVEKVGVAEKMSHISTGGGASLELLESKVLPGIAALDEA

SEQ ID NO: 12468 - protein, 270 aa, Methanosarcina mazei Go1
MINRKIGFIGAGKMGSALMQGIIKAGIVQPENIGASDVYEPFLKELQTKLGIRVSTDNTVIVRESDILILAVKPQTLGSVLENLKNEITSEKLVISIAAGVPLSTYEGALLEGTRVVRVMPNIAATVSEAASGISPGKNATPEDMKDALTIFSAVGTAVQVPESLMDAVTGLSGSGPAFIFPVIEAMADGAVLEGMDRKSALTLAAQTVLGAAKMALETGMHPGELKDMVTSPAGTTIQGVHALEEAGIRAAFMNAVIRASERSRELGKK

SEQ ID NO: 12469 - protein, 454 aa, Haemophilus ducreyi 35000HP
MTITTPIKAVLASNQHFLDRQDKMESNVRSYPRKLPFAYAKAQGCWVTDVEGNEYLDFLAGAGTLALGHNHPILMQSIKDVLDSGLPLHTLDLTTPLKDAFTEELLSFFPKDEYILQFTGPSGADANEAAIKLAKTYTNRGNIIAFSGGFHGMTHGALSLTGNLGAKNAVQNLMPGVQFMPYPHEYRCPFGIGGEAGAKAVERYFENFIEDIESGVVKPAAVILEAIQGEGGMVPAPISFLQKVREVTQKHGILMIVDEVQAGFCRSGKMFAFEHAGIAPDIVVMSKAIGGSLPLAVLAIKKQFDAWQPAGHTGTFRGNQLAMATGYASLKIMRQENLAQNAQARGEYLTNALRELSKTFACIGNVRGKGLMMGIDIVDERQAQDATGAYPQDCELAIAIQKCCFNNKLLLERGGRGGNVVRVLCPVNINQAECEEFIKRFTQSVADAIKAVRG

SEQ ID NO: 12470 - protein, 291 aa, Magnaporthe grisea 70-15
MAERQLQQILTQLKSQQLAYADAAKLLSKAKLLLLQLGALTPKTTTTTSSSTSSGKGKSSSSGGASPSAAQLALARETYEQGALYSIRAKNADGFTRYVQQLSPLYELPANVLPPNLPERNKVTGLYLLLLLTQGRYAEFHSELEALSTREGGGGSVDVEGDRYLGYPIRLERWLMEGSYDRVWKAMKKGEVPCEEYGVFSEILTIQIRAEIASSSERAYPSLPISSTKSLLFLESEGAVVEFAKRRGWTVRDGHIYFPTAGAEDGEPEKPVSLSFIENTLGYARELETIV

SEQ ID NO: 12471 - protein, 496 aa, Bradyrhizobium japonicum USDA 110
MDHEKVNILLVDDQPAKLLAYEVILKELGENLVIASSGREALEVLLKTEIAVILVDVCMPELDGFELAAMIREHPRFQKTAMIFISAIQVSDIDRLRGYEMGAVDYVPVPVVPEVLRAKVKVFAELYRKTRELERLNHDLEDRVRARTAELENSTAKLRESEERRSMAIAAGKMGSWDWDWVSGDWMWDEGQYRIFGVSPESFEVNPANVQALLHPDDVDQLRKAIAEFSKGTRAYETEFRIVRPDGDVRWCVGTAAATADNSGRVVRVSGVTVDITERKRAEERQNLLAREVDHRAKNALALAQSIVRLTRADEVKAYVNAVEGRINALARVHTILSLSSWQGAELSKLIDEELAPYSLGGQIKLAGPEVQLLPATAQTLALALHELFTNSAKYGALSTRSGRLMIGWQVEEDHLTLIWEESGGPLVRTPKSRGFGTRSLLASVESQLGGKAQFDWRAEGLLCRLEVPLTRKTPTGAAHGKFEGTTSLALQRASG

SEQ ID NO: 12472 - protein, 294 aa, Nicotiana tabacum
MDQYEKVEKIGEGTYGVVYKARDRVTNETIALKKIRLEQEDEGVPSTAIREISLLKEMQHANIVRLQDVVHSEKRLYLVFEYLDLDLKKHMDSSPEFSEDPRLVKMFLYQILRGIAYCHSHRVLHRDLKPQNLLIDRRTNALKLADFGLARAFGIPVRTFTHEVVTLWYRAPEILLGSRHYSTPVDVWSVGCIFAEMVTQRPLFPGDSEIDELFKIFRVMGTPNEDTWPGVTTLPDFKSAFPKWPSKDLATIVPNLDGAGLDLLDKMLRLDPSKRITARNALEHEYFKDIGYVP

SEQ ID NO: 12473 - protein, 212 aa, Oryza sativa
MAEEEDLADMPRVVGVLAALLERVTERNDAAAAELELAVAGAPAASAFRATTKPDITVRAYMARIARFAGCSPACYVVAYIYLDRLLRRRRRACAFSVDSYSVHRLLITAVLAAVKFMDDICYNNAYFAKVGGVSLPEMNYLEVDFLFGVGFDLNVSPETFGHYCAVLQSEMLCLELEPPPSPSPAPAARLHCFLSEDDTSSSGSTQHQLAA

SEQ ID NO: 12474 - protein, 439 aa, Synechocystis sp. PCC 6803
MCCWQSRGLLVKRVLAIILGGGAGTRLYPLTKLRAKPAVPLAGKYRLIDIPVSNCINSEIVKIYVLTQFNSASLNRHISRAYNFSGFQEGFVEVLAAQQTKDNPDWFQGTADAVRQYLWLFREWDVDEYLILSGDHLYRMDYAQFVKRHRETNADITLSVVPVDDRKAPELGLMKIDAQGRITDFSEKPQGEALRAMQVDTSVLGLSAEKAKLNPYIASMGIYVFKKEVLHNLLEKYEGATDFGKEIIPDSASDHNLQAYLFDDYWEDIGTIEAFYEANLALTKQPSPDFSFYNEKAPIYTRGRYLPPTKMLNSTVTESMIGEGCMIKQCRIHHSVLGIRSRIESDCTIEDTLVMGNDFYESSSERDTLKARGEIAAGIGSGTTIRRAIIDKNARIGKNVMIVNKENVQEANREELGFYIRNGIVVVIKNVTIADGTVI

SEQ ID NO: 12475 - protein, 624 aa, Methylococcus capsulatus str. Bath
MCGISGLVQLEGVADTSAMRRSVETMVKALAHRGPDDSGVAGDGSAVFGMARLAIRGCHDGRQPMVDAETGVMMVCNGEIDNHAELRGWLAERGRAVEHATDVAVIPGLYLELGDGFVERLVGAFALAVWDPRRGRLLLARDRAGERPLFYACRDGRVSFASQAAALVAGSPEPYPADEAAVQAFLKAGYFEAPASPFAGMRKVLPGERIAIDVKGVERSRYWRLNFTRGPARKNPLDEFDAVFREAVRRQSEVEVDFGAFLSGGVDSSLVTAVMRSVHPDRKLKAFGLRFSESSYDEGVFAERVAESLGVDYTPIWVRPEDFPETLADLVRQSGEPLADPAWVPTALLARRASDEVRVALVGEGADELFGGYPTYFGARLAERYSRLPGGLRALIRKAVEAWPVSDKKVTVSFLLKRFVQGDELDFLARHVLWTSSIPPALLRRLGVTPPETPHVAGPQETMLDRLQQHDLETSLAEGLLTKADRASMRSALELRAPFLDKDVIEFAATLPERERVQGLETKVFLKRVALRYLPKDIVYRKKRGLSVPLSAWLRGPLHDWAEARISSPRLEELGINRAAALELLREHERRSADHARALWTLIVVSEWLEWKAGMEAHPAAFTA

SEQ ID NO: 12476 - protein, 474 aa, Rhodopseudomonas palustris CGA009
MVRAMTAPGSNIAAGALAPAKSSAWRTELIETLWLAWPMALTQLGQIAMMTTDLALIGRLGDAAVAAAALAHFVLFSTFTMGLGLVSAVTPLAAQAFGARAPRQVRASLRVGLWAGVIAGVPLTLGQLYGEELLVALGQNPATSRLAGDYLDGLAWSLVPGWLFIALRGLMGAVNRPEPALWIMLTAIPINLGLAYVLIHGSFGLPRLEIFGAGLATSIVSWAMCIAAAVVCVTMRPFRKYQVFGELFRFDGELMRRLLQLGLPISGASVLEYGVFGAAALLMGKFGTTALAAHQIALQVAAIMFMVPMGISVAATVRVGHAVGRGDPPSARRAGFAAIGLGFVFMAAMTLLVALTRHQIPQLFLGDSDTSIETATLTAALLIVGASFFIADGLQVVANGALRGRNDTKVPLLFAVLGFWVIGFPFCWVLGFHTDLGPFGVWIGLAVGLVVYAALLVWRFHRLTRDAMAAAVAA

SEQ ID NO: 12477 - protein, 234 aa, Enterococcus faecalis V583
MTQLFGEFFGTMILVLLGDGVCAAVNLKKSKAFASGWVVIALGWGAAVTLAVYMSGYMSPAHLNPAVTVAMAITGNFEWGMVLPYIVAQVLGGFIGGLVVWLAYLPHWNITEDKGAILGTFATGPAVRNYPANVLTEIIGTFVLVFGLLAFSQNDLAAGINPMLVGILVLGLGLSLGGPTGYAINPARDLGPRLAHQIIPVKTKGDSDWAYSWVPIVGPILGASLAAVIYLFTI

SEQ ID NO: 12478 - protein, 516 aa, Thermus thermophilus HB27
MTVEPFRNEPIETFQTEEARRAMREALRRVREEFGRHYPLYIGGEWVDTKERMVSLNPSAPSEVVGTTAKAGKAEAEAALEAAWKAFKTWKDWPQEDRSRLLLKAAALMRRRKRELEATLVYEVGKNWVEASADVAEAIDFIEYYARAALRYRYPAVEVVPYPGEDNESFYVPLGAGVVIAPWNFPVAIFTGMIMGPVAVGNTVIAKPAEDAVVVGAKVFEIFHEAGFPPGVVNFLPGVGEEVGAYLVEHPRTRFINFTGSLEVGLKIYEAAGRLAPGQTWFKRAYVETGGKDAIIVDETADFDLAAEGVVVSAYGFQGQKCSAASRLILTQGAYEPVLERVLKRAERLSVGPAEENPDLGPVVSAEQERKVLSYIEIGKNEGQLVLGGKRLEGEGYFIAPTVFTEVPPKARIAQEEIFGPVLSVIRVKDFAEALEVANDTPYGLTGGVYSRKREHLEWARREFHVGNLYFNRKITGALVGVQPFGGFKLSGTNAKTGALDYLRLFLEMKAVAERF

SEQ ID NO: 12479 - protein, 509 aa, Zea mays
  unsure (1)..(509): unsure at all Xaa locations
GRDPLFFPPPIPNQPKPSSPPRLRLRHRALLFNGDGPRTPLASPPPSCPPGSVPEWYRRAHGGGSRGAGGWWCAPRIREIFMPALSSTMTEGKIVSWSAGEGDXVSKGDAVVVVESDKADMDVETFHDGXVAAVLRPGWASRRPVGAPIALLAESEEEVPLALAKAQELSNGQPAAGASXAPTEDAAATPPPPPAPATAPTPXPWGTKGIANWHAKKLAKQHRVDLAKVTSTGTYDRITPADIEAAAGIKPKSEPTPAVAAAAPPPVAAPSVGAVPQSAVLPPVPGATVVPFTTMQAAVSKNMVESLAVPAFRVGYPIITDKLDELYEKVKPKGVTMTVLLAKAAAMALAQHPVVNASCRDGKSFTYNSNINIAVAVAIDGGLITPVLQDADKLDIYLLSQNWKDLVKKARAKQLQPNEYSSGTFTLSNLGMFGVDRFDAILPPGQGAIMAVGAXSKPTVVADKDGFFSVKSKMLVNVTADHRIVYGADLAAFLQTFAKVIEDPESLTL

SEQ ID NO: 12480 - protein, 406 aa, Vibrio vulnificus YJ016
MSVTASQVHGAVQTLTQSSDTLFLLLGAIMVFLMHAGFAFLEVGTVRHKNQVNALVKILADFGISTLAYFFIGYWVAYGAHFFADAETLAQGNGYELVKFFFLLTFAAAIPAIVSGGIAERARFYPVLIATFFTVGIVYPLFEGIIWNGNFGVQAWFEATFGVGFHDFAGSVVVHGVGGWIALVAVIFLGMRRGRVRAGKHTNFAPSNIPFLALGAWILCVGWFGFNVMSAQTLNGISGLVAMNSLMAMAGGIVAALIAGKNDPGFIHNGPLAGLVAVCAGSDLMHPLGALVTGSVAGVLFVYLFTYLQNKTKIDDVLGVWPLHGVCGAWGGIAAGIFGQSSLGGLGGVSFTVQLLGTLLGISVALIGAGIVYGAINRFSGLRLSQEDEFNGADLAIHKISSVNAE

SEQ ID NO: 12481 - protein, 492 aa, Zantedeschia aethiopica
MDPYRQRPSSAFNSPFWTTNSGAPVWNNNNSLTVGARGPILLEDYHLLEKLAQFDRERIPERVVHARGASAKGFFEVTHDVSHLTCADFLRAPGVQTPVIVRFSTVIHERGSPETLRDPRGFAVKFYTREGNFDLVGNNFPVFFIRDGIKFPDMVHALKPNPKTHIQENWRILDFFSHHPESLHMFTFLFDDIGIPTDYRHMDGSGVHTYTLVSKEGKAHYVKFHWKPTCGVKSLLDDEAVVVGGANHSHATKDLTDAIAAGNYPEWKLYIQIMDPDHEDRFDFDPLDVTKTWPEDILPLQPVGRMVLNKNIDNFFAENEQLAFCPAIIVPGIYYSDDKLLQTRIFSYADTQRHRLGPNYLMLPANAPKCAHHNNHHEGFMNFMHRDEEVNYFPSRYDPVRHAEQFPIPPRILNGGREKCCIQKENNFKQPGEKYRSWAPDRQERFIKRWIDALSDPRVTHEIRTIWITYWSQCDKFLGQKLASRLNIKPTL

SEQ ID NO: 12482 - protein, 490 aa, Oryza sativa
MASLASLSLPVSTASQGRARGAGPVTAAPRRRRVSVVRAKVREIFMPALSSTMTEGRIVSWTAAEGDRVAKGDPVVVVESDKADMDVETFYDGIVAVVLVPAGESAPVGAPIALLAESEEEVAVAQARAQALPRGPGQEPPPPHVPKAAPPPPPPPPPHAPPGPPPTKGVATPHAKKLAKQHRVDISMVVGTGPHGRVTGADVEAAAGIKPKLKGPKGAPPPPPPPPPSPHRHPAAHPPPPPHHPAPRPPPPIAAAPRQPAALPPVPGATVVPFTTMQAAVSRNMMESLSVPTFRVGYAVCTDKLDALCEKVKSKGVTKTLLLVKAAAMALTQHPVVNASCRDGKSFSYNSSINIAVAVAIEGGLLTPVLEDVDKLDVYLLAQKWRGLLKKARMKQLQPDEYSSGTFTLSNLGMFGVDRFDAILPPGQGAIMAVGGSRPTLVANKDGFFSIKNEMLVNVTADHRIIYGADLAAFLQTFAKIIEDPESLTL

SEQ ID NO: 12483 - protein, 469 aa, Xylella fastidiosa 9a5c
MFLPRPDFRIALFICFMAVSFVISRFGSEVRPTLLLALPLVLGHVSTGLIGFVLNVIAGHHSTVTLAASTIGTALLWLPMLVPMGTLISLTVLVSQLHGAERERDIGPLFRQALWLAMLLGLVMFTFLSVVPALLPLFGIVPDIVPGAAKFLHVVRWGSLAFPLYFCMRYFCEGMHCTFPTMLLGFGGLLVLVPLSYALTYGRFGFSEYGVEGLGIATVMVMWLQAVVFALYLWRSRRFAHLQLFAHLELPCWARIRDLLNIGLPIGISILMEGGLFIVTTLLIGRFGTDEIAAHQIALSVAQLCFMIPMGVAEATTVRIGHAVGRCDLLVMRRVAWAGYAIVIGTQTLSASVLLLGYDVIVAAYTDDLVVASLASKLLLFAAIFQFPDGLQMLSSGVLRGMKDTRVPMLLAMISYWGLGMPLGLGLGFALEWNSRGMWIGLIIGLTAAAVLLGWRFRVVSERMFAGIP

SEQ ID NO: 12484 - protein, 336 aa, Magnaporthe grisea 70-15
MFAASRIQTRAFSAAARNLSKVTVLGAAGGIGQPLSLLLKLNPRVTELALYDIRGGPGVAADISHINTKSNVKGYDPTPSGLAAALKGSEVVLIPAGVPRKPGMTRDDLFNTNASIVRDLAKACAESCPEANILVISNPVNSTVPICAEVFKARGVYNPKRLFGVTTLDVVRASRFVSEIKGSDPKDENITVVGGHSGVTIVPLFSQSNHPDLSANDQLVNRVQFGGDEVVKAKDGAGSATLSMAMAGARMAESVLRAAQGEKGVIEPTFVDSPLYKDQGIEFFSSKVELGPNGVEKILPIGEIDANEQKLLDACVGDLKKNIEKGVAFVASNPGK

SEQ ID NO: 12485 - protein, 548 aa, Bacteroides thetaiotaomicron VPI-5482
MTKSALQIARAAYQPKLPKALATGAVKAVAGAATQSVADQEAIKALFPNTYGMPLITFEAGEAVQLPAMNVGVILSGGQAPGGHNVISGLFDGIKKLNPESKLYGFILGPGGLVDHNYMELTADIIDEYRNTGGFDIIGSGRTKLETEAQFEKGFEIIKELGIKALVIIGGDDSNTNACVLAEYYAAKKYGVQVIGCPKTIDGDLKNDMIETSFGFDTACKTYAEVIGNIQRDCNSARKYWHFIKLMGRSASHIALECALQVQPNVCIVSEEVEEKDMSLDDVVTSIAKVVADRAAQGNNFGTVLIPEGLVEFIPAMKRLIAELNDFLAANAEEFSQIKKSHQRDYIIRKLSPENSAIYASLPEGVARQLTLDRDPHGNVQVSLIETEKLLSEMVATKLAAWKEDGKYVGKFAAQHHFFGYEGRCAAPSNFDADYCYSLGYTASMLIADGKTGYMSSVRNTTAPAAEWIAGGVPITMMMNMERRHGEMKPVIQKALVKLDGAPFKAFAAQRDRWAVETDYVYPGPIQYFGPTEVCDQATKTLQLEQAK

SEQ ID NO: 12486 - protein, 447 aa, Bacteroides thetaiotaomicron VPI-5482
MNFDIAIIGGGPAGYTAAERAGANGLRAVLFEKKAIGGVCLNEGCIPTKTLLYSAKILDSIKSASKYGISAESPSFDLTKIMSRKEKTVKMLTGGVKMTVNSYGVTIVEKEAFIEGEENGLIRIICDGERYEVKYLLVCTGSDTVIPPIPGLSEVSYWTSKEALEIKELPETLVVIGGGVIGMEFASFFNSMGVKVHVVEMMPEILGVMDKETSSMLRMEYAKRGVTFYLNTKVIEVKPDGVVIEKDGKASTIKTEKILLSVGRKANITNVGLDKLNIELHRNGVKVDEYLQTSHPGVYACGDITGYSLLAHTAIREAEVAINHILGVEDRMNYNSVPGVVYTNPEVAGVGKTEEELTKQGIPYRVTKLPMAYSGRFVAENEQVNGICKLILDEADHIIGCHMLGNPASELIVIAGIAIQKGYTVEEFQKNVFPHPTVGEIYHEVLS

SEQ ID NO: 12487 - protein, 174 aa, Triticum aestivum
MAPAVMASSATTVAPFQGLKSTAGLPVGRRSSGSLGSVSNGGRIRCMQVWPIEGIKKFETLSYLPPLSTEALLKQVDYLIRSKWVPCLEFSKVGFVFREHNSSPGYYDGRYWTMWKLPMFGCTDATQVLNEVEEVKKEYPDAYVRVIGFDNLRQVQCVSFIAFRPPGCEESGKA

SEQ ID NO: 12488 - protein, 293 aa, Enterococcus faecium
MKVKKAVIPAAGLGTRFLPATKAMAKEMLPIVDKPTIQFIVEEALDSGIEDILIVTGKEKRPIEDHFDANIELENNLREKEKTELLALVEETTQVNLHFIRQSHPRGLGDAVLQAKAFIGNEPFVVMLGDDLMKDDIPLTQQLMMDYEETQASAVAVMRVPENETSKYGIIDPKTDSEKGRCRVKGFVEKPEMGKAPSNLAIIGRYLLTPKIFEILETQEPGAGNEIQLTDALQTLNQTEAVYAREFKGKRYDVGDKLGYMKTNIEYGLQHSEIGTSLSAYIIQLSKKLRTES

SEQ ID NO: 12489 - protein, 190 aa, Triticum aestivum
RGNPTVEVEIITAKGAFRADVPSGASTGIHEALELRDKIKADYCGKGVLQAIENVNQTIGPALVDSGLVVTDQKAIDTFLIDLDGTTNKSKLGANAILGVSLAVAKAGAAEKEVPLYVHFADLASSKKPFVLPVPSFNVINGGSHAGNKLAMQEFMIMPTGAASFSEAMKIGTEVYHTLKGVIKDKYGQD

SEQ ID NO: 12490 - protein, 582 aa, GIBBERELLA ZEAE PH-1
MRRFLAYLLLAITNGFALTSAAASGYHEQLTLRPLPLSQLLASFNFRANTSIADFEAHNFRLFPRSLAQILQYAGTRELHLRFTLGRWDAQSWGARPWDGTREGGTGVELWAWLDAETDAEADEKWLILTNALSGLFCASLNFIDETRTIRPVMSFQPDGHHSNSSLANTRLLHGVLPHEVVCTENLTPFLKLLPCKGKAGIATLLDGHKLFDASYQSMAIDVRPKCDTDGECFLEMEETVDMVLDINRSKRPQNNPIPRPPPSHELLCDTSKPYHSDNTCFPADSLDGQDWSLSQVFGRSIKGTCPLTDPDIPPVCVQIPQSRDIYTTEGAREIRSQDGNSRCYNLDANSELALMLVKPESQDEDKILNKPETPLLYADRSFNGHGQEHGGVQAILSNPSDTDVEFVYMESLPWFMRIYLHTLSARIADAPLSNSSDLIKEIYYRPALDRARGTQLELRMRIPPHCTVFLTYDFEKSILRYTEYPPDANRGFDIAAAVITTLEPKVLNIRTTTLLLYLPTPDFSMPYNVIIFTSTAIALAFGGLYNILVRRFVGADEAQGMALKAKIIGLIARLKGKVGKQ

SEQ ID NO: 12491 - protein, 412 aa, Wautersia eutropha
MMSLSHASVPHTNPTAPHTLAALLAAGGLAGKRVFIRADLNVPQDAAGDITDDTRIRASVPAIAACLQAGAAVMVTSHLGRPQEGAPDPRHSLAPVGRRLSELLGRQVPLLSGWTEGGFQVPPGQVVLLENCRMNTGEKKNSDELAQKMAALCDVYVNDAFGTAHRAEATTHGIARYAPVACAGPLLAAEIDALGKALGQPARPLWAIVAGSKVSTKLTILKSLADKVDNLVVGGGIANTFMLAAGLKIGKSLAEPDLLADARAIIDIMAARGASVPIPVDVVCAKEFSATAAAAVKDVRDVADDDMILDIGPKTAAMLADQLKAAGTIVWNGPVGVFEFDQFGNGTRVLAQAIAESKAFSIAGGGDTLAAIAKYGIADRVGYISTGGGAFLEFLEGKKLPALDVLEQRAAS

SEQ ID NO: 12492 - protein, 260 aa, Glycine max
MGMGSSACIPQVLCTCADRMYAGILLNTRLACPLSSILSSPFSESAAQFCAASVVIALEDLHKNGVLYRGVSPDVLMLEQTGHIQLVDFRFGKQLSGERTFTICGMADSLAPEIVLGKGHGFPADWWALGVLIYYMLRGEMPFGSWRENELDTVAKIAKRKLHLPETFSPEAVDLISKLLEVEESTRLGSQGPDSVKNHPWFNGVEWEGIRHHTFPVPQEIISRITQHLEVHSEDCSTGYLGSPLQEVKELNVPEWLEDW

SEQ ID NO: 12493 - protein, 522 aa, Arabidopsis thaliana
MVVSADCRISLSAPSCIRSSSTGLTRHIKLGSFCNGELMGKKLNLSQLPNIRLRSSTNFSQKRILMSLNSVAGESKVQELETEKRDPRTVASIILGGGAGTRLFPLTKRRAKPAVPIGGAYRLIDVPMSNCINSGINKVYILTQYNSASLNRHLARAYNSNGLGFGDGYVEVLAATQTPGESGKRWFQGTADAVRQFHWLFEDARSKDIEDVLILSGDHLYRMDYMDFIQDHRQSGADISISCIPIDDRRASDFGLMKIDDKGRVISFSEKPKGDDLKAMAVDTTILGLSKEEAEKKPYIASMGVYVFKKEILLNLLRWRFPTANDFGSEIIPFSAKEFYVNAYLFNDYWEDIGTIRSFFEANLALTEHPGAFSFYDAAKPIYTSRRNLPPSKIDNSKLIDSIISHGSFLTNCLIEHSIVGIRSRVGSNVQLKDTVMLGADYYETEAEVAALLAEGNVPIGIGENTKIQECIIDKNARVGKNVIIANSEGIQEADRSSDGFYIRSGITVILKNSVIKDGVVI

SEQ ID NO: 12494 - protein, 145 aa, Triticum aestivum
QLAFCPAITVPNYLMLPVNAPKCAHHNNHHDGLMNFMHRDEEVNYFPSRFDPTRHAEQYPIPPRVLSGCREKCIIEKENNFKQAGERYRSFDPARQDRFLQRWVDALTDARVTHEIQGIWVSYWSQCDTSLGQKLASRLKIKPSM

SEQ ID NO: 12495 - protein, 130 aa, Glycine max
  unsure (1)..(130): unsure at all Xaa locations
IHVTLPREAACTENHTPCAKLPTGRDKXALYYLRERPYLYRRIHHCQRVRLTMXQTLHKGKDXGTMLEQTLTVDNQPSQHQAGMNHDRETQIQPSXPMSAILGRKIRGRCHTAKLRIDDLHAVRGRVSQL

SEQ ID NO: 12496 - protein, 571 aa, Glycine max
  unsure (1)..(571): unsure at all Xaa locations
MCGILAVLGCVDNSQTKRARIIELSRRLRHRGPDWSGIHCYEDCYLAHQRLAIVDPTSGDQPLYNEDKTVIVTVNGEIYNHKQLRQKLSSHQFRTGSDCEVIAHLYEEHGEEFVNMLDGMFAFILLDTRDKSFIAARDAIGITPLYLGWGHDGSTWFASEMKALSDDCERFISFPPGHIYSSKQGGLRRWYNPPWXFSEDIPSTPYDQXPFCLEVLVWHAVLQKLWNGMHHGLLSGGLDSSLVAAVVNRDLAESESARQWGSQLHTFCIGLKGSPDLKAAKEVADYLGTRHHELYFTVQEGIDALEEVIYHIETYDVTTIRASTAMFLMSRKIKALGVKMVLSGEGSDEIFGGYLYFHKAPNKKEFHEETCRKIKALHLYDCLRANKSTAAWGVEARVPFLDKEFINVAMSIDPEWKMIRPDLGRIEKWVLRNAFDDDKNPYLPKHILYRQKEQFSDGVGYSWIDGLKDHANKQVTDATMMAANFIYPENTPTTKEGYLYRTIFEKFFPKNAAKATVPGGPSVACSTAKAVEWDAAWSKNLDPSGRAALGIHDAAYDAVDTKIDEPKNGTL

SEQ ID NO: 12497 - protein, 323 aa, Candidatus Blochmannia floridanus
MNQLDNLKKFSKISADTGDVDLIRTYQIQHATTNPSLILKSPLFTTYLKLFNDAIDYAQKIGGNQNTKITNASDRLIVNIGSEILANISGYISTEIDAQLSFNTDLTIKKAHKLITMYQKKNIDTSRVLIKIAATWEGIQAAEELEKSGIKCNLTLVFSFAQARACAERNIYLISPFIGRIYDWYNQRNLIKTSYINDDPGIQSIKKIYHYYKTYGYNTIIMGASFRRLEQILALSGCDYLTISPHFLKQLYQNTNSVTRQLFPPKTIISHHIPVLDQSEFFQEHNKNQMAVEKLNEGIQQFSIDQQKLHKLLLNNLNVQLQK

SEQ ID NO: 12498 - protein, 227 aa, Nicotiana sylvestris
MAVKNKVSNGDLKGGNVKTNGVKEVHYRGVRKRPWGRYAAEIRDPGKKSRVWLGTFDTAEEAAKAYDTAAREFRGPKAKTNFPLPSENQSTSHSSTMESSSGETGIHAPPHAPLELDLTRRLGSVAADGGDNCRRSGEVGYPIFHQQPTVAVLPNGQPVLLFDSLWRPGVVNRPQPYHVMPMAMGFNGVNAGVDPTVSDSSSVVEENQYDGKRGIDLDLNLAPPTEF

SEQ ID NO: 12499 - protein, 536 aa, Oryza sativa
MRKNPSEQEEEEKETEKKANEIEVQFPFRPTDPTHLPQPQVDAQVHHPCSIRTNTTTQTTYRCDTRSRAKRYHPPIHGGLHLRHLLLHSHQARLLLLLLLKSQLRLLRQVSIGVALGGWIFAGSLAAIGDVMTASGRCRMASVVVRAEAVDATISPTVSALRPSKTMAITDQATALRQAGVPVIGLAAGEPDFDTPHVIAEAGMNAIKDGYTRYTPNAGTLELRKAICNKLQEENGISYSPDQVLVLIPAPYWVSYPEMATLAGATPVILPTSISENFLLRPELLASKINEKSRLLILCSPSNPTGSVYPKELLEEIADIVKKYPRLLVLSDEIYEHIIYQPAKHTSFASLPGMWDRTLTVNGFSKAFAMTGWRLGYLAAPKHFVAACGKIQSQFTSGASSISQKAGLAALNLGYAGGEAVSTMVKAFQERRDYLVKSFKELPGVKISEPQGAFYLFIDFSSYYGSEVEGFGTIKDSESLCMFLLEKAQVALVPGDAFGDDKCIRMSYAAALSTLQTAMEKIKEAVALIKPRVAAK

SEQ ID NO: 12500 - protein, 214 aa, Elaeis guineensis
MVRGKTEMKLIENATSRQVTFSKRRNGLLKKAFELSVLCDAEVAVIVFSPRGKLYEFSSTSMEKTIDRYRRHAKSGINNNEVTQQWKFEAASMSRKIESLEVSKRKLLGENLESCSAEELHEIEGKIEQSLCHVRGKKNQLLEEQIATLKEQEQTLMEENALLREKCKLQSQLRPAAAPEETVPCSQDGENMEVETELYIGWPGRGRTNCRSQG

SEQ ID NO: 12501 - protein, 951 aa, Vibrio vulnificus YJ016
MKLIKRSDSVTKEQKQLGISRRVFMRNSSLAAGGAIAGASMFAPGMIRKAEAKSVDASAPIEVKRTICSHCSVGCGIYAEVQNGVWTGQEPAFDHPFNAGGHCAKGAALREHGHGERRLKYPMKLENGKWKKLSWDQAIEEIGNKVLEIREQSGPDSVYWLGSAKHNNEQAYTFRKMASMWGTNNVDHQARICHSTTVAGVANTWGYGAMTNSFNDMHNCKSMLFIGSNPAEAHPVAMQHILIAKEKNSCKIVVADPRRTRTAAKADHYVSLRPGTDVAFIWGVLWHVFNNKWEDKEFIRQRVFGMDEIRAEVAKWNPKEVERVTGVSEEDVYQTAKLLSDHRPGCIVWCMGGTQHTTGNNNTRAYCVLELALGNLGKSGGGANIFRGHDNVQGATDLGVLSHTLPGYYGLAEGSWKHWAKVWGIDFDWLKNRFDQNKYNGKQPMFNMGIPVSRWIDGVLENKDSIEQNDNIRAMFYWGHAVNSQTRGVEMKKAMEKLDMMVIVDPYPTVAAVMNDRTDGVYLLPATTQFETHGSVTASNRSIQWRDQVIEPLFESKPDHEIMYLLTKKLGFADQLFKNVRVVNNQPVIEDITREFNKGMWTIGYTGQSPERLKAHQQNWHTFHKTTLAAEGGPANGETYGLPWPCWGTPEMKHPGTHILYDTSKPVAQGGGTFRTRFGVEFEGKSLLADGSYSKDSDIQDGYPEFSDKLLKQLGWWDDLTAEEKALAEGKNWKTDLSGGIQRVAIKHGCIPFGNGKARTIVWEFPDRVPLHREPLYTPRRDLIADYPTWDDAASIYRLPTLYKSIQDQDKSQEYPIILTSGRLVEYEGGGEETRSNPWLAELQQEMFVEVNPKDANDLGFKDGDMVWVEGAEKGRIHVKAMVTRRVRPGMAFIPFHFGGKFQGEDLRNKYPEGTDPYVIGESANIATTYGYDPVTQMQETKVTLCNIRKA

SEQ ID NO: 12502 - protein, 456 aa, Bacteroides thetaiotaomicron VPI-5482
MSRFEIKMPKLGESITEGTIVSWSVKVGDVIQEDDVLFEVNTAKVSAEIPSPVAGKVVEILFKEGDTVAVGTVVAVVDMGGEEASDEETASGKETPESKENASSDAEKVSSQVAKAEERWYSPVVIQLARGANIPKEELDSIQGTGYEGRLSKKDIKDYIEKKKRGISEVSKAAIPTGDALTASMPSSTGGAGSMTTSPVAASVQTPVAAPSAPSKQAPAAANIPGVEVKEMDRVRRIIADHMVMSKKVSPHVTNVVEVDVTKLVRWREKNKDAFFRREGVKLTYMPVITEAVAKALAAYPQVNVSVDGYNILFKKHINIGIAVSLNDGNLIVPVVHDADHLNLNGLAVAIDSLALKARDNKLMPDDIDGGTFTITNFGTFKSLFGTPVINQPQVAILGVGYIEKKPAVIETPEGDTIAIRHKMYLSLSYDHRVVDGMLGGNFLHFIADYLENWKG

SEQ ID NO: 12503 - protein, 272 aa, Nostoc sp. PCC 7120
MTIATSTKPQINWVNTLFFLGLHIGALFAFIPSNFSWAAVGVALLLYWITGGLGITLGFHRLVTHRSFQTPKWLEYFLVLCGTLACQGGPIEWVGTHRIHHLHSDTDPDPHDSNKGFWWSHIGWLIYHSPSHADVPRFTKDIAEDPVYQFLQKYFIFIQIALGLLLLYLGGWSFVVWGVFFRIVWVYHCTWLVNSATHKFGYRTYDAGDRSTNCWWVAVLVFGEGWHNNHHAFQYSARHGLEWWEVDLTWMTVQLLQILGLATNVKLADKKQ

SEQ ID NO: 12504 - protein, 653 aa, Ustilago maydis 521
MARRMERPCRPALSLQRVAAVSLVALAATFPTVQARGIGERTVSSPVQTSPRPLSGINPTISVADAMQRTQRPWLAVAKDRIFDTVSRFLYHALPDPRYFSYDIDQFDKYQLPSSDAAALDSDGILDGPGLNWGGSTLEVVRSQAIFLTRSAFFGPHITDEAGLKGFLLPISDFYRVPKGASFSTSDASRNPMHACPYQGGPGSQRDVFLDKYQDKDDRRLYSSFGSASSKQVSFTWTHDSDDSFDASLKPPQNWIALVERGGGCGFADKVRVAQELGAVAVVVGDAPSPDWHGGHSGDPNEEGDPGLSDKRLITMFSPGDTSDIRIPSTFVTRPSYLDLRRLIEETEKDQEDWEKQHPSQHDDSRPAMRKGLEIVIGKDDMVWEWPLIDFGILLLLLPSFMTVITIIVHRIRMVRQRRKERAPEPVVLGLPCLIWRGNGQPWEKVEGPDVDPGPGNGNASTPSATKSFASDDLEAGQVTETIPLLAEDENEAGPSQRAHTSVKVPTFSETSSTRPAKPSSCLPPDRTYFSTDECAICLCDFVDGDRVRVLPCGHIFHRQEVDDWLVRVKKLCPICKRDITVPIPPAPPVGVASATTSPAASPVDAVANGVSVGPVTSDIVNDVQPGDESIDLSQHLSSDDDYQQSHQDGRQV

SEQ ID NO: 12505 - protein, 272 aa, Bradyrhizobium japonicum USDA 110
MDNLKTQGISMPKLGLGTFRMQGDACRAAVESALSIGYRHIDTAEMYANEEPIGAALAAARLPRGELHVTTKVWHENLAPDAIRRAFDASLKKLRLDHVDLYLVHWPSRSANWGAVFETLMKLKEEGRTRAIGVANFTTALLKIAVEDIKAPIACNQIEYHAMLDQSKVLAYLNARSIPLVAYCPLAQGRVASDPVLAEIGARHNATAAQVALKWLLDQGGVAAIPKASRRESQQANLDALKIMLDDADRNKIAALPKDRRCVNPGFAPAWD

SEQ ID NO: 12506 - protein, 400 aa, Triticum aestivum
MVKAKLLAVLALVAVAAPFLRAAGQEEGEGGARPSELLPFAVGAAPAGCDVGQGEWVYDEAAAPAYDEEACPYIPAELTCQAHGRPDKSYQHWRWQPRGCSLPSFNATVMLEMLRGKRMLFVGDSLNRAQYVSLLCLLHRAMPEGSTSFETVDALSIFRAKAYDATIEFYWAPLLAESNADDGVEHQLNDRVIRGAPMDRHSRFWKGADVLVFNSSLWWMTGDKIQILRGADNDMSKDIVEMGAEEAYRLVLHQVVRWLDGNVDPKKSRVFFVTASPTHASGQLWGDEAEGSNCHGQTKPIADASYWGSTSRAMLRVTGEVLAASARVPVGVVNVTQMSEYRRDAHTQVYREQWAPPTKEQLADPKSYADCTHWCLPGVPDAWNELLYWKLFFPANDQAL

SEQ ID NO: 12507 - protein, 262 aa, SYNECHOCOCCUS SP. WH 8102
MSIDLRASSLDPVQIPGWRWQPFLDEASAALKPFNPSPYPIAETFLQKEGSTGSKAKPVPVTTATWACSTDKLRQVRCACVEAGMAASVLNFVINPSCRFDLPFFGADLVTLPNGHLLALDLQPVDKADPDHTQPVWERLMPLFERWQAELPDGGPIPEEAQPYFSPAFLWTRIPLGEEGDELIERVIRPAFIDYLQLYLNLVAEAEPVSDDRAELLLSGQKRYTAYRAEKDPARGMLTRFYGSEWTESYIHGVLFDLEDAA

SEQ ID NO: 12508 - protein, 245 aa, Shigella dysenteriae
LLVTHASKNAVENHFDTSYELESLLELRVKRQLLAEVQSICPPGVTIMNVRQGEPLGLGHSILCARPAIGDNPFVVVLPDVVIDDASADPLRYNLAAMIARFNETGRSQVLAKRMPGDLSEYSFIQTKEPLDREGKVSRIVEFIEKPDQPQTLESDIMAVGRYVLSADIWPELERTQPGAWGRIQLTDAIAELAKKQSVDAMLMTGDSYDCGKKMGYMQAFVKYGLRNLKEGAKFRKGIEKLLSE

SEQ ID NO: 12509 - protein, 242 aa, Triticum aestivum
  unsure (1)..(242): unsure at all Xaa locations
MSKPGGSAGGATAGPTAAAAAAAAQKQRAPLRAAAARVCSLCRSRPPDLAGSRPTSPEAVAPLQAPPARRHPAHRAPASRRPPLAGCPAMSKPGGSAGGATAGPTAAAAAAAAQKQRALLQKADADVSSLVDNFSALINIARVNDPPVRNSQEAFQMDMRASRMVHSADSLLKLVSELKRTAIFSGLAXSLSENVDRRIEVLSQQSEETERMLERIGQEAAASLKELEAHYYSSVVRTPLYD

SEQ ID NO: 12510 - protein, 289 aa, Shigella dysenteriae
MKGIILAGGSGTRLYPITKGISKQLMPVYDKPMIYYPLSVLMLAGIKDILIITTPEDLNNFQRLLGDGKRFGINLSFEVQLKPEGLAQAFIIGGEFIGNDAVCLALGDNIFYGQNFSPKLKEAAQLIDGATVFGYQVKDPERFGIVEFDANKKALSIEEKPAKPKSNYAVTGLYFYDNNVVNIAKTIKPSERGELEITSINEVYLRNGKLNVELLGRGFTWLDTGTHQSMLEASHFVETIEQHQGFKIACLEEIALYNGWLTKDEVFKIGNEYKKNGYGQYLLSLVKDK

SEQ ID NO: 12511 - protein, 483 aa, Oryza sativa
MHAAITWWQLRHQTCLTAIVGSLSGLCVSAAAAAAGAGEERRRSLISLGVGDASSHACFRRGGEFAADAVADAARSGVFDCYAPSCGFPAARRAVADHLSAGARHRTRDADVFMTAGGTGAITAIATVLGGAPGANVLLPRPGFAPYEAACELAGAEPRFYDLLPRRGWEADLAGVRAMADGATAAIVVINPNNPCGAVYSAQHLFQIAETARELGIPIIADEVYAHMVFGGSKFVPMATFAHITPVITIGALSKKFMLPGWRLGWLAFCDPNGALKHQKVRNATEMLLNVTSGPASIVQAAVPKILSNEHNEFHRNVVNLLESAADALYRRVNQIEALQCYSKPHGSMFMMVEVNTSLLFGVEDDMDFARELIKEESVLVLPGSVIGLKNWIRIFFGAPTSVILEACDRIEAFLPKKSSSSKATEKEVLKPTNKIFLFWPAHNNMYRAFYVNFIGFSFIFLTPRDLRIVCRIISADACLYCK

SEQ ID NO: 12512 - protein, 461 aa, Synechocystis sp. PCC 6803
MTDISMRFGMQAEAREFLKLAVPLAGAQMAQAATGFVDTVMMGWLGQDVLAAGGLATMIFMAFMMTGVGLISGVSPLVAEAYGAGQTRRIGQLTRQGLWIVLLLSIPGMLFITHLNGVMHWSGQADTTIILSDSYLNVMAWGLFPAIAFATLRGCIIALSQARPIMLIVIAATLFNILGNYGLGFGKWGFPALGITGLAIASISAHWIMFLSLLVYMLWHKPLHQYSLFDSLHHLKPRILQQLLWVGGPIGIAAVLEYGLYLTASFFMGALGTPILAAHQVVSQTVLVLFMVPLAMSYAATVRVGQWFGQQHWPQIRQAALVSIGLAVLFMLTAGIALLAYPQQIIGLYLDLNDPANGEALNVGISIMKIAAFGLVLDGLQRTANGVLQGLQDTRIPMVLGTIAYWGIGLTASYLLGFYTPLSGAGVWIGTYIGLAAASIAYLWRFQKVMVRKKSLPVARS

SEQ ID NO: 12513 - protein, 399 aa, Oryza sativa
MALSISTPPTSSSLLPASLQVGRWSSSAAMSARPVAFSLRRPVLAARVAAGGNAPSSSVDEVVTELDAVASFSEVVPDTVVFDDFEKFAPTAATVSSSLLLGIAGLPDTKFKSAIDTALADGECNTMEKPEDRMSCFLTKALANVGAEMAHLVPGRVSTEIDARLAYDTQGIIQRVHELLKLYSDHDVLSERLLFKIPATWQGIEASRLLESEGIQTHLTFVYSFAQAAAAAQAGASVVQIFVGRVRDWARTHSGDPEIDEALKKGEDAGLALVKKVYAYIHKNGYKTKLMAAAIRNKQDVFSLLGIDYIIAPLKILQSLEESVTDTDVKYGYVPRLTPALGKTYNFTEEELVKWDQLSLAAAMGPAAEELLASGLEGYVNQARRVEELFGKIWPPPNV

SEQ ID NO: 12514 - protein, 312 aa, Schizosaccharomyces pombe
MSISSKDFQNVTSAGFADDTFAADTFAADKKSPFESSVFENKTQVLPVDSVSRLSNGARSRSNSNISLSEPHALNDTVEDQPVSKWVWVLAFAAGIGGLLFGYDTGVISGALVVIGTSLGGHELTNGGKEFITSATSLGALLGGIIAGALADFFGRKPVIAIASIIIIVGSIVQVTAHHLWHMIVGRFVIGWGVGIASLIIPLYLSEIAPSKIRGRLVIIYVLLITAGQVIAYGIDTAFEHVHNGWRWMVGLAMVPAAFQLFILIWLPESPRLLVKKERSQEAYNTLARIYPTAHPYEIKTKLYLIQEGVRD

SEQ ID NO: 12515 - protein, 387 aa, Zea mays
MAGRRAEEEYDYLFKAVLIGDSGVGKSNLLSRFTRNEFCLESKSTIGVEFATRTLHVEGKIIKAQIWDTAGQERYRAITSAYYRGALGAVLVYDVSKPTTFENVRLPLTVLRCLRPRPLPFPFHSPIVPLSVSRQSSSSARRSHLHRPPIPPRASGRIRGAGSAAAGGGRPAMAHRMDNEYDYLFKIVLIGDSGVGKSNILSRFTRNEFCLESKSTIGVEFATRTLQVEGKTIKAQIWDTAGQERYRAITSAYYRGAVGALLVYDITKKQTFENIQRWLRELRDHADSNIVIMMVGNKSDLNHLRSVAEEDGQALAEKEGLSFLETSALEALNVEKAFQTVLSDIHQIISKKALAAQEAAGSGPPGQGTTINIADPSANTKRGCCSS

SEQ ID NO: 12516 - protein, 421 aa, Schizosaccharomyces pombe
MAFRGIRPSNKVAASRPDVWTLVNQATAECKVPPVSLSQGFFNYNPPKFVLDAAKKSIDEVACNQYSHTRGRPSLRKALSEAYSPYFKRTLNPDTEIVVTAGANEGFFSVFAAFLNPGDEVIVMEPFFDQYISNITMNGGVPVYVPIIPPEEGSVKPVSAGAWKLDMNKLRNAITEKTKMIVINTPHNPLGKIFSEEELNEIADLVLKHNLLVVSDEVYDRLSFVPFVRLATLRPELFKHVVTVGSGGKTFGCTGWRVGWLIGDESLIKYSAAAHTRICFAVNSPCQEALAIAFGEAEKHNYYEEYKSSYKKRFEILAKAFDQLEIPYTIPDGSYYTMANFSKLKLPKDYPFPEEIANRPRDFKLCYWILKEIGVATIPPTEFYTDEDAPVAENYLRFAFCKTFETLEEAARRLQKLKDYF

SEQ ID NO: 12517 - protein, 242 aa, Corynebacterium efficiens YS-314
MVPRRRWPRLCDVAKASLDKDPFDVASMFDDVGDKYDLTNTVLSFGQDRVWRRRTRERLDLKPGEKVLDLAAGTAVSTVELAKSGAWCVACDFSQGMLAAGKHRNVPMVVGDGMTLPFADNSFDAVTISYGLRNIHDFRAGLREMARVTKPGGRLTVAEFSTPVIPVFGTLYKEYLMRLLPKVARVVSSNPEAYIYLAESIRAWPDQEDLAREINANGWSDCGWQNLTFGIVAMHSAIKPGN

SEQ ID NO: 12518 - protein, 433 aa, Candidatus Blochmannia floridanus
MIKYRNSSIHIQSVRGMHDCLPKDVIQWQYIEDVLKTILNGYGYNEIRFPIIECTDLFKRSIGEVTDVVEKEMYTFIDQHGNDLTLRPEGTSGCVRAGIENSLFYHQEPRLWYMGPMFRRERPQKGRYRQFHQFSAEAFGCVGPDIDVELILITNRCWKELGISNYLTLELNSIGLLSSRMIYRKKLISFLEKNKHNLDDSSKRRLYSNPMRILDTKNVKIKELLAHAPVLSDYLDDCSKNHFLNLCRLLDIANVTYIVNPYLVRGLDYYNRTVFEWVTDKLGVKKTICAGGRYDDLIKQLGGGSIPAVGFAIGLERVVLLMKLIKSSIINTRNVYIDVYLIRLGTYYQEYSIKLSEHIREKLPFLRLMVDCGGGNFKQQIDRAEKNNSRFVIVVDDKNFFEQTIILKELQSKKQEILKYDEIILKLRKIYNM

SEQ ID NO: 12519 - protein, 479 aa, Methanosarcina mazei Goe1
MVAMKMQINGKAAGSCGGECFDVRNPATCELLEQVPRGTEEDVALAVEAALSAFEGWASISPQQRGMVFYRAAGLVRQRKEELAALLTQEQGKPLAEARNELEGFSHVLEYYCGLAGSLRGDFIPVTGNGYSFTVKKPLGVCAAIIPWNMPALIMGWKIAPALISGNTFVLKPASSTPLTNLTLASILNEAGLPAGVLNVVTGSGEIAGESLVRSPDVRKISFTGESGTGKRISELAASGMKRVTLELGGSDPMIVCDDANLESAVAGAIRGRFYNCGQTCTAVKRLYVFESVAREFIRKLEEGVKRLKVGNGLDKDTDMGPLNNHSQFEYIKELVAGIEEKGEGRIIAGGKAPSFKGMGKGYFFEPTLVSDVPGDSRLLKEEVFGPLLPIVTVRNLDEAIEEANRSIYGLGASIWTKDLDRIRMGCEQLNAGIIWVNQHLKVAPEVPFGGVKESGFGRENGPDILSEYLETRTIMLKT

SEQ ID NO: 12520 - protein, 518 aa, Oryza sativa
MQFMMPLDTNACAQPMRRAGEGAGTERLMERLNIGGMTQEKALRKRCFGDGVTGTARCVFTSDADRDTPHLRTQSSRKNYADASHVSAVILGGGTGVQLFPLTSTRATPAVPVGGCYRLIDIPMSNCFNSGINKIFVMTQFNSASLNRHIHHTYLGGGINFTDGSVQVLAATQMPDEPAGWFQGTADAIRKFMWILEDHYNQNNIEHVVILCGDQLYRMNYMELVQKHVDDNADITISCAPIDGSRASDYGLVKFDDSGRVIQFLEKPEGADLESMKVDTSFLSYAIDDKQKYPYIASMGIYVLKKDVLLDILKSKYAHLQDFGSEILPRAVLEHNVKACVFTEYWEDIGTIKSFFDANLALTEQPPKFEFYDPKTPFFTSPRYLPPARLEKCKIKDAIISDGCSFSECTIEHSVIGISSRVSIGCELKDTMMMGADQYETEEETSKLLFEGKVPIGIGENTKIRNCIIDMNARIGRNVIIANTQGVQESDHPEEGYYIRSGIVVILKNATIKDGTVI

SEQ ID NO: 12521 - protein, 342 aa, Zea mays
  unsure (1)..(342): unsure at all Xaa locations
MAVDLMGCYAPRRANDQLAIQEAAAAGLRSLELLVSSLSTQAAAPHRAAAHQLQKPPSQPPIGEIADQAVSRFRKVISILDRTGHARFRRGPVXSPPPVPAPAVAAPAPAPALHVVAPVAVAQPQSLTLDFTKPNLAVSGGATSVTSTSFFSSVTAGEGSVSKGRSLVSSGKPPLSGHKRKPCAGAHSEATTNGSRCHCSKRRKNRVKRTIRVPAISAKIADIPPDEYSWRKYGQKPIKGSPYPRGYYKCSTVXGCPARKHVERATDDPAMLVVTYEGEHRHTPGAPAPAPSPLAPALHVVATVSSAASQHIVVDSYYQWRSPCYLLYCSCILSGPLDSKAP

SEQ ID NO: 12522 - protein, 494 aa, Xylella fastidiosa 9a5c
MSRKHAFQFLDLPRQMPQRIPVELRTSGDWRELYGKFDKAEAQYQAGRCLDCGNPYCSWKCPVHNAIPQWLQLVQENRIDEAAALCHATNPLPEVCGRVCPQDRLCEGSCTLEEFGAVTIGAVEKYIVDTALQQGWRPDLSHVQPTGWRVAVVGAGPAGLACADRLARAGVQAVVYDRYEQIGGLLQFGIPSFKLDKAVMSTRRKVLEGMGVEFRLGVEIGKDLGIEALLEHYDAVFLGVGAYRYTDGGLPGQDLKNVLPALPFLVQNGRIVSGNDPYGRPIAGWEDQVQLPDVTGKSVVVLGGGDTGMDCVRSAIRLGATKVTCIYRRDEANMPGSAREVANAREEGVRFLFNRQPLSIQSGTDKQAIGVTVVETKLAEPDANGRRNAVPIQGTEAVLEADVVIIAFGFSPMLPEWLTAQGIQASSNGRIVVALSDTGDGLTYQTTHPKLFAGGDCVRGADLVVTAVAEGRDAAESIVRWLRATAQVMDVAVI

SEQ ID NO: 12523 - protein, 517 aa, Ipomoea batatas
MEFCATLKSSAHLPRETEFFGGRIRGSLNNNVLLSQSRKSLRLDGNKRKIKPGVAFSVLTRENGTETLTVEAPILERRRANPKNVAAIILPGGAGTHLFPLTNRAATPAVPLGGCYRLIDIPMSNCINSGVNKIFVLTQFNSASLNRHISRTVFGNGVSFGDGFVEVLAATQTQGETGMKWFQGTADAVRQFSWVFEDAKNKDIDNIVILSGDQLYRMDYMDLVQNHIERNSDITLSCATVGDSRASDFGLVKIDRRGRVVQFCEKPKGTEHKAMQVDTTLLGLPRQDARLNPYIACMGVYVFKTDVLLRLLRWRYPTSNDFGSEILPAAVMEHNVQAYIFRDYWEDIGTIKSFYDANLALTEEFPKFEFYDPKTPFYTSPRFLPPTKIDNCKIKDAIISHGCFLRECTVEHSIIGERSRLDCGVELKDTLMMGADTYETESEIASLLADGKVPIGVGENTKIRNAIIDKNVRIGKHVVITNKDGVQESDRPDEGFYIRSGITIIMEKATIRDGTVV

SEQ ID NO: 12524 - protein, 253 aa, Glycine max
MSNATDSAGKIPPETRPAESDSGGDSGPRPTIKINVMHGSSQHEFHLPAQSTFGDVKKLLVNKTGLEPVEQRLFFRGIEKGDNLHLHLEGVKDKSKLLLLEGTASKERKLEETRKQNVMSKAFEAIAGVRAEVDKLSNRVTSIEVAINGGNKASEKEFLVLTELLMSQLLKLDGIEAEGEAKLQRKAEVNRVQNLVDKLDSLKARNANPFSNSSNAVKVTTQWETFDSGMESLDAPSDNPSSTKVTQEWERFD

SEQ ID NO: 12525 - protein, 502 aa, Synechocystis sp. PCC 6803
MANKFETVKATKDGLAVRAELEHFAQIGWENIPEEDRDLRLKWLGIFFRPVTPGEFMLRFRIPHGLLTSQQLQVIGDIINRYGDRGNGDITTRQNLQVRGIKIEDIPDIFSKLESCGLTSVQSGMDNVRNITGSPVAGLEKDELIDTRDLVQGVQDMITNGGRGNPEFTNLPRKFNIAIEGSRDNSVHAEINDVAFVPAYREGILGFNVVVGGFFSSRRCEAAIPLDAWVQPDQQVVDLCRSILEIYRDHGLRANRQKSRLMWLIDEWGVAKFREEVAAKLPFPLLTAAPKDELDWDKRDHLGVHPQKQAGLNYVGLHVPVGRLYANDFFELSRLADTYGSGEVRLTVEQNLILVNVPDEKLEALLAEPLLTKFRVDPHNLQRSVVSCTGAQFCKFALIETKNRALAMVAALEKELTVPKPVRIHWTGCPNSCGQPQVADIGLMGTKVRKDGKTVDGADVYLGGKVGKDAHLGTCVHKSIPCDELQPLLAQILIEQFGAVRR

SEQ ID NO: 12526 - protein, 457 aa, Zea mays
MASLISPCLSVPTAPGPARLAAPGTPRRRRMAVVRAKIREIFMPALSSTMMEGKIVSWTAAEGDRVAKGDPVVVVESDKADMDVETFQDGIVAVVLVPAGGTAPVGAPIALLAESEEEVALARARAQALSQGQSQAPSPPLAPHAAAALGPPPPAPVAPPATKGIATPYAKKLAKQHRVDIAGVVGTGPHGRVTAADVEAAAGIKHKRPPPPPPPASVDAAPLVPASAVLPPVPGGTVVPFTTMQAAVSRNRGESLRVATFRVSYSMITDKLDALYEKVKSKGVTKTVLLVKAAAVALTQHPVVNASCRDGKSFSYNNDVNIGVAVALEGGLLTPVLEDADKMDIYLLARKWRVLLKKARMKQLQPNEYNSGTFTLSNLGMFGVDKFDAILPAGQGAIMAVGASRPTVVADKDGFFSIKSEMLVNVTADHRIIYGADLAAFLQTFAKIVEDPECLTL

SEQ ID NO: 12527 - protein, 369 aa, Synechococcus sp. PCC 7942
MKSRAAIAWAAGQTADDREVDVQAPQAGEVMVKLVATGVCHTDAFTLSGADPEGIFPCILGHEGAGIVVEVGEGVTSVAVGDHVIPLYTPECGECKFCKSGKTNLCQAIRATQGKGLMPDGTSRFSLNGQPIYHFMGTSTFSEYTVLPEIAIAKINPAAALDKVCLLGCGITTGIGAVLNTAKVEPGSTVAVFGLGGVGLSVIQGAVLAKASRILAIDINPDKAEFAKQLGATDFINPKDYDRPIQEVIVELTDGGVDYSFEAIGNVNTMRAALESCHKGWGESTIIGVAGAGQEISTRPFQLVTGRVWRGSAFGGVKGRSQLPGYVEQYLNGQIKVDEFVTETRPLEEINEAFEDMHAGKVIRTVITF

SEQ ID NO: 12528 - protein, 432 aa, Enterococcus faecalis V583 [sequence omitted]

SEQ ID NO: 12529 - protein, 397 aa, Enterococcus faecalis V583
MAKKTIKDVDLKDKKVLVRVDFNVPLKDGVITNDNRIVAALPTIKYVIENGGKAILFSHLGRVKTEEDKAGKSLKPVAERLSELLGQPVTFVPETRGKELEDAVNNMKDGDVLVFENTRFEDVDGKKESGNDAELGKYWASLGDVFVNDAFGTAHRAHASNVGIASTGIPTVAGFLMEKEIKFIGEAVENPKRPFVAILGGAKVSDKIAVIENLIEKADKILIGGGMAYTFMKAQGYSVGLSLLEEDKVDLAKSLMEKAGDKLVLPVDTVVSKEFSNDAPFHTVPSTEIPDDEEGLDIGEKTIELFANELQGAKTVVWNGPMGVFEMSNFAKGTIGVCEAIANLEDATTIIGGGDSAAAAIQLGYENKFSHISTGGGASLELLEGKTLPGLASINDK

SEQ ID NO: 12530 - protein, 267 aa, Chromobacterium violaceum ATCC 12472
MKMPKLGVGTFRLKDQQAEESVSMGLELGYRHIDTAQIYRNEADVGRAIAKSGVPRDELYVTTKIWIDQFAQGKLIPSLRESLDKLGLDSVDMTLIHWPSPNDEVPVAVYMNQLAEAKHLGLTREIGVSNFTIAHLRQAMDVVGADAIGTHQLEVHPYLQNLKVRAFCREHGIALTGYMPLAYGRAVGDPTLQAIGQKHGATAAQVALAWQLQQDIAVIPSSTKRANLAANLDALKLRLDADDMARIAALEDGGRIADPDFAPAWDA

SEQ ID NO: 12531 - protein, 215 aa, Hordeum vulgare subsp. vulgare
MSYAYLFKYIIIGDTGVGKSCLLLQFTDKRFQPVHDLTIGVEFGARMITIDNKPIKLQIWDTAGQESFRSITRSYYRGAAGALLVYDITRRETFNHLASWLEDARQHANANMTVMLIGNKCDLSHRRAVSYEEVEQFAKEHGLVFMEASAKTAQNVEEAFIKTAGTIYKKIQDGVFDVSNESYGIKVGYAVPNASGGGAGLVLSNQGRLLAIKQV

SEQ ID NO: 12532 - protein, 496 aa, Zea mays
ITMDPTKFRPSSSHDTTVTTTNAGAPVWNDNEALTVGPRGPILLEDYHLIEKVAHFARERIPERVVHARGASAEGFFECTHDVTSLTCADFLRAPGVRTPVIVRFSTVIHERGSPETIRDPRGFAVKFYTREGNWDLLGNNFPVFFIRDGIKFPDVIHAFKPNPRSHVQEYWRVFDFLSHLPESLHTFFFLFDDVGVPSDYRHMEGFGVNTYTFVSAAGKAQYVKFHWKPTCGVRCILTDEEAALVGGRNHSHATQDLYDSIAAGSFPEWTLYVQVMDPDTEEQYDFDPLDDTKTWPEDLLPLRPVGRLVLDRNVDNFFNENEQLAFGPGLVVPGIYYSDDKMLQCRVFAYADTQRYRLGPNYLMLPVNAPRCAHHNNHYDGAMNFMHRDEEVDYYPSRHAPLRQAAPPTPLPPRPVAGRREKATIRKPNDFKQPGERYRSWDADRQDRFVRRFADSLGHPKVSQELRSIWIDLLAKCDASLGMKIATRLNMKPNM

SEQ ID NO: 12533 - protein, 306 aa, Streptococcus pneumoniae
MKKVKKAVIPAAGLGTRFLPATKALAKEMLPIVDRPTIHFVIEEALRSGIEDILVVTGKSKRSIEDYFDSTFELEYSLRKQGKMELLKSVNESTDIKVHFVRQSSPRGLGDAVLQAKSFVGDDPFVVMLGDDLMDITDSTAVPLTRQLMDDYNATQASTIAVMPVRYEDVSSYGVISPRLESSNGLYSVDAFVEKPKPEEAPSHLAIIGRYLLTPEIFSILETQKPGAGNEIQLTDAIDTLNKTQSVFAREFVGKRYDVGDKFNFMKTSIDYALQHPQIKESLKNYVIALGKQLEKLDDCSSSGHL

SEQ ID NO: 12534 - protein, 470 aa, Zea mays
MDRKDVGILAMDIYFPPSCVQQEALEAHDGASKGKYTIGLGQDCMAFCSEVEDVISMSLTVVNSLLKKYKIDPKLIGRLEVGSETVIDKSKSIKTWLMQIFEESGNSDIEGVDSSNACYGGTAALLNCVNWVESNSWDGRYGLVVCTDSAVYAEGPARPTGGAAAIAMLIGPNAPISFESKYRASHMAHVYDFYKPDLASEYPVVDGKLSQTCYLMALDSCYRQFCNKYEKIAGKQFSICDAEYFVFHSPYNKLVQKSFARLYYNDFLRNCSSVDDDAKEKLQSFSNLTGEESYQSRDLEKASQQVAKHLHDIKVQPSTLLPKQIGNMYTASLYAALASVLYNKHDSLNGQRIVMFSYGSGLTSTMFSLRLNNGQHPFSLSNIASVLDVTEKLQSRHETLPEKFVETLKLMEHRYGAKDFETSRDTSLLQPGAFYLTKVDSMYRRFYSQKLSEETGGGKTKCCNGLANGH

SEQ ID NO: 12535 - protein, 579 aa, Oryza sativa
  unsure (1)..(579): unsure at all Xaa locations
MSATTSNSRRLCNGRGQVIPGPTLPEAVKMGPHAIRIVVGGLGEGELSTATTVHGPERASSSSAPPEMASAALPEAVAPKKKGNVRFAFACAILASMTSILLGYDIGVMSGASLYIKKDFNISDGKVEVLMGILNLYSLIGSFAAGRTSDWIGRRYTIVFAAVIFFAGAFLMGFAVNYAMLMFGRFVAGIGVGXYALMIAPVYTAEVSPASARGFLTSFPEVFINFGXILLGYVSNYAFSRLPLNLGWRIMLGIGAAPSVLLALMVLGMPESPRWLVMKGRLADAKVVLEKTSDTAEEAAERLADIKAAAGIPEELDGDVVTVPKRGSGNEKRVWKELILSPTPAMRRILLSGIGIHFFQQASGIDSVVLYSPRVFKSAGITDDKHLLGTTCAVGVTKTLFILVATFFLDRVGRRPLLLSSTGGMILSLIGLGAGLTVVGQHPDAKIPWAIGLSIASTLAYVAFFSIGLGPITWVYSSEIFPLQVRALGCSLGVAANRVTSGVISMTFLSLSKAITIGGSFFLYSGIAALAWVFFYTYLPETRGRTLEEMSKLFGDTAAASESDEPAKEKKKVEMAATN

SEQ ID NO: 12536 - protein, 441 aa, Oryza sativa (japonica cultivar-group)
MEGGRGGKRWRFATPNLAVAAAGERSIQRYLLQLHACLDENGPRPVIPLSHGDPSSSACFRTAPEAEEAVAAAVRSGDYNGYSSPATSLPARRAIAEYLSCDLPYKLCTDDIFLTSGGTQAIEIVMSVFGQPGANILLPKPGYPKHEAHAVFHRMEVRLYDLVPERGWEINVEAVEALADENTVAIVITNPNNPCGNVYTYEHLSKIADTASKFGLLVIADEVYGHLVYGSTPFVPMGVFGETVPVLTLGAISKRWVVPGWRFGWIAICDPKGILKETKVVDSLRSFRNLTTGPATFIQGAIPHIMKNTNDEFFRKTLELLKETAEICFGEIKEIKCITCPHKPEGSFFMMVKLDISQLSDICDDIDFCSKLVKEESVVLLPGRALGMENWLRITFALDPPRLKQGLERVKSFCRRHQSHANMLNISASAKVEPHFGMSKS

SEQ ID NO: 12537 - protein, 515 aa, Saccharomyces cerevisiae
MSKLGQEKNEVNYSDVREDRVVTNSTGNPINEPFVTQRIGEHGPLLLQDYNLIDSLAHFNRENIPQRNPHAHGSGAFGYFEVTDDITDICGSAMFSKIGKRTKCLTRFSTVGGDKGSADTVRDPRGFATKFYTEEGNLDWVYNNTPVFFIRDPSKFPHFIHTQKRNPQTNLRDADMFWDFLTTPENQVAIHQVMILFSDRGTPANYRSMHGYSGHTYKWSNKNGDWHYVQVHIKTDQGIKNLTIEEATKIAGSNPDYCQQDLFEAIQNGNYPSWTVYIQTMTERDAKKLPFSVFDLTKVWPQGQFPLRRVGKIVLNENPLNFFAQVEQAAFAPSTTVPYQEASADPVLQARLFSYADAHRYRLGPNFHQIPVNCPYASKFFNPAIRDGPMNVNGNFGSEPTYLANDKSYTYIQQDRPIQQHQEVWNGPAIPYHWATSPGDVDFVQARNLYRVLGKQPGQQKNLAYNIGIHVEGACPQIQQRVYDMFARVDKGLSEAIKKVAEAKHASELSSNSKF

SEQ ID NO: 12538 - protein, 416 aa, Hypocrea jecorina
MSLSNKLSITDVDLKGKRVLIRVDFNVPLDENKKITNNQRIVGAIPTIKHALDNGAKAVVLMSHLGRPNGAVNPKYSLKPVVPELERLLGKPVTFARDCVGPEVESIVNDADNGAVILLENLRFHIEEEGSAKDKDGNKTKADKAKVEEFRKGLTALGDIYINDAFGTAHRAHSSMVGVDLPQKAAGFLMKKELDYFAKALESPQRPFLAILGGAKVSDKIQLIDNLLDKVDTLIVCGGMAFTFKKVLNNIPIGTSLFDEAGAKTCPSCREAKAKNVKLVLPVDYITADKFDKDANTGTATDESGIPDGWMGLDCGEKSIELYKEAIADAKTILWNGPAGVFEFDKFANGTKATLDAVVEGCKNGKIVIIGGGDTATVAAKYGVEDKLSHVSTGGGASLELLEGKELPGVVALSSK

SEQ ID NO: 12539 - protein, 168 aa, Oryza sativa
ARGRGRENLPIPARRGWGRRCVATLRRKPEVDAAIRDTLDKVLVLRFGRADDAACLHLDDILAKSSWDISRFATVALVDMDSEEMQVYIDYFDITLVPATIFFFNAQHMKMDSGTPDHTKWIGSFSSKQDFIDVVEAIFRGAMKGKLIVSCPLPPERIPKFQLLFKDV

SEQ ID NO: 12540 - protein, 511 aa, Pelargonium x hortorum
MYNMSLYLLLGSSALAFAAYLVLFSFSKSRRRLPPGPKAWPIVGNLPHMGSMPHQNLAAMARTYGPLVYLRLGFVDVVVALSASMASQFLKTHDSNFSSRPPNAGAKHIAYNYHDLVFAPYGPRWRLFRKITSIHLFSGKALDDYRHVRQEEVGVLASNLARAVSTIVNLGQLLNICATNALGRAVIGKKVFKDGTDDVDPKADEFKSMVVELMVLAGVFNIGDFIPPLDCLDLQGVASKMKNLHKRFDAFLSAILQEHNINSAASATPSMLTTLISLKDSVEDSEGGKLTDTEIKALLLNMFTAGTDTTSSTVEWAIAELIRQPEILIRAQKEIDSVVGRDRLVTELDLSKLPYLQAIVKETFRLHSSTPLSLPRIATQSCEINGYHIPKGATLLVNVWAIARDPDVWADPLSFRPERFLPGSEKENVDVKGNDFELIPFGAGRRICAGMSLGLRMVQLLTATLLHAFNWDLPQGQIPQELNMDEAYGLTLQRASPLHVRPRPRLPSHLY

SEQ ID NO: 12541 - protein, 395 aa, Halobacterium sp. NRC-1
MQAVVLAAGKGERLWPLTENRPKPMVPVANQPILEHIVDALVSAGVTRVMLVVGSNRERVQRHFEDGSRWGIEISYVVQDRQLGTGHALAQAESVVGESFVALNGDRVIDASLVEDVWECHRESGDSAMGVTQVETPSAYGVVDLDGGTVTDIDEQPVPELVASEYINAGVYAFGPSVFAAIRRTDSYGELALTDALDEQLADHELRAVRYDGRWLDVSEPWDLVAANSALITDRRFDPPVERRKPRGSVPGDDQQAPVGGGTVCGEGVIVHPQAVVRNGVALGDNVTVGANAVIEQSILLPDSTVNPGAVVNDSIVGANATIGPNTTVEGGQTDVVLGDTVHQGVRFGALVGDNAEVGAGVTVAPGSIVGNSAVVDSATVVTGRVDDQAHVTRG

SEQ ID NO: 12542 - protein, 401 aa, Halobacterium sp. NRC-1
MQAIVVAAGRGTRMGPLTETRPKPLVPVAGATLLEHVLDAAAGVVDEYVIVVGYRGDQIRERIGASYAGTPVVYAEQDTQEGTAHAVGCAEPHVEGPCLVLNGDVYVTSALVEALAGADGTAMSVMPVADPQSYGVVERGDDGRVTNVVEKPTDPPTDLANLGLYRFTPRVFEYIDTVERSERGEYELTDALARAIDREDGGVTAVSYDGPWLDVGRPWELLAANSALLAEQEREINGTVADGATLTGRVVVEDGARVRDGAYIEGPVVIQSGADVGPNAYVRGATVVGPDVRVGNAVEVKNSILMADTAVGHHAYVGDSVLGADVNFGAGTKVANLRHDDAPVQVQVNGELVDTGRRKFGVVVGDDTKTGINTSLNAGVTLGTGTRTTLGAVVTTDKGRD

SEQ ID NO: 12543 - protein, 164 aa, Vibrio cholerae O139
VTPGVAADLSHIPTPVTIKGYAGEDPTPALEGADVVLVSAGVARKPGMDRADLFNVNAGIVKALAEKIAVVCPKACVGIITNPVNTTVPIAAEVLKKAGVYDKRKLFGVTTLDVIRSETFVAALKDKDPGQVRVPVIGGHSGVTILPLLSQVEGVSFTDEEVAA

SEQ ID NO: 12544 - protein, 339 aa, Talaromyces emersonii
MFATRQAFNLFQKRAFSASARQSSKVAILGAAGGIGQPLSLLMKLNPRVTELALYDIRGGPGVAADLSHINTNSTVTGYQPTPEGLRDALKGSEIVLIPAGVPRKRGMTRDDLFNTNASIVRDLAKAAADACPNANILVISNPVNSTVPIVAEVFKSKGVYNPKRLFGVTTLDVVRASRFISEVKNTDPANEEVTVVGGHSGVTIVPLISQSNHPDIEGETRDKLVNRIQFGGDEGVKAKDGAGSAALSMAFAGARSPSLCSSGQGVKGVVEPSFVDSPLYKDQGIDFFASRVELGPNGAEKVLPVGKVSPYEEKLLEAAFADLKKNIQKGIDFVKNNP

SEQ ID NO: 12545 - protein, 433 aa, Enterococcus faecalis V583
MSYQKPKGTNDILPGTSEKWQFVEETARLIFKDYQYQEIRTPIFEHYEVISRSVGDTTDIVSKEMYDFYDKGDRHVTLRPEGTAPIVRAFVENKLYGPEYTKPYKTYYMGPMFRYERPQAGRLRQFHQIGVEAFGSENPALDVEIMAMALDFFKQLGIQQIKLVINSLGDKETRATYRQALIDYLEPHMAELSEDSQRRLHENPLRVLDSKDKKDKVIVAEAPSILDYLNEPSKAHFEAVTDMLDLLEIPYEIDSNMVRGLDYYTHTIFEIMSEAPKMGAQSTICAGGRYNGLVEELGGPDTPGFGFGMGIERVLLTMEAEEVVIPALSELDAYVVGIGSDTNVAALQLVQSIRNFGFSADRDYMNRKPKAQFKTADKLQAKLVLTIGENELNEGIVNVKSMATREEKAFPLSAIHDSFDEVYDEMMTKMIEE

SEQ ID NO: 12546 - protein, 164 aa, Vibrio cholerae O139
VTPGVAADLSHIPTPVTIKGYAGEDPTPALEGADVVLVSAGVARKPGMDRADLFNVNAGIVKALAEKIAVVCPKACVGIITNPVNTTVPIAAEVLKKAGVYDKRKLFGVTTLDVIRSETFVAALKDKDPGQVRLPVIGGHSGVTILPLLSQVEGVSFTDEEVAA

SEQ ID NO: 12547 - protein, 389 aa, Staphylococcus carnosus
MTIGIDQLNFYIPNFYVDMAELAEARGVDPNKFLIGIGQSQMAVSPVSQDIVSMGANAAQPILSEQDKKDITMVIVATESAIDSAKASAVQIHHLLGIQPFARCFEMKEACYAATPAIQLAKDYLVPRPKEKVLVIASDTARYGLNSGGEPTQGAGAVAMVISHNPSILELHDDSVAYTEDVYDFWRPSGEIYPLVAGKLSKDAYIKSFQESWNEYAKRHHKSLSDFAALCFHVPFTKMGQKALDSILTDSASEDTQARLNEGYKSATDYNRYVGNVYTGSLYLSLISLLENHKLNGGDNIGLFSYGSGSVGEFFSATLVDNYQDHLDVKAHKAMLDNRKALSVEEYEKFFNRFDNLEFDTETELEVEPKGNFYLKEISDNIRYYDTVK

SEQ ID NO: 12548 - protein, 444 aa, Bacillus subtilis
MSSYLIKPELSSAYPVVSYAKGSYVYDQTGKKYLDGSSGAVTCNIGHGVRDVTEKLKEQLDQVSFAYRSQFTSEPAEQLAALLAQELPGDVNWSFFVNSGSEAIETAMKIAIQYWQEKKQTQKSIFLSRWSSYHGITLGALSLSGFYERRYRFTHLIERYPAISAPHIYRLNHETEEDFVQTAADELDTMIKRIGSQFIAGFVAEPIIGAAGAAITPPPGYYERLSEVCRTHDVLFIADEVMTGLGRTGRMLATEHWDTVPDIAVLGKGLGAGYAPIAAAVVSDSIIETIKQGSGVIMSGHTYSAHPYSAKAALEVLRYVLKHGLIKQSEKKGAVLKKKLDEAASQSGIIGEVRGKGLLLGIEFVQTKKRRKCFRQQQAITQLIVSEAKKRGLIVYPSKAGIDSGEGDAVIIAPPFTISDGEMEELISIFSETVAAVEKNLKKD

SEQ ID NO: 12549 - protein, 254 aa, Escherichia coli
MENIMNNPVIGVVMCRNRLKGHATQTLQEKYLNAIIHAGGLPIALPHALAEPSLLEQLLPKLDGIYLPGSPSNVQPHLYGENGDEPDADPGRDLLSMAIINAALERRIPIFAICRGLQELVVATGGSLHRKLCEQPELLEHREDPELPVEQQYAPSHEVQVEEGGLLSALLPECSNFWVNSLHGQGAKVVSPRLRVEARSPDGLVEAVSVINHPFALGVQWHPEWNSSEYALSRILFEGFITACQHHIAEKQRL

SEQ ID NO: 12550 - protein, 484 aa, Physcomitrella patens
MNVSEGCSTLTGAQLKYSTDKSNMSYETVYRDAAVESPQREVSNESGSTLKEHDYFGLSEVLSSNSSSGKQPEKCCREELNLNESATTLQLGPPAAVKPSGQADGDDAHDEGAGPENPAKRSAYHMQQESLADGRKAAAEMGSFKIQRKNILEEFRAMKAHAHMTKSPKTVQTMQHNMHVSYSGAQMAFGGAKNNGVKRVFSEAVVANHNAASGVGVGVREGNDDVSRCEEMNGTEQLDLKVHLPKGMGMARMAPASGSPSFDNMQGPLNPFFRKSLVSKMPVPDGGDSSANASNDCANRKGMVASPSVQPPPAQNQTVGWPPVKNFNKMNTPAPPASTPARACPSVQRKGASTSSSGNLVKIYMDGVPFGRKVDLKTNDSYDKLYSMLEDMFQQYISGQYCGGRSSSSGESHWVASSRKLNFLEGSEYVLIYEDHEGDSMLVGDVPWELFVNAVKRLRIMKGSEQVNLAPKNADPTKVQVAVG

SEQ ID NO: 12551 - protein, 315 aa, Oryza sativa (japonica cultivar-group)
MEGGRGGKRWRFATPNLAVAAAGERSIQRYLLQLHACLDENGPRPVIPLSHGDPSSSACFRTAPEAEEAVAAAVRSGDYNGYSSPATSLPARRAIAEYLSCDLPYKLCTDDIFLTSGGTQAIEIVMSVFGQPGANILLPKPGYPKHEAHAVFHRMEVRLYDLVPERGWEINVEAVEALADENTVAIVITNPNNPCGNVYTYEHLSKIADTASKFGLLVIADEVYGHLVYGSTPFVPMGVFGETVPVLTLGAISKRWVVPGWRFGWIAICDPKGILKETKVVDSLRSFRNLTTGPATFIQVILWTHKSHIKLSVPW

SEQ ID NO: 12552 - protein, 503 aa, Physcomitrella patens
MKFSNEVVHKSMNITEDCSALTGALLKYSTDKSNMNFETLYRDAAVESPQHEVSNESGSTLKEHDYFGLSEVSSSNSSSGKQPEKCCREELNLNESATTLQLGPPAAVKPSGHADGADAHDEGAGPENPAKRPAHHMQQESLADGRKAAAEMGSFKIQRKNILEEFRAMKAQAHMTKSPKPVHTMQHNMHASFSGAQMAFGGAKNNGVKRVFSEAVGGNHIAASGVGVGVREGNDDVSRCEEMNGTEQLDLKVHLPKGMGMARMAPVSGGQNGSAWRNLSFDNMQGPLNPFFRKSLVSKMPVPDGGDSSANASNDCANRKGMVASPSVQPPPAQNQTVGWPPVKNFNKMNTPAPPASTPARACPSVQRKGASTSSSGNLVKIYMDGVPFGRKVDLKTNDSYDKLYSMLEDMFQQYISGQYCGGRSSSSGESHWVASSRKLNFLEGSEYVLIYEDHEGDSMLVGDVPWELFVNAVKRLRIMKGSEQVNLAPKNADPTKVQVAVG

SEQ ID NO: 12553 - protein, 864 aa, Ustilago maydis 521
MPSVEPVRARKIAPLPSKTASQQQTTQLSVATTASEGAIMKRASNSSLYAISVDAVAPPSPSKRRSSASDESDISSASPTTPIKPLRSSLSKKAPPPGSMAAINSVGSSSSTNYQGMYLSFVINALSEREKGNTGPYYELLVQFAEPSTGRSGASASSLRSLLAALSHVVSDLDRSHAKLVESIFALPWTSMDDSFAQMWIKFVCSLVSARSEWLSVILTKATKALSYRLEWLPYQFADELGKRSVSTLKRKQVYERVHLLIRSLLSVVPTLPGVLGPLLVQFLPHKMVHRSDQLVYVRNILHVSEYCAELSEAILGAVIDRAIQLDVEIQVELDEFDDDEAEELGLDFEDPFEQALDDIDDGDSSDDDDESDAGDFADNLSDLSDENYEQGVATEEQKRTQEDLQRSMRRIRESVAKLDAIMIALFEHLRKLDAQYVAGANSLNYSSPMDSEANRRNLFHTLLSIFARNILPTFRSRHVQFLLFWFNSLDPEFSDYFLGVLLEKSLYSKRVDMGQKDEPAVIRSAAAGYVASFVSRASYVDGPTTRVVLYNLCAFLDAHIDESSRTDTEAGSAAPGTGTHSVFYSVVQAAFYIFCFRWRDLKITDEEQDGGADDLDYHDADEIGGGMHDSVGSLGQFGAEAWCDGLTSLQRAVTSRLNPLKYCSANVVKQFARIAQHTGFLYCYSIIEANNRSVRGINRSIPVSRSTSLNRLQLDGSGSATPMSQDGSERGTPRPDSLDTEATKKETVVTTSSVLESFFPFDPYKLESSASFIEPLYREWAEVAPDEDGQDSSEDEDDDDDEADDVRRNESVAIGGLAIPGSKSRPRTYSNEEEEEEEDEDEDGNSSSFVSQVEAMSISPYLG

SEQ ID NO: 12554 - protein, 286 aa, Oryza sativa
MELGGGGHESVERRRRHQHHFVLVHGLCHGAWCWYKAAAALRRAGHRATALDMAASGAHPARVDEVRTFEDYSRPLLDALAALPPAGGDGDDEERVVLVGHSQGGFSVALAAERFPERVAAVVFLTAAMPPVGRPMSATTVEVINLCLVHTFFLDSMELEQQNADIPGNPVIFGPNFMAQILYHLSPQEDLTLGLSLIRPTNKFTGDALMRDPGLLTKERYGSTRRVFVVVEDDRGIPVEFQRRMIAENPGVEVVDFAGADHMAMISSPAKLAELLVRIADKAHEP

SEQ ID NO: 12555 - protein, 513 aa, Ralstonia eutropha JMP134
MTTWFKRILTAGAMALAIGTAGVGLSTHAVAQDKPAAEASAPAAAAAPAAAPAAAAAPAAATTAAAPAEAAAAPAAPVPNKGDTAWLLVSTAFVILMTLPGLALFYGGLVRSKNMLSVLMQCLVIFSVVSLLWAVYGYSFAFTEGNAFFGGTDRLFMKGLTVDAVAATFSKGVVVPELGYFAFQCAFAAITCGLIIGAFAERAKFSAVLVFVVLWFTFSYIPIAHMVWFWPGPDAFTDAAAGTAATAKSGWLFQKGALDFAGGTVVHINAAVAGLVGAFMFGKRIGFGREAIRPHSLTFTMVGASLLWFGWFGFNAGSALEANGSAALAFVNTLLATCAAVLSWTFGEWISKGKPSMLGGASGAVAGLVAITPAAGFVGPMGSIAIGLIAGLLCLWGVTGLKRMLGMDDSLDVFGVHGVGGILGALLTGVFASPSLGGTGIYDYVANKVADDYSIAGQVWIQFQGVLTTIVWSGVVAFVAYKLVDMLIGLRVPEEEEREGLDITSHGETAYEV

SEQ ID NO: 12556 - protein, 458 aa, Bacillus cereus ATCC 10987
MDENYDKQRQSLLGKDFNDNEERNEQAILHSQTVGSRGPVLEQDSVLHEALQQFIHEKILERPVHVKGFGAFGYFQTIYPMSEHTKLSFLQHSNEKVPVMVRFSLAVSTKGTPDTSRNVRGFSTKFYTKEGIFDLLCNHIPVFSVRDPMRFPETIQALSPSPKNNLIDPNRFWSFVARAPESIHFVVRLYSDNGTAKSLRHIPGHSVNTYVWRNAEGNRKYVKYHWYPFEGVQFITSEEANKLAAENPDYSGKDLYDAIANGKPVEYGLYVQLMDPKDEAHLSYDPLDDTKIWDEKAYPLIPVGKMVLNKNPENFMEQIEKVAFSPSNLLDGAELSDDKMLQGRANIYSDSQRKRIGPEFRKLTINQQQNWTPANQITSGDGRYVDGKLERTSISKQDDFTQAGEFYATLKPIEKEHLAENLAGDLKVISDDIRKVVLEYFHNVSVDLVKRIETEIKK

SEQ ID NO: 12557 - protein, 491 aa, Synechococcus sp. PCC 7942
MPRGVAPAFAGRKPKGWAWASTAVPDFQGGFKRLINRFQGSKLWLACVPLAATIAVFWGVAANAQGSADPVPSAQFLVNNLWLMVATVLVIFMNAGFAMVETGLCRQKNAVNVLAKNLIVFTLAATAYWFIGYSLMYGSPVVDGFLYFGKGGPLGFFFDPTVSAETIKNDGLISSLDFLFQAAFAGTAATIVSGSVAERIKFVDFIIFSLILTAVIYPIAGSWQWNVGSGWLNKAGFIDFAGSTVVHSVGGWAALIGAITLGPRMGKFQDGRPGALPGHNLAIATLGALILWIGWYGFNGGSVLAFNTAVPYVAVTTTLGGAAGGISATITSWSTSGKPDLSMVINGILAGLVGVTAGCDGFGMGGSFIVGLIAGVLVVFSVYTFENLKIDDPVGACSVHLVCGIWGTLAVGLFNLEKGLFYGGGFGQLGSQILGIISYGVWTVVASVIIWNILKALLGLRVSLKKSYKAWILANTGWKPTLALPRMHLTP

SEQ ID NO: 12558 - protein, 209 aa, Eremothecium gossypii
MAYQTGGNIRKKLVIVGDGACGKTCLLVVFSKGQFPEIHVPTVFENYVADVDIDGRRVELALWDTAGQEDYDRLRPLSYPDSNVVLICFSVDLPDSLDNVQEKWVSEVLHFCQGVPILLVGCKVDLRNDPQVLQQLQAEGQRPVTAAEGSAVAGKIGAVAYLECSARTGQGVKEVFDTATRAALSGKPAASAGKKKVHGDKKKKKCLVL

SEQ ID NO: 12559 - protein, 207 aa, Eremothecium gossypii
MSQQMHNPSIRRKLVIVGDGACGKTCLLIVFAKGKFPQVYVPTVFDNYVADVEVDGRRVELALWDTAGQEDYDRLRPLSYPDSNVVLICYSIDLPDSLENVMEKWISEVLYFCQGVPIILVGCKADLRNDPQVIEQLRQQGQQPVSQAQAQEVADQIGAVEYIECSAKTGFGVREVFEAATRASLMGKQGKSKAKSDKKKKKKCVVL

SEQ ID NO: 12560 - protein, 506 aa, Zea mays
  unsure (1)..(506): unsure at all Xaa locations
MASPAMVPLRQLFVDGEWRPPAQGRRLPVVNPTTEAHIGEIPAGTAEDVDAAVAAARAALKRNRGRDWARAPGAVRAKYLRAIAAKVIERKPGLAKLEALDCGKPYDEAPWDSDDVAGCFECFAHPLSSNIVTGLGPDACAPLSSHANSDKVYFXLVGLIPVRNYPXLMATWXKPAPALAAGKRAMLVFDDXAIDKAVEWTSVWVLLGLSSGVLDNDPVLGPDAGAPLSAHPDVDKVAFTGSFETGKKIMASAAPMVKPVTLELGGKSPIVVFDDVDIDKAVEWTLFGCFWTNGQICSATSRLLIHTKIAKKFNERMVAWAKNIKVSDPLEEGCRLGPVVSEGQYEKIKKFISNAKSQGATILTGGVRPAHLEKGFFIEPTIITDITTSMEIWREEVFGPVLCVKEFSTEDEAIELANDTQYGLAGAVISGDRERCQRLSEEIDAGCIWVNCSQPCFCQAPWGGNKRSGFGRELGEGGIDNYLSVKQVTEYISDEPWGWYQSPSKL

SEQ ID NO: 12561 - protein, 497 aa, Bordetella parapertussis 12822
MSTLPPLSHWESLAAGLTLRNQAFIDGRWHDGRAGPLAAINPATGQLLAEVTACSQADIDQAVAAARRAFESGVWSRMPRRERKQCMLRLAALIREHAEELALIETLDMGKPIGDTMAFDIPETAHTYAWYAETIDKQYDEIAPTDADALATITREPLGVVAAVVPWNYPLLMASWKVAPALAAGNSVILKPAEQSSLSALRLAELALQAGIPAGVLNVVPGAGPVAGRALGLHMDVDCLAFTGSTATGKRFMEYSGQSNLKQIWLECGGKSPHIIFDDCPDLDRAALAAAIGIFNNQGEVCIAGSRLYVQAGIYDTFVSKVEACARAMQPGNPLDPASPMGAMVDERQMARVLEYVESGRREGARLRMGGERVRADSGGYYIEPTIFECARPDLTIVREEIFGPVLAVTRFDGEDEVVAQANASAYGLGSGLWTADLSRAHRVSRRLRAGLVWVNCYFDGDVTVPFGGVKQSGFGRDKSLHALDKYTSLKTTWIRL

SEQ ID NO: 12562 - protein, 475 aa, Triticum aestivum
MAASTAPLAFSASASALSARLRLAAPPAPPSCAATTRRRRPVVVRAKIREIFMPALSSTMTEGKIVSWAAAEGDRVAKGDAVVVVESDKADMDVETFYDGIVAAVLVPAGETAPVGAPIALLAESEEDVALAVAQAQALSSGQPQQQAPALSDAAAPPPPPAAPVAAAPAPVAAGTKGVATPQAKKLAKQHRVDLAKVTGTGQFGRITPADVEAAAGIQPKPKVAPTPAAAPVAAASSVKAVPQAAVLPPVPGATVVPFTAMQAAVSKNMVESLSVPAFRVGYPILTDKLDALYEKVKPKGVTMTVLLAKAAAMALAQHPVVNASCRDGTSFTYNSSINIAVAVSIDGGLITPVLEQADKLDIYLLSQKWKELVKKARAKQLQPNEYNSGTFTLSNLGMFGVDRFDAILPPGQGAIMAVGASKPTVAADKDGFFSVKSKMMVNVTADHRIVYGADLAAFLQTFAKIIEDPESLTL

SEQ ID NO: 12563 - protein, 229 aa, Zea mays
MMNCAGGGDPVEDFLISGAVDDEDLAIFCDGGLGIEGVNGDACGFEQSNLGKRSRDEPCSSGLKSKACREKMRRDKLNDRFLELSSVMNPGKQAKLDKANILSDAARMVAQLRGEAEKLKESNEKLRENIKDLKEEKNELREEKVRLKVEKDRLEQQQVKAMSVAPTGYVPHLPHPASYHPAAFTPFAPPPANKSAPIPAPFPGMAMWQWLPPTIVDTTQDPKLWPPNA

SEQ ID NO: 12564 - protein, 197 aa, Triticum aestivum
MDVAASEFYNDKDKTYDLNFKEENNDGSQKISGDSLKNVYKSFVSEYPIVSIEDPFDQDDWVHYAKMTEECGVEVQIVGDDLLVTNPTRVAKAIQEKSCNALLLKVNQIGSVTESIEAVKMSKHAGWGVMTSHRSGETEDTFIADLAVGLSTGQIKTGAPCRSERLAKYNQLLRIEEELGDAAVYAGLKFRAPVEPY

SEQ ID NO: 12565 - protein, 526 aa, Arabidopsis thaliana
MMKNLPEVGNGGGSGFPAVSVGNKKNKYQRMDSDAEESQNHREAEARNSRTRKYVMACAFFASLNNVLLGYDVGVMSGAVLFIQQDLKITEVQTEVLIGSLSIISLFGSLAGGRTSDSIGRKWTMALAALVFQTGAAVMAVAPSFEVLMIGRTLAGIGIGLGVMIAPVYIAEISPTVARGFFTSFPEIFINLGILLGYVSNYAFSGLSVHISWRIMLAVGILPSVFIGFALCVIPESPRWLVMKGRVDSAREVLMKTNERDDEAEERLAEIQLAAAHTEGSEDRPVWRELLSPSPVVRKMLIVGFGIQCFQQITGIDATVYYSPEILKEAGIQDETKLLAATVAVGVTKTVFILFATFLIDSVGRKPLLYVSTIGMTLCLFCLSFTLTFLGQGTLGITLALLFVCGNVAFFSIGMGPVCWVLTSEIFPLRLRAQASALGAVGNRVCSGLVAMSFLSVSRAITVGGTFFVFSLVSALSVIFVYVLVPETSGKSLEQIELMFQGGLERKDGEVELGDAERLVRKEQEF

SEQ ID NO: 12566 - protein, 461 aa, Brassica juncea
MAKNVGILAMDIYFPPTCVQQEALEAHDGASKGKYTIGLGQDCLAFCTELEDVISMSFNAVTSLLDKYKIDPKQIGRLEVGSETVIDKSKSIKTFLMQLLEKCGNTDVEGVDSTNACYGGTAALLNCVNWVESNSWDGRYGLVICTDSAVYAEGPARPTGGAAAIAMLIGPNAPIVFESKLRGSHMAHVYDFYKPNLASEYPVVDGKLSQTCYLMALDSCYKHMCNKFEKLEGKEFSINDADYFVFHSPYNKLVQKSFARLLYNDFLRNASSIDEAAKEKFTPYSSLSLDESYQSRDLEKVSQQVAKTFYDAKVQPTTLVPKEVGNMYTASLYAAFASLIHNEHSDLAGKRVVMFSYGSGSTATMFSLRLCENQSPFSLSNIASVMDIGGKLKARHEYAPEKFVETMKLMEHRYGAKEFVTSKEGILELLAPGTYYLKEVDSLYRRFYGKKGDDGSIANGH

SEQ ID NO: 12567 - protein, 461 aa, Brassica juncea
MAENVGILAMDIYFPPTCVQQEALEAHDGASKGKYTIGLGQDCLAFCTELEDVISMSFNAVTSLLDKYKIDPMQIGRLEVGSETVIDKSKSIKTFLMQLFEKCGNTDVEGVDSTNACYGGTAALLNCVNWVESNSWDGRYGLVICTDSAVYAEGPARPTGGAAAIAMLIGPNAPIVFESKLRGSHMAHVYDFYKPNLASEYPVVDGKLSQTCYLMALDSCYKHLCNKFEKLEGKEFSINDADYFVFHSPYNKLVQKSFARLLYNDFLRNASSIDEAAKEKFIPYSSLSLDESYQSRDLEKVSQQVAKTFYDGKVQPTTLVPKEVGNMYTASLYAAFASLIHNKHSDLAGKRVVMFSYGSGSTATMFSLRLCENKSPFSLSNIASVMDIGGKLKARHEYAPEKFVETMKLMEHRYGAKDFVTSKEGILELLAPGTYYLKEVDSLYRRFYGKKGDDGSIANGH

SEQ ID NO: 12568 - protein, 444 aa, Mesembryanthemum crystallinum
MVTIKCVKARQIYDSRGNPTVEADIHLDDGTYARAAVPSGASTGVYEALELRDGGKDYMGKGVYKAVKNVNEIIGPALVGKDPTQQTAIDNFMVQQLDGTVNEWGWCKQKLGANAILAVSLAVCKAGAQVKKIPLYQHIAEIAGNKNMVLPVPAFNVINGGSHAGNKLAMQEFMILPTGASSFKEAMKMGSEVYHNLKSVIKKKYGQDATNVGDEGGFAPNIQENKEGLELLKTAIEKAGYTGKVVIGMDVAASEFYKEDKSYDLNFKEENNDGSQRISGEALKDLYKSFVAEYPIVSIEDPFDQDDWEHYAKMTAECGEKVQIVGDDLLVTNPKRVKKAIDENSCNALLLKVNQIGSVTESIEAVKMSKKAGWGVMASHRSGETEDTFIADLSVGLSTGQIKTGAPCRSERLAKYNQLLRIEEELGDKAVYAGANFRRPVEPY

SEQ ID NO: 12569 - protein, 367 aa, Monascus purpureus
MAEPQIPTKQKAAIYDKPGTVSTKVVEIDVPEPGPGEVLVNLTHSGICHSDYGVMTNSWKLLPYPTQPGQIGGHEGVGKVVKFGPGANGTGLKIGDRVGIKWVSSACGNCHPCHAGADGICLNQKISGYYTPGTFQQYATGPANYVTPIPENLSSAEAAPLLCAGVTVYAALKRSKAQPGQWIVISGADGGLGHLAVQIASRGMGLRVIGIDHGSKAALVKESGAEHFVDITAFPKDDNGAAIAAHVKSLTTEKLGAHAVIVCTASNAAYAQAFLFLRFNGTLVCVGMPEHESQAIATAYPAAIVFNQATITGSAVGNRIEAIEVLDFAARGIIKSHVRMAKLEDLTDLFNEMAEGKLQGRVVLDLS

SEQ ID NO: 12570 - protein, 453 aa, Brassica juncea
MAKNVGILAMDIYFPPTCVQQEALEAHDGASKGKYTIGLGQDCLAFCTELEDVISMSFNAVTSLLEKYKIDPNQIGRLEVGSETVIDKSKSIKTFVMQLFEKCGNTDVEGVDSTNACYGGTAALLNCVNWVESNSWDGRYGLVICTDSAVYAEGPARPTGGAAAIAMLIGPDAPIVFESKLRGSHIPHVYDFYKPNLASEYPVVDGKLSQTCYLMALDSCYKHLCNKFEKLEGKEFSINDADYFVFHSPYNKLVQKSFARLLYNDFLRNASSIDEAAKEKFTPYSSLSLDESYQSRDLEKVSQQLAKTFYDAKVQPTTLVPKQVGNMYTASLYAAFASLIHNKHNDLVGKRVVMFSYGSGSTATMFSLRLCENQSPFSLSNIASVMDVGVSPEKFVETMKLMEHRYGAKEFVTSKEGILDLLAPGTYYLKEVDSLYRRFYGKKGDDGSVANGQ

SEQ ID NO: 12571 - protein, 504 aa, Triticum aestivum
  unsure (1)..(504): unsure at all Xaa locations
LTSRSACVRVHGVQFRPSSSFDTKTTTTNAGQPVWNDNEALTVGPRGPILLEDYHLLEKIAHFARERIPERVVHARGASAKGFFECTHDVTGLTCADFLRAPGARTPVXIVRFXTVIHERGSPETIRDPRGFAVKFYTREGNWDLLGNNFPVFFIRDGIKFPDVIHAFKPNPKSHVQEYWRVFDFLSHHPESLHTFFFLFDDVGIPTDYRHMDGFGVNTYTFVSRAGKSHYVKFHWRPTCGVSCLMDDEATLVGGKNHSHATQDLYDSIDAGNFPEWKLFVQVIDPDDEDRFDFDPLDDTKTWPEDLVPLQPVGRLVLDRNVDNFFNENEQLAFGPGLVVPGIYYSDDKMLQCRVFAYADTQRYRLGPNYLMLPVNAPKCGFKNNHYDGAMNFMHRDEEVDYYPSRHAPLRQAEPASFPVPTRPVVGKREKTRIKKENDFVQPGERYRSWAPDRQDRFVRRFADALAHPKVSHELRVIWIDFLSKCDKSCGMKVANRLNVKPSM

SEQ ID NO: 12572 - protein, 426 aa, GIBBERELLA ZEAE PH-1
MSNQTQKLQPAGRVQGQKKDVWSMINEAAASSPIQPIVNLGQGFFGYNPPDFILNAAKEALDRVECNQYAPAKGRPRLRQALADAYSPSWGRQLDPETEIIITTGANEGMLSAFMGFIEAGDEVIVFEPFFDQYISNIQMPGGKVVYVPLHPPKTGATKNSSAADWTIDFEELEKAFTPRTKMIVINTPHNPVGKVFSKEELQGIADLAVKHQVIILSDEVYDKLYYVPFTRIANLSPEVEKLTLTVGSAGKNFYATGWRVGWLIGPQELIQYVTAAHTRICFSTPAPFQEASAIGFEQAGKNGFWDETIKEMKGKIDRLKEVFEELELPVTYPEGGYFLLVNMAKVKLPEDYPFPPHVASRPRDFKLAWFLIQEIGVAAIPPTEFYTPVNAHLAEDYIRFAVCKNDDILEQAKERLRGLKKYIPE

SEQ ID NO: 12573 - protein, 772 aa, Deinococcus radiodurans R1
MADFHFALLKGRWLMAPKRTLSTPLSLDDAQKQVDDLSKAQDLSANTTDPGTTLTDNMGHVVSDDQNSLRAGERGPTLMEDFLFREKITHFDHERIPERVVHARGAGAHGYFQLDKSLEKYTHAKVLTEVGVKTPVFARFSTVAGSRGSADTARDVRGFAVKMYTKEGNWDIVGNNIPVFFIQDAIKFPDLIHSVKPEPHNEIPQAASAHDTFYDFIAETPEAMHMLMWIHSDRAIPRAYNMMEGFGVHTFRLVNAQGKAHLVKFHWKPVLGVKSLVWDEAQKIAGKDADFHRRSMWETIDQGGTLEWDFGVQVFTEEEAMKWDFDVLDATKIVPEDLVPVQRVGKMVLDRNVDNFFAETEQVAFMTQNVVPGIDFTNDPLLQGRNFSYLDTQLSRLGSPNWQELPINRPIIRVSNNQRDGHMRHTINKGRVAYFPNQMAANKPAQAGAAGFVTYPDKVEGTKLRVRAESFSDHYGQARLFWNSMSPVEKEHIAKSLRFELSKCETRDVRVRMLGHLAKINEVLAAQVAKGLGEKLPSTSDAKPGGQQDSASETALLAAAISPTTASGGLQKAKGLSQEEGQPKSAKGRKVAVLVADGVDAAGVKALQDALKKADVKYDIVAPHLGEIASGVMATATLSNTDPVVYDGVVVAGGAAAVRELAQHPESFNFVVGSYRHAKPIGSLGEGAEIVTGSGIGNVLRRVAADSPAKDGATAPVQNLSEVAGVRLAAGEGGAKLAALGVIVGQDKGASAAADSFVQALAEHRFWGRPQL

SEQ ID NO: 12574 - protein, 565 aa, Arabidopsis thaliana
MASTPKLTSTISSSSPSLQFLCKKLPIAIHLPSSSSSSFLSLPKTLTSLYSLRPRIALLSNHRYYHSRRFSVCASTDNGAESDRHYDFDLFTIGAGSGGVRASRFATSFGASAAVCELPFSTISSDTAGGVGGTCVLRGCVPKKLLVYASKYSHEFEDSHGFGWKYETEPSHDWTTLIANKNAELQRLTGIYKNILSKANVKLIEGRGKVIDPHTVDVDGKIYTTRNILIAVGGRPFIPDIPGKEFAIDSDAALDLPSKPKKIAIVGGGYIALEFAGIFNGLNCEVHVFIRQKKVLRGFDEDVRDFVGEQMSLRGIEFHTEESPEAIIKAGDGSFSLKTSKGTVEGFSHVMFATGRKPNTKNLGLENVGVKMAKNGAIEVDEYSQTSVPSIWAVGDVTDRINLTPVALMEGGALAKTLFQNEPTKPDYRAVPCAVFSQPPIGTVGLTEEQAIEQYGDVDVYTSSFRPLKATLSGLPDRVFMKLIVCANTNKVLGVHMCGEDSPEIIQGFGVAVKAGLTKADFDATVGVHPTAAEEFVTMRAPTRKFRKDSSEGKASPEAKTAAGV

SEQ ID NO: 12575 - protein, 424 aa, Bordetella parapertussis 12822
MDNAELTRRKEAATPRGVGVMCNFYADRAENAELWDTEGRRYIDFAGGIAVLNTGHRHPQLMQALQAQMSRFTHTAYQIVPYASYIQLAERINQLAPGDFAKKTALFTTGAEAVENAVKIARAATGRPAVVAFGAAFHGRTLLGMALTGKVVPYKVGFGPFPADIYHVPYPNALHGVSTDDALAALGTLFKTDVDPRRVAAIIIEPVQGEGGFNICPPAFMQALRALCDDHGILLIADEVQTGFGRTGKLFAMEHYGVAADLTAMAKSLAGGMPLSAVCGRAEVMDAPPPGGLGGTYAGNPLAVAAALEVIRIIEAEDLLARGTRLGHQLRDHLEAQRHDVPEIAEVRALGAMVAVEFRQPGSDAPSPEFARQVQARALEQGLLLLTCGSDGNVIRFLFPLTIPEAVMREALDILARTLRGQNA

SEQ ID NO: 12576 - protein, 164 aa, Ralstonia metallidurans CH34
MSNVYQFEANSLSGQPQPLADYRGKVLLIVNTASECGFTPQYAGLQTLQASYQARGFDVLGFPCNQFGKQEPGDAEQIGAFCESRFHVTFPMFEKIDVNGADAHPLYKWLTSEKRGFLGTQAIKWNFTKFLLRRDGTVFKRYASTTKPEEIRADIESLLAEQPA

SEQ ID NO: 12577 - protein, 427 aa, Methylobacillus flagellatus KT
MQQHELSSSRFVSTLTKNTVALILAGGKGSRLRDLTNWTAKPAVPFGGKFRIIDFPLSNCINSGVRRIGVVTQYKAHTLIQHIQRGWGFLRGEFNEFVELLPAQQRIQEEWYKGTADAVFQNLDILRQTNIEFVLILAGDHVYKMDYGQMLAAHVRNKADMTVACINVPLKEASAFGVMGVDENDRVVDFEEKPAHPSSLPDDPDHALASMGIYVFNAAFLYEQLIRDADDPKSSHDFGHDIIPYLIKKYRVFAHRFTDSCVGAADGNYYWRDVGTVDAYWEANMELTKVVPELNLYDRQWPIWTYQEQLPPAKFVFDNEERRGQATDSLISGGCIVSGANVRNSVLFSDVRVNSYSSIEQSVILPKVDIGRHVTLRRVVVDSGARIPDGMEIGVNLELDRKRFHITEQGVVLVTPDMLGQNLHHIR

SEQ ID NO: 12578 - protein, 118 aa, Triticum aestivum
  unsure (1)..(118): unsure at all Xaa locations
MAPAVTXSSXTTVAPXQGLKSTAGLPVSRRTSXQPRQXHNGGRXRCMQVWPXEGIKKYETLXYLPPLATEALLKQVDYXXRSXWVPCLEXARWLRFRXHNSPPGXXXGRXWTMXKHGA

SEQ ID NO: 12579 - protein, 214 aa, Neurospora crassa
MANDEYDFLFKVVLIGDSGVGKSNLLSRFTRNEFNLDSKSTIGVEFATRSIQVDSKTIKAQIWDTAGQERYRAITSAYYRGAVGALLVYDISKGVTFENVNRWLKELRDHADQNIVIMLVGNKSDLRHLRAVPTEDAKKFAEENHLSFIETSALDATNVELAFQNILTEIYKIVSTKNFDNGPSGSNEGHQNLSGQSISLSQTANDPQAKSGCC

SEQ ID NO: 12580 - protein, 136 aa, Zea mays
  unsure (1)..(136): unsure at all Xaa locations
MCKILRSISSCSRRTSSGYSEEHCFSWIQGDAEALSFEDGSMDGYTITFGIRNVTHIEKALSEAYSXDGSKARVEVPMLGVESCGYRRRXNMLTRHVNLEPWQEKFAQMIQEAGFQRVEYENLLSGVVAIHSGLKL

SEQ ID NO: 12581 - protein, 627 aa, Pseudomonas aeruginosa
MCGIAGFWNITGTLLGDNARVARQMAAAIHHRGPDESGIWYEAPRAPILVHARLAVLELSPAGSQPMHSDCGRYVLIYNGEIYNHLALRARLSEAGVTHSWRGGSDTETLLACFAQWGVESTLKLTVGMFALALWDRQEKTITLARDRMGEKPLYWGWQNGVLFFASELKALKEHPLFRGDIDRDALALFLRYGYVPAPYSIYKGIGKLRAGSYLVLSERSLNETCEPAAYWSANAAIEEALSNPFQGTDAEAVDLLESQLRTSISDQMVSDVPLGAFLSGGVDSSTVVALMQQQSSRPIRTFSIGFDEPGYDEAVYAKAVAEHIGTDHTELYVNSKDALDVIPSLPKIYCEPFGDSSQIPTLIVSGLARQQVTVALSGDGGDELFGGYNPYQFTPRVWRMLERFPHSMRRFASAFAQDLPLPEKLGKLRDVFASRTAEELFYRLNSHWRNHEYPVIGAQGHTALLDTPERWPRVDSFQHWMMAMDVQGYMPDDILVKVDRAAMANSLETRVPLIDHRVFELAWRMPLHMKIRNGKGKWLLREVLYRHVSRELIERPKKGFSVPVSDWLRGPLKEWAESLLDERRLQQEGYLDSRLIRRIWNDHLAGRRDHSRRLWSVLMFQAWLES

SEQ ID NO: 12582 - protein, 274 aa, Ralstonia metallidurans CH34
MMLDSLTFGFLGGGNMASALIGGLVARGVPANAIRVVDPFEDARQRLATTLGVQTLAAPDAAFGASNVIVLAVKPQQFKDAVGALAPQLKNSLIISVAAGIRLQDMQRWLGTNRLVRAMPNTPALAGMGMTGLAAAPGLSDEDRAIAKAVAEAVGQCVWVEGDDQIDAVTAISGSGPAYVFYFVEAMERAAIEMGLSAEQGRKLAVETFRGAAALAAESSEPVSTLRERVTSKGGTTYAALTSMDASGIQDAFVRAMLAAAARGREMGAEFGKD

SEQ ID NO: 12583 - protein, 355 aa, Chloroflexus aurantiacus
MKGLVLSGGKGTRLRPITYTSAKQLVPVANKPVLFRVIEAIRDAGITDIGIVIGDTGDEIRSAVGNGRRWGVKISYIPQEAPLGLAHAVKISRDFLGDDRFVMFLGDNCIQGGISPLIEQFGRSDYNAQIVLKKVSDPRSFGVAELDDEGRVVRLVEKPREPKSDLALVGIYMFDHHIFEAVEAIRPSARGELEITDAIQWLVSNGYNVYPYVHEGWWIDTGKKDDMLEANRLVLEELEPSVQGYVDRDSQLIGKVIIEPGAEIINSTIRGPAIIGEHTRIVNAYVGPFTSIYHHCHIEECEIEHSIVLEYCTIRGLPHRLEDSLIGRNVEIGRSPLRPKAYRFMLGDNSSVGVL

SEQ ID NO: 12584 - protein, 349 aa, Oryza sativa
MGRRARCLCLLLLLLLVVGGGFHVANAQASPAPPQTGTRAVNRAVSTVITVVIGVFFVLVFVCVIVNQCCDCDSSAGAGAGQGQSSAARRRRGLDPAAVAAIPVVPYAEVRKHRSGGGGALECAVCLTVFDDGDDLRLLPQCSHAFHPDCIDPWLEGHVTCPLCRANLEKQPAPSPPAVEFSSSPAAAAAAAEESRTPEAAAVRVEEVAEASDEEETRRREEEAVELESLRAVRRAARMPRSNSTGHSLCALPAPRAPGPGDGGDHERFTVRLPPHVREEVLKSRRLRHATSLVLGIRGSSREGSSRGGGGSWHGARRWPSFLARTVSWARGGVGADTSAKETPCRDAV

SEQ ID NO: 12585 - protein, 435 aa, Dendrobium crumenatum
MSKEFGIEAPLSKIAVSKAHGEDSPYFAGWKAYEENPYDAVDNPNGVIQMGLAENQLSFDLLEEYLEQHPEASSWGSGMSSFRENALFQDYHGLQTFRKAMASFMEKIRGGRSKFDPDRIVLTAGATAANELLTFILADPGDALLVPTPYYPGFLRDLQWRTGVTIFPVHCHSSNGFQLTLASLESAYADAKASNFNVKGLLITNPCNPLGTVASLSLLQDIILFISDKNIHLISDEIYFGCVFSSTNLFSISDLITNAVSYQIHIVYSLSKDLGLPGFRVGALFSYNDRVVKTARRMSSFSLVSSQTQKLLAFMLSDEEFTVNYIKKNRERLRERYELVVGGLKEAGIECLKGEAGLFCWVNMEELMEDKTEEGELRLWKVMVDELKLNISPGSSCCCSEPGWFRVCFANTSRETLEVALRRLKDFARKKTKNI

SEQ ID NO: 12586 - protein, 196 aa, Zea mays
  unsure (1)..(196): unsure at all Xaa locations
MHMSEATTVFEAVVPFMGESVTDGTLANFLKKPGDRVEADEPIAQIETDKVTIDVASPEAGVIEKLIASEGDTVTPGTKVAIISKSAQPAETHVAPSEEATSKESSPPKVEDKPKVEEKAPKVDPPKMQAPKPTAPSKTSPSEPQLPPKERERRVPMPRLXKRIANRLLGSQNTFAMLSTXFNEVDMTNLMKLXSD

SEQ ID NO: 12587 - protein, 492 aa, Cicer arietinum
LHQVIKANDDLSREHHQFFLYQMLRALKYMHSANVYHRDLKPKNILANSNCKLKVCDFGLARVAFNDAPTSIFWTDYVATRWYRAPELCGSFSSKYTPAIDIWSIGCIFAEVLLGKPLFPGKSVVHQLDLITDLLGTPLPETITGVRNDNARKYLAGMRKKLPVPFEQKFPNADPLALRLLQRLLAFDSKNRPTAEEALADPYFKGLAKVEREPSCKPISKLEFEFERRRITKDDVRELIYREILEYHPQLFKDYMNGTEGANFLYPSAIDQLRKQFAYLEENDGKSGSVLPPERKHVSLPRSTVYSGSILPSNQRTPALYEKKKMVEETSKSWGAAGENSRNQLRGVQPPPRVPAKPGRVVGPVLHYEDERITKSSNDPRIVIQNTTQAVSSRDAFQTHPPNTKTTSGIHKEQGKNEFPSLQSNLHATATTDLNNNPYRRRVINNNLNDPVTTIDAKMLQAQSHLGVVGAAAVAVATHSHRYSRGIQYGLF

SEQ ID NO: 12588 - protein, 202 aa, Cicer arietinum
AIVNLISNPVNSTVPIAAEVFKRAGTYDPKKLLGVTMLDVVRANTFVAEVLGLDPRDVDVPVVGGHAGITILPLLSQVKPPSSFTPKEIEYLTDRIQNGGTEVVEAKAGAGSATLSMAYAAVKFADACLRALKGESGIIECAYVASQVTELPFFASKVRLGRDGVEEFLPLGPLSDYERESLEKAKKELATSVEKGISFTRQ

SEQ ID NO: 12589 - protein, 499 aa, Saccharomyces cerevisiae
MLRIRSLLNNKRAFSSTVRTLTINKSHDVVIIGGGPAGYVAAIKAAQLGFNTACVEKRGKLGGTCLNVGCIPSKALLNNSHLFHQMHTEAQKRGIDVNGDIKINVANFQKAKDDAVKQLTGGIELLFKKNKVTYYKGNGSFEDETKIRVTPVDGLEGTVKEDHILDVKNIIVATGSEVTPFPGIEIDEEKIVSSTGALSLKEIPKRLTIIGGGIIGLEMGSVYSRLGSKVTVVEFQPQIGASMDGEVAKATQKFLKKQGLDFKLSTKVISAKRNDDKNVVEIVVEDTKTNKQENLEAEVLLVAVGRRPYIAGLGAEKIGLEVDKRGRLVIDDQFNSKFPHIKVVGDVTFGPMLAHKAEEEGIAAVEMLKTGHGHVNYNNIPSVMYSHPEVAWVGKTEEQLKEAGIDYKIGKFPFAANSRAKTNQDTEGFVKILIDSKTERILGAHIIGPNAGEMIAEAGLALEYGASAEDVARVCHAHPTLSEAFKEANMAAYDKAIHC

SEQ ID NO: 12590 - protein, 210 aa, Paeonia lutea
IVESVGEGVTDLKPGDHVLPVFTGECKECRHCKSEESNMCDLLRINTDRGVMLNDGKSRFSINGQPIFHFVGTSTFSEYTVVHIGCVAKINPEAPLDKVCVLSCGISTGLGATLNVAKPKKGSSVAIFGLGAVGLAAAEGARIAGASRIIGVDLNPKRFEEAKKFGVTEFVNPKDYNKPVQEVIAEMTGGGVDRSVECTGSIMAMISAFE

SEQ ID NO: 12591 - protein, 429 aa, Thermotoga maritima [sequence omitted]

SEQ ID NO: 12592 - protein, 498 aa, Nostoc sp. PCC 7120
MAINTGKNKLMNRHIRPWQRLLVLAIGSMVFAVFAPTIVQAVDTPTLESLSETTIKLQISIDTTWVLLSGFLVFFMQTGFAMLEAGLVRQRSVVNTLLENFIDAAVTVLAWWAVGFGIAFGTSAGGLFGIDTFFLSQLPGADGSYPLGAPGSTAAINTYTLFFFQFAFAATASTITTGSMAGRTDFIGDLIYSAIMGAISYPIIVHWAWNSNGWLGKLSYHDFAGGSIVHTVGGWTALVGAYLLGPRPDRPPWGKLPPAHNLALATLGTMILWFGWYGFNPGSTLGTANPGLIGLVTINTTLAAGAGALAALIFLYVRTGKWDLVYCLNGSLAGLVAITAPCAYVAPWASVLIGLTGGIAVVLGVSLIESLHIDDPVGAFSVHGISGMMGTLSIGFLGQEELTLNQKAGLLLGGGFDLLGIQMLGIVAITVFTVAFAFLMYGGLKAMGHLRVNAEADRIGIDTYEHGASVWPDVYSVEELSKPQEHTKISENKTLEGE

SEQ ID NO: 12593 - protein, 518 aa, Nostoc sp. PCC 7120
MYQQKSRTRNRRFSTRNYAKSRQSNSQIQIFNLVKKLSPSWQACIPLACLIVLGWSYVAVAQAPAAGPTTAELKVALDTLWVAIAAFLVFFMNAGFGMLETGFCRQKNAVNVLAKNLIVFALATVAFWAIGFGLMFGDGNDFIGFNGLFLSGVDNSPATGDAYKGVFSALSWAGVPLAAKFLFQLVFAGTAATIVSGAVAERIKFVDFLIFSLLLVGIAYPITGHWIWGAGWLAKAGFWDFAGSTVVHSVGGWAALMGAAFLGPRIGKYQDKQIVALPGHNMSIATLGCLILWLGWFGFNPGSVMAADPNAITHIALTTNMAGAVGGIAATATAWLYLGKPDLSMIINGILAGLVGITASCAYVSIPSSIIIGLIAGVIVVFSVTFFDKLGIDDPVGATSVHLVCGVWGTLAVGLWSVGPGVYSWYGEGLGPTKGLFAGGGLGQLITQFLGAAAVGGMTVLVSSIFWVVLKATLGIRVTREEELEGLDIGEHGMEAYSGFLKEASPGGFAEGKTSDGY

SEQ ID NO: 12594 - protein, 470 aa, Nostoc sp. PCC 7120
MFQKILIIGVSTLLLLTSPIMGNAWAQVPGTTPPADTGDTAFMLISAALVLLMTPGLAFFYGGFVRSRNILNTLMMSFVLMAIVGVTWVLWGYSLSFAPGLPFIGGLQWFGLNGVGLETTGYLQGSEPANVVSYAGTIPHQAYMIYQAMFAIITPALISGAIAERMSFRAYCLFVLLWSTFIYTPLAHMVWAKGGFLGLYGGLGALDFAGGTVVHISSGVSALVAAIVLGPRKTHPDRLSPPHNVTFILLGAGLLWFGWFGFNAGSALSVASSTSGSFITNPATTAFVATNTSAAAGALMWLILEGVLRGKPTAVGAATGAVAGLVGITPAAGFVTPLASILIGFITAFVCFYAVSFKHKLNVDDALDTYPVHGVGGTVGAILTAFFATAEVNSGGKNGVLKGNFGELGVELAAIVIAYVIAAVGTWIILKIIDATVGLRVKEEAEYQGLDISEHGEEAYNSEFSDRIVP

SEQ ID NO: 12595 - protein, 379 aa, Chromobacterium violaceum ATCC 12472
MSHDIIRCQAAVAWAAGQPLSIEEIEVHPPKAGEVRVKMVATGVCHTDAFTLSGADPEGVFPCILGHEGGGVVESVGPGVTSVAVGDHVIPLYTPECRECKFCLSGKTNLCQKIRATQGKGLMPDGTSRFSKDGKPIYHYMGTSTFSEYTVLPEISLAKVNKAAPLEEVCLLGCGVTTGMGAVVNTAKVKAGDNVAVFGLGGIGLSAIIGARMAGAGRIIGIDINEGKFELAKKLGATDCVNPNGFDKPIQDVIVEMTDGGVDFSFECIGNVKVMRAALECCHKGWGESVIIGVAGAGQEISTRPFQLVTGRVWRGSAFGGVRGRTELPEYVERYLKGEFRLDDFITHTMPLERVNEAFDLMHEGKSIRSVIHYAAEPA

SEQ ID NO: 12596 - protein, 214 aa, Paeonia californica
IVESVGEGVTDLKPGDHVLPVFTGECKECRHCKSEESNMCDLLRINTDRGVMLNDGKSRFSINGQPIFHFVGTSTFSEYTVVHVGCVAKINPEAPLDKVCVLSCGISTGLGATLNVAKPKKGSSVAIFGLGAVGLAAAEGARIAGASRIIGVDLNPERFEGAKKFGVTEFVNPKDYNKPVQEVIAEMTGGGVDRSVECTGSIMAMISAFECVHD

SEQ ID NO: 12597 - protein, 501 aa, Candida albicans SC5314
MTIPLSVDVTLPDGKKFTQPTGLFINNEFIKSKSGKTLESINPGTSEINGEVYAAESEDIDYAVECASKAFKSWKKITGVERGKYLYKLADLVEQQRDLLGAMEAWDSGKTKSTNAVFDVDECIAVIRYAASWADKITGKVIQNDPKKFAYTIHEPWGVCAQIVPWNYPLLMSMWKIPIAVAAGNTVVLKTSEITPLSMLYFASLVKQVGFPPGVINIVSGFGATAGAALASHKKVAKIAFTGSTATGKIIQKLAAENLKAVTLECGGKSPLIIRSDADIDQAVKWGAIGIMSNQGQICTSTSRIYVHESIYDKFIEEFAAHVKSDYKQGDVFDDEAVVGPQVSKMQHDKILNYIDIGKKEGARCVLGGEKNIEGELSKGYFVKPTIFADVKPEMRIVNEEIFGPVVVVGKFSTDEEAITYANQTDYGLGAAIFTKDITAAHNMASDIEAGMVWINSSNDSDYHVPFGGVKMSGVGRELGEYGLNMYTQAKAVHVNLGTRL

SEQ ID NO: 12598 - protein, 446 aa, GIBBERELLA ZEAE PH-1
MAMRLPLRARLASSCAIARPRIVRRGLASLPNADVASDSKSAAMVNEHAPYMVATYARPPPVFIKGKGSWLWDAEDRKFLDFTAGIAVNGLGHCDPEFTRIMTEQAQTLVHASNLYYNPWTGALSKLLVEKTLESGAMHNAASVFVCNSGSEANEAAIKFARKAGKIVDPSGEKVEIVSFNNGFHGRTMGSLSATPNPKYQKPFSPMVPGFKTGDYNDIAGIDALVTEKTCGVIVEPIQGEGGVTPAKEEFLVALAKRCREVGAVLIYDEIQCGLGRTGTFWAHGNLPKEAHPDILTTAKALGNGFPIGAVLVTQDVADKMKVGDHGTTFGGNPLACRLAHYIVGRLADKQLQADVKAKSEIFKKRFAKLQSQYPDLVKEVRGRGLILGLQLSQDPSPIIKAARERGLLIITAGTNTLRFVPSLTVTDEEINQGLDIVETAIAATQ

SEQ ID NO: 12599 - protein, 511 aa, Streptomyces coelicolor A3(2)
MHNPGNATPDRFPAQDRFADGAQYIAGRLTKGTSGRTHTVVDPATGEDVLTYDLAGPDDVDAAVAAARAAFPGWAGATPGERSDALHRFAAVLAERAEDFARAESLQCGKPLKLTREFDVPGTVDNAAFFAGAARHLQGQSAGEYSGDHTSYVRREPIGVVGSIAPWNYPLQMAAWKILPAIAAGNTIVLKPAEITPLTSLMFAQAATEAGIPDGVINVVSGTGREAGEHLVAHPDVAMTSFTGSTAVGKRVAEVATATVKRLHLELGGKAPFLVFDDADLDAAVHGAVAGSLINTGQDCTAATRAYVQRPLYEAFVEKTAALMDTVRVGDPFAPGTDLGPLVSHVQRDRVAAFVDRARSYARVVTGGEVPQGDLKDGAYYRPTLVADAAQDSEVVQSEIFGPVLVVLPFDTDDEGIRLANDTPYGLAASAWSRDVYRANRATREIKAGCVWINDHIPIISEMPHGGYKASGFGKDMSAYSFEEYTQVKHVMFDNTAVAAKDWHRTVFGDR

SEQ ID NO: 12600 - protein, 440 aa, Lactobacillus plantarum WCFS1
MSEKFDVVYLGSGHGTFDGAIPLAARGKKVAVIEADSIGGTCPNRGCNAKITLDQPVALKNQVANFQGYGLRGEPTIDWQANFDHERDVIAGLPDMIAGLMTSAGVTLINGRGTFVDDHTIQVADKTYTADKIVIATGQHPHRLDIPGTELAHDSNDFLNLTTLPHHITVIGAGYIGLEFANMALTAGSQVTLLMRGDQALRQFHQPFVERLLAILVEQGLVLKREWVPTAIKSTGDHFEVLSADDKVTTDWILDATGRQPNTANLGLEKIGVDYTAAGITVDDHLQTSVAGIYASGDVLAKDQPKLTPTAIFESQYLTHLFMGDTNAPIKYPAIPSVVFTSPRLAQVGTLPTSDTHDIKVTVNDLKDDWFRQTTRDVTGHNLLVTDDQHRLIGAAELGEQAENTINTLLPAIQYQLTPAQREQLVTLFPSIGAAVWSAI

SEQ ID NO: 12601 - protein, 474 aa, Pseudomonas putida KT2440
MQTQMLINGQLVAGQGPAWTVLNPALGTALAQINEATEAQVDSAVRAADQAFDSWSQTSPKERSQALLALADAIEAHGDELARLESQNCGKPLSAALNDEIPAIADVFRFFAGAARCLGGSAAGEYLPGHTSMIRRDPLGVVASIAPWNYPLMMLAWKIAPALAAGNTVVIKPSELTPLTALRLGELAQDLLPPGVLNILFGRGQTVGNPLITHPKVRMVSLTGSIPTGAHIISATADSVKRMHMELGGKAPVLVFDDADIDAAIDGIRTFGFYNAGQDCTAACRLYVQDGIYERFVERLGKAVASLKPGLQESEETELGPLISAQHRDKVAGLVQRAIAQPHIRLVTGGKPIAGDGFFFEPTVLADALQDDEIVRNEVFGPVVSVTRFTDEAQALEWANDSNYGLASSVWTRDTGRAHRLAARLQYGCTWVNTHFMLVSEMPHGGQKHSGYGKDMSMYGLEDYTCVRHVMIKH

SEQ ID NO: 12602 - protein, 113 aa, Glycine max
MAASDRTVLQFSSSSSSSQSLSAKVHPLVIFNICDCYVRRPDQADRVIGTLLGSVLPDGTVDIRNSYAVPHNESIEQVALDIEYHHNMLISHQKVNPKEIIVGFYKVVFFFLY

SEQ ID NO: 12603 - protein, 116 aa, Triticum aestivum
MASPALISDTDQWKALQAHVSAIHKTHLRDLMTDADRCKAMTAEFEGVFLDYSRQQATTETVDKLFKLAETAKLKEKIDKMFKGEKINTTENRSVLHVALRAPRDAVINSDGVNVV

SEQ ID NO: 12604 - protein, 325 aa, Pichia ciferrii
MSSHQFLINQTTLAAPPVHLVEKPSLINGIPDNILALIAPVIAYYSYSGFFYVIDTLEIAELYRIHPPEEVSSRNKATKFDVLKDVVLQHFIQSVVGYIFTYFDPIQYTGDEEYQAWKLQQTLPFLPFDVAYYWNMYGWSCLKIGLAFLIIDSWQYWLHRIMHLNKTLYKRFHSRHHRLYVPYAFGALYNDPFEGFLLDTLGTGIAAIVTQLTPRESIVLYTFSTLKTVDDHCGYSLPYDPFQILFPNNSIYHDIHHQQFGIKTNFSQPFFTHWDVFSNTRYKEIDEYREKQKAITIAKYKEFLHDREIAKQKKKAEIYKDKKTD

SEQ ID NO: 12605 - protein, 706 aa, Nostoc punctiforme PCC 73102
  unsure (1)..(706): unsure at all Xaa locations
MVTNSGFRNLKDQFLPERKEALLARMANRIRQSLNLQEILDATVVELRAFLQTDRTKVYRFDRDGHGHVVAEASAPNRLPSLLGLHYPADDIPPQARALFVKARTRSIVNVSEQRIILNSLPTPTTTAIGDLTVEEVQEQPLEDILSRPVDPCHVDYLTQMGVQSSLVVPIIYQQELWGLLISHHAEPREITSEDLLVVQLLADQVSLAITQASLLSQVQEQQQRDAIVNQIATMLHAPLTPEEILHNVLEQAVKASGSSGGRLYLTSPDEALPAHLYTYGNQPAPSEQEQPHLLENHPLWQEVRKIPAPIGTTLTQKDKPALRVVINLQQEPRLHQLIESFQTTPIRGLIVQPLYYSKEFLGYLTFFRDQISTKNLWPGYEEADERQQRPRQSMAQWQALKEDKAHPWSIEEMELIQSLNIHLSLAVLQNRLYHRERQQRLIVEMHNEALSHARAAAEEVSRLKSNFLASTSHELRTPLASTLNYLKLLKERLYEDEDELREYIDGAYQSTQNLVTIINDVLDIAKIEDGRIALDLETVYLQQLLQEQCFLSGAESRYKAIPLTLDCEIETVFADKIKVRQVMTNLLDNAFKFTDEGQIDVRAVVDSTGTMAQISVHDTGIGIEMENSEQLFSPFVQADGSAQRSYGGTGLGLTICKRLVELMGGKIWLESPGLGQGNTVTFTLPLNEQSQVAGQGSLFEGQAXX

SEQ ID NO: 12606 - protein, 525 aa, Brassica oleracea
MKQSSMVHSCSILFRFVVFLISFCIFFVTTSHAQVVHRRLWPWPSIPWPSMPWPYPWPMEPPEPGPPPGPPPGPSPNPGPPSGPSPRPPIPPKPQPKPPPAPGPSACPPIPPKPQPKPPPAPAPSPCPPQPPKPQPKPPPAPAPSPKPGPSPPPPKPPSPVPKPVPPPAPSPKPSPPAPSPKPKPSPPAPLPPKPENKTIPAVFFFGDSIFDTGNNNNLKSKIKSNYRPYGMDFPSRVATGRFSNGKVASDYISTYLGVKEIVPAYLDQKLQQNQLQRSDLLTGVSFASGGAGFDPETSESVEVIPMLDQLSYFQDYIKRVKKLVGKKEAKRIVSKGVAIVVAGGTDLIYTYFGIGAQHLKTDIDSYTTLMADSAASFVLQLYGYGARRIGVIGTPPLGCTPSQRVKDKKICDEEINYAAQLFNSKLAIILDQLSETLRNSTLVYMDIYSIFSKILESPAHYGFEEVKKPCCKIGLTGGGVFCKKKTSKICPNTSSYLFWDGAHPTERAFETLNKKLVKKYLRYI

SEQ ID NO: 12607 - protein, 292 aa, Triticum aestivum
MAAPETSACGAGPALLFPSSSSSSSSARVEAVVVFTICDSFVRRPDQAERVIGTLLGSVLPDGTVHVRNAYVVPHSESADQVALDIEYHHNMYASHQKVNPKEVLVGWFSTGFGVSGGSTLIHEFYSREVQSPIHLTVDTGFTMGEASIKAYVSSNLSLGDRHLAAQFQEIPLELKMLDAEKVGFEMLKSTMVEKLPNDLEGMESSMQKLYALIDEIYKYVDDVVEARVAPDNKIGRFIADTVSSMPKLSPASFDRLFNDKIQDNLALVYLSSITRTQIAVAEKLNTAAQVL

SEQ ID NO: 12608 - protein, 250 aa, Zea mays
MQSAAAFRPCPTRLLVSSPCRPLLSARPLRVSAAGAVATRSSAVGPRGLGLGLLPASPDRDGKCRQRQVSCSAAGDAVAAPKAEEGGGLMKTLWLGSLFGLWYLFNIYFNIYNKQVLKVFPYPINITEVQFAVGTVAALFMWITGIIKRPKISGAQLVAILPLAIVHTMGNLFTNMSLGKVAVSFTHTIKAMEPFFSGILSAIFLGELPTIWVVSSLLPFGGGVALASLTEASFNWAGFWSAMASMLPFH

SEQ ID NO: 12609 - protein, 275 aa, Xerophyta humilis
SLQQVEEVKCLLRIIPIWSTGIIYYIAIVQQQTYVVYEALQSDRHLGNTSFLIPAASYSVFAMLAMTIWIPIYDRIIVPRFRKLTGQEGGITLLQRMGVGLVLAIIGMVVSAIIEIQRRSYAIHRPTIGTAPSGGAISSMSSLWLIPQLVILGLSEAFNAIGQIEFYYKQFPENMRSVAGSLFFLGAATANYLSGALIGVVHRVTGRGAGKNWLAGDLNKGRLDYYYFFIAGLGVLNLVYFMMCAKWYKYKEADSSSNAGEISLVDEIISKEPLV

SEQ ID NO: 12610 - protein, 366 aa, Thermotoga maritima
MGSDKIHHHHHHMKIAVLPGDGIGPEVVREALKVLEVVEKKTGKTFEKVFGHIGGDAIDRFGEPLPEETKKICLEADAIFLGSVGGPKWDDLPPEKRPEIGGLLALRKMLNLYANIRPIKVYRSLVHVSPLKEKVIGSGVDLVTVRELSYGVYYGQPRGLDEEKGFDTMIYDRKTVERIARTAFEIAKNRRKKVTSVDKANVLYSSMLWRKVVNEVAREYPDVELTHIYVDNAAMQLILKPSQFDVILTTNMFGDILSDESAALPGSLGLLPSASFGDKNLYEPAGGSAPDIAGKNIANPIAQILSLAMMLEHSFGMVEEARKIERAVELVIEEGYRTRDIAEDPEKAVSTSQMGDLICKKLEEIW

SEQ ID NO: 12611 - protein, 167 aa, Arabidopsis thaliana
MALEKHIEKVLFSDEVIAHRVNQLGIDITSDFSGDSEETPIFVGVATGACLFLADLVRRIDLPIAIDFIRAESYGSGTVSSGVPRVSFDLKLDITNKHVVLVEDIVDTGNTLSCLIEHMKAKKASSVSVCTLLDKPSRRKVHYKLVGKGKFYSGFENNTATYLTLAY

SEQ ID NO: 12612 - protein, 246 aa, Arabidopsis thaliana
MTTFSVPIDNGDSMKIAEEESQRTLYPYVTGTSIVAIKYKDGVLMASDMGGSYGSTLRYKNIERVKAIGKHSLLGASGEISDFQEILRYLDELTLNDNMWDDGNSLGPKEIHNYLTRVMYNRRNKFNPLWNTLVLGGVKNGKSYLGMVSMIGVSFEDDHVATGFGNHLARPILRDEWHADLSFEDGVKLLEKCMRVLLYRDRSAINKLQIAKITEEGVTVSQPYSLKTYWEFSSFHNPTAGAAGSW

SEQ ID NO: 12613 - protein, 214 aa, Paeonia szechuanica
IVESVGEGVTDLKPGDHVLPVFTGECKECRHCKSEESNMCDLLRINTDRGVMLNDGKSRFSINGQPIFHFVGTSTFSEYTVVHVGCVAKINPEAPLDKVCVLSCGISTGLGATLNVAKPKKGSSVAIFGLGAVGLAAAEGARIAGASRIIGVDLNPKRFEEAKKFGVTECVNPKDYNKPVQEVIAEMTGGGVDRSVECTGSIMAMMSAFECVHD

SEQ ID NO: 12614 - protein, 482 aa, Salmonella typhimurium LT2
MQLNDSTLFRQQAFIDGDWRDARGGDVIPVSNPANGKPLGNVPKMGAEETRDAINAANRALPAWRALTAKERANILRRWFNLMMEHQDDLARLMTLEQGKPLAEAKGEISYAASFIEWFAEEGKRIYGDTIPGHQADKRLLVIKQPIGVTAAITPWNFPSAMITRKAGPALAAGCTMVLKPASQTPFSALALAELAQRAGIPAGVFNVVTGSAGDIGGELTSNPLVRKLSFTGSTEIGRQLMEQCAKDIKKVSLELGGNAPFIVFDDADLDKAVEGALASKFRNAGQTCVCANRLYVQDGVYDRFAEKLNQAVNKLAVGDGLQADVAIGPLIDEKAVAKVQEHIADALEKGARVITGGEAHKLGGNFFQPTILADVPDNAKVAKEETFGPLAPLFRFSDEADVIRQANDTEFGLAAYFYARDLSRVFRVGEALEYGIVGINTGIISNEVAPFGGIKASGLGREGSKYGIEDYLEIKYMCIGL

SEQ ID NO: 12615 - protein, 214 aa, Paeonia tenuifolia
IVESVGEGVTDLKPGDHVLPVFTGECKECRHCKSEESNMCDLLRINTDRGVMLNDGKSRFSINGQPIFHFVGTSTFSEYTVVHVGCVAKINPEAPLDKVCVLSCGISTGLGATLNVAKPKKGSSIAIFGLGAVGLAAAEGARIAGASRIIGVDLNPKRFEEAKKFGVTEFVNPKDYNKPVQEVIAEMTDGGVDRSVECTGSIMAMISAFECVHD

SEQ ID NO: 12616 - protein, 427 aa, Salmonella typhimurium LT2
MNTNNALMQRRHNAVPRGVGQIHPIFAERAENCRVWDVEGREYLDFAGGIAVLNTGHLHPGIVSAVEAQLKKLSHTCFQVLAYEPYLALCERMNQKVPGDFAKKTLLVTTGSEAVENAVKIARAATKRSGAIAFSGAYHGRTHYTLSLTGKVHPYSAGMGLMPGHVYRALYPCPLHNISDDDAIASIERIFKNDAAPEDIAAIIIEPVQGEGGFYAASPAFMQRLRALCDQHGIMLIADEVQSGAGRTGTLFAMEQMGVAADITTFAKSIAGGFPLAGVTGRADVMDAIAPGGLGGTYAGNPIACAAALAVLDIFEQENLLQKANTLGKTLRDGLMEIAETHREIGDVRGLGAMIAIELFENGDPGKPNAALTADIVTRAREKGLILLSCGPYYNILRILVPLTIEASQIRQGLEIIAQCFDEAKQA

SEQ ID NO: 12617 - protein, 214 aa, Paeonia veitchii
IVESVGEGVTDLKPGDHVLPVFTGECKECRHCKSEESNMCDLLRINTDRGVMLNDGKSRFSINGQPIFHFVGTSTFSEYTVVHVGCVAKINPEAPLDKVCVLSCGISTGLGATLNVAKPKKGSSIAIFGLGAVGLAAAEGARIAGASRIIGVDLNPKRFEEAKKFGVTEFVNPKDYNKPVQEVIAEMTDGGVDRSVECTGSIMAIISAFECVHD

SEQ ID NO: 12618 - protein, 360 aa, Methanosarcina mazei Goe1
MEKEYDIIIIGTGTAGRTLAGRAESSGMKFAIIDSREYGGTCPLRGCDPKKVLAGASEATDLNNRLIGKGAGTEEPLKIDWPSLIRFKRTFTEVYPREAEKMFADMGIDMYHGRARFKNENTVIVGNDELKGKFIFLATGSKPRKLKIPGEEYLTTSEEFMELMELPEKIIFAGGGYISFEFTHIARRAGAEVLILHRSERPLGTFDPDLVDMLVRASEESGIKILTNRPVVAVEKAGDGFLVRTEYKTETGSEVQVFNADMVVNGAGRVPDIEDLQLENAGVRAEKKGIIVDKHMRTSNPRVYAGGDCTAEGIQLTPVATLQGEVAAANIFDRNGAEADYTGIPSAVFTHPCACFRWNK

SEQ ID NO: 12619 - protein, 71 aa, Oryza sativa
MGGGMEVHKNRWIEEWNAGRENLEFNFRWTRRSLAVVGLFGLAVPILVYKGIVREFHMQDEDAGRPPRKFL

SEQ ID NO: 12620 - protein, 413 aa, Pyrococcus furiosus DSM 3638
MKAVILAGGFGTRLRPISSTRPKPMVPVLGKPNLQYILEALEKVSEIDEIILSVHYMRGEIREFIQERMVDYPKDIRFVNDPMPLETGGALKNVEDYVSDDFLVIYGDVFTNFDYSELIKAHKENDGLITVALTKVYDPERFGVVIVDEEGKIIDFEEKPRKPKTNLVDAGIYMVNKEVLKEIPKNKEVYFEREILPKFVSQGLVYGYRMPKEYYWIDLGTPEDLFYAHQIALDQLSRENGYMILGENVEIPEDVEVQGPVYIDNNAKIGHGVKIKAYTYIGPNTIIEDKAYIKRSILLGSDIIKERAELKDTILGEGVVVGKNVIIKENAVVGDYARINDNLVIYGAKILPWKKVEEYEAYIRIKLDPTKVRPELTPERCPLGLPECIYKKFKAIAGEKPPCDECIENQWLF

SEQ ID NO: 12621 - protein, 97 aa, Glycine max
LALARASPSVSAYSSACFFQFSFPHLSAWGSLSFCACLYVSLTSRGYSSPTCCVLVCALPTACLLCCSTLISSPLLARSYPPLFSFMFFDVVSPSLS

SEQ ID NO: 12622 - protein, 354 aa, Pseudomonas fluorescens
MKIRSQIGMVLNLDKCIGCHTCSITCKNVWTSREGMEYAWFNNVESKPGIGYPKEWENQDKWKGGWIRNANGTINPRIGGKFRVLANIFANPDLPSLDDYYEPFDFDYQHLHTAPLGEHQPTARPRSLISGKRMEKIEWGPNWEEILGTEFAKRRKDKNFDKIQADIYGEYENTFMMYLPRLCEHCLNPTCAAACPSGAIYKREEDGIVLIDQEKCRGWRMCISGCPYKKIYFNWKSGKSEKCIFCYPRIEAGMPTVCAETCVGRIRYLGVLLYDADRISEVASTANEQDLYEKQLEIFLDPNDPAVIRQALADGVPQSVIDSAQRSPVYKMAVDWKLALPLHPEYRTLPMVWY

SEQ ID NO: 12623 - protein, 391 aa, Coxiella burnetii RSA 493
MSNLNLHNKRVMIREDLNVPMKNGKITNDERIVRALPTIQKAIEQKARVMILSHLGRPEEGKFEKEFSLAPVARLLSKKLNQKVPLINDWLKGVAVEPGQAILCENVRFNKGENENNTELAKRMAELCDIFVMDAFATAHRAQASTAGVAAYAKLACAGPLLISEVEALSRALENPQKPLVAVVGGSKVSTKIHLLENLLDKVDQLIVGGGIANTFLKAQGYSIGKSLCENEWLDAAQQFWEKAAEKNVSLPLPVDVIVADELSEDAKATVKNIDAVTSNESIFDVGPNTSATYAKLMAQAGTIVWNGPIGVFEIEAFSQGTRALAQAVAKSTAYSIVGGGDTLAALDKFNLTDQMSYVSTAGGAFLEFLEGKILPAIKILTQRAKEYEQK

SEQ ID NO: 12624 - protein, 765 aa, Corynebacterium efficiens YS-314
MTTPPEISSVNPLANKFDHPDVGRRVKSAAGVPGVLHAMEHVVPNRGVLPLLTMNKPGGFDCPGCAWPEPAPHELSIAEFCENGAKAVAEETTPKRATAEFWAEHSIFDLREKTDHWLGKQGRITQPMFYDRSSGDEHYRPISWEDAIALIASTLKRIEPDEAVFYTSGRTPNEPAYMFQLLARRLGTNNLPDCGNMCHESTGSALSETLGLGKGSVVIEDFHNTDLLISVGQNPGTNHPRALSAFKKLKENGGKILTLNPLPETGLMKFRDPQTVKGALSISEDLTDEYLQVRLDGDRAFFQALNKELIRRDALDHTFLEKFCSGVEETIAHLNSLDDETLLRGCGLAARDIQKAADMVEAADTVVVSWTLGVTQHKNAVYTIREMVNFLLLTGNIGKPGAGTAPLRGHSNVQGDRTMGIWEKMPESFLQAIEDEFGFDVPREDGWDTVDSLRAMRDGKTKFFMSLGGNLVRVASDTSVLEKGMQSNELTVHVSTKPNGSHAWPGEKSLILPVRARTDRDVQKTGLQTVTVEDSAGAIHGSTGKRFANRDLDLKSECDVIGSIGRETFGDDFWQPMIDDYDVIRDHIEATIPGFHDFNRRIQNPGGFLLPNGPRERVFNTSDGKAQLTVNETNVIELPEGYLLMNTVRSHDQYNSTIYGLDDRYRGVRGGRRVVFVNPEDCHARGLRDGDLVDIVSVFDDGERRAPNFRVVEYDTARDCVTTYFPEANVLVPLDSVAEKSNTPASKSVLVRLEPLGVHADDLDK

SEQ ID NO: 12625 - protein, 219 aa, Gossypium arboreum
MSMKKEGEILYKKGLWAMEEDKLLIDYVNVHGKGQWNKIANRTGLKRSGKSCRLRWMNYLSPNVKKGDFSEEEEDLVIRLHKLLGNRWSLIAKRVPGRTDNQVKNYWNSHLRKKLGIIDQNKTRIDFCQSSKQVKVCHVDEAATDPSPGHGTTTETTGITVDQSNQQEVIDHRVLNNTTQESMTTESYINTFWIPDHDYELSTLAMIDHFHECSSFHLS

SEQ ID NO: 12626 - protein, 515 aa, Yersinia pestis biovar Medievalis str. 91001
MSSTKKPLVLTILDGYGHREEQQDNAILNAKTPVMDVLWQQQPHTLIAASGLDVGLPDGQMGNSEVGHVNLGAGRIVYQDLTRLDKEIKEGDFFTNPTLTAAVDNAVKTGKAVHIMGLLSAGGVHSHEDHIMAMVELAAKRGATAIYLHAFLDGRDTPPRSAESSLKRFTAKFAELGNGRIASIIGRYYAMDRDNRWDRVQLAYDLLTQAKGEFTADNAVAGLQAAYARGENDEFVKPTVIQATGEADAAMNEGDTLIFMNFRADRARQITRTFVNAEFDGFKRDKVVNFGDFIMLTEYAADIKVACAYPPASLTNTFGEWLMKHDKTQLRISETEKYAHVTFFYNGGVEEPFKGEDRILINSPKVATYDLQPEMSSAELTEKLVSAIGSGKYDVIICNYPNGDMVGHTGDYDAAVKAVETLDNCIEQVVAAVKAADGQLLITADHGNAEQMRDPATGQAHTAHTSLPVPLIYVGNKAVKAVEGGKLSDIAPTMLSLMEMEIPQEMTGKPLFIVE

SEQ ID NO: 12627 - protein, 214 aa, Paeonia lactiflora
IVESVGEGVTDLKPGDHVLPVFTGECKECRHCKSEESNMCDLLRINTDRGVMLNDGKSRFSINGQPIFHFVGTSTFSEYTVVHVGCVAKINPEAPLDKVCVLSCGISTGLGATLNVAKPKKGSSIAIFGLGAVGLAAAEGARIAGASRIIGVDLNPKRFEEAKKFGVTEFVNPKDYNKPVQEVIAEMTGGGVDRSVECTGSIMAMISAFECVHD

SEQ ID NO: 12628 - protein, 214 aa, Paeonia lutea
IVESVGEGITDLKPGDHVLPVFTGECKECRHCKSEESNMCDLLRINTDRGVMLSDGKSRFSINGQPIFHFIGTSTFSEYTVVHVGCVAKINPEAPLDKVCVLSCGISTGLGATLNVAKPKKGSSVAIFGLGAVGLAAAEGARIAGASRIIGVDLNPKRFEEAKKFGVTEFVNPKDYDKPAQEVIAEMTDGGVDRSVGCTGSIMAMVSAFECVHD

SEQ ID NO: 12629 - protein, 214 aa, Paeonia rockii
IVESVGEGVTDLKPGGHVLPVFTGECKECRHCKSEESNMCDLLRINTDRGVMLSDGKSRFSINGQPIFHFIGTSTFSEYTVVHVGCVAKINPEAPLDKVCVLSCGISTGLGATLNVAKPKKGSSVAIFGLGAVGLAAAEGARIAGASRIIGVDLNPKRFEEAKKSGVTEFVNPKDYDKPAQEVIAEMTDGGVDRSIECTGSIMAMVSAFECVHD

SEQ ID NO: 12630 - protein, 405 aa, Vibrio vulnificus YJ016
MAGVLGMILAGGEGSRLRPLTESRSKPAVPFGGSYRLIDFALNNFVNADLMRIYVLTQFKSQSLFHHMKKGWNINGITDRFIDPIPAQMRTGKRWYEGTADAIYQNLRFMELSEPEQVCIFGSDHIYKMDIKQMLSFHKEKQAALTVSALRMPLAEASQFGVIEVDAEGRMVGFEEKPSAPKSIPGDPDFALVSMGNYIFEADVLFAELIEDADNENSSHDFGKDIIPKMFPRGDVFVYDFSQNRISGEKAEVYWRDVGTIDAYWQAHMDLLKTDAPFSLYNRKWPLHTYQPPLPPATFTDSDNGRVQIIDSLVCNGSYVRGSRIEKSVLGFRSNIASACDISESILLGDVKVGEGCVLRRVIVDKDVDIAPGTQIGVNLQEDKKVFHVSDDGIVVIPKGARVGY

SEQ ID NO: 12631 - protein, 214 aa, Paeonia suffruticosa subsp. spontanea
IVESVGEGVTDLKPGDQVLPVFTGECKECRHCKSEESNLCDLLRINTDRGVMLSDGKSRFSINGQPIFHFIGTSTFSEYTVVHVGCVAKINPEAPLDKVCVLSCGISTGLGATLNVAKPKKGSSVAIFGLGAVGLAAAEGARIAGASRIIGVDLNPKRFEEAKKFGVTEFVNPKDYDKPAQEVIAEMTDGGVDRSVECTGSIMAMVSAFECVHD

SEQ ID NO: 12632 - protein, 204 aa, Eremothecium gossypii
MNSEYDYLFKLLLIGDSGVGKSCLLLRFADDTYTNDYISTIGVDFKIKTVELDGKTVKLQIWDTAGQERFRTITSSYYRGAHGIIIVYDVTDQESFDNMKTWLQEIDRYGTAGVVKLLVGNKNDLKDKKVVDFEVAREFADSLNIPVLETSALDSSNVEEAFLTMARQIKETMSHQQKESGKKDDKSGVNLKGQSLANSGGGCC

SEQ ID NO: 12633 - protein, 140 aa, Pinus pinaster
ELQDLQRDPPTSCSAGPVGEDLFHWQATIMGPTESPYAGGVFFVMIHFPPDYPFKPPKVNFQTKVYHPNINSNGSICLDILKEQWSPALTISKVLLSICSLLTDPNPDDPLVPEIAHIYKSQRSRYEETARAWTQKYAMN

SEQ ID NO: 12634 - protein, 321 aa, Schizosaccharomyces pombe
MSAEQKYFENAQNVHFTLADGSKIPGLGLGTWRSEPNQTKNAVKTALQYGYRHIDAAAIYGNEDEVGDGIKESGVPRKDIWVTSKLWCNAHAPEAVPKALEKTLKDLKLDYLDEYLIHWPVSFKTGEDKFPKDKDGNLIYEKNPIEETWKAMEKLLETGKVRHIGLSNFNDTNLERILKVAKVKPAVHQMELHPFLPQTEFVEKHKKLGIHVTAYSPFGNQNTIYESKIPKLIEHETIQKIAKSKGEGVTGATIAVSWAITRGTSVIPKSVNEQRIKSNFKYIPLTKEDMDEINSIGIRARFNQATFSNEPVFAGLEDGRT

SEQ ID NO: 12635 - protein, 475 aa, Thermus thermophilus HB27
MEVKEAPTEALIGGAWRRLERRFPVVSPATGERVAEVADCGEEEAREALEEAVLAFPAWSRATAYERAQVLRRWYERILEHQEPLARLMALEMGKPLKEGRAEVAYAAGFVEWYAEEAKRVYGETVPSQFPHKRILVRYEPVGPVYGITPWNFPAAMVTRKVAPALAAGCTFVLKPAEESPLTALYLAKLFLEAGGPPGVFQVLPTSRPAEVSRPFLEDERVRKLTFTGSTEVGVRLYGEAAKTLKRVSLELGGGAPVLVFADADLDRAVEETLRAKFRNAGESCVAANRIFVQAEVAEAFAEAYARRVQALKVGDPLSEETDVGPLVNEAALRKVRTHVEDALAKGARLVAGGEAKGLFFAPTVLLDVKPESLLFREETFGPVAPLTVFREEEEAVRWANGFPVGLAAYVFTRDLSRAFRVAEALEYGIVGVNDGVPSTPQAPFGGVKRSGLGREGGKWGLLEYLEVKYVSLGL

SEQ ID NO: 12636 - protein, 405 aa, Enterococcus faecalis V583
MRNFKKSDKLNNVSYDVRGPVLEEAERMQEEGIRILKLNTGNPAPFGFDAPNEIVRDMIVNVRDSEGYSDSKGIFSARKAIEQYCQLKKFPNVTINDIYTGNGVSELITMCMQGLLNNGDEVLVPMPDYPLWTASVSLAGGTPVHYICDEQAEWYPDIDDIKSKITSNTKAIVIINPNNPTGALYPKELLLEIVEVARQNDLIIYSDEIYDRLVMDGLVHVPIATLAPDLFVVTLNGLSKSHRVAGFRCGWMVLSGDKSRVKGYIEGLNMLASMRLCSNVLSQQIIQTALGGYQSVDGLLLPGGRIYEQREFIYNAINDIPGLSAVKPKAAFYIFPKIDTAKFDIYDDEKFVLDFLHKHHILLVHGGGFNWQQPDHFRIVYLPKMEDLKTTADKMREFLSTYKQK

SEQ ID NO: 12637 - protein, 475 aa, Arabidopsis thaliana
MSVQEYLDKHMLSRKIEDAVNAAVRAKTSDPVLFIANHLKKAVSSVITKVKARQILDSRGIPTVEVDLHTNKGVFRASVPSGDSSGTYEAIELRDGDKGMYLGNSVAKAVKNINEKISEALIGMDPKLQGQIDQAMIDLDKTEKKSELGANAILAVSIAACKAGAAEKEVPLCKHLSDLSGRANMVLPVPAFTVLSGGKHASNTFAIQEIMILPIGASRFEEALQWGSETYHHLKAVISEKNGGLGCNVGEDGGLAPDISSLKEGLELVKEAINRTGYNDKIKIAIDIAATNFCLGTKYDLDIKSPNKSGQNFKSAEDMIDMYKEICNDYPIVSIEDPFDKEDWEHTKYFSSLGICQVVGDDLLMSNSKRVERAIQESSCNALLLKVNQIGTVTEAIEVVKMARDAQWGVVTSHRCGETEDSFISDLSVGLATGVIKAGAPCRGERTMKYNQLLRIEEELGDQAVYAGEDWKLSL

SEQ ID NO: 12638 - protein, 381 aa, Ludwigia peploides
NVLDKIKEFSERIRNGSWVGATGKQLTNVIAIGIGGSFLGPLFVHTALQTDREACECARGRQLRFLANVDPIDVARNIMGLNPETTLVVVVSKTFTTAETMLNARTLREWISSALGPSAVAKHMVAVSTNLPLVEKFGIDPKNAFAFWDWVGGRYSVCSAVGVLPLSLQYGFAIVEQFLLGARSIDQHFNSAPFEKNIPVLLGLLSVWNVSFLGYPARAILPYSQALEKFAPHIQQVSMESNGKGVSIDGLPLPFETGEIDFGEPGTNGQHSFYQLIHQGRVIPCDFIGVMKSQQPVYLKGEVVNNHDELMSNFFAQPDALAYGKTPEQLRKENVPEHLVPHKTFTGNRPSLSILLPSLNAYNVGQLLAIYEHRVAVQGFI

SEQ ID NO: 12639 - protein, 238 aa, Halobacterium sp. NRC-1
MKAVVLAAGEGTRLRPRTADLPKPLVEVNGKPILTHCFEILLDLGIDDVVVVVGYEKDKIIDRYGDSFRAIDIEYAHQSERLGLAHAVLTAEPYVDSDFVVLNGDNIYSANFSEVLAHHTESGADITFPVEEVSTEEATSGAVCELDDDRAVTGLVEKPAEPPSNYAPTAFYVLPPAIFPACRVIRPSERGEYELADAIDLLIYSGYSVETQPFEGWKVNVNTEADITRAEQLLHSGQ

SEQ ID NO: 12640 - protein, 387 aa, Arabidopsis thaliana
MASSPLTANVQGTNASLRNRDEETADKQIQFNDQSFGGNDYAPKVRKPYTITKERERWTDEEHKKFVEALKLYGRAWRRIEEHVGSKTAVQIRSHAQKFFSKVAREATGGDGSSVEPIVIPPPRPKRKPAHPYPRKFGNEADQTSRSVSPSERDTQSPTSVLSTVGSEALCSLDSSSPNRSLSPVSSASPPAALTTTANAPEELETLKLELFPSERLLNRESSIKEPTKQSLKLFGKTVLVSDSGMSSSLTTSTYCKSPIQPLPRKLSSSKTLPIIRNSQEELLSCWIQVPLKQEDVENRCLDSGKAVQNEGSSTGSNTGSVDDTGHTEKTTEPETMLCQWEFKPSERSAFSELRRTNSESNSRGFGPYKKRKMVTEEEEHEIHLHL

SEQ ID NO: 12641 - protein, 952 aa, Sulfurospirillum multivorans
  unsure (1)..(952): unsure at all Xaa locations
MEKTTERALSTTVGRRSFLKMAAVASVFGATSGFAGENVTRAATEEEVKNPFPGSKKVKTICTSCSVGCGVIAEVQNGVWVRQEVAQDHPISLGGHCCKGADMIDMVRSEVRLKYPMVKENGQWKRLSWDDALNRIATKLADLKKKDGADSVQFLGSAKMGNEQAYYFRKFAAFYGTNNTDHQARIXHSSTVAGVANTFGYGAMTNSLGDIQKSKAIIIFGANPAVNHPVGFQHFLKAKERNNSQLIVIDPRFTKTAAKADIFAQIRPGTDIPFMYGMLNIIFKNGWEDKEYIHDRVFGMEKIREEALKWTPELVADVTGVPAEKLIQITTLYAKNRPGTLIWAMGLTQHSIGTSNTRMAPILQLALGNMGKAGGGTNILRGHDNVQGATDMGCLADSLPGYYGLAEGSWKYFAKQWGVDYEYLVSQFKDASWMTKNGFSLARWWAGVEGVKSDDKIENAGTTLKALVVMGNGITSIAQQAKIKEALDNLELIVLADPFVNEAAILTDKKDNVFILPAATQFETSGLVVATNRSAQWRYKVVEPLYESKADQDIMFELAKRLGFYDLYTKAMFMQETKDGKLEMIPEKKAFTWPEDATNEIARIIKTIGLTGWTAERVKKHTDNWHMFDEVTGAGMGPMKGEYYGLPWPCWTKTHGGSPNLYDTSIPVSAGGMGFRNNFGLEKDGVNLLAEKGSFPKGSKIEAGYPEITKANIEAVLGITLTEEEKAAMGANWKVDNSNLIVQKALDAGLCPYGNAKARAIVWNFPDHIPMHREPLHSPRTDLTLKYPAYPDKANHFRVMTKYISVQSAQDYAKDFPINMVTGRLVTMNGAGIENRASKYIAALTPEMFCDIHPDLALKHDIKNGAMMWVHSPEGTKIKVKAKYSHSVLPDMVFMPFHFAGYFQGTDRTGNFPAGTKPYASGESVNTVTNYGYDIITQIPETKGGLCRIEKA

SEQ ID NO: 12642 - protein, 293 aa, Oryza sativa
MQQQGAAALTPATGLGSRPSLTVKTSRVCTTAALPPLCRCGRRHLIGSTSATALLPLLALPSPAASPVDPEVMLERVHPARHEGYEKFYATAMDKFMKPYEAEIAQYKSKLFSQLMTAGKNILELGVGTGPNLKYYANADGVNIVGVDPNKHMEEYARAAAVSAGLPPSNFTFRRGVGEALPAEDNSMDAVVGTLVMCSVSDVEMALREIKRVLKPGGLYIFIEHVAAPDGSFLRFVQGALNPLQQFVSDGCHLTRETGEIIRDAGFSSLDLNTTRLSTAFILSPHVYGVACK

SEQ ID NO: 12643 - protein, 262 aa, Zea mays
  unsure (1)..(262): unsure at all Xaa locations
MICSSLLRVSSRSAVRPSHSFSQSASNLPRICAINRWQRGYATEAKEHDLVIIGGGVAGYVAAIKAGQEGLKVACIEKRGMLGGTCLNVGCIPSKSLLNNSHMYHQILHDTKKRGIEVGDVKLNLQQMMAAKNTSVDGLTKGVEFLFKKNKVEYIRGTAAFSGEHEVTVNKTEGGETTLRAKNILIATGSEATPFPGLTIDEXRVVTSTGAISLXKVPKKMVVIGGGIIGLXEMGSVWSRLXAEVTVVEFLXIGGPGMDANI

SEQ ID NO: 12644 - protein, 491 aa, Gaura lindheimeri
WKDLKAHVEGVKRTHLRELMGDSERCQSMMVEFDNIFLDYSRQQASPDTINKLYKLADAAHLKQKIDRMYNGDHINSTENRSVLHVALRAPRNSAICSDGKNVVQDVWNVLDKIKDFSERVRNGSWVGATGKELKDVIAVGIGGSFLGPLFVHTALQTDPEASKNARGRELRFLANVDPIDAARNISGLDPETTLVVVVSKTFTTAETMLNARTLREWISSALGPSAVAKHMVAVSTNLPLVEKFGIDPNNAFAFWDWVGGRYSVCSAVGVLPLSLQYGFAVVEKFLQGAHNIDQHFSSAPFEKNIPVLLGLLSVWNVSFLGYPARAILPYSQALEKLAPHIQQVSMESNGKGVSIDGLPLPFQSGEIDFGEPGTNGQHSFYQLIHQGRVIPCDFIGVMKSQQPVYLKGEVVNNHDELMSNFFAQPDALAYGKTPEQLKKENVSEHLIPHKTFTGNRPSLSILLPTLDAYRIGQLLAIYEHRVAVQGFVWG

SEQ ID NO: 12645 - protein, 506 aa, Pseudomonas aeruginosa PAO1
MRYAHPGSEGAIVSFKARYGNYIGGEFVPPVKGQYFTNTSPVNGQPIAEFPRSTAEDIDKALDAAHAAADAWGRTSVQERSNILLKIADRIEQNLELLAVTETWDNGKAVRETLNADIPLAADHFRYFAGCIRAQEGSAAEINDSTVAYHIHEPLGVVGQIIPWNFPLLMAAWKLAPALAAGNCVVLKPAEQTPLGICVLLELIGDLLPPGVLNVVQGFGREAGEALATSKRIAKIAFTGSTPVGSHILKCAAENIIPSTVELGGKSPNIYFEDIMQAEPAFIEKAAEGLVLAFFNQGEVCTCPSRALVQESIYPAFMEEVLKKVRAIKRGDPLDTETMVGAQASQQQYEKILSYLDIAQQEGAELLAGGSVEKLEGNLASGYYIQPTLLKGHNGMRVFQEEIFGPVVGVTTFKDEAEALAIANDTEYGLGAGLWTRDINRAYRMGRGIKAGRVWTNCYHLYPAHAAFGGYKKSGVGRETHKMMLDHYQQTKNLLVSYDINPLGFF

SEQ ID NO: 12646 - protein, 322 aa, Nostoc sp. PCC 7120
MQQQGQPAYRGKQLHDWIYHKGVRSLTDISVFSKQWRAAVADVPIGRSTIHHRSVASDGTVKYLLQLSDGEIVEAVGIPTDKRLTVCVSTQVGCPMACDFCATGKGGYKRNLERHEIVDQVLTVQEDFQQRVSHVVFMGMGEPLLNTENVLAGLRSLNQDVGIGQRSLTLSTVGIRDRISELAEHHLQVTLAVSLHAPNQALREQLIPSARSYHIEDLLAECREYVAITGRRISFEYILLAGVNDLPEHALELSKHLRGFQNHVNLIPYNSIDEVDYKRPSGDRIQAFLTVLQQQHIAVSVRYSRGLEADAACGQLRTKASR

SEQ ID NO: 12647 - protein, 393 aa, Chlamydophila pneumoniae CWL029
MIFEFRFPKIGETSSGGSIVRWLKNLGDHVARDEPLIEVSTDKIATELPSPKAGRLVRFCVNEGDEVASGDVLGLIELEEISEADDESTSCPPTSCETKSEAGSSSSSVWFSPAVLSLAQREGIGLDNLQKIAGTGKGGRVTRQDLEAYISESQQVSIPEIFQGEVNRIPMSPLRRAIASSLSKSSDEVPHASLVVDVDVTDLMNLISGERQRFLDTHGVKLTITSFIVQCLAQTLRQFPLLNGSLDGTTIVMKKSVNVGVAVNLNKEGVVVPVIHNCQDRGLVSIAKALADLSSRARLNKLDPSEVQDGSVTVTNFGMTGALIGMPIIRYPEVAILGIGTIQKRVVVRDDDSLAIRKMVYVTLTFDHRVLDGIYGSEFLTSLKNRLESVTMG

SEQ ID NO: 12648 - protein, 261 aa, Zea mays
  unsure (1)..(261): unsure at all Xaa locations
AAAGRYDWREEWYPLYLAKEVPXDAALPLTVFDRQLVLWRDAHGVLRCHEDRCPHRLAKLSEGQIVDGKLECLYHGWQFDGDGKCVKIPQLPEGAKIPRSACARNYEVRDSQGVVWVWMSDANPPDEGKLPWFEPYARAGFTDLSTVHELPYDHSILLENLMDPAHVPISHDRTDWTAKREDAQPLFFDVTERTPRGFVGYWGRTGTPYLRNLLRFEAPCVLTNTLEFADKDGREQCFSAHLLCRPAGQGKSMLLVRFGST

SEQ ID NO: 12649 - protein, 433 aa, Vibrio cholerae O1 biovar eltor str. N16961
MSKIVKVLGREIIDSRGNPTVEAEVHLEGGFVGMAAAPSGASTGSREALELRDGDKSRFLGKGVLKALAAVNGPIADALVGKDAKDQATIDQIMIDLDGTENKSNFGANAILAVSLANAKAAAAAKGMPLYEHIAELNGTPGVFSMPLPMMNIINGGEHADNNVDIQEFMIQPVGAKTLKEAVRMGAEVFHNLAKVLKSKGYNTAVGDEGGFAPNLKSNAEALEVIAEAVAAAGYKLGTDITLAMDCAASEFYDAEKKEYNLKGEGRIFTSNGFSDFLEELTEKFPIVSIEDGLDESDWEGFAYQTEKLGKKIQIVGDDLFVTNTKILKRGIDNGIANSILIKFNQIGSLTETLAAIKMAKDAGYTAVISHRSGETEDATIADLAVGTAAGQIKTGSMSRSDRVAKYNQLIRIEEALGSRAPFNGLKEVKGQA

SEQ ID NO: 12650 - protein, 352 aa, Shigella flexneri 2a str. 301
MLYYLHIRWITSMCKKTSGNRFHFAFQSSEVVMIKKIGVLTSGGDAPGMNAAIRGVVRSALTEGLEVMGIYDGYLGLYEDRMVQLDRYSVSDMINRGGTFLGSARFPEFRDENIRAVAIENLKKRGIDALVVIGGDGSYMGAMRLTEMGFPCIGLPGTIDNDIKGTDYTIGFFTALSTVVEAIDRLRDTSSSHQRISVVEVMGRYCGDLTLAAAIAGGCEFVVVPEVEFSREDLVNEIKAGIAKGKKHAIVAITEHMCDVDELAHFIEKETGRETRATVLGHIQRGGSPVPYDRILASRMGAYAIDLLLAGYGGRCVGIQNEQLVHHDIIDAIENMKRPFKGDWLDCAKKLY

SEQ ID NO: 12651 - protein, 220 aa, Zea mays
MAATIQSVKARQIFDSRGNPTVEVDVCCSDGTFARAAVPSGASTGVYEALELRDGGSDYLGKGVSKAVNNVNSIIAPALVGKDPTAQTELDNFMVQQLDGTKNEWGWCKQKLGANAILAVSLAVCKAGASVKKIPLYQHIANLAGNKQLVLPVPAFNVINGGSHAGNKLAMQEFMILPTGAASFKEAMKMGVEVYHNLKSVIKKKYGQDATNVGDEGGFA

SEQ ID NO: 12652 - protein, 367 aa, Emericella nidulans
MAAPEIPKKQKAVIYDNPGTVSTKVVELDVPEPGDNEVLINLTHSGVCHSDFGIMTNTWKILPFPTQPGQVGGHEGVGKVVKLGAGAEASGLKIGDRVGVKWISSACGQCPPCQDGADGLCFNQKVSGYYTPGTFQQYVLGPAQYVTPIPDGLPSAEAAPLLCAGVTVYASLKRSKAQPGQWIVISGAGGGLGHLAVQIAAKGMGLRVIGVDHGSKEELVKASGAEHFVDITKFPTGDKFEAISSHVKSLTTKGLGAHAVIVCTASNIAYAQSLLFLRYNGTMVCVGIPENEPQRIASAYPGLFIQKHVHVTGSAVGNRNEAIETMEFAARGVIKAHFREEKMEALTEIFKEMEEGKLQGRVVLDLS

SEQ ID NO: 12653 - protein, 154 aa, Triticum aestivum
LVPNSARGGSGPGAGFSSFIARRQQRRAATRGLDAEVVKAFPTMRYAEAKALRVGRKAAPLLECAVCLSEFEDEDRLRLLPKCSHAFHPDCIGEWLASHVTCPVCRRNLDPKQGRWRRTRVTPRCLEPKQQPPAIARWFRHHQKAGAGPWVQSN

SEQ ID NO: 12654 - protein, 159 aa, Zea mays
PVACAETGVTLISPFVGRILDWYKKSTGKEYTAETDPGVKSVQRIFNYYKQHGYNTIVMGASFRNTGEITELAGCDYLTIAPKLLEELKNSDAKVPKKLDAAPADQAKEEKVSFVDNEAAFRWELFNDPMAFDKLHEGIRGFAKDGDACKEMLREKLRA

SEQ ID NO: 12655 - protein, 822 aa, Rhodobacter sphaeroides
MTKLSGQELHAELSRRAFLSYTAAVGALGLCGTSLLAQGARAEGLANGEVMSGCHWGVFKARVENGRAVAFEPWDKDPAPSHQLPGVLDSIYSPTRIKYPMVRREFLEKGVNADRSTRGNGDFVRVTWDEALDLVAKELKRVQESYGPTGTFGGSYGWKNPGRLHNCQVLMRRALNLAGGFVNSSGDYSTGAAQIIMPHVMGTLEVYEQQTAWPVVVDNTELMVFWAADPVKTNQIGWVVPDHGAFAGMQAMKEKGTKVICINPVRTETADYFGAELVSPRPQTDVALMLGMAHTLYSEDLHDKDFIENCTSGFDIFAAYLTGESDGTPKTAEWAAEICGLPAEQIKELARRFVGGRTMLAAGWSIQRMHHGEQAHWMLVTLASMIGQIGLPGGGFGLSYHYSNGGSPTSDGPALGGISDGGKPVEGAAWLSASGAASIPCARVVDMLLNPGGEFQFNGATATYPDVKLAYWVGGNPFAHHQDRNRMLKAWEKLETFIVQDFQWTATARHADIVLPATTSYERNDIESVGDYSNRAILAMKKVVDPLYEARSDYDIFAALTERLGKGKEFTEGRDEMGWISSFYEAAVKQAEFKQMEMPSFEDFWSEGIVEFPITEGANFVRYADFREDPLFNPLGTPSGLIEIYSKNIEKMGYDDCPAHPTWMEPAERLGGPGAKYPLHVVASHPNSRLHSQLNGTSLRDLYAVAGHEPCLINPDDAAARGIADGDVLRVFNDRGQILVGAKVSDAVMPGAIQVYEGGWYDPLDPSEEGTLDKYGDVNVLSLDVGTSKLAQGNCGQTILADVEKYAGAPVTVTVFDTPKGP

SEQ ID NO: 12656 - protein, 353 aa, Eremothecium gossypii
MSSSMQQAVVLREKGAIVYEHRPVPVIEDPHYVKVKIEKTGICGSDVHYYLHGSIGPFVVRSPMVLGHESSGTVVEVGSDVTRVRIGDRVAIEPGVPSRYSEETKSGHYNLCREMRFAATPPYDGTLVKYYISPEDFLVKLPDSVSLEEGALCEPLAVAVHANRLAGTQFPSRVVVFGAGPVGLLTASVAKAFGATTVAIVDISKHKLCVAPALGVTHPVDSSDCSSPEALANKLRAELRSDVDIAFDCSGAEICIAAAVLICRPGGTHVQVGSSRDYVSFPLAEATVKQLRILGSFRYAAGDYATAVELLASKRVDAARLVTHRFPFDRAVEAYKFNATADEHIIKTIIEGP

SEQ ID NO: 12657 - protein, 316 aa, Methylobacillus flagellatus KT
MANLFDQLKEFTTIVADTGDVEAIKSVKPYDATTNPSLLLKASTIPQYAPLIDEAIAYAKSQSGDKAQQIEDAADKLAVLIGLEILKHIPGKISTEVDARLSFDTEAMVQKGRKLIKLYEDAGIAKDRVLIKLASTWEGIKAGEILEKEGINCNLTLLFSFAQARACAEAGVFLISPFVGRILDWYKAKTGETYTAETDPGVQSVRKIYAYYKEHGYKTVVMGASFRNTGEIIALAGCDRLTVSPNLLEELKATEGKLERVLVDNGVTKQRPPLLTEKEFRFDLNEDAMATEKLAEGIRGFVVDQNKLEKALAEKL

SEQ ID NO: 12658 - protein, 475 aa, Mycoplasma gallisepticum R
MAKTNSTSKNNKLEIKSVFAYQAFDSRGFPTVACEVVLNDGSKGLSMVSSGASTGEKEALELRDGGTKYHGKGVTKAVNNINKKIGPKILGVDATLQTQIDEFMIELDGTKTKAKLGANAILAVSMAVCRAAAKSLNLPLYQYIAKKVAKVKGADFILPVPMLNVINGGAHADNTIDFQEFMIMPVGAKTMAKALQMASEVFHSLQKLLKAKKFNTNKGDEGGFAPNLKSAEEALDLMSQAVVDAGYALGKDVAFALDCAASEFYSKEKQAYVFKKAVKAGILSEEKGTKTTEQLISYLEDLTKKYPIVSIEDGLDENDWKGMESLTKKIGKKVQIVGDDTYCTNPELTSKGVSLSATNSVLIKLNQIGTLTETIQTINIAKKANWTAVVSHRSGETEDAFIADLAVALSTGQIKTGSMSRSERIAKYNRLLAIEMQLGNKAKYLGSKTFYNLSTPAATPKKSPAKKTTKAKSKK

SEQ ID NO: 12659 - protein, 827 aa, Haemophilus ducreyi 35000HP
MELSRRDFMKANAAVAAAAAAGIVLPVKNVQADDSGIKWDKAPCRFCGTGCSVLVGTKDGRVVATQGDPDAEVNRGLNCIKGYFLSKIMYGADRVQTPLLRMKDGKFHKEGDFTPVSWDQAFSIMAEKVKATLKAKGGNAVGMFSSGQTTIFEGYAKVKLWKAGLRSNTIDPNARHCMASAAVAFLRTFGMDEPMGCYNDIEKTDGFVLWGSNMAEMHPILWSRISDRRLSDNNVKVVVMSTFEHRSFELADTPIIFKPHSDLAILNYIANYIIQNDKVNWDFVNKHTKFKRGETDIGYGLRPEHPLQKAAKNVKNAGKMHDSSFEEFKKIVEPYTLEKAHEISGVPKHQLEALAKMYADPAQKLVSFWTMGFNQHTRGVWVNHMIYNVHLLTGKISTPGCGPFSLTGQPSACGTAREVGTFVHRLPADMVVMNPKHVEICEKAWKLPKGTIPTVPGYAAVMQSRMLKDGKLNFLWQMCTNNMQGGPNINEEIFPGWRNPENFIVVSDPYPSVSAVAADLILPTCMWVEKEGAYGNAERRTQFWYQQVKGPAQSKSDLWQIVEFAKYFKAEEVWNEELMAQMPEYRGKTLYEILYLNGEVDKYQVPTNIPGYLNDEADDFGFYIQKGLFEEYAQFGRGHGHDLADFETYHQARGLRWPVVDGKETLWRYREGFDPYVKAGEDFRFYGYPDGKAIILGVPYESPAESPDEEYDLWLSTGRVLEHWHTGTMTRRVPELHRSFPNNLVWMHPSDAKKRGLRHGDKVKVITRRGEMISHLDTRGRNKCPEGLIFTTFFDAGQLANKLTLDATDPISGETDFKKCAAKVVKA

SEQ ID NO: 12660 - protein, 1111 aa, Arabidopsis thaliana
MSSNTSRSCSTRSRQNSRVSSQVLVDAKLHGNFEESERLFDYSASINLNMPSSSCEIPSSAVSTYLQKIQRGMLIQPFGCLIVVDEKNLKVIAFSENTQEMLGLIPHTVPSMEQREALTIGTDVKSLFLSPGCSALEKAVDFGEISILNPITLHCRSSSKPFYAILHRIEEGLVIDLEPVSPDEVPVTAAGALRSYKLAAKSISRLQALPSGNMLLLCDALVKEVSELTGYDRVMVYKFHEDGHGEVIAECCREDMEPYLGLHYSATDIPQASRFLFMRNKVRMICDCSAVPVKVVQDKSLSQPISLSGSTLRAPHGCHAQYMSNMGSVASLVMSVTINGSDSDEMNRDLQTGRHLWGLVVCHHASPRFVPFPLRYACEFLTQVFGVQINKEAESAVLLKEKRILQTQSVLCDMLFRNAPIGIVTQSPNIMDLVKCDGAALYYRDNLWSLGVTPTETQIRDLIDWVLKSHGGNTGFTTESLMESGYPDASVLGESICGMAAVYISEKDFLFWFRSSTAKQIKWGGARHDPNDRDGKRMHPRSSFKAFMEIVRWKSVPWDDMEMDAINSLQLIIKGSLQEEHSKTVVDVPLVDNRVQKVDELCVIVNEMVRLIDTAAVPIFAVDASGVINGWNSKAAEVTGLAVEQAIGKPVSDLVEDDSVETVKNMLALALEGSEERGAEIRIRAFGPKRKSSPVELVVNTCCSRDMTNNVLGVCFIGQDVTGQKTLTENYSRVKGDYARIMWSPSTLIPPIFITNENGVCSEWNNAMQKLSGIKREEVVNKILLGEVFTTDDYGCCLKDHDTLTKLRIGFNAVISGQKNIEKLLFGFYHRDGSFIEALLSANKRTDIEGKVTGVLCFLQVPSPELQYALQVQQISEHAIACALNKLAYLRHEVKDPEKAISFLQDLLHSSGLSEDQKRLLRTSVLCREQLAKVISDSDIEGIEEGYVELDCSEFGLQESLEAVVKQVMELSIERKVQISCDYPQEVSSMRLYGDNLRLQQILSETLLSSIRFTPALRGLCVSFKVIARIEAIGKRMKRVELEFRIIHPAPGLPEDLVREMFQPLRKGTSREGLGLHITQKLVKLMERGTLRYLRESEMSAFVILTEFPLI

SEQ ID NO: 12661 - protein, 371 aa, Epilobium canum
ERVRNGSWVGATGKELKDVIAVGIGGSFLGPLFVHTALQTDPEASKNARGRELRFLANVDPIDAARNLSGLNPETTLVVVVSKTFTTAETMLNARTVREWISSALGPSAVAKHMVAVSTNLQLVETFGIDPNNAFAFWDWVGGRYSVCSAVGVLPLSLQYGFAVVEKFLQGAHSIDQHFLSAPFEKNIPVLLGLLSVWNVSFLGYPARAILPYSQALEKLAPHIQQVSMESNGKSVSIDGLPLPFETGEIDFGEPGTNGQHSFYQLIHQGRVIPCDFIGVVKSQQPVYLKGEVVNNHDELMSNFFAQPDALAYGKTPEQLKKENVSEHLIPHKTFTGNRPSVSILLPTLDAYRVGQLLAIYEHRVAVQGFI

SEQ ID NO: 12662 - protein, 1276 aa, Streptomyces avermitilis MA-4680
MSPQSPSNSSISTDDQAGKNPAAAFGPNEWLVDEIYQQYLQDPNSVDRAWWDFFADYKPGAAAASAPAGTAAAGAAETTTPAPAAPTAAAPAAPAAPAPAAPAPAPAAPAPAAAPAVPKPAAAAPAPAAAKPAAAAPAQPKAAAATEAAEGPTFVPLRGPAAAVAKNMNASIEVPTATSVRAVPVKLLFDNRIVINNHLKRARGGKISFTHLIGYAMVQAIKAMPSMNWHYAEKDGKPTLVKPAHVNFGLAIDLVKPNGDRQLVVAGIKKAETLNFFEFWQAYEDIVRRARDGKLTMDDFTGVTVSLTNPGGLGTVHSVPRLMPGQSVIMGVGSMDYPAEFQGTSQDTLNKLGISKVMTLTSTYDHRVIQGAASGEFLRIVANFLLGEGGFYDEIFEALRIPYEPVRWLKDIDASHDDDVTKAARVFELIHSYRVRGHVMADTDPLEYRQRKHPDLDITEHGLTLWDLEREFAVGGFAGKSLMKLRDILGVLRDSYCRTTGIEFMHIQDPKQRKWIQDRIERSHSKPEREEQLRILRRLNAAEAFETFLQTKYVGQKRFSLEGGESVIPLLDAVIDSAAESRLDEVVIGMAHRGRLNVLANIVGKSYAQIFREFEGNLDPKSMHGSGDVKYHLGASGTFTGLDGEQIKVSLAANPSHLETVDPIIEGIARAKQDIINKGGTDFTVLPVALHGDAAFAGQGVVAETLNMSQLRGYRTGGTVHIVINNQVGFTAAPESSRSSMYATDVARMIEAPIFHVNGDDPEAVVRVARLAFEFRQAFNKDVVIDLICYRRRGHNESDNPAFTQPLMYDLIDKKRSVRKLYTESLIGRGDITLEEAEQALQDFQGQLEKVFTEVREAISTPGEAPAPEPQPEFPVAVPTAVSQEVVKRIAESQVNIPDHVTVHPRLLPQLQRRAAMIEDDTIDWGMGETLAIGSLLLEGTPVRLSGQDSRRGTFGQRHAVLIDRVTGEDFTPLQYLADDQARLNVYDSLLSEYAVMGFEYGYSLARPDALVMWEAQFGDFVNGAQTVVDEYISAAEQKWGQTSGVTLLLPHGYEGQGPDHSSARIERFLQLCAQNNMTVAQPTLPSNYFHLLRWQVHNPHHKPLVVFTPKSMLRLKAAASKTEEFTTGAFRPVIGDDTVDAAAVRKVVFCAGKLYYDLEAERKKRGATDAAAAETAIIRLERLYPLPGAELQAEIAKYPNAEKYLWAQEEPANQGAWPFIALNLIDHLDLAVGADVPHGERLRRISRPHSSSPAVGSAKRHQAEQEQLVREVFEA

SEQ ID NO: 12663 - protein, 371 aa, Epilobium canum
ERVRNGSWVGATGKQLKDVIAVGIGGSFLGPLFVHTALQTDPEASKNARGRKLRFLANVDPIDAARNISGLNPETTLVVVVSKTFTTAETMLNARTLREWISSALGPSAVAKHMVAVSTNLQLVEKFGIDPYNAFAFWDWVGGRYSVCSAVGVLPLSLQYGFAVVEKFLQGAHSIDQHFSSAPFEKNLPVLLGLLSVWNVSFFGYPARAILPYSQALEKLAPHIQQVSMESNGKGVSIDGLPLTFESGEIDFGEPGTNGQHSFYQLIHQGRVIPCDFIGVVKSQQPVYLKGEVVNNHDELMSNFFAQPDALAYGKTPEQLKKENVAEHLIPHKTFTGNRPSLSILLPTLDAYRIGQLLAIYEHRVAVQGFI

SEQ ID NO: 12664 - protein, 261 aa, Haemophilus somnus 2336
MSEPENLAQNQPHFSKDTTHFGFQTVAKSEKQKLVANVFHSVAAKYDLMNDLLSFGIHRVWKRFTIDCSGVRKGHKVLDLAGGTGDFSAKFSRIVGETGKVILADINSSMLDVGREKLRNLGIVGNVDYVQANAEELPFADNTFDCVIISFGLRNVTDKDKALRSMFRVLKPGGRLLVLEFSKPILDPLSKIYHFYSFNVLPKIGEIVVNDSDSYRYLAESIRMHPKQDILKEMMINAGFEQVGYYNLTAGIVALHRGYKF

SEQ ID NO: 12665 - protein, 198 aa, Streptococcus pneumoniae
GIEDILVVTGKSKRSIEDHFDSNFELEYNLKEKGKHDLLKLVDETTGIRLHFIRQSHPRGLGDAVLQAKAFVANEPFVVMLGDDLMDITDDNAVPLTKQLMNDYESTHASTIAVMPVPHEEVSAYGVIAPQGEGINGLYSVETFVEKPAPEDAPSDLAIIGRYLLTPEIFEILENQAPGAGNEIQLTDAIDTLNKTQR

SEQ ID NO: 12666 - protein, 334 aa, Oryza sativa
  unsure (1)..(334): unsure at all Xaa locations
MTFSGMDIALKASTHSSTSQQHWLHSTRYRCQYGLGSTHLNGRKRSPMVLSVRAVSGKSDLDFSDPSWKEKYQEDWNRRFSLPHITDIYDLKPRLTTLAFEKNRTDGGSLSADKWNGYVNKDDRALLKVIKYASPTSAGAECVDPDCSWVEHWIHRAGPRKEIYYEPAEVKAAIVTCGGLCPGLNDVIRQIVFTLEIYGVKNIVGIQFGYRGFFEKGLKEMPLSRKVVENINLSGGXSFLGGARGGAXTSEIVDSIQARRIDMLFVIGGNGSHAGANAIHEECRKRKTEVSVVAVPKTIDNDILFMDKTFGFDTAVEEAQRAINSAYIEARSAY

SEQ ID NO: 12667 - protein, 417 aa, Chloroflexus aurantiacus
MRIVAMIMAGGEGTRLSVLSEKRAKPSVPFAGKFRIIDFTLSNCVNSGIFDVAVLTQYRPHSLNEHIGIGKPWDLDRARGGVRLLQPYQGRRDESWYRGTADAIYQNLNYIQERRADLVLILSGDHIYKMNYNDIIKTHLQKRADLTVAVMEVPIEETDRFGIMTTDEHDRIIEFTEKPKARDKGNLASMGIYVFNADILIRRLSEGGPEKPRIDFGKDVIPAMVAEDRVFAHRFKGYWVDVGTIQSYWETSMQLLDPSLDFDLFDPNWLIRTRSEERPPAKIGPQAKVTQSIICNGCTIRGTVIHSVLSPGVYVSPGAIVRDSVVMNDTWIGPGAVLDRVIVDKKVVVGAGARLGFGDDLTVPNRKQPDKLNSGVTVVGKSAHIPAGITIGRNVVINADRDAEDFPAGDVPSGETI

SEQ ID NO: 12668 - protein, 435 aa, Bordetella parapertussis 12822
MPGGRACARLQGFVALQSCGAPAARGLFPPLFLSPFRIPIMRKFSRIERLPPYVFNITGELKMAARRRGEDIIDMSMGNPDGATPQHIVDKLVEASTRPDTHGYSVSKGIPRLRKAICDWYMRRYAVEFDPDSEAIVTIGSKEGLAHLMLATLDRGDTVLVPNPSYPIHIYGAVIAGANIRSVRMTPGIDFFEELERAVRESIPKPKMMILGFPSNPTAQCVDLSFFERVVALAKEHDILVVHDLAYADVCFDGYVAPSIMQVPGARDVAVEFFTMSKSYNMAGWRIGYMVGNRELVGALARIKSYHDYGTFTPIQVASIAALDGPQDCVNEIVAQYQRRRDVLARGLHEAGWNVEIPKASMYIWAQIPEPYRAMGSLEFTKRVLSDAKVAVSPGIGFGEYGDEYVRFALIENEQRTRQAVRGIKDMFRKDGLLK

SEQ ID NO: 12669 - protein, 407 aa, Chloroflexus aurantiacus
MILAGGDSPALSVLTAERTEAAVPFGGKYRIIDFALSNCVNSGLYNVAVLTQYRPRSLHAHLGVGRPWDLDRAQGGLRLLHPSPTPDGGGWQRGTADAVRYNLDFVEDQQVDAVLLLAGDHIYKMDYGPLLKLHAEQEADVTMAVRSVSPHDAHRYGIVSVGSDGRVDRFVEKPRRADSNLASMGIYVFRKQFLIDLLRSTDAVDFGRHLLPQIVSSARAFAYNFQGYWADVGTVQAYYEANLALLAETPALDLYDPEWVIHTVSSDRPGAEIGVQARVENSLLSDGCRVYGTVIGSVLSPGVVVAAGAVVRDSVVLGDAVIEAGAVLDRCIIDEGVRIGEGAHVGFGDDNTPNAEAPERLNTGLTLVGLKAQIPAGVRIGRNVAIKPRTQPAAFPADGQVPSGATI

SEQ ID NO: 12670 - protein, 198 aa, Streptococcus mitis
GIEDILVVTGKSKRSIEDHFDSNFELEYNLKEKGKHDLLKLVDETTGIRLHFIRQSHPRGLGDAVLQAKAFVGNEPFVVMLGDDLMDITDDHAVPLTKQLMNDYETTHASTIAVMPVPHEEVSAYGVIAPQGEGINGLYSVETFVEKPAPEEAPSDLAIIGRYLLTPEIFEILENQAPGAGNEIQLTDAIDTLNKTQR

SEQ ID NO: 12671 - protein, 116 aa, Glycine max
  unsure (1)..(116): unsure at all Xaa locations
MAGEDYTFKXAMIVDARARNISHNVTCTESGSQSIEDSQAYIAILLRKLILDEIQSGKTDKDIYNKLADXFTETVLYTPNFDMQTTPIWLLPLLIASSAARVWAYNMHKQKTNVHI

SEQ ID NO: 12672 - protein, 166 aa, Megacorax gracielanus
SAILPYSQALEKLAPHIQQVSMESNGKGVSIDGLPLPFETGEIDFGEPGTNGQHSFYQLIHQGRVIPCDFIGVVKSQQPVYLKGEVVNNHDELMSNFFAQPDALAYGKTPEQLKKENVSEHLIPHKTFTGNRPSLSILLPTLDAYRIGQLLAIYEHRVAVQGFIWG

SEQ ID NO: 12673 - protein, 198 aa, Streptococcus oralis
GIEDILVVTGKSKRSIEDHFDSNFELEYNLKEKGKTDLLKLVDETTGMRLHFIRQTHPRGLGDAVLQAKAFVGNEPFVVMLGDDLMDITNEKAVPLTKQLMDDYERTHASTIAVMPVPHDEVSAYGVIAPQGEGKDGLYSVETFVEKPAPEDAPSDLAIIGRYLLTPEIFQILENQAPGAGNEIQLTDAIDTLNKTQR

SEQ ID NO: 12674 - protein, 420 aa, Pyrococcus furiosus DSM 3638
MKAIILAAGKGERLRPLTDDRPKVVLKIANKPIISYVLENLDPFVDEFIIVVKYMKEKVIDLLGDEFRGKPITYVEQGEEEGTAAAVYSVKEFIESNEEFFVVNGDLYFEPDAVKGLLHVFKKEKGDAGIVVKEFENLSQYGMVEVENGKVKGIIEKPGNVKGYANLGIYIFKSDVFDYIENTEISERGEYEITDTINLMIKDGKSVVYYNYEGFWSDIGRPWDLLEVNEYILKTKLKHEIRGVVEEGATIIPPVEIGEGTIVRAGSYIIGPVKIGKNCRIGPNCYIRPYTSIGDNCHIGNAVEVKNSIIMDNSNAPHLNYVGDSIIGENTNLGAGTITANLRHDKGTIKVEVKGKLEDSGRRKLGAIIGHNVKVGINVTIYPGRKIGSNSFIGPGVIVDKNIPQNVLVTVKQEKKVIEK

SEQ ID NO: 12675 - protein, 429 aa, Acidithiobacillus thiooxidans
MTTHIQKPATGSPLTLLNGVLQVPDQPIIPFIEGDGIGCDVTPAMRSVVDAAVAKVYGGQRQIAWMELFAGQKAVQLYGEGQYLPDETMAAIREYKVAIKGPLETPVGGGIRSLNVAMRQDLDLYVCLRPVRYFEGTPSPMRHPEKVDMVIFRENSEDIYAGIEWPAGSPEAEKIIRFLREEMGVTKIRFPDSSAIGIKPVSTEGSERLIRRTIQYALEHGKPSVSLVHKGNIMKFTEGGFRDWGYALAEREFAGRVFTWRQKAAISKAEGKAAGQKAEQQAIADGKLIIKDVIADNFLQQILLRPEDYSVVATLNLNGDYVSDALAAEVGGIGMAPGANLSDTHAIFEATHGTAPDIAGQGKANPSSLILSAVMMLEHLGWGEAAQAIVAAMNATIAAGEVTGDLAALRGDVPALSTTEFTAALIRRF

SEQ ID NO: 12676 - protein, 229 aa, Pseudomonas aeruginosa PAO1
MKQYGAEFFGTFWLVLGGCGSAVLAAGVPELGIGYLGVALAFGLSVLTMAYAIGPISGAHLNPAVSVGLWVGGRFPASQLLPYVVAQVLGGLAAGGVLYLIASGKAGFDLAAGFASNGYGEHSPGGYSLQAALVSEVVLTGMFLLIILGATSKRAPQGFAPIAIGLTLTLIHLISIPVTNTSVNPARSTAVALYVGDWAVSQLWLFWVAPILGAVLGALAYRLIGDKND

SEQ ID NO: 12677 - protein, 84 aa, Pisum sativum
MCGILAVLGCSDDSQAKRVRILELSRRLKHRGPDWSGLHQHGDNYLAHQRLAIVDPASGDQPLFNEDKSIIVTVNGEIYNHEEL

SEQ ID NO: 12678 - protein, 180 aa, Glycine max
MQHRNLTSGRPSGTDGSDYSYRMVVDSRYQLVAKGKKRLSLYFITEAVLLLIGVTLTYLPGIEADAPNTVAYSSVIVSVVSLIIGNIGRRRSRSGLLRFYAAVSSIAMLLLIASLAQQHLLLKAIQDSKLWKTGKYDVNELSHFQIGLLLYMVTLSVLKLCTVNAVVSLLFNMAPPKKTS

SEQ ID NO: 12679 - protein, 84 aa, Pisum sativum
MCGILAVLGCSDPSRAKRVRVLELSRRLKHRGPDWSGLHQHGDCFLAHQRLAIVDPASGDQPLFNEDNPSIVTVNGELYNHEDL

SEQ ID NO: 12680 - protein, 437 aa, Synechococcus elongatus
MRELTLTTTVFQTTKSQEIFAAAQKLMPGGVSSPVRAFKSVGGQPIVFDHVKGAHIWDVDGNQYIDYVGSWGPAIVGHAHPEVIDALHAALEKGTSFGAPCLLENILAEMVIAAVPSVEMVRFVNSGTEACMAVLRLMRAYTQREKVIKFEGCYHGHADMFLVKAGSGVATLGLPDSPGVPKATTAATLTAPYNDLEAVSRLFEQYPNDIAGVILEPVVGNAGFIPPDAGFLEGLRELTKQYGALLVFDEVMTGFRIAYGGAQEKFGVTPDLTTLGKVIGGGLPVGAYGGRAEIMKMVAPAGPVYQAGTLSGNPLAMTAGIKTLEILSRPGSYEHLDRITGKLVQGLLDAAREFGHEVCGGHISGMFGLFFTAGPVTNYEQAKQSDLKKFAAFHRGMLEQGIYLAPSQFEAGFTSLAHTEADIERTIAAARTVLSQL

SEQ ID NO: 12681 - protein, 474 aa, Nostoc punctiforme PCC 73102
MIGAMTLLFLAGPLMGNAFAQTPVAVPAADTGDTAFMLISAALVLLMTPGLAFFYGGFVRSRNILNTLMMSFVLMAIVGVTWILWGYSLSFAPGLPFIGGLQWFGLNGVGLETQGYLPHLPYEDALKAADPKYADVVSYAGTIPHQAFTIYQAMFAIITPALISGALVERMSFRAYSLFVLLWSTFVYAPLAHMVWAKGGFLGLAGGLGALDFAGGTVVHISSGVSALVAAIVLGPRKTHPDRLSPPHNVPFILLGAGLLWFGWFGFNAGSALSVASGTSGNLTTNLATTAFVATNTAAAAAALMWLILEAVLRGKPTAVGAATGAVAGLVGITPAAGFVTPLSAILIGFITAFVCFYAVSFKHKLQIDDALDTYPVHGVGGTVGAILTAIFATTQVNGGGKDGVLRGNFGELGVELIAIAVAYAIAGVGTWIILKVIDATVGLRVKEEAELQGLDINEHGEEGYNSEFGDRPT

SEQ ID NO: 12682 - protein, 414 aa, Thermoanaerobacter tengcongensis
MANVKLMPKLGMTMTAGKVVRWLKKEGEKVEAGEPLLEIETDKVTMEEEAGYTGTLLKILVREGEEVPINQPIAIIGGEGEDIEEILKTLKVSEGVEEEKKEEKIKVKIEEKPEEVKREEISKPRATPAARKIAREHGIDLSEVIGSGAHGRIHRKDVEEYIRKRTEIVPSQVTVEQKVEKKEEIPSYRVIPFTGMRKIIAEKMQKSINTAPHFYVTMEVKMREILKLRETLNSKLKEDEAKISLNTLLMKAAGIAIKDYPIFNSYVEEGQIILRNEINIGLAVALDEGLIVPVIREVDKKGLKEIAREEKALIQKAREGKLTPDEYTGGSFTISNLGMFDVVRFAAIINPPEVAILAVGKIREIPVVEEGQIEIEPIMEMTLSSDHRVIDGALAAKFLRRIKEILEDPLQFML

SEQ ID NO: 12683 - protein, 327 aa, Yersinia pestis biovar Medievalis str. 91001
MVKKIGVLTSGGDAPGMNAAIRGVVRAALSAGLDVFGIEDGYLGLYENRMKKLDRYSVSDMINRGGTFLGSARFPEFRDPEVRKVALKNMHERGIDGLVVIGGDGSYAGADLLTKEGGIHCVGLPGTIDNDVAGTDYTIGFFTALETVVEAIDRLRDTSSSHQRISIVEVMGRYCGDLTLAAAIAGGCEFIAIPEVEFKRDDLVAEIKAGIAKGKKHAIVAITEKLDDIDSLAKYIEKETGRETRGTVLGHIQRGGAPVAYDRILASRMGAYAVDLLLQDHDYKKGGFCVGVQNEKMVHELISVCIAPENKKSKFKEDWYDTAKKLF

SEQ ID NO: 12684 - protein, 500 aa, Lycopersicon esculentum
MAIGSLARRKASTILSSRYLKYSFSLSRGFASGSDENDVVVIGGGPGGYVAAIKAAQLGLKTTCIEKRGTLGGTCLNVGCIPSKALLHSSHMYHEAQHSFASHGVKFSSVEVDLPAMMAQKDKAVAGLTRGIEGLFKKNKVNYVKGYGKFLSPSEVSVDTVEGGNTIVKGKNIIIATGSDVKSLPGLTIDEKRIVSSTGALALTEIPKKLVVIGAGYIGLEMGSVWGRLGSEVTVVEFASDIVPTMDGEVRKQFQRSLEKQKMKFMLKTKVVSVDTVGDSVKLTLEPAAGGEQTTLEADVVLVSAGRVPFTSGLGLDKIGVETDKAGRILVNERFASNVPGVYAIGDVIPGPMLAHKAEEDGVACVEFIAGKEGHVDYDLVPGVCYTHPEVASVGKTEEQVKALGVDYRVGKFPFLANSRAKAIDDAEGIVKVIAEKGTDKILGVHIMSSNAGELIHEAVLALNYGASSEDIARTCHAHPTMSEALKEAAMATYDKPIHM

SEQ ID NO: 12685 - protein, 310 aa, Oryza sativa
MDAEMAMGESFAYYWETQRYLESEELDSMYLPTQDDSNYESSSPDGSHSSSAPAPAAVGGDAAAAVAGSGGGMTTMMMGGGGGGGDDAGGANKNILMERDRRRKLNEKLYALRSVVPNITKMDKASIIKDAIEYIQRLQAEEQQMLREVAALESAAAASAAPAAANPFAGLGADEEHEYGHHHPSSSSERTKKVKRALSVSSISDALLAAAAPAPPVEIQELRVSEVGDRVLVVSVTCSKRRDAMARVCRALEELRLRVITANITSVAGCLMHTLFVEVDHMDSVQMKQMVEAALSQLVATGSPLSSMSY

SEQ ID NO: 12686 - protein, 345 aa, Triticum aestivum
  unsure (1)..(345): unsure at all Xaa locations
MGKKKKRVEKVFCYYCDREFDDEKILVQHQKAKHFKCHVCHKKLSTAGGMAIHVLQVHKESVTKVPNAKPERDSTEIEIFGMQGIPSDVLAAHYGEEEEPSKVAKVEVPTIRPPIMPNYPLGMPFPPRXMVQPRPMYNPAMMVRPPIWPLQQPQPWFAQQPPVSVPPMIXLGQAPQQPLFPIQNMPNPMMTSAPANLLQTSYPMATTGVPSPVAPQASQPLFPVNTTGNGAANSSFSSSISPATIAANSPASVGTAGYGYVANNHGTGGPAVGHPPAPATNSKTSATQPATSEVYLVWDDEAMSMEERRLALPMYQVHDETSQMSSVDAAFDRRISDITFSRQST

SEQ ID NO: 12687 - protein, 479 aa, Oryza sativa (japonica cultivar-group)
MAIGGGGGGGSWSIHGRPDVTSRYEVLGRAGSGAYADVYRGRRRSDGAPVALKEVHDAVSARREADALLAAAPSRHVVALLDHFPGGDHDDDVLVLEWLPLDLSAVVRAAAAARPSALPAAQRKRWMLQVLEGVAACHSAGVVHRDLKPANLLISEDGVLKVADLGQARILQETGTYQGMHPYEQSSGVEPWVSQQRAVLHGVKENHPSHDSETQTGQEPERLTAADYLHEMDQLRAKSTHGDVDKMSLQDGNASCLATCSTADIDDDPFRASYSYDAEEGMLEEESGAFTSCVGTRWFRAPELLYGSTNYGQEVDLWSLGCILAELFNLEPIFPGTSDIDQIGRIISVLGNITEETFPGCSNLPDYNKIFFNKVEKPIGLEACLPDRSASEVSIIKRLLCYDPTKRASAADLLNDPYFAEEPLPVPIEGLQVPESKDEDDDSTEEWANFRGGDSDSDFDEFGSMDVTKTDKGFSIRFS

SEQ ID NO: 12688 - protein, 282 aa, Mycobacterium avium subsp. paratuberculosis str. k10
MSKVPTIELNDGARIPQLGFGVYQIKPDETAAAVRAALDIGYRHIDTAEMYGNEREVAQGIRDAGLDRSEVFVTSKLNNGFHEPDAARRAFDATLNALGSDYVDLFLIHWPLPTLYGGDFVSTWRVLEEFARDGRARSIGVSNFQVAHLERLAAETDTVPAVNQVEVHPYFTNEKVRGYAREHGLAIEAWSPIAQGGVLGDAVINRIADGLGRTAAQVVLRWHIQRGDIVFPKTVNPDRMKSNFELFDFELDERAMEAISALDRGESGRRGPNPDTFDYIPR

SEQ ID NO: 12689 - protein, 567 aa, Arabidopsis thaliana
MQSVLSLSFSQASLPLANRTLCSSNAAPSTPRNLRFCGLRREAFCFSPSKQLTSCRFHIQSRRIEVSAAASSSAGNGAPSKSFDYDLIIIGAGVGGHGAALHAVEKGLKTAIIEGDVVGGTCVNRGCVPSKALLAVSGRMRELQNEHHMKAFGLQVSAAGYDRQGVADHASNLATKIRNNLTNSMKALGVDILTGFGAVLGPQKVKYGDNIITGKDIIIATGSVPFVPKGIEVDGKTVITSDHALKLESVPDWIAIVGSGYIGLEFSDVYTALGSEVTFIEALDQLMPGFDPEISKLAQRVLINTRKIDYHTGVFASKITPAKDGKPVLIELIDAKTKEPKDTLEVDAALIATGRAPFTNGLGLENINVTTQRGFIPVDERMRVIDGNGKLVPHLYCIGDANGKLMLAHAASAQGISVVEQVTGRDHVLNHLSIPAACFTHPEISMVGLTEPQAREKAEKEGFKVSIAKTSFKANTKALAENEGEGLAKMIYRPDNGEILGVHIFGLHAADLIHEASNAIALGTRIQDIKLAVHAHPTLSEVVDELFKAAKVDSPASVTAQSVKVTV

SEQ ID NO: 12690 - protein, 281 aa, Megacorax gracielanus
ERVRNGSWVGATGKELKDVIAVGIGGSFLGPLFVHTALQTDQEASKNARDRELRFLANVDPIDVARNISGLNPETTLVVVVSKTFTTAETMLNARTLREWISSVLGTSAVAKHMVAVSTNLPLVEKFGIDPNNAFAFWDWVGGRYSVCSAVGVLPLSLQYGFAVVEKFLQGAHSIDQHFSSAPFEKNIPALLGLLSVWNVSFLGYPARAILPYSQALEKLAPHIQQVSMESNGKGVSIDGLPLPFETGEIDFGEPGTNGQHSFYQLIHQGRVIPCDFIGVV

SEQ ID NO: 12691 - protein, 450 aa, Escherichia coli CFT073
MNAFRQEIIMNKYQAVIIGFGKAGKTLAVTLAKAGWRVALIEQSNAMYGGTCINIGCIPTKTLVHDAQQHTDFVRAIQRKNEVVNFLRNKNFHNLADMPNIDVIDGQAEFINNHSLRVHRPGRNLEIHGEKIFINTGAQAVVPPIPGITTTPGVYDSTGLLNLKELPGHLGILGGGYIGVEFASMFANFGSKVTILEAASLFLPREDRDIADNIATILRDQGVDIILNAHVERISHHENQVQVHSEHAQLAVDALLIASGRQPATASLHPENAGIAVNERGAIVVDKQLHTTANNIWAMGDVTGGLQFTYISLDDYRIVRDELLGEGRRSTDDRKNVPYSVFMTPPLSRVGMTEEQARESGADIQVVTLPVAAIPRARVMNDTRGVLKAIVDNKTQRILGASLLCVDSHEMINIVKMVMDAGLPYSILRDQIFTHPSMSESLNDLFSLVK

SEQ ID NO: 12692 - protein, 371 aa, Hauya elegans
ERVRNGSWVGATGKELKDVIAVGIGGSFLGPLFVHTALQTDPEASKNARGRELRFLANVDPIDVARNISGLNPETTLVVVVSKTFTTAETMLNARTLREWISSALGPSAVAKHMVAVSTNLPLVEKFGIDPNNAFAFWDWVGGRYSVCSAVGVLPLSLHYGFAVVEKFLQGAHNIDQHFSSAPFEKNIPVLLGLLSVWNVSFLGYPARAILPYSQALEKFAPHIQQVSMESNGKGVSIDGLPLPFETGEIDFGEPGTNGQHSFYQLIHQGRVIPCDFIGVVRSQQPVYLKGEVVNNHDELMSNFFAQPDALAYGKTPEQLQKENVPQHLIPHKTFTGNRPSLSILLPSLDAYRIGQLLAIYEHRVAVQGFI

SEQ ID NO: 12693 - protein, 455 aa, Xanthomonas axonopodis pv. citri str. 306
MDPSVLKALQQLDAAHHLHPFNDNAALAQKGTRILTRGEGVYVWDADGNQLLDAFGGLWCVNVGYGRKELAQAAARQMEQLAYYNSFFQCTTEPTIQLAAKLAELAPGDLNHAFFANSGSEANDTILRLVRHFWAVQGQPQKRIFIGRHDGYHGTTMAGASLGGMRGMHQQGGLPIADIHHVAPPYHFGDGGEMDPEEYGLLAARRLEDKILELGPDNVAAFIGEPIMGATGVYIPPRSYWPEIERICRRYDVLLVADEVICGFGRTGEWFGAEYFGFQPDVMTLAKGITSGYIPLAAAMFNDRVAGVLKTQGGELAHGGTYAGHPVCAAVALENLRLLQDEGIVETARTQVAPYLAQRWAALGEHRLVGEARIAGLVGALELVPDKQRRGAYFPRRGRVGAMCRDFALRRGLILRATYDAMLLSPPLIITPAQVDELFDKAWAALDDTAQALGR

SEQ ID NO: 12694 - protein, 198 aa, Streptococcus sobrinus
GIEDILVVTGKSKRSIEDHFDSNFELEYNLKEKGKTDLLKLVDEATGMRLHFIRQTHPRGLGDAILQAKAFVGNEPFVVMLGDDLMDITDEKAVPLTKQLMNDYEKTHASTIAVMPVPHEDVSSYGVIAPQDEGSNGLYSVETFVEKPAPEETPSDLAIIGRYLLTPEIFEILEKQAPGAGNEIQLTDAIDTLNKTQR

SEQ ID NO: 12695 - protein, 251 aa, Xanthomonas axonopodis pv. citri str. 306
MAVVPLVGLPTDRILQGPHPFLAAGEKYIRAVVEAAGAMPVLLPSLQPALDAGAWLERLDGLLLTGAVSNVEPHHYSDEPSWEGNPHDPARDATSLALIPQALARGLPVLAICRGLQEVNVALGGRLHQRVHDVPGLADHREDPGTPIDTQYGPAHVVHLHPGGWLAGMSDSAQVWVNSLHGQGIATLAEGLLIEATAPDGLIEAFHGPGPGFLLAVQWHPEWRVTQHPFYRAIFQAFGEACRQYAARRGK

SEQ ID NO: 12696 - protein, 347 aa, Azotobacter vinelandii
MKALVLEKQHDLKIRDIDLPTPPVGPDDVRIRIHTVGVCGSDVHYYTHGRIGHFIVDRPLVLGHEAAGTVVEVGSGVTRLAVGDRVCMEPGIPDPKSKASRLGLYNVDPSVVFWATPPVHGCLTPEVVHPAAFVYKLPDNVGFAEGALVEPFAIGMQAAVKARIKPGDVAVVIGAGTIGMMTALAALAGGASRVLVSDLMVEKLAIAQRYEGITAVNVRERSLRDAVAEVTDGWGADVVFEASGSARAYGDALAAVCPGGALVLVGMPVEPVPFDVVAAQAKEIRIETVFRYANVYERAVNLIASGKVDLKPLVSATYPFERGVEAFERAASARPGDVKVQITFGDG

SEQ ID NO: 12697 - protein, 782 aa, Xanthomonas axonopodis pv. citri str. 306
MSKKTIKQYDNPAGGWGALRSVAKHLMEQDIAVQGAKTLLHANQPDGFDCPGCAWPDRDHTSTFEFCENGAKAVAAESTARRAGPELFASHTVSLLSQYSDYWLEGQGRLTHPMRYDAASDHYVPVSWDDAFAQIARHLNGLATPDEAIFYTSGRTSNEAAFLYQLFVREFGTNNFPDCSNMCHEPSGTALRSQIGVGKGTVSLHDFELADAIFIFGQNPGTNHPRMLGELRQASKRGAAIAAFNPLRERGLEKFADPQDKLEMLHNGSTRIASDYFQLKIGGDLAAVKGIIKHVLERDAQAQRDGTPRLLDLEFIQAHTANFEAFAADVHAESWDTIVEESGLDETALRKAGEIYLNAERVIACWGMGITQHKHSVATIHMITNLLLLRGNLGRPGAGVCPVRGHSNVQGDRTMMIYEKPPAAFLDKLQSVFGFAPPRADGFDTVGAIEAMLDGRGKVFFAMGGNFAAATPDTDATHRALRNCELTVHVTTKLNRSHLVHGRDALILPCLGRTEIDIQDAGSQGVTVEDSMSMVHLSAGINPPASPDLLSEPAIVARMAEATLGARSAIRWRWLVGDYDRVRDLIAQVFPDFAGFNERVRTPGGFRLSNTARDRQWVTPEQRAVFKPHAVPTDNPIHRARRGHAEQMVFTLATTRSHDQYNTTIYGLDDRYRGVFGERRVLFINGADIAALNMKAGDWVDLESLCEDGVRREARRFLLVDYNIPRGCLAAYYPETNALVPLSSFADEARTPTSKSIPVIVLPHRAETADAAPRDIGAVLVR

SEQ ID NO: 12698 - protein, 420 aa, Zea mays
  unsure (1)..(420): unsure at all Xaa locations
PPAQVDVGLSDGSFARGAVPSAQXGASTDDVIYEALELRDGGSDYLGKGVLKAVNNVNSIIGPAIVGKLDGTSNEWGWCKQKLGANAILAVSLAVCKAGAMVQKIPLYQHIANLAGNKTLVLPVPAFNVINGGSHAGNKLAMQEFMILPTGASFKEAMKMGVEVYHHLKSIIKKNXKKYGQDATNVGDEGGFAPNIQENKKGLELLKAAIEKAGYTGKVFIGMDVAASEFFSEKDKTYDLNFKEENNDGSNKISGDSLKDLYKSFVSEYPIVSIEDPFDQDDWTTYAKLTGEIGQQVQIVGDDLLVTNPTRVAKAINEKTCNALLLKVNQIGSVTESIEAVRMSKRAGWGVMASHRSGETEDTFISDLSVGLATGQIKTGAPCRSERLAKYNQLXLRIEEELGVAAVHAGAKFRAPVEPY

SEQ ID NO: 12699 - protein, 487 aa, Bacillus subtilis
MKIKAQIGMVMNLDKCIGCHACSVTCKNTWTNRSGAEYMYFNNVETKPGIGYPKQWEDQDKYKGGWTLKKGKLELKSGSKTNRLAGLFYNPNQPSIDDYYEPWNYDYETLTNSPQKKHQPVARPKSSLTGDFMNIEWGPNWEDDLAGGHITGLEDPNVQKMEESIKTEFDDVFIMYLPRICEHCINPACVSSCPSGAMYKREEDGIVLVDQNACRSWRYCVSSCPYKKVYFNWQTNKAEKCTLCFPRLEAGLPTICSETCVGRIRYLGVMLYDADKVEEAASVENEKDLYHSQLDVFLDPNDPEVAKLAKEQGIPAEWIEAAQQSPIYKMIIDWKIALPLHPEYRTLPMVWYIPPLSPIMNLFEGKGSRQTAEDIFPAIDQMRIPIDYLAQLLTAGDTDHIRSTLKKMSVMRQYMRAVQTNKSIDPELISSVGLTEQQIEDMYRLLAIAKYDDRFVIPSSHREEVSDLYAEQGSCGLSFSGGPGSCF

SEQ ID NO: 12700 - protein, 554 aa, Pseudomonas fluorescens
  unsure (1)..(554): unsure at all Xaa locations
MAYYRTPHDVTALPAWQALNDHRKAMQDFSMREAFNADPQRFTQFTLSSCGLFLDYSKNLINAQTRDLLVGLANEVDLKGAIKSLFEGEIVNASENRPALHTALRRPVGDKLLVNGVNVMPDVHKVLNQITDLVGRIHDGLWRGYTEKPITDVVNIGIGGSFLGPELVSEALLSYAQKGVRCHYLANIDGSEFHELTMKLRAETTLFIVSSKSFNTLETLKNAQAARAWYLAQGGSEAELYRHFIAVSSNNAAAVAFGIREENIFPMWDWVGGRYSLWSAIGLPIALAIGMSNFKELLSGAYSMDQHFQSAPFEQNMPVLLALLGVWYGNFWGAQSHAILPYDHYLRNITKHLQQLDMESNGKSVRQDGTPVSTDTGPVIWGGVGCNGQHAYHQLLHQGTQLIPADFIVPIVSFNPVSDHHQWLYANCLSQSQALMLGKTRAEAEXELRDKGASEEEVQKLASHKVIPGNRPSNTLVVERISPRRLGALVALYEHKVFVQSVVWGINAFDQWGVELGKELGKGVYNRLVGSEESLAEDASTQGLINYFRGRHRG

SEQ ID NO: 12701 - protein, 445 aa, Shigella flexneri 2a str. 301
MTSCNAPVGVIMHIILTAIWDLLNLYAKKFRCPDVLTSINTMFTLVPDISPTKPRKLHHMTRKQATIAVRSGLNDDEQYGCVVPPIHLSSTYNFTGFNEPRAHDYSRRGNPTRDVVQRALAELEGGAGAVLTNTGMSAIHLVTTVFLKPGDLLVAPHDCYGGSYRLFDSLAKRGCYRVLFVDQGDEQALRAALAEKPKLVLVESPSNPLLRVVDIAKICHLAREVGAVSVVDNTFLSPALQNPLALGADLVLHSCTKYLNGHSDVVAGVVIAKDPDVVTELAWWANNIGVTGGAFDSYLLLRGLRTLVPRMELAQRNAQAIVKYLQTQPLVKKLYHPSLPENQGHEIAARQQKGFGAMLSFELDGDEQTLCRFLGGLSLFTLAESLGGVESLISHAATMTHAGMAPEARAAAGISETLLRISTGIEDGEDLIADLENGFRAANKG

SEQ ID NO: 12702 - protein, 282 aa, Yersinia pestis biovar Medievalis str. 91001
MSQTASSTLKGQCIAEFLGTGLLIFFGAGCVAALKLAGASFGQWEISIIWGLGVAMAIYLTAAISGAHLNPAVTIALWLFACFERRKVLPYIVAQVAGAFCAAALVYGLYYSLFVDFEQTHQMVRGSTESLQLAGIFSTYPNPHISVVQAFLVETVITAILMCLILALTDDGNGIPRGPLAPLLIGILIAVIGASMGPLTGFALNPARDLGPKAFSYLAGWGDIAFTGGRDIPYFLVPIFGPIVGALLGAFGYRALIGRHLPCDVCTLEDEESTTITTERKA

SEQ ID NO: 12703 - protein, 457 aa, Shigella flexneri 2a str. 2457T
MQKYISEARLLLALAIPVILAQIAQTAMGFVDTVMAGGYSATDMAAVAIGTSIWLPAILFGHGLLLALTPVIAQLNGSGRRERIAHQVRQGFWLAGFVSVLIMLVLWNAGYIIRYMENIDPALADKAVGYLRALLWGAPGYLFFQVARNQCEGLAKTKPGMVMGFIGLLVNIPVNYIFIYGHFGMPELGGVGCGVATAAVYWVMFLAMVSYIKRARSMRDIRNEKGTAKPEPAVMKRLIQLGLPIALALFFEVTLFAVVALLVSPLGIVDVAGHQIALNFSSLMFVLPMSLAAAVTIRVGYRLGQGSTLDAQTAARTGLMVGVCMATLTAIFTVSLREQIALLYNDNPEVVTLAAHLMLLAAVYQISDSIQVIGSGILRGYKDTRSIFYITFTAYWVLGLPSGYILALTDLVVEPMGPAGFWIGFIIGLTSAAIMMMLRMRFLQRMPSAIILQRASR

SEQ ID NO: 12704 - protein, 356 aa, Methanosarcina acetivorans C2A
MNNMKGFAMLEIGKVGWIDAERPSAGPYDAIVRPLAVAPCTSDVHTVWEGALGERKNMILGHEAVGVIDEIGSEVKDFKPDDKVIIPAVTPDWRSMEAQDEIPMHSNGMLGGWKFSNFKNGVFAEYFHVNDADMNLALLPKGMPLEQAVMLSDMATTGIQGAEMANIKTGSTVAVIGIGPVGLMAVAGASILGAGRLIAVGSRKVTVDLALEYGASEVVDYRKGGLVGQILEKTNGKGVDSVIIAGGNENTISDAVKIVKPGGTVSNVNYYGTGDTLPIPRIEWGSGMAHKDIRGGLTTGGRLRMERMAALCTYGRIKPEKMATHVFEGFDKIEEALMLMKDKPRDLIKPVVLLEE

SEQ ID NO: 12705 - protein, 222 aa, Oryza sativa
MDIRLRITPYSTLESRSEPLVPGGLRHASLLPCIHRRSATRCIVVLPTVRSKLDTAAIMGFPLVCYCMAIPKPLIALAKLLAAIREALQLMLFVVGICHHPERSGRPAAVDAPLPDEVKDRLPPLEFAQLLAASEHGCHGCDDDEAVAGCIVCLERLEADDVVRRLGNCAHAFHRGCIDRWIDLGRLTCPLCRSTLLPRARPAAGPRGRLGRLATRLTGVVW

SEQ ID NO: 12706 - protein, 256 aa, Oryza sativa (japonica cultivar-group)
MASPEGSTWVFDCPLMDDLAAAAGFDAAPAGGFYWTTPAPPQAALQPPPPQQQPVAPATAAPNACAEINGSVDCEHGKEQPTNKRPRSESGTRPSSKACREKVRRDKLNERFLELGAVLEPGKTPKMDKSSILNDAIRVMAELRSEAQKLKESNESLQEKIKELKAEKNELRDEKQKLKAEKESLEQQIKFLNARPSFVPHPPVIPASAFTAPQGQAAGQKLMMPVIGYPGFPMWQFMPPSDVDTTDDTKSCPPVA

SEQ ID NO: 12707 - protein, 203 aa, Schizosaccharomyces pombe
MSAFKKSGSKSETSKKLVVVGDGGCGKTCLLIVFSSGTFPERYVPTVFENYITDITYGPNSKVIELALWDTAGQEEYDRLRPLSYPNSNVILLCFSIDCPASLNNVTEKWYPEVQHFCPRTPIVLVGLKADLRKDRNATEVLRTQGLTPVTYQQAQSVALSMNAPYVECSAKENTGVNEVFQLAVGLTIKKSFSFSKKSCVIL

SEQ ID NO: 12708 - protein, 646 aa, Zea mays
MAPPRPPTGPILFLPLVFLFLFTTAAASATAPEDEKFTEELLLRPLPDRKALAHFHFRSSAPPAASVGRHHHLFPKAISQLVKKYHISELELSFTQGRWNYEQWGGFDPMSTNNAKPPGVELWAVFDLPLSEIDATWKNLTHTLSGLFCASINFLESSTAFSAPRWGFKLNEGNLRYGALPREAVCTENLTPWLKLLPCRDKAGIASLLYRPSIYKGYYHSQKLKLRSSQSLGIILDQTLTVVLQPNNVHGEQLHSNHGQLQPNWSMRHLFNRKLSGKCLVSKSSRVFIEVDKGIADEVNISGSVHSWSNEFFVLSNSPDKLIKGQNHLEMQSSFLYVYDASNYSEEQPLDLGITWKLPLIWTCTPSPFHASRFLMGSGNERGSIALSFMSTNLHKKISGSANDCSIKAVIFQVVPWYVKVYYHSLEIFIDGSRKTVSEVVDKIHVIPSEDKLLPGTLEMLLRFPCSMQSGTLTLDFDKGFLHIDEYPPDANQGFDIPSALVSFPEFSSARSYPEIDPVLGSPLLENFQEDSVVKSYTEVLLVPLTTPDFSMPYNVITFTCTVLALYFGSLLNALRRRIGEEERELKKRATRHGLISRLLAKLRGQKVDPSESGSSFESTGSKKLLFKVVFVAVAAVLFHYFSNNS

SEQ ID NO: 12709 - protein, 200 aa, Neurospora crassa
MASGSPQNVIRRKLVIIGDGACGKTSLLSVFTLGFFPATYIPTVFENYVTDCRVDGKSVQLALWDTAGQEDYERLRPLAYSKAHVILIGFSVDTPDSLDNVKHKWVTEANERCPNVPIILVGLKKDLRGDPVAIEEMRKRSQRFVMEDEGQRIAKEIGARKYLECSSLTGEGVDDVFEAATRAALLTFEKKEGSGCCVIL

SEQ ID NO: 12710 - protein, 185 aa, Pyrococcus furiosus DSM 3638
MELFFITSNDGKVREAKKFLEPLGINVIKKPLEYPEIQADTLEDVVVFGLNWLKDKVDKPFIIEDSGLFIEALNGFPGVYSAYVYKTIGLDGILKLMEGIENRKAYFKSVIGFYDGEIHLFVGEVRGRISNEKRGLHGFGYDPIFVPDGFDKTFAEMSTEEKNSVSHRGKALKEFYRWMKENLKK

SEQ ID NO: 12711 - protein, 115 aa, Zea mays
SASNGVVVVGATRWVDNYNVPLATADVSVARRIARAVSERGGGLACVQAMGLAHGDGATEVACNLLHPDAVGADQVQERVSRLAAGLGVGVGQGYFTDFSREKVVELYLQAAQAA

SEQ ID NO: 12712 - protein, 450 aa, Xanthomonas axonopodis pv. citri str. 306
MPDHLPSDAADALQAPTQLDAFWMPFTANRQFKARPRLLASAQGMYYRDVQGRQILDGTAGLWCCNAGHSRERIVAAIRDQAGTLDFAPTFQMGSPLPFVLAQRLAAIAPPGLGHVFFTNSGSEAVDSAMKIVLAYHRLRGEGQRTRFIGREKAYHGVGFGGMSIGGLPNNRKWFGPLLAGTDHLPHTLDLQHNAYARGLPVHGAELADDLERLITLHDASTIAAVFVEPVSGSAGVILPPEGYLQRLRAICDRHGIVLVFDEVITGFGRVGDAFAAQRFGVIPDIITAAKGLTSGTVPMGAVLVADAIHDAFMHGPQNAIELFHGYTYSGHPLACAAAIATLDTYAEEELFTRAITLGPQWEDALHGLRGSPHVIDIRNIGLIGAIELAPRDGAPGARGYDVFERCFHEGGLLVRVTGDVIALSPPLIVTPEQIGQMVETLGKILRQVD

SEQ ID NO: 12713 - protein, 389 aa, Lactobacillus plantarum WCFS1
MTMQHVFPTYQRFPFAITDGQGVHLTDNHGKTYLDFTAGIGVCNFGYHQPQIQAAVTQQLTHIWHTSNLYENELQDAVAGLLANGEERLVYFANSGTEANEAALKLARKYTGKTGILAFQHSFHGRTYGAMSMTGNPHIQAGYAPLVPGITFATYNDDAALDKITPELAAVILEVVQGEGGVFAGQTAWLQAVNAKCQATGVLLIIDEVQTGIGRTGYRMAYEGYGLDPDIYTVAKGLANGLPVGAMVGRRQLATAFGPGSHGSTFAGNAVAMAAAKCVLPQLTPALLTTVRAHAKLVWQSLATQVEPIPVVKQITGKGLMIGIHLDEQIPVNQVITRLQVEGLLTLSAGDNTLRLLPPIVMQPADLLAGIALIAKVLTTLTTEVTTNE

SEQ ID NO: 12714 - protein, 410 aa, Glycine max
  unsure (1)..(410): unsure at all Xaa locations
LEIAHQSLSRILNFSYVCHPSSFIPLIKSPHIYIMSTDLSVILPRVLIVSRRSVRKNKFVDFVGEYHLDLIVGYGAVPVIVPRVSGVHMLLDSFEPIHGVLLCEGEDIDPSCYEQDTAGLSEEEVEEIRRLHASDTAIDKEKDSIELSLAKLCLERNIPYGHRESXFRLTAAKGCLVMHINYDDYDGHLHDVDVVEKAPGLKKRFLLMSFQHHGVNKGAQRFVPMVFAPDGLIEGFYDPDAYNPEEGKFIMGLQXRMRKPDSDEFDYPGCPFAYKEFVKAVVAHQKKLNSLTSVQKPIKLNKEMEIKRRGTNSPKETELDAGAEFLESNTALSVQQENRLKQMGATVRNGGSYVERLKLNEVREKMARNVMGKMTVEQLSDLLSFYRTMGQICSEVLDIKIHGVVNDLGS

SEQ ID NO: 12715 - protein, 254 aa, Zea mays
  unsure (1)..(254): unsure at all Xaa locations
MDVKCRRLEGKVAVVTASTQGIGLAIAERLGLEGAAAVVSSRKQKNVDEAVEGLKAKGITVVGAVCHVSDAQQRKNLVETAVKNFGHFDILVSNAAANPTVNVILEMKEVVLDKLWDINVKASILLIQDAAPHLRAGSSVILISSIAGYNPEQGLTMYGVTKTALFGLTKALAXEMGPDIRVNCIAPGFVPTRFASFFIDNETIRKKLNERTMLKRLGFRGKTWAAAAAFLASDDASFITAETIVVAGGVQSRL

SEQ ID NO: 12716 - protein, 400 aa, Erwinia carotovora subsp. atroseptica SCRI1043
MPDIADRLNNIAISASVAMTQKARDLAAQGIDVVGLSTGEPDFPTPVHAIEAAYAAALAGDTRYPPTDGTPTLRAAIQRKFKRDNHLNYDISQIITSGGARQIIFNAMMATINPGDEVVIPTPSWISYADIVKFAGGTPVPVACREEHGFKPLSQDIAHAITPKTKWLLLNYPSNPTGSVASRSELQAIADVMLDNPHVWVMTDDIYEHLIYDDCEFLTMAQVEPRLFDRVLTVNGVSKAYSMTGWRLGFCGGPVALIKAMSNVNTQNAGGIATLAQAAAIAVLDGPQDLLKERAAIYRQRRDFVLEKLAAIDGLRCHKPQGAFYLFVNIAHFIGKTSAGGRRIESDADFVMALIEEQHVVTVQGAAYGMSPYIRLSYATSMERLETGCARLGAFCNGCH

SEQ ID NO: 12717 - protein, 162 aa, Glycine max
GILSNLPVSDKKVTDALKRANLLPILVSIMDLGTGSNSPAKSILMESIAGIAIRFTSSSDKKLQLLSAKHGVIALLVKLLSSGSAITKLKAATALGQLSQNSPSLRRSRKSRWLCVAPSVDAYCEVHDGYCFVSSTFCLIKAGAVSPLIQILEDKDWEAVEA

SEQ ID NO: 12718 - protein, 149 aa, Zea mays
MAMAVSGAVLSGLGSSFLTGGKRGATALASGVGTGAHRVGRKTLIVAAAAAQPKKSWIPAVKGGGNFLDPEWLDGSLPGDFGFDPLGLGKDPAFLKWYREAELIHGRWAMAAVLGIFVGQAWSGVAWFEAGAQPDAIAPFSFGSLLGTQ

SEQ ID NO: 12719 - protein, 426 aa, Triticum aestivum
  unsure (1)..(426): unsure at all Xaa locations
MALYRRAASAIRRRGAGGLPLLPARAMASLFGHVEPAPKDPILGVTEAFLADPSPDKVNVGVGAYRDDSGKPVVLDCVREAERRIAGNLNMEYLPMGGSIHMIEESLKLAYGEDSEFIKDKRIAAVQALSGTGACRLFADFQKRFLPDSQIYIPTPTWSNHQNIWRDAQVPQRTFSYYHPESRGLDFAGLMDDIKNAPNGSFFLLHACAHNPTGVDPTEEQWREISYQFKLKNHFPFFDMAYQGFASGDPERDAKAIRIFLEDGHQIGCAQSYAKNMGLYGQRAGCLSILCEDEMQAVAVKSQLQQIARPMYSNPPVHGALVVSIILSDPELKNVWLXEVKGMADRIIGMRKALRENLEKLGSPLSWEHVTNQIGMFCYSGMTPEQVDRLTSEYHIYMTRNGRISMAGVTTGNVAYLANAIHDVTK

SEQ ID NO: 12720 - protein, 491 aa, Escherichia coli CFT073
MMSRMAEQQLYIHGGYTSATSGRTFETINPANGNVLATVQAAGREDVDRAVKSAQQGQKIWAAMTAMERSRILRRAVDILRERNDELAKLETLDTGKAYSETSTVDIVTGADVLEYYAGLIPALEGSQIPLRETSFVYTRREPLGVVAGIGAWNYPIQIALWKSAPALAAGNAMIFKPSEVTPLTALKLAEIYSEAGLPDGVFNVLPGVGAETGQYLTDHPGIAKVSFTGGVASGKKVMANSAASSLKEVTMELGGKSPLIVFDDADLDLAADIAMMANFFSSGQVCTNGTRVFVPTKCKAAFEQKVLARVERIRAGDVFDPQTNFGPLVSFPHRDNVLRYIAKGKEEGARVLCGGNVLKGDSFDNGAWVAPTVFTDCSDDMTIVREEIFGPVMSILTYESEDEVIRRANDTDYGLAAGIVTADLNRAHRVIHQLEAGICWINTWGESPAEIPVGGYKHSGIGRENGVMTLQSYTQVKSIQVEMAKFQSIF

SEQ ID NO: 12721 - protein, 302 aa, Mycobacterium avium subsp. paratuberculosis str. k10
MSCPNVVVPRTAIVPAAGLGTRFLPATKTVPKELLPVVDTPGIELVAAEAAEAGAERLVIVTSEGKDGVVAHFVEDLVLESTLEERGKTAMLDKVRRAPRLIKVESVVQSEPLGLGHAIGCVEPRLADDEDAVAVLLPDDLVLPTGVLGTMSKVRAHYGGTVLCAIEVTPEEISAYGVFDVEPVPDDDPDVLRVKGMVEKPKAEDAPSMFAAAGRYVLDRAIFDALRRIDRGAGGEVQLTDGIALLISEGHPVHVVVHRGSRHDLGNPGGYLKAAVDFALDRDDYGPDLRQWLVARLGLSEQ

SEQ ID NO: 12722 - protein, 334 aa, Eremothecium gossypii
MVEPTLKKQRTGNSLAQLKATGTTVVADTGDFQAIAKYAPQDATTNPSLILAAARKEGYQALIDRAVEYGRSRDGSVEQQTEAAVDRLLVEFGKEILKVVPGRVSTEVDARLSFDKDATVRKALEIISLYEQQGVSKDRVLIKIASTWEGIQAARELESQHGIHVNCTLLFSFCQAVAAAEAGVTLISPFVGRILDWYKASTGKTYSGDEDPGVLSVRRIYNYFKKHDYPTIVMGASFRNLDEIKALAGVDFLTFWPASLNQLMTSADPVPQVLDPASAKAQGDDKVSYVEDEPAFRFALNDDAMATEKLAEGIRKFSEDIVTLFAMVEERIRA

SEQ ID NO: 12723 - protein, 828 aa, Helicobacter hepaticus ATCC 51449
MNVLSRRQVLQAMGKGLAVFALVPFVGCDTESKKAVIESGVKSFSENLVLDGEVITGAHWGVLKAKIKDGKVISSTNALKNNVSNPLHSTIPDLIYSPTRIQYPMVRKSYLENPANPKPELRGADEWVRVSYDEAIALIAKELKATYKQKGKEGVFAGSYGWKSSGNLHNARILLQRFMGMAGGYVGVSGDYSTGASQVIMPYVVGSIEVYEQQTSFSSVLDNSQVVVIWGADPMATLRNAWTLNEGTGLDFFDQLKKSGKHIISIDPVRNMTCDYLGAEWLAPLPNTDVALMLGIMHTMFKSNQYDKEFLENYTTGFEQFKSYLLGEADGIAKDALWASKICGISAQKIESLAQLFFNNRTMLMSGWGMQRAHHGEQPHWSLVTLACMIGQIGLPGGGFGLSYHYSNGGSPTATAPVVGGINLGNVGSGGAEWLMQGSDNNFPLARISDALLNPGKSIEHNGKKITYTDIDFIYWAGGNPLVHHQDTNTLIKAWQKPRTIVVNEIYWTPTARFADIVMPITTSYERNDISMSGDYSNLHIVPMKQLVEKQFEARDDYQVFCDLAKAFGVYDTFNEGKNEMQWIEEFYNQALKQAEGLMLTMPSFKEFWEANEPLRFEIPAESESFVRYAEFREDPILNPLGTESGLIEIYSKSIEKFGYTQCPPHPTWLEPIEWLGMDNKPAEFALITSHPELRLHSQCANTSLRKDYAIADKEPIWINTKDAADKGIKTGDIVSVSNQRGEVLAGAFVTDAIKQGVVRLCEGAWYDPQEPGKIGSVCKNGSSNVLTLDMPTSPLANGNIAHTALVNIKKYEGEVKPLSVFESPQGV

SEQ ID NO: 12724 - protein, 432 aa, Pyrococcus furiosus DSM 3638
MIERVKGTRDFLPEEMVKRRWVFERIRERFETYGFKEVLTPTMEYTKLFELRSGEEVVKQLYAFKDKGGRDVSLRPDMTSSVARLYVNMFQTAPKPIKWYYIANMFRYEEPQSGRYREFWQAGVELIGSDKVEADAEVIALFVESYLATGLREFTVNIGDRILLDEFAKMLGVKDDIGLMRIIDKKDKLPQEDFINALKEFGLDKNGIEKVLELINIKGKPDEVLPLAEELFTSEVAKNEINRLYALIDLLEAYEVKDWIRIDLGIARGFDYYTSIVFEAIAPNDLGIGSIGGGGRYDNLIEVFGGKPTPATGFAIGIERLIPILEAKGLIPEVQIAPDVYVVPIGERMKKVAIRIATSLRKSGIKTEIELMGRKLKKAMDYANKVGVKKTIIVGEKDLERGVVTVRDMESGEQNEVKIDDIVEFMKNALKT

SEQ ID NO: 12725 - protein, 556 aa, Caulobacter crescentus CB15
MPGLETAEHGLRRRVSSVRGRLVLLTVSLLVPALLAMGFLLASADRESRGRLYQQLLTTARALNGAVDRQAATGISVAETLATDEALLAGDWAGFHARARRAMERRTGWIVVADANGQQVLNTRVPYGRPLPRIQRTPEETKAFLAGRSKVSDLLAGPVAGTPVITVGTPITVKGRFYVLSYVVDAASFTSVFRQQRVPDTWVATLLDNRQRVIARSRLNEKFTGAQASADMTENLRHSTEGVNRSISLEGVPTRVAYTRSPQTGWTLVVAIPRKELASTVNRSVAVGTGIFLLLLVLGLWLALVYSRRINRDMRRLVRDASAIGRGESLQPAPRDSLEEIAAVHAALLTASEELKAREERQGVMINELNHRVKNTLATVQALARQTFAKVDGAPLGVFTDRLIALSGAHDLLTRTGWREADMAALIEASLGAHGDRVDREGPTVALAPHTAVGLSMVFHELATNSAKYGALSAPGGRVALTWRRDPVSDTLFFTWRDVGGPQVIPPASLGFGTRLIESSIRREQKGQARFDFLPDGLVFEASLPLPEAVRWSNPL

SEQ ID NO: 12726 - protein, 108 aa, Zea mays
  unsure (1)..(108): unsure at all Xaa locations
MACPGGRTPFPLCFFLMICLMAQLGASNVVLMANNTTLSLDDVEATFTPAVEGSGVSGVLYAVEPKDACSPLRAKAIQGSVSPFALIXIRGRWPFDDKIRNAQNAGFK

SEQ ID NO: 12727 - protein, 436 aa, Coxiella burnetii RSA 493
MANRIEQITVPDLGGASEVDVIEVLVKPGDTVAKEDGLITLEGDKASMDVPSPLAGTIKELQVKVGDKVKEGDKILTLEMSAEEEKPAKEEKKESEKSEKLEEEGKKEKEEKSEPKEEKKKATEIKEYEAEEVEGFGTSVHAGPAVRRIAREFGIDLTKIKGTGQKDRILKEDVQKFVKEQLKVAEGKSGIGFPPAPKIDFKKFGAIEEKPLSKIKKATGVNLSRNWMTIPHVTQFGEADITELQAFRQSQKEYAAKQNVRLTPLVFIIKAVVNALKEFPHFNASLDPTGEHLILKKYFHIGVAVDTPEGLVVPVIRDADKKGLFELAKELGEVSEKARKKGLNMNDMQGGCFSISSLGGIGGTAFTPIINAPEVVILGVSKMQWKPICNEAGDCKTRLMLPLSLSYDHRVIDGADGARFIVYLAERLSDIRTLLL

SEQ ID NO: 12728 - protein, 493 aa, Nostoc sp. PCC 7120
MQLNHNGVHSEGHSFVLPQICPSQSSVESDFPSNRVRSVPGAASSHYLERQQARESNARSYPRRIRIAISEAQGIYLKDADGNVYIDCLAGAGTLALGHNHPVAIEAMRRVLDTGLPLHTLDLTTPVKDQFVEEIFASLPAEFAQNAKIQFCGPSGADAVEAAIKLVKTATGHRSVLSFHGGYHGMTHGALSLTGNLNPKQAVTGLMPDVHFLPYPYHYRCPFGLGGEAGQITSSRYIESILDDPESGIVTPAAMILEVVQGEGGVIPAPDDWLREMRRITRDRHIPLIVDEIQTGLGRTGKLYAFEHSGIVPDVLLLSKAIGGSLPLSVVLYNKALDKWSPGAHAGTFRGNQMAMAAGTATLQYILENSLTEHAAAMGDRLLKHLHQIQGETYCIGEVRGRGLMVGVEIINPQASADRRGKYPVHPQLASCIQAECLRRGLIVELGGRFGSVVRFLPPLIVTPAQIDSISEIFSSAVQAAEKQVLSVLSQVS

SEQ ID NO: 12729 - protein, 474 aa, Coxiella burnetii RSA 493
MTKEIKTEVVVLGSGPGGYAAAFRAADLGKKVVLVERYETIGGVCLNVGCIPSKALLHVAKVIDDAKDMSSFGIDFGKAALEIEKIRSWKENVVKKLTGGLKMMAKQRKVEIITGYGKFSSSNELAVENKEKSVTKIKFDQAIIAVGSLPVKLPFIPDDPRIMDSTGALELEDVKGHLLVLGGGIIGLEMATVYHALGTKISVVEMMDQLIPGADADVVKPLHQRIQKRYEEILLKTKVTKIEPKKDGLYVTFEGENAPKEPKKYDRILVAVGRSPNGKLIDAEKAGVKVDDKGYIAVDKQMRTNVSHIYAIGDVVGQPMLAHKATYEGRLAAEVIAGIKHYNDARCIPAVAYTDPEVAWVGLTETQAKEKGIKYEKGVFPWAASGRALSLNRSEGSTKLLFDEKGTVIGGGIVGVNAGDLISEVALAIEMGCDAEDVGLTIHPHPTLSETVMMACEMFEGTITDLIPPKKKDK

SEQ ID NO: 12730 - protein, 121 aa, Triticum aestivum
  unsure (1)..(121): unsure at all Xaa locations
YLCKGVYKAANNGNSIIAPAVVGIDPTGQTELDNCMVQNLDGTKNEWGRCKQXLAANAILTVSLAAGKAGASVKNIPLYQHIANLAGNKQLVLPVPAFNVINGGSHAGNKLAMQEFMILPT

SEQ ID NO: 12731 - protein, 97 aa, Glycine max
  unsure (1)..(97): unsure at all Xaa locations
MASSMISSPAVTTVIRAGAGMVARFTGLKSMAGFRSSKTINDITSIATNGGRVHCMQVWSPVGNKLFETLSXLPFLDDVQLAHELXYLLMNGWIPCL

SEQ ID NO: 12732 - protein, 547 aa, Chromobacterium violaceum ATCC 12472
MSELTELPAWQALWDHFAEAKHLHMRDLFAADPGRAERYSLEVGGLFLDYSKNRITDATLLGLMELAREAGLPARIKAMFKGEKINRTENRAVLHVALRNRTNSPIRVDGEDVMPKVNSVLERMGKFAHAVRSGDWLGFTNQPITDIVNIGIGGSDLGPLMVCSALKPFGHPRLNMHFVSNVDGAQLKETLKKVHPETTLFVVESKTFTTQETLTNALTAREWFLSHARDEGAVAKHFVAVSTNQKAVAEFGIDPANMFEFWNWVGGRYSLWSAIGLPIMLYLGEENFTELLNGAHIMDQHFMNAPFEQNMPVLLAMIGVWYINYYGGGSHVIAPYDQYLHRLPAFIQQLDMESNGKQVTLSGQPVDFETAPIIWGETGINGQHAFFQLLHQGTHISPIDLIASLGNRASLPGHHEILLANVFAQAEAFMRGKTADEVRAELAEQGLSGEEMEALVPHKVFGGNRPTNTLLMSRLDPRNLGSLIALYEHKIFVQGVIWHINSFDQWGVELGKQLAKTIHAELTGKLEQAEHDSSTRRLIQLYRKANG

SEQ ID NO: 12733 - protein, 274 aa, Saccharomyces cerevisiae
MPSLAELTKSLSIAFENGDYAACEKLLPPIKIELIKNNLLIPDLSIQNDIYLNDLMITKRILEVGALASIQTFNFDSFENYFNQLKPYYFSNNHKLSESDKKSKLISLYLLNLLSQNNTTKFHSELQYLDKHIKNLEDDSLLSYPIKLDRWLMEGSYQKAWDLLQSGSQNISEFDSFTDILKSAIRDEIAKNTELSYDFLPLSNIKALLFFNNEKETEKFALERNWPIVNSKVYFNNQSKEKADYEDEMMHEEDQKTNIIEKAMDYAISIENIV

SEQ ID NO: 12734 - protein, 466 aa, Shigella flexneri 2a str. 301
MPHSYDYDAIVIGSGPGGEGAAMGLVKQGARVAVIERYQNVGGGCTHWGTIPSKALRHAVSRIIEFNQNPLYSDHSRLLRSSFADILNHADNVINQQTRMRQGFYERNHCEILQGNARFVDEHTLALDCPDGSVETLTAEKFVIACGSRPYHPTDVDFTHPRIYDSDSILSMHHEPRHVLIYGAGVIGCEYASIFRGMDVKVDLINTRDRLLAFLDQEMSDSLSYHFWNSGVVIRHNEEYEKIESCDDGVIMHLKSGKKLKADCLLYANGRTGNTDSLALQNIGLETDSRGQLKVNSMYQTAQPHVYAVGDVIGYPSLASAAYDQGRIAAQALVKGEATAHLIEDIPTGIYTIPEISSVGKTEQQLTAMKVPYEVGRAQFKHLARAQIVGMNVGTLKILFHRETKEILGIHCFGERAAEIIHIGQAIMEQKGGGNTIEYFVNTTFNYPTMAEAYRVAALNGLNRLF

SEQ ID NO: 12735 - protein, 248 aa, Yersinia pestis biovar Medievalis str. 91001
MKKTILITGALSGIGNTATKLFSEMGYNVVFSGRRPEEGRVILDDLKRINKDVLYVNADMNSESDIKHLIEMTLERFGSLDVAVNCAGTVGETAEIQAVTQDNFHLVFNTNVLGTLLAMKYQIPVMVERGKGSIINISSIAGLVGLPSTGIYVASKHAIEGLTKTAALEVATTGVRINSISPGPVEGKMFDRFLGHDENNKKAFIEMMPNKRFTTQEEVAHTIVFLAEDNVTAITGQTITIDGGYTAQ

SEQ ID NO: 12736 - protein, 349 aa, Escherichia coli CFT073
MKIKAVGAYSAKQPLESMDITRREPGPHDVKIEIAYCGVCHSDIHQVRSEWAGTVYPCVPGHEIVGRVVAVGDQVEKHAPGDLVGVGCIVDSCKHCEECEDGLENYCDHMTGTYNSPTPDEPGHTLGGYSQQIVVHERYVLRIRHPQEQLAAVAPLLCAGITTYSPLRHWLAGPGKKVGVVGIGGLGHMGIKLAHAMGAHVVAFTTSESKREAAKALGADEVVNSRNADEMVAHVKSFDFILNTVAAPHNLDDFTTLLKRDGTITLVGAPATPHKSPEVFNLIMKRRAIAGSMIGGIPETQEMLDFCAEHGIVADIEMIRADQINEAYERMLRGDVKYRFVIDNRTLTD

SEQ ID NO: 12737 - protein, 412 aa, Yersinia pestis biovar Medievalis str. 91001
MNSIGIEKISIYPSSLALKLSELAQARGGDNKYIQESLMVIKRSLVPQWEDAVTLAVNSAKDMLNDQDRSDIGLFIIATESGLDQEKAISTWAHRYLGLPATCRVFELKSACHAGAAALKMAESWISSGLNRGKKVLLINVDISNNMICHGKMEYSLGAGAIALLISDNPVFAVIETGKSGIHTHEVTDVIRPLPWKEVAFDVEASLFSYMDGLENAFEEYCHQTPEARESTYFNYNLYHVPFPGISKEAHKVLLELQGLFGKEALATSFKQKVMPSLYYAQKIGATYCGSIFLSLFSLMVKAPEIKSGDRIGVYSYGSGSCAEYFSMQVGDQAVEIAQQQGAALDILLTQRKILDVAAYEQLENARSAQMQGKDYRLDGDNLQDWYTHHYSGSGLLILERIDNHLRRYRYA

SEQ ID NO: 12738 - protein, 180 aa, Lactobacillus plantarum WCFS1
MNNDIERVLYSREDIHQVAQKLGKELTTAYAGKNPLIICVLKGAVLFTTDIIREMDIYADLDFINLSSYGNETISSGEVQLTKDLDADVTGRDVLVIEDIIDTGRTLKFLIDLLKRRDVNSVKVCTLLDKPAGRLVDIKADYIGFEVPNEFVVGYGLDYAERYRNLPYVGILKPAIYEHK

SEQ ID NO: 12739 - protein, 495 aa, Pseudomonas aeruginosa PAO1
MSIAIDPSVSAFLRSPHGLLIDGESGPARSGADMPLYDPATGAELARVARAGAEDVDRAVAAARRAFEGNWAGQRPADRERLLLRLAERIEAHGEQLAQLETLNNGKSINLSRALEVGASVEFIRYMAGWATKIEGRSLDLSIAAVPGARYRAYTVPEPVGVVGAIVPWNFPLLMAIWKIVPALACGCTVVLKPADETPLTALRLGQLCLEAGIPPGVVNIVTGTGAEAGAALAAHPGIDKLAFTGSTPVGKLIGHAAVENMTRFSLELGGKSPVIILDDTSLDMAAAGSAGAIFFNQGQVCTAGSRLYVQRKRFDQVLERLAAIAGDLSIGPGLDPTTQINPLVSARQQERVLGMIESGVAEGASVVCGGARQGETGFYVQPTILADVTPGMQVVREEIFGPVLVATPFDDLDEAVRLANDSIYGLGASIWSNDLRQVMDLVPRIKAGTVWVNAHNLLDPSMPFGGFKQSGIGREMGHAAIEAYTENKSVCIAY

SEQ ID NO: 12740 - protein, 511 aa, Zea mays
  unsure (1)..(511): unsure at all Xaa locations
MMASQAMVPLRQLFVDGEWRPLALGRRLPVVNPTTEAHIGEIPAGTTEDVDPAVXASSRAALKRNXRGRDWARAPGAVRARDLRAIVAKGIERKQELAKLEALDCGKXYDEAAWDMDDVAGCFEYFADQAEALDKRQNSPVSLPMETFKCHLRREPIGVVGLITPWNYPLLMATWKXVAPALAAGCTAVLKPSELASVTCLELADICKEVGLPSGVLNIVTGLGPDAGAPLSAHPDVDKVAFTGSIETGKKIMASAAPMVKPVTLELGGKSPIVVFDDVDIDKAVEWTLFGCFWTNGQICSATSRLLIHTKIAKKFNERMVAWAKNIKVSDPLEEGCRLGPVVSEGQYEKIKKFISNAKSQGATILTGGVRPAHLEKGFFIEPTIITDITTSMEIWREEVFGPVLCVKEFSTEDEAIELANDTQYGLAGAXVISGDRERCQRLSEEIDAGCIWVNCSQPCFCQAPWGGNKRSGFGRELGEGGIDNYLSVKQVTEYISDEXPWGWYQSPSKL

SEQ ID NO: 12741 - protein, 413 aa, Yersinia pestis biovar Medievalis str. 91001
MSRCIDVRNLCVYSGVTFSRSRLVEINMTRKQATIAVRSGLNDDEQYGCVVPPIHLSSTYNFIDFNQPRTHDYSRRGNPTRDVVQRALAELEGGAGAVMTSSGMSALHLVCTTFLQPGDLLVAPHDCYGGSYRLFDSLSKRGAYRVLFVDQGDEAALNCALAEKPKLVLIETPSNPLLRVVDIAAICQAARAAGALTVCDNTFLSPALQQPLSLGADLVVHSCTKYLNGHSDVVAGAVIAKDPELVVELAWWANNIGVTGAAFDSYLLLRGLRTLSPRMAQQQRNADDIVRYLQQQPLVKKLYHPSLPQHPGHEIACRQQSGFGAMLSFELDGDEQVMRRFLSALELFTLAESLGGVESLISHAATMTHAGMAAEARIAAGITDSLLRISVGIEDSEDLIADLDHAFQLAVTR

SEQ ID NO: 12742 - protein, 363 aa, Vibrio cholerae O1 biovar eltor str. N16961
MTDRDYKIAVLPGDGIGPEVMAQAHKVLDAIEQKHGIRFSREEHDVGGIAIDNHGCPLPESTLRACEEADAVLFGSVGGPKWEHLPPNEQPERGALLPLRKHFQLFCNLRPAQIHQGLEAFSPLRADISARGFDIVVVRELTGGIYFGQPKGREGEGAHEKAFDTEVYHRFEIERIARIAFESARLRRKKVCSIDKANVLQSSILWREVVSEIAKEYPDVSLSHMYIDNATMQLIKDPAQFDVMLCSNIFGDILSDECAMITGSMGMLPSASMNESKFGLYEPAGGSAPDIAGKNIANPVAQILSAALMLRYSLGEEAAARDIENAVSQALAAGELTADLAGSKPALSTSAMGDKIASYILNS

SEQ ID NO: 12743 - protein, 371 aa, Berberidopsis corallina
AAGALKSYKLAAKAISRLQSLPSGTISLLCDVLVQEVSDLTGYDRVMVYKFHDDEHGEVVAECRRPELEPYLGLHYPATDIPQASRFLFMKNKVRMICDCLAPPVKVIQDKRLAQPLSLCGSTLRSPHACHAQYMANMGSIASLVMSVTINEEDDEMESDQQKGRKLWGLVVCHHTSPRFVPFPLRYACEFLIQVFGVQVNKEVELAAQLREKHILRTQTVLCDMLLRDAPVGIVTQSPNVMDLVKCDGAALYYRNKFWLLGVIPTEAQIRDIAEWLLEYHGGSRGLSTDSLMEAGYPGALVLGDAVCGMAAIRITSKDFLFWFRSHTAKEIKWGGAKHDPDDKDDGRKMHPRSSFKAFLEVVKRRSLPWE

SEQ ID NO: 12744 - protein, 391 aa, Carallia brachiata
DLEPVNPADVPVTAAGALKSYKLAAKAISRLQSLPSRNMSLLCEVLVKEVRDLTGYDRVMVYRFHDDEHGEVVAESCRTDLEPYLGLHFPATDIPQASRFLFMKNKVRMICDCLAPPVKVVQDRRLAQPLSLCGSTLRAPHGCHAQYMANMGSIASLVMSVTINEDDAEMDSGQQNGRKLWGLVVCHHTSPRFVPFPLRYACEFLIQVFGVQINKEVELATQMREKHILQTQTVLCDMLLRDAPVAIVTQSPNVMDLVKCDGAVLYYRKKTWLLGITPTEAQISDIAEWLLECHSGTTGLSTDSLMEAGYPGASDLGDAVCGMAAVKITAKDFLFWFRSHTAKEIKWGGAKHDPHNKDDGKMMHPRSSFKAFLEVVKWRSLPWEDMEMDAI

SEQ ID NO: 12745 - protein, 135 aa, Glycine max
  unsure (1)..(135): unsure at all Xaa locations
AAVRKIIEVNRNKILSPSLLSFRRGIAYKLFVGASFLTLGLSFYTTENALSEAFSNYGQVIEAKIVTDRVSDRSKGFGFVTFASQDEAENAIEDMKGKTLNGRVIFVDYAKPXSTLRGEIPIARGPPEPTSTPDT

SEQ ID NO: 12746 - protein, 391 aa, Celastrus scandens
  unsure (1)..(391): unsure at all Xaa locations
DLEPVNPADVPITAAGALKSYKLAAKAISRLQSLPSSNMSLLCDVLVKEVSELTGYDRVMVYKFHDDDHGEVVAECCIPDLEPYLGLHYPATDIPQASRFLFMKNKVRMICDCLAPPVKVLQDKRLAQPLSLCGSTLRSPHGCHAQYMANMGSIASLVMSLTINEDDDETNSDQQKRRKLWGLVVCHHTTPRFVPFPLRYACEFLIQVFGGQINKEVELATQLKEKHILRTQTLLCDMLLRDSPVGILTQSPNVMDLVKCDGAALYYRNKFWLLGVTPTEIQIKDIAEWLLDYHSESTGLSTXSLMEAGYPDASILGEAVCGMAAVKITSKDFLFWFRSHTAKEMKWGGAKHDPADKDDGRRMHPRSSFKAFLEVVKRRSLPWEDVEMXAI

SEQ ID NO: 12747 - protein, 435 aa, Helicobacter hepaticus ATCC 51449
MDILQSINDFNEAKQVIPGGVNSPVRAFGSVGGTPRFIAKGKGAYIYDEDDNEYIDFVQSWGPLIFGHANEVIESALSLAIKDGLSFGAPTEKETTLVKQIIALSGSAEKMRLVNSGTEATMSALRLARAYSNKDDIIKFEGCYHGHSDSLLVSAGSGCATFGTPSSPGVPNDITKHTLVARYNDIESVRACFEQSKNVACVIIEALAGNMGFVPADKKFMQDLRALCDEYNALLIIDEVMSGFRAGLKGAIGLYDVQADLVTYGKVIGGGMPLAAFGGRADIMDMLSPVGGVYQAGTLSGNPIAVSAGLATLLQIKANPTLYEHLEVLAKRLIKGLKEAAQSYEIPLQVDCRGSMFGFFFNQKEVKNFDDAKCSDTAMFARFHQKMLDKGVYFACSQFETGFICSAMNEMIIDEVIMKAKAVFGEITHEIESRI

SEQ ID NO: 12748 - protein, 413 aa, Salmonella typhimurium LT2
MPQQNYLDELTPGFTPLLAIKEASRCLLCHDAPCSQACPAQTDPGKFIRSIYFRNFKGAAETIRENNALGAVCARVCPTEKLCQRGCTRSGIDKPIDIARLQRFITDFEQQTAMQIYQPGSKTRGKVAIIGAGPAGLQASVTLTHLGYDVTIYEKQPQPGGWLRHGIPAFRLPQSVLDQEIARIVEMGVNIKCNCEVGGSLSLAQLKAEYRAVLMTVGMSCGSGLPLFEQASHVEIAVDFLQRARQADGDISVPRSALIIGGGDVAMDVASTLKILGCPSVTCVAREELAEFPASEKEFTSTQALGVSIIDGFTPVAVSGNKVTFHHVRHSGELTLEAENIILAVGQHARLDTFAEIKAQHNIIDTHNYQTDDPAIFAAGDIVKGDKTVVYAVKTGKEAAQAIHHYLEEACSC

SEQ ID NO: 12749 - protein, 231 aa, Oryza sativa
WIPGLPGPRGAFLPAEAAANTGAQQACPGAAAAAARALPKAVTFVTGNAKKLEEVRAILGSSIPFQSLKLDLPELQGEPEDISKEKARMAASQVNGPVLVEDTCLCFNALKGLPGPYIKWFLEKTGHEGLNNLLLAYEDKSAFAMCIFSLALGPGEEPMTFVGKTAGKIVPARGPADFGWDPVFQPDGFDQTYAEMPKSVKNQISHRGKALALVKEHFAAANYKVQNDGSA

SEQ ID NO: 12750 - protein, 282 aa, Yersinia pestis biovar Medievalis str. 91001
MTSNHAILFPGQGAQRADMGAPIFDIYTKLVAEAEEIAEFSIRDFFRDCPADRFSNTLYVQPALYTVNALYYRRYIDESGALPLFLAGHSLGEFNALHAAGVFDFETGLRLVKKRALLMSESQGGGMAAVLGLNAEEVVKILEENNLFDLTIANINSDLQMVISGPIESIKQAEEIFYDNYAIKYVVLRVSGAFHSTMLNTAAIKFSEYIQGFSFLPPQIPVIANRTACPYTLSSVIKNLSEHINRPVMWRQSVIYMRTHGVERFTEMGETSLLLDMVKNIL

SEQ ID NO: 12751 - protein, 399 aa, Helicobacter hepaticus ATCC 51449
MDFTHTQALDEEFVLHTYARANVAFVRGENARIFDTQGNDYIDFGAGIGVCSVGHANAKLAQTIYKQAQTLLHTSNLYYIQPQARLAQEIITLYRYNTPYTAPMRAFFCNSGAEANECAIKIARKYGKPRNAYKIITLDSSFHGRTIASLKATAQEKMHQHFGPFPDGFVYAKNLDDVIAKIDDSTCAVLLELVQGEGGVLPMDKEKINTLSTILKQKQILLMVDEVQSGVFRSGEIFASKVYEIDPDVITTAKGLAGGVPIGAVLTKLTDIFEYGDHGSTFGGNFLSCAAGLETLAILNELYNNGTLQRTITLFHAELDALVVDFADIFSHKVGLGLMCGLYTRNPDMQQEIIAQALKHYVIVLKSGKGVVRFLPPLTITQEEIKEGFARVRNALKTL

SEQ ID NO: 12752 - protein, 370 aa, Pseudomonas aeruginosa PAO1
MKHFKLPDLGEGLQEAEIVEWHVKAGDSVRADQRLVSVETAKALVDIPAPYDGVVGKLFGAEGDILHVGEPLVGFEGEEADAGTVVGRLEGGGSALEDRFFIGAAPSTREHLAPRATPAVRQFARQQGVELAGLSGSGPDGLITRADVEAAAQGTRERFGGERLRGVRRSMALNMARSHAEVVPVTIYGDADLHRWKTARDPLIRLAQALAEACRAEPTLNAWFDGASLSLKLHERLDLGIAVDTPDGLFVPVLRDVGARSAEDLRAGMRRLREDVQARSIPPAEMLGATLTLSNFGTLFGRYANPVVVPPQVAILGAGGIRDEVVAWRGEMAIHPILPLSLSFDHRAATGGEAARFLKVLVNALEQPDG

SEQ ID NO: 12753 - protein, 263 aa, Lactobacillus plantarum WCFS1
MKIGFIGAGNMGRAIIDGWLKQQAVVPADIYIHSAHAASYQPYAQKNGLQACDTNLAVAQAADVIVLAVKPNIALAALKEVQAALTGKWVITMVSGLSLADYATVAPDLPVLRIMPNVNVAIGAGMTALVGNDALTPEQYAAGQQLFDAIGATSAIAEKDFPTFSALAGSSPAYIYFFIDAMARAGVKHGLSKDAATKIAAQATLGSAQNVLASDKIPFDLIDQVSSPGGTTVAGLLAMEEAGFMTAVVKGIDATIAKELGES

SEQ ID NO: 12754 - protein, 416 aa, Escherichia coli O157:H7 EDL933
MESKVVVPAQGKKITLQNGKLNVPENPIIPYIEGDGIGVDVTPAMLKVVDAAVEKAYKGERKISWMEIYTGEKSTQVYGQDVWLPAETLDLIREYRVAIKGPLTTPVGGGIRSLNVALRQELDLYICLRPVRYYQGTPSPVKHPELTDMVIFRENSEDIYAGIEWKADSADAEKVIKFLREEMGVKKIRFPEHCGIGIKPCSEEGTKRLVRAAIEYAIANDRDSVTLVHKGNIMKFTEGAFKDWGYELAREEFGGELIDGGPWLKVKNPNTGKEIVIKDVIADAFLQQILLRPAEYDVIACMNLNGDYISDALAAQVGGIGIAPGANIGDECALFEATHGTAPKYAGQDKVNPGSIILSAEMMLRHMGWTEAADLIVKGMEGAINAKTVTYDFERLMEGAKLLKCSEFGDAIIKNM

SEQ ID NO: 12755 - protein, 285 aa, Methanothermobacter thermautotrophicus str. Delta H
MKAVIPAAGLGTRFLPATKAQPKEMLPVFDKPTIQYVVEEAVASGIDDILIITGKGKRSIEDHFDRSFELEYFLRKNNKMNYLDEVEAISDLADIYFVRQKEQKGLGDAIYCARKHIDGEDAFAVLLGDTITSSGVPCTRQLMDIYERYGASAIAVEEVPRDKVERYGIIDGEEVSEGIYSIRDMVEKPPVTEAPSNLAIMGRYVLESEIFDHIREVPPGFGGEIQLTDAMRCLEEVYGCVFRGRTYDIGNRVDWLKTSLEFAMNDDEIRPELIEYLKNLIDGYR

SEQ ID NO: 12756 - protein, 113 aa, Glycine max
MPPAKRGKAKAESKVTTPSEKPNDFPSCIQSVPPSSVAITIHAKPGAKSASITDISDEAVGVQIDAPARDGEANAALLDYISSVSSDFRIVTFSFCILFCRLHHSVSSDCNNL

SEQ ID NO: 12757 - protein, 395 aa, Ralstonia eutropha JMP134
MYASHFAQAVDDAAGFGWRAPTPVHDWASLIAAKNAEIARLEAIYVRMLQSAGVDAITGRAQIVGPHRVEVNGVIFTAKVILVASGSVPVEPAIQGAELMITSNEAFYLDTLPKRIAIIGGGYIACEFAGIFNGLGSDVTQLYRGQQILRGFDDELRNHLGAEVSKSGVDLRVAVDVAAVGKRGDGLVVHLTTGQAIEVDAVMAATGRRSNTSGMGLESAGVLLDESGAIKVDEYSATSNPDIYAVGDVTNRLNLTPVAIHEGHAFADTVFGGRKRASAHDNVPFAVFSQPQAASVGLTEAQARRRHAKVDVYSSAFRPMRTALSGRDERALVKLVVDASTDRVLGAHIVAADAAEIILGIAVAIKAKATKADFDATLGVHPTLAEEFVTLRNRR

SEQ ID NO: 12758 - protein, 435 aa, Ralstonia eutropha JMP134
MDAAKAAFPAWSRATSQERFDILRKASDEIIARKEELGRLLSREEGKTLAEGIGEVARAGQIFAFAAGECLRAGGEAIPSVRAGVGVEITREPVGIVGMITPWNFPIAIPAWKIAPALAWGNCVVIKPADLVPGSAWALVDIIQRAGLPKGVLNLVMGRGSVVGQALLEHKDVHAISFTGSVATGRKVAATCIASNPMKKVQIEMGGKNPLVVLDDADLNTAVEVAVNGAFFSTGQRCTASSRLVVQAGIHDRFVEACIERLKSIVVDDALKQGTQIGPVVDQSQIDQDLRYIQIAKDEGGKLVFGGELLKRATPGFYLQPALFTETTNAMRISREEVFGPVANIVRVRDYDEALALANDTEFGLSAGICTTSLKYATHFKRSSEAGMVMVNLPTAGVDYHVPFGGRKGSSYGSREQGTYAKEHYTTIKTAYTMA

SEQ ID NO: 12759 - protein, 189 aa, Zea mays
FLDKEFINVAMGMDPEWKMYDKNLGRIEKWVMRKAFDDYEHPYLPKHILYRQKEQFSDGVGYNWIDGLKSFTEQQVTDEMMNNVAQMFPYNTPSTKEAYYYRMIFERLFPQDSARETVPWGPSIACSTPAAIEWVEQWKASNDPSGRFISSHDSAATDHTAVSRRWPTAAARPANGTVNGKDVPVPIAV

SEQ ID NO: 12760 - protein, 444 aa, Streptomyces avermitilis
MVPHAGDARDAEAKHDARTRGWETTMSALSPHLRQATPVVAVRGEGVHLYGEDGRRYLDFTAGIGVTSTGHCHPRVVAAAQEQAGTLVHGQYTTVLHPPLRRLVDRLGEVLPAGLDSLFFTNSGSEAVEAALRLARQATGRPNVLVCHGGFHGRTVAAAAMTTSGTRFRSGFSPLMSGVVVTPFPTAFRYGWDEETATRFALQELDYTLRTISSPDDTAAIIVEPVLGEGGYVPATRAFLEGLRERADRHGFVLILDEVQTGVGRTGRFWGHDHFGVTPDILITAKGLASGFPLSGIAASAELMGKAWPGSQGGTYGANAVACAAACATLDVVRDEKLVDNAEAMGARLRAGLAAVAATTPAIGDVRGLGLMLASEFVTEDGGPDPETAARVQRAAVDEGLLLLLCGAWNQVVRMIPALVIDEAEVDEGLRAWSAAVEVGVPAR

SEQ ID NO: 12761 - protein, 368 aa, Corylopsis glabrescens f. gotoana
ALKSYKLAAKAISRLQSLQSGNISLLCDVLVKEVSDLTGYDRVMVYKFHEDEHGEVVAECRREDLEPYLGLHYPATDIPQASRFLFMKNKVRMICDCLAPAVKVNHDKRLAQPLSLCGSTLRSPHGCHAQYMANMGSIASLVMSVTINEQDDEIESEQQQGRKLWGLVVCHHTSPRFVPFPLRYACEFLIQVFGVQISKEVELAAQLREKHILRTQTMLCDMLLRDAPVGIITQSPNVMDLVKCDGAALYYRKKFWLLGVTPTEMQIRDIVQWLLEYHSGSTGLSTDSLVEAGYPDALILGDAVCGMAAIRITSKDFLFWFRSHTAKEIKWGGAKHDPDDKDDGRKMHPRSSFKAFLEVVKRRSLPWE

SEQ ID NO: 12762 - protein, 453 aa, Streptomyces hygroscopicus subsp. yingchengensis
MSQPIDSVTAGHTPEETSAGPDTSAWSFETKQIHAGAAPDPTTGARATPIYQTTSFVFRDTQHAADLFSLAEPGNIYTRLHNPTQDVFEQRIAALEGGVAAVALSSGQAAETLAILTLASAGDHIVSSTSLYGGTYNLFRHTLPKLGIEVSFVDDPDDVEAWRAAVRPNTKALFAETLGNPRGNVLDVRAVADVAHAAGVPLIVDNTVPTPYLLRPIEHGADIVVHSATKFLGGHGTAIAGVVVDGGTFDFGAHADRFPDFTEPDPSYHGLRYWPALGPGAFAVKLRVQLLRDLGPALSPHSAFLLLQGVETLSLRIERHSANAQALAEWLEQRDEVAVVHYPGLPSSRWYEAGQRYLPRGAGAIVSFELRDGVEAGKRFVDAVELFSHLANIGDVRSLIIHPASTTHSQLDEEQLAATGTSPGLVRLSVGIENLADLKADLEAGFRAAKDAS

SEQ ID NO: 12763 - protein, 407 aa, Streptomyces hygroscopicus subsp. yingchengensis
MPIHPATSYVFRDTAHAAAAFELADLTTHAYTRLSNPTTAVAEERIAALEGGTAAVAVASGQAATSLALLNLARAGDHIVASSSLYGGTRTLLEHTFADLGIDVTFVDDPDDLGAWYTAVRPTTKAFFGETLGNPRGNVLDIEAVAGIAHETGVPLVVDNTVLTPYLLRPFEHGADIVVHSTTKFLSGHGTSIGGAVVDSGRFDFSADPDRWPGLTHPDPTYNGLSFWDSFSGLGLAYALRLRTRLVRDLGPAVSPFNSFLLLQGLETLSLRIERHVSNAQSLAEWLEQQPQVSQVHYPGLSSSPWHVPAKRYLPRGAGAVLAFELAAGLEAGRRFVEGVRLFSHLANIGDVRSLVIHPASTTHAQLDARQQTAAGVTPGLVRLSVGLEGVGDLIADLEAGLRAAVV

SEQ ID NO: 12764 - protein, 103 aa, Coxiella burnetii RSA 493
MSQNKIYVGSLSYDVTADELQSFFGQYGEIEEAKLIMDRETGRSKGFAFITYGTQDAAQEAVSKANGIDLQGRKIRVNIARENTGDRRRDGGSGGRGGRGGRF

SEQ ID NO: 12765 - protein, 583 aa, Arabidopsis thaliana
MVFKVSTVSTSPIDGQKPGTSGLRKKVKVFKQPNYLENFVQATFNALTAEKVKGATLVVSGDGRYYSKDAVQIIIKMAAANGVRRVWVGKNTLLSTPAVSAVIRERSGADGSKATGAFILTASHNPGGPTEDFGIKYNMENGGPAPESITDKIYENTKTIKEYPIAQDLPNVDISAVGVTSFEGPEGKFDVEVFDPADDYVKLMKSIFDFEAIRKLLSSPKFTFCYDALHGVAGAYAHRIFVEELGAQESALLNCTPKEDFGGGHPDPNLTYAKELVARMGLGKSDTGGEPPEFGAAADGDADRNMILGKRFFVTPSDSVAIIAANAIGAIPYFSSGLKGVARSMPTSAALDVVAKSLNLKFFEVPTGWKFFGNLMDAGMCSVCGEESFGTGSDHIREKDGIWAVLAWMSILAHKNKGNIDGNAKLVSVEDIVRQHWATYGRHYYTRYDYENVDAGKAKELMEHLVKLQSSIPEVNKIVKGIRSDVASVASADEFEYKDPVDGSISKHQGIRYLFEDGSRLVFRLSGTGSEGATIRLYIEQYEKDASKTGRESQEALSPLVDLALKLSKMEEFTGRSAPTVIT

SEQ ID NO: 12766 - protein, 296 aa, Ruegeria sp. PR1b
MSTGKPDTHRKGIILAGGSGTRLYPITMAVSKQLLPLYDKPMIYYPISVLMLAGIREICVITTPQDADQFQRLLGDGSQWGVSLTYVQQPSPDGLAQAFILAEEFLDGAPSALVLGDNVFFGHGLPDLLAAADARPEGGTVFGYHVADPERYGVVDFDAEGRARQIIEKPAVPPSNYAVTGLYFLDGTAPERAKQVQPSPRGELEITDLLQMYLDAGQLSVESMGRGYAWLDTGTHGSLLDAGNFVRTLHERQGLQTGCLEEIAFHAGWISRDELAERAELFKKNSYGAYLGKLLG

SEQ ID NO: 12767 - protein, 391 aa, Euonymus alatus
DLEPVNPADVPITAAGALKSYKLAAKAISRLQSLPSSNMSLLCDVLAKEVSELTGYDRVMVYKFHDDDHGEVVSECCRPDLEPYLGLHYPATDIPQASRFLFMKNKVRMICDCLAPPVKVLQDKRLSQPLSLGGSTLRSPHGCHTQYMTNMGSIASLVMSVTINEDDDETNSDQKIGRKLWGLVVCHHTTPRFVPFPLRYACEFLIQVFGVQINKEVELAKQLKEKHILRTQTLLCDMLLRDAPVGILTQSPNVMDLVKCHGAVLYYRNKFWLLGVTPTETQIKDIAEWLLDYHSESTGLSTDSLVEAGFPDASILGEAVCGMAAVKITSKDFLFWFRSHTAKEMKWGGAKHDPGDKDDGKRMHPRSSFKAFLEVVKQRSLPWEDVEMDAI

SEQ ID NO: 12768 - protein, 293 aa, Zea diploperennis
IIESVGEGVTDVAPGDHVLPVFTGECKECAHCKSAESNMCDLLRINTDRGVMISDGKSRFSINGKPIYHFVGTSTFSEYTVMHVGCVAKINPQAPLDKVCVLSCGISTGLGASINVAKPPKVSTVAVFGLGAVGLAAAEGARIAGASRIIGVDLNPSRFEEARKFGCTEFVNPKDHNKPVQEVLAEMTNGGVDRSVECTGNINAMIQAFECVHDGWGVAVLVGVPHKDAEFKTRPMNFLNERTLKGTFFGNYKPRTDLPNVVELYMKKELEVEKFITHSVPFAEINKAFDLMA

SEQ ID NO: 12769 - protein, 358 aa, Zea mays
VDPRVRGNPAITNLPRKWNVCVIGSHDLYEHPHINDLAYMPAVKDGKFGFNLLVGGFISPKRWAEALPLDAWVAGDDVVPACKAILEAYRDLGFRGNRQKTRMMWLIDELGMEVFRSEVEKRMPNGVLERAAAEDLVDKKWERRDYLGVHPQKQEGLSYVGLHVPVGRLQAADMFELARLADEYGTGELRLTVEQNVVLPNVSNRRLDALLAEPLLQRQRLSPQPSLLLRGLVACTGNQFCGQAIIETKARALQVAREVEKRVAVPRPVRMHWTGCPNSCAQVQVADIGFMGCLTKDRDGKVVEAADIFVGGRVGSDSHLADVYRKSVPCKDLVPIVADLLVERFGAVPREREEEDEE

SEQ ID NO: 12770 - protein, 261 aa, Picea abies
MGRGRVQLRRIENKINRQVTFSKRRNGLLKKAYELSVLCDAEVALIIFSTRGKLYEFASSSMNKTLERYEKCSYAMQDTTGVSDREAQNWHQEVTKLKGKVELLQRSQRHLLGEDLGPLNVKELQQLERQLEVALAHLRSRKTQVMLDQIEELRQRERLLHEVNKSLQKKLSETEGRDVITGIEQTSNTNTGTNGPWDSSITNTAYALSHPQQNSNASLHHVDCEPTLQIGYQPVPPESIGPPHQPQHNQTQNQYMQGWWV

SEQ ID NO: 12771 - protein, 370 aa, Gunnera monoica
  unsure (1)..(370): unsure at all Xaa locations
ALKSYKLAPKPISRLQSLPSGNISLLCDVLAKEVSDLTGYDRVMVYKFHEDEHGEVVAECRRPDLEPYLGLHYPATDIPQASRFLFMKNKVRMICDCMALPVRVIQDNKLPQPLSLCGSALRSPHGCHMQYMANMGSIASLVMSVTINEDEEEEEEESNRQTRRKLWGLVVCHHTSPRFXPYPLRYACEFLIQVFGVQINKEVELAAQMREKHVLRTQTVLCDMLLRDAPIGIMTQSPNVMDLMKCDGAALYYKNKIWLLGVTPTELQLRDIAQWLLENHNSSTGLSTDSLLEAGYPNATILGDLVCGMAAVKITSKDFLFWFRSHTAKEIKWGGAKHDPGEKDDGRKMNPRSSFKAFLEVVKRRXVPWE

SEQ ID NO: 12772 - protein, 233 aa, Zea mays
MTVLDAESRFHVLAVDDSIIDRKLIEMLLKSSSRVDPRVRPRVRALELLGLRDNGAEDASPPSSSSSSSSSSSPDHQEIDVSLIITDYCMPGMTGYDLLKRVKGSSSLKDIPVVIMSSENVPARISRCLQDGAEEFFLKPVKPADMKKLKSHLLKRKQPKQKNKPQAQAVESPEQQLDPHPQPVHEPEEAAADRNGVNKRKAAAMEEGLTVVVTAPESTKPRRLSTSSLTVET

SEQ ID NO: 12773 - protein, 391 aa, Ixonanthes chinensis
DLEPVNPADVPVTAAGALKSYKLAAKAISRLQSLPSRNLSLLCDVLVKEVSDLTGYDRVMVYKFHEDGHGEVVAECCRPDLEPYLGLHYPATDIPQASRFLFMKNKVRMICDCRTSSVKVVQDQKLTQPISLCGSTLRAPHGCHAQYMANMGSIASLVMSVTINEEDDEIESDHQKARKLWGLVVCHHTCPRFLPFPLRYACEFLMQVFGVQVNKEVELAVQMREKHTLRTQTVLCDMLLRDAPVAIVTQSPNVMDLVRCDGAALYYRKKFWLLGVTPTEPQIRDIVEWLLEYHSGSTGLSTDSLMEAGYPGASILGDAVCGMAAIRITSKDFLFWFRSHTAKEIKWGGAKHDPGDKDDGRKMHPRSSFKAFLEVVKRRSLPWEDVEMDAI

SEQ ID NO: 12774 - protein, 266 aa, Oryza sativa
MAASALDSAWEGLTGSFTEFQLATVVTFLLHETVFFLSGLPSLLFERFGLFAKYKIQKKSNTPSYQNRCVLRLILYHVCVNLPVMVLSYPAFKFMGLRSSLPLPHWTVIVSQVLFYFVLEDFIFYWGHRALHTKWLYKHVHSVHHEYATPFGLTSEYAHPAEILFLGFATIVGPALTGPHLFTLWLWMVLRVLETVEAHSGYHFPWSPSNFLPLYGGSDFHDYHHRVLYTKSGNYASTFVYMDWLFGTDKDYRNAKAIEEKDGKHL

SEQ ID NO: 12775 - protein, 369 aa, Escherichia coli CFT073
  unsure (1)..(369): unsure at all Xaa locations
MKSRAAVAFAPGKPLEIVEIDVAPPKKGEVLIKVTHTGVCHTDAFTLSGDDPEGVFPVVLGHEGAGVVVEVGEGVTSVKPGDHVIPLYTEXCGECEFCRSGKTNLCVAVRETQGKGLMPDGTTRFSYNGQPLYHYMGCSTFSEYTVVAEVSLAKINPEANHEHVCLLGCGVTTGIGAVHNTAKVQPGDSVAVFGLGAIGLAVVQGARQAKAGRIIAIDTNPKKFELARRFGATDCINPNDYDKPIKDVLLDINKWGIDHTFECIGNVNVMRAALESAHRGWGQSVIIGVAGSGQEISTRPFQLVTGRVWKGSAFGGVKGRSQLPGMVEDAMKGDIDLEPFVTHTMSLDEINDAFDLMHEGKSIRTVIRY

SEQ ID NO: 12776 - protein, 173 aa, Oryza sativa
  unsure (1)..(173): unsure at all Xaa locations
RPGSHRNPNLRLCLPLAADSIRSDPIQGEAEALAMKRSVGTLGEADLRGKKAFVRADLNVPLDDAQKITDDTRIRASVPTVKLLLEKGAKVILVSHLGRPXGVTPNYSLXPLVPRLCELLGVDVEMPTDCIDEEGEKLYAALAEGGVLLLENVRFYKEEEGTDXEFAKRFAVV

SEQ ID NO: 12777 - protein, 173 aa, Flaveria bidentis
MASIPATFATVAQANMVAPFTGLKANAAFPVTKKVNGFSTLPSNGGRVQCMKVWPPVGKKKYETLSYLPELTEAQLAKEIDYLIRNKWVPCLEFELEHGFVYRENARSPGYYDGRYWTMWKLPMFGCTDSAQVMKELQECKKEYPQAWIRIIGFDNVRQVQCVSFIASKPTGF

SEQ ID NO: 12778 - protein, 173 aa, Flaveria bidentis
MASIPATVAAVPQTNMVAPFTGLKANAAFPVTKKVNGFSTLPSNGGRVQCMKVWPPVGKKKYETLSYLPELTEAQLAKEVDYLIRNKWVPCLEFELEHGFVYRENASSPGYYDGRYWTMWKLPMFGCTDSAQVMKELQECKKEYPQAWIRIIGFDNVRQVQCVSFIASKPTGF

SEQ ID NO: 12779 - protein, 94 aa, Zea mays
ETTKTVFWNGPMGVFEFHRFSVGTKVVAKKLAELNGKGVPTIIGGGDSVPPVEKVGVADVISPFSPGGGASLELLEEKELPGVVGFNETAPVTV

SEQ ID NO: 12780 - protein, 488 aa, Arabidopsis thaliana
MSSPRSNKPKIVNGPGGYILQDVPHLIDYLPDLPTYPNPLQDNPAYSVVKQYFVHADDSVPEKVVVHKDGPRGVHFRRAGPRQKVYFESDEVHACIVTCGGLCPGLNTVIREVVSSLSYMYGVKRILGIDVSLGGYRGFYAKNTIPLNSKVVNDIHKRGGTIIGTSRGGHDTNKIVDSIQDRGINQVYIIGGDGTQRGASVIFEEIRRRRLKVAVVGIPKTIDNDIPVIDKSFGFDTAVEEAQRAINAAHVEAESNENGIGFVKLMGRYSGYIAMYATLASRDVDCCLIPESPFYLEGEGGLFEFIERRLKDHGHMVIVLAEGAGQDLMCKSMESTPMDASGNKLLKDVGLWLSQSIKDHFKKNKMVMNLKYIDPTYMIRAVPSNASDNVYCTLLAQSAVHGAMAGYTGYTSGLVNGRQTYIPFYRITETQNNVVITDRMWARLLSSTNQPSFLGPKDTSEEKKELPETPLLDDGAVDIPPVTKEVTK

SEQ ID NO: 12781 - protein, 192 aa, Taxodium distichum
DNHGEVISEIRRSDLEPYLGLHYPATDLPQAARFLFMKNKVRMICDCYATPVKVVEDKRFPRELILCGSTLRAPHGCHAEYMSNMGSVASLVIAETINAKEEAEITDGQQQQQKGRRLWGLVVCHHSSPRFVPFPMRYACEFLMQVFAIHVNKEVELADQLREKHILRTQTLLCDMLLRDAPTGIIRQKPNI

SEQ ID NO: 12782 - protein, 336 aa, Streptomyces avermitilis MA-4680
MTPGSDVIDDVPKANNDSMAASATLGGERKRSLEQITLLLFIIVPFLALLAAVPLAWGWGVSWLDMGLMVFFYYLGCHGITIGFHRYFTHGSFKAKRPLRIALAIAGSMAVEGPLVRWVADHRKHHKFSDAEGDPHSPWRFGETVPALMKGLWWAHIGWMFDEEQTSQEKYAPDLIKDGAIRAISRQFVLWTGLSLALPPLIGGLVTMSWWGAFTGFFWGSLVRVALLHHVTWSINSICHAVGKRPFKSRDRSGNVWWLAVLSCGESWHNLHHADPTSARHGVERGQLDSSARIIRWCERLGWAYDVRWPSRSRIDSRRHTGEEGSRRKRESADAA

SEQ ID NO: 12783 - protein, 312 aa, Escherichia coli
MKVAVLGAAGGIGQALALLLKTQLPSGSELSLYDIAPVTPGVAVDLSHIPTAVKIKGFSGEDATPALEGADVVLISAGVRRKPGMDRSDLFNVNAGIVKNLVQQVAKTCPKACIGIITNPVNTTVAIAAEVLKKAGVYDKNKLLGVTTLDIIRSNTFVAELKGKQPGEVEVPVIGGHSGVTILPLLSQVPGVSFTEQEVADLTKRIQNAGTEVVEAKAGGGSATLSMGQAAARFGLSLVRALQGEQGVVECAYVEGDGQYARFFSQPLLLGKNGVEERKSIGTLSAFEQNALEGMLDTLKKDIALGQEFVNK

SEQ ID NO: 12784 - protein, 189 aa, Taxodium distichum
DEHGEVVAEIRRSDLEPYLGLHYGATDIPQASRFLFMQNRVRMICDCRPNPVRVIQAEELKQPLCLVGSTLRAPHGCHAQYMANMGSIASLVMAVIVNGNGNDEEGSSGRSAVKLWGLVVCHHTSPRAVPFPPLSACEFLMQTFGLQINMEMQLAAQLTENNIVRTQTLLCDMLLRDAPIGIVTQSPSI

SEQ ID NO: 12785 - protein, 181 aa, Thuja plicata
DDHGEVVAEMRRPDLEPYLGLHYPATDIPQASRFLFMKNRVRMICDYRATAVKVRQDKRLGQVLSLSRSTLRAPYGCHAQYMANMGSIASLVMAVTVDNSEVGGRRLWGLVVCHHTTPRFVPYPLRYACEFLTQVFGVQLNKEVELAARLRERHILRSQTVLCDMLLRDAPVGIVTKTPNI

SEQ ID NO: 12786 - protein, 142 aa, Methylobacillus flagellatus KT
MHGGQFPAPAALLATDVAQLRACGFSGRKITYITGLAQAALAGNIPDHATALAMEDEALITQLTALPGIGRWTVEMMLMHTLRRADILPVDDLGVREGFRRLKGLSTAPTPRLLRDIGLAWSPHRSSAAWYLWHVPRDYLPP

SEQ ID NO: 12787 - protein, 341 aa, Populus deltoides
MGSLETERKIVGWAATDSTGHLAPYTYSLRDTGPEDVFIKVISCGVCHTDIHQIKNDLGMSHYPMVPGHEVVGEVVEVGSDVTRFKVGDVVGVGVIVGSCKNCHPCKSEIEQYCNKKIWSYNDVYTDGKPTQGGFAESMVVHQKFVVRIPDGMSPEQAAPLLCAGLTVYSPLKHFGLKQSGLRGGILGLGGVGHMGVKIAKAMGHHVTVISSSDKKREEAMEHLGADEYLVSSDVESMQKAADQLDYIIDTVPVVHPLEPYLSLLKLDGKLILMGVINAPLQFVTPMVMLGRKSITGSFIGSMKETEEMLEFCKEKGVASMIEVIKMDYINTHSRGLRKMM

SEQ ID NO: 12788 - protein, 217 aa, Pimpinella brachycarpa
MVRGKTQMRRIENATSRQVTFSKRRNGLLKKAFELSVLCDAEVALIIFSPRGKLHEFASSSMHETIERYRKHTKDVQSNNTPVVQNMQHLKHETASLAKKIELLEVSKRKLLGEGLGTCSINELQQIEQQLEKSVCTVRARKMQVFKEQIEQLKEKEKTLAADNAILLAKYDVQPRQESPEDGGNLTSTTENSENSDVETELFIGPPEKRFKRIMEK

SEQ ID NO: 12789 - protein, 497 aa, Spinacia oleracea
MAFPIPARQLFIDGEWREPIKKNRIPVINPSTEEVIGDIPAATAEDVEVAVVAARRAFRRNNWSATSGAHRATYLRAIAAKITEKKDHFVKLETIDSGKPFDEAVLDIDDVASRFEYFAGQAEALDGKQKAPVTLPMERFKSHVLRQPLGVVGLISPWNYPLLMATWKIAPALAAGCTAVLKPSELASVTCLEFGEVCNEVGLPPGVLNILTGLGPDAGAPLVSHPDVDKIAFTGSSATGSKVMASAAQLVKPVTLELGGKSPIVVFEDVDIDKVVEWTIFGCFWTNGQICSATSRLLVHESIAAEFVDKLVKWTKNIKISDPFEEGCRLGPVISKGQYDKIMKFISTAKSEGATILYGGSRPEHLKKGYYIEPTIVTDISTSMQIWKEEVFGPVLCVKTFSSEDEAIALANDTEYGLAAAVFSNDLERCERITKALEVGAVWVNCSQPCFVQAPWGGIKRSGFGRELGEWGIQNYLNIKQVTQDISDEPWGWYKSP

SEQ ID NO: 12790 - protein, 400 aa, Nostoc punctiforme PCC 73102
MQFAKRLQPLQSNVFADMDRAKAIALAAGQEVIDLSLGSSDLPVEAHVIEAIAQSLHDRSTHGYLLFNGTLGFREAAANWYEQKFGIKVDPQTEVLPLIGSQEGTAHLPLALLNPGDFALLLDPGYPSHAGGVHLASGQIYPMPLRAENAFLPVFADIPAPVLAQSRMMVLSYPHNPTSAIAPLSFFQEAVAFCQQHNLILVHDFPYVDLVFQETGEWADSSPNPKSLVPSILQADPEKSVSIEFFTLSKSYNMGGFRIGYAIGNAELINALRQVKAAVDFNQYRGILNGAIAALTGPQAGVKSAVAIFQQRRDAFITALHSIGWNVPTPKATMYIWAKLPSAWSQNSIEFCTQLVKQTGVAASPGAGFGKSGEGYVRFALVHEPPLLETAVERIAQFLY

SEQ ID NO: 12791 - protein, 313 aa, Coxiella burnetii RSA 493
MPQSFAFVFPGQGSQHLGMLAELGLQQPIVLETFQQASSALAYDLWALVQHGPQERLDQTQFTQPALLTADVAIFRCWEALGGPKPQVMAGHSLGEYAALVCAGALKFEEAVKLVEKRGQYMQEAVPVGEGAMGAIIGLNEAEIESICENAALGQVVQPANLNSTDQTVISGHSEAVDRALNMAKTEGAKIAKRIPVSVPSHCPLMQPAADRLAQDIAKISIDSPKVPVIHNVDVVDHNEANIIRGALIKQLVRPVRWVETIKYIEEQGIKVFMECGPDNKLAGLIKRIDRQSEILPLTTTELILTAIKRLTH

SEQ ID NO: 12792 - protein, 325 aa, Pseudomonas aeruginosa
MAKRIQFAACGGPEVLEYRDYQPAEPGPREVRVRNRAIGLNFIDTYYRSGLYPAPGLPSGLGSEGAGEVEAVGSEVTRFKVGDRVAYATGPLGAYSELHVLAEEKLVHLPDGIDFEQAAAVMLKGLTTQYLLRQTYELRGGETILFHAAAGGVGLFACQWAKALGVQLIGTVSSPEKARLARQHGAWETIDYSHENVARRVLELTDGKKCPVVYDSVGKDTWETSLDCVAPRGLLVSFGNASGPVTGVNLGILSQKGSLYVTRPTLGSYADTPEKLQAMADELFGLIERGDIRIEINQRFALAEAARAHTELAARRTTGSTVLLP

SEQ ID NO: 12793 - protein, 281 aa, Leea guineensis
RFLFMKNKVRMICDCLATPVKVIQDKRLTQPMSLCGSILRSPHGCHTQYMANMGSIASLVMSVTISEEGDETQNEQQKGRKLWGLLVCHNTSPRFVPFPLRYACEFLVQVFGVQINKEVELVTQQRQKHILRTQAVLCNMLLRDAPVGILNQSPNVMDLVKCDGAALYYRKKFWLLGITPTEAQIGDIAEWLNEYHGGSTGLSTDSLIEAGYPGASALGEAVCGMVAVKITSNDFLFWFRSHTAKEIKWGGAIQGPNDTDDLGKMHPRTSFKAFLEAVKLR

SEQ ID NO: 12794 - protein, 267 aa, Chromobacterium violaceum ATCC 12472
MRITFIGGGNMAGAIIGGLARQGGHRIHVVEHQQDKLDQLAAGFGCSGSQALPERFAADEVVVLAVKPQQLRELCLALAPVLNGALVVSIAAGIRLDALARWLGSRRIVRVMPNTPAMVGKGVSGLYADAAVSAADRDAAETVMRAAGLTVWLADEAGIDDITCVSGSGPAYVFYFIESMIEAAAKAGFGEDKARELVLATFDGAVELARQSPLPVAELRRNVMSKGGTTERAIARFEAEGVKAAIVAGAMDCRDRSIEMGRELSQE

SEQ ID NO: 12795 - protein, 391 aa, Liquidambar styraciflua
DLEPVNPADVPVTAAGALKSYKLAAKAISRLQSLPSGNISLLCDVLVKEVSDLTGYDRVMVYKFHEDEHGEVLAECRRPDLEPCLGLHYPATDIPQASRFLFMKNKVRMICDCLAPPVKVNQDKRLTRPLSLCGSTLRSPHGCHAQYMANMGSIASLVMSVTINEDDDEMESDQQKGRKLWGLVVCHHTSPRFVPFPLRYACEFLIQVFGVQINKEVELATQLREKHMLRTQTVLCDMLLRDAPVGIVTQSPNVMDLVKCDGAALYYRKKFWLLGVTPAEAQIRDIAQWLLEDHNGSTGLSTDSLVEAGYPDALILGDAACGMAAIRITSKDFLFWFRSHTAKEIKWGGAKHDPDEKDDGRKMHPRSSFKAFLEVVKRRSLPWEDVEMDAI

SEQ ID NO: 12796 - protein, 469 aa, Bacillus cereus ATCC 10987
MKPPTDNNKEGAESHKLESESKPIWKSMSMFLVPLLLSNVLQSVGQLFGMVVVGRWLGVNDLAAISAFFPLFFLLVSFVIGIGSGSSILIGQAFGAKNEDRLKAIVGTTLTFTFIIGVVLAIVGSIFAMDIMRLMGTPENIIEISVHYARILFISMPILFLYFAYTTFMRGTGDSKTPFYFLIVSTALNMILLPILIFGWLGAPKLDVYGAAYASVISTVITFIVMLVYLKKKNHPLQLDSTVRKYLRMDWGLLKLLLRLGIPASINMILVSLSEIAVIAFVNRYGSDATAAYGVVNQVASYVQMPAVSLGITVSIFAAQSIGANQFDRLQKVVKAGIIMNYVIGGVLISLIYLFSRDILALFLTSQTTIEIAHSLVMITLWSYLIFGHAQIISATMRASGTVLWPTVIGVVSIWLVEVPVAYYLSYHTSLGIEGIWIGYPAAFIVSLILQYAYYKLSWQKKRITRLVS

SEQ ID NO: 12797 - protein, 376 aa, Meliosma squamulata
  unsure (1)..(376): unsure at all Xaa locations
TAAGALKSYKLAAKAISRLQSLPSGNITLLCEVLVREVRDLTGYDRVMVYKFHEDEHGEVIAECRRSDLEPYLGLHYPATDIPQASRFLFMKNKIRMICDCSSQPVKIIQDKRLAQPLSLGGSTLRAPHGCHAQYMANMGSIASLVMSVTINDDDDDDDDTSESDKKKGRKLWGFVVCHHTSPRFVPFPLRYACEFLSQVFGIQLNKEVELAAQLKEKHILXTQTMLCDMLLRDAPMGIITQSPNVMDLVKCNGATLYYNNKFWLLGITPTEEQIRDIIGWLFENHDQSTGLSTDSLVEAGYPGAXFLGDAVCGMAAIKITSKDFLFWFRSHTAKEIKWGGAKHDPIDKDDGRKMHPRSSFRAFLEVVKWRSIPWE

SEQ ID NO: 12798 - protein, 402 aa, Helicobacter hepaticus ATCC 51449
MKETGIELMKNTKSVRDIDVKDKRVLIRVDFNVPMDEDFDISDDTRIREALPTINYCIDNHAQNIVLVSHLGRPKGRNAEFSLKHVLKRVERLLGRDIAFAETIENVENLQQQSKSGSVILLENIRFYEGEEKNDEELSTKLASICDVYINDAFGTSHRAHSSTCGIAKYAKECVAGLLLKKEIDSFAKAMANPLKPVLLIVGGSKVSSKLALLYNILDVVDKIIIGGAMSNTFLKARGFDMQKSLVEDDLVSEARKILDKAKEKKVKIYLPVDVVSTDDIKEHRHIKITPAQDIPEGFMAVDMGPATSKLFSEVVRDSQTIIWNGPLGIYEIQAFSRGTFNLAHAVSDTYAFSLIGGGDTADAIDKAGERDNMSFISTGGGASLELLEGKILPAFEVLERK

SEQ ID NO: 12799 - protein, 328 aa, Triticum aestivum
  unsure (1)..(328): unsure at all Xaa locations
WSEQPAQQQKKKXLWGLIVCHHESPRYVPFPLRYACEFLAQVFAVHVNKEFEVQKQLXREKSILRMQTILSDMLFKEASPLTIVSGAPNIMDLIKCDGAALLYGGKVWRLGTAPTESQIRDLALWLSEVHMDSTGLSTESLHDAGYPGASALGDTVCGMAVAKINSSDILFWFRSPTAKEIRWGGAKNDPSDMDDSRRMHPRLSFKAFLEVVKMKSLAWTDSEMDAIHSLQLILRGAVDGVVKPTGKASLDEQIGDLKLDGLAELQAVTSEMVRLMETATVPILAVDGNGLVNGWNQKAAELTGLRVDDAIGRHILTLVEESSVSVVQ

SEQ ID NO: 12800 - protein, 313 aa, ASPERGILLUS NIDULANS FGSC A4
MEQLNVGGPLSRWWSHTTTTYSPTTIEFFGSAAVLFIGFWVPSLIFTWMDTLGPKHIPWRKIQAPARQPQYAAVKKGLVNSLQNQLLTSVLHLAYLGMLHFFTSGAKTTIYNVDSALPSPTRMARDIVISIVLQDIIFYHSHRGLHHPKIYRHIHKKHHEFTTPIALAALYAHPVEYFLSNILPVALPPALLGAHVVTFWFMLTWALLLAIIAHCGYELPPIYGWNMEVHDMHHELFVGNFGTIGFCDVLYGTRLTDSKATRVARDRLKEDTTEDTITAKNISSSAFNPLQRNGLGLEQGDWQGFFSHHTRHH

SEQ ID NO: 12801 - protein, 608 aa, Ustilago maydis 521
MSTTPIHSTRNLLRAFPSRILPLLTTTAETKAKTKTKAVTVVPPSLSLNLQRPRRFQPISPLAVPRRTATTSSKIDPAAIASQLSSMPSTSKTPASEPTLFIDGKWTHAKAGHTRPIINPFDGSTVAVIDEAGSEDALAAVDSAARFFRTSSWPHQTCTSRTALLSKVADLLQRDKEILAEIETKDTGKTLQESKVDVDDVTNVFRFYAQEAKKLDTPKKIVSDVIPDSVESTTSHVPVGVCVLIAPWNYPLLQICWKVAPALVTGNAVIIKPSEVTPLSTVHFVKLLVEAGAPMGSVQLLTAGGASVGPALTEHADVDLVSFTGGLDTGRRIIASCATTVKRCTVELGGKNPNIVFADCDLEWAIDTVTTAVFLHSGQVCSSGARLIVEESIADKLVAGVAERAKRIKMGNGLDAASETGPLVSAAHLSKVEAYVQLGLEEGAKLVCGGARPDAKSHPELANGFFFCPTIFDRCHREMRIVQEETFGPILTVERFKDGDEEHAIWLANDTKYGLAGGVQSGNQERARRVAKRLRHGTVWVNTYGSYTPAAEWGGFGMSGNGRELGSKGLDEYIETKHEWVETKPAPPGWFKGQAEVLQPANVVKAKL

SEQ ID NO: 12802 - protein, 562 aa, Glycine max
MAPTTTVPIGTLPSGSVTGRLASVYSEVQKTRVDHALPLPSVLKHPFTILDGPPSSAAGNPDEIAKLFPHLFGQPSAALAPSGAVQTQKKLKIGVVLSGGQAPGGHNVISGIFDYLQERAPGSTLYGFKGGPAGIMKCKYVELTSEYIYPYRNQGGFDMICSGRDKIETPEQFKQAEETAKKLDLDGLVVIGGDDSNTNACLLAENFRSKNLKTSVIGCPKTIDGDLKCKEVPTSFGFDTACKIYSEMIGNVMIDARSTGKYYHFVRLMGRAASHITLECALQTHPNITIIGEEVAAKKLTLKNVTDYIVDVVCKRAEINYNYGVILIPEGLIDFIPEVQHLIAELNEILAHDTVDEGGLWKKKLTDQSLKLFDFLPQAIQEQLMLERDPHGNVQVAKIETEKMLIQMVETELEKRKQEGKYNGEFKGQSHFFGYEGRCGLPTNFDATYCYALGYGAGALLHSGKTGLISSVANLCAPVEEWTVGGTALTSLMDVERRHGKFKPVIKKAMVELEGAPFKKFASLRDEWALKNCYISPGPIQFSGPGSEVINHTLLLELEALA

SEQ ID NO: 12803 - protein, 543 aa, Ustilago maydis 521
MAFLKRVEDRPTPASVYNWRVWMLSFIASFASIMIGYDSAFIGGTLALPSFTKSFGKLNANTSGNLVSTYQAGAFFGAFLGHPIGHFFGRKRGLLITSIVFTIGAAIMTAASPATHLTPIYVGRAIAGLAIGAASNLTPMYISEIAPAPARGQAIGVYEIGWQIGGIVGFFINYGVIQTLPPSVKQWRIPFAVQLIPGGMLMIGSLFLVESPRWLLSRGRVDEAQQKLAYIRQLPTDHPYFIEEFNQMSHSIEENKRVAGGDSYFAPFRYVFRQKHLLRRLAFGSSLFIFQNGTGINAINYYSPTVFKSLGIVGTSTGLLGTGCFGVIKTIGSFVFILFLVETVGRRRLLMISSTGGAAAMYYIAAYIAIAKPTLHKKSSIDGPGASALAFFYIWTCFYSFGWNPLPWVYGAESFDNTARPVAQIFMAASNWLYNFVISQATPHMFQRMGWGVYAFFASCMVVSVFWIYFLMPETKGIPIEEMDNLHEKRPARHAHRMVMEELRTKAAEQRGEAVLANDGYQPSDTASSNEKEDNNQVKINTA

SEQ ID NO: 12804 - protein, 191 aa, Thuja plicata
DDHGEVISEIRRSDLEPYLGLHYPATDIPQASRFLFMKNKIRMICDCYATPVKVVEDRRLPRELILCGSTLRAPHGCHADYMSSMGSIASLVIAVHHAKEEDGVFDGQQQQQKGRRLWGLVVCHHTSPRFVPFPLRYACEFLMQVFAIQLNKEVELADQLREKHILRTQTLLCDMLLRDAPMGIIREKPNI

SEQ ID NO: 12805 - protein, 1421 aa, Polyangium cellulosum
MADRPIERAAEDPIAIVGASCRLPGGVIDLSGFWTLLEGSRDTVGRVPAERWDAAAWFDPDPDAPGKTPVTRASFLSDVACFDASFFGISPREALRMDPAHRLLLEVCWEALENAAIAPSALVGTETGVFIGIGPSEYEAALPQATASAEIDAHGGLGTMPSVGAGRISYALGLRGPCVAVDTAYSSSLVAVHLACQSLRSGECSTALAGGVSLMLSPSTLVWLSKTRALARDGRCKAFSAEADGFGRGEGCAVVVLKRLSGARADGDRILAVIRGSAINHDGASSGLTVPNGSSQEIVLKRALADAGCAASSVGYVEAHGTGTTLGDPIEIQALNAVYGLGRDVATPLLIGSVKTNLGHPEYASGITGLLKVVLSLQHGQIPAHLHAQALNPRISWGDLRLTVTRARTPWPDWNTPRRAGVSSFGMSGTNAHVVLEEAPAATCTPPAPERPAELLVLSARTASALDAQAARLRDHLETYPSQCLGDVAFSLATTRSAMEHRLAVAATSREGLRAALDAAAQGQTSPGAVRSIADSSRGKLAFLFTGQGAQTLGMGRGLYDVWSAFREAFDLCVRLFNQELDRPLREVMWAEPASVDAALLDQTAFTQPALFTFEYALAALWRSWGVEPELVAGHSIGELVAACVAGVFSLEDAVFLVAARGRLMQALPAGGAMVSIEAPEADVAAAVAPHAASVSIAAVNAPDQVVIAGAGQPVHAIAAAMAARGARTKALHVSHAFHSPLMAPMLEAFGRVAESVSYRRPSIVLVSNLSGKACTDEVSSPGYWVRHAREVVRFADGVKALHAAGAGTFVEVGPKSTLLGLVPACMPDARPALLASSRAGRDEPATVLEALGGLWAVGGLVSWAGLFPSGGRRVPLPTYPWQRERYWIDTKADDAARGDRRAPGAGHDEVEEGGAVRGGDRRSARLDHPPPESGRREKVEAAGDRPFRLEIDEPGVLDHLVLRVTERRAPGLGEVEIAVDAAGLSFNDVQLALGMVPDDLPGKPNPPLLLGGECAGRIVAVGEGVNGLVVGQPVIALSAGAFATHVTTSAALVLPRPQALSAIEAAAMPVAYLTAWYALDRIARLQPGERVLIHAATGGVGLAAVQWAQHVGAEVHATAGTPEKRAYLESLGVRYVSDSRSDRFVADVRAWTGGEGVDVVLNSLSGELIDKSFNLLRSHGRFVELGKRDCYADNQLGLRPFLRNLSFSLVDLRGMMLERPARVRALLEELLGLIAAGVFTPPPIATLPIARVADAFRSMAQAQHLGKLVLTLGDPEVQIRIPTHAGAGPSTGDRDLLDRLASAAPAARAAALEAFLRTQVSQVLRTPEIKVGAEALFTRLGMDSLMAVELRNRIEASLKLKLSTTFLSTSPNIALLAQNLLDALATALSLERVAAENLRAGVQNDFVSSGADQDWEIIAL

SEQ ID NO: 12806 - protein, 192 aa, Thuja plicata
DDHGEVISEIRKSNLEPYLGLHYPATDIPQASRFLFMKNRVRMICDCCAPPVSVVEDKRLPRDLNLCGSTLRAPHGCHVQYMVNMGSIASLVMAIIINEKEEEEGDSEGQQQQKGRRLWGLVVRHHTSPRFVPFPLRYACEFLMQVFGIQLNKEVELAAQLKEKHILRTQTLLCDMLLRDAPVGIMTQRPNI

SEQ ID NO: 12807 - protein, 7257 aa, Polyangium cellulosum
MTTRGPTAQQNPLKQAAIIIQRLEERLAGLAQAELERTEPIAIVGIGCRFPGGADAPEAFWELLDAERDAVQPLDMRWALVGVAPVEAVPHWAGLLTEPIDCFDAAFFGISPREARSLDPQHRLLLEVAWEGLEDAGIPPRSIDGSRTGVFVGAFTADYARTVARLPREERDAYSATGNMLSIAAGRLSYTLGLQGPCLTVDTACSSSLVAIHLACRSLRAGESDLALAGGVSALLSPDMMEAAARTQALSPDGRCRTFDASANGFVRGEGCGLVVLKRLSDAQRDGDRIWALIRGSAINHDGRSTGLTAPNVLAQETVLREALRSAHVEAGAVDYVETHGTGTSLGDPIEVEALRATVGPARSDGTRCVLGAVKTNIGHLEAAAGVAGLIKAALSLTHERIPRNLNFRTLNPRIRLEGSALALATEPVPWPRTDRPRFAGVSSFGMSGTNAHVVLEEAPAVELWPAAPERSAELLVLSGKSEGALDAQAARLREHLDMHPELGLGDVAFSLATTRSAMSHRLAVAVTSREGLLAALSAVAQGQTPAGAARCIASSSRGKLAFLFTGQGAQTPGMGRGLCAAWPAFREAFDRCVALFDRELDRPLREVMWAEAGSAESLLLDQTAFTQPALFAVEYALTALWRSWGVEPELLVGHSIGELVAACVAGVFSLEDGVRLVAARGRLMQGLSAGGAMVSLGAPEAEVAAAVAPHAASVSIAAVNGPEQVVIAGVEQAVQAIAAGFAARGARTKRLHVSHAFHSPLMEPMLEEFGRVAASVTYRRPSVSLVSNLSGKVVTDELSAPGYWVRHVREAVRFADGVKALHEAGAGTFVEVGPKPTLLGLLPACLPEAEPTLLASLRAGREEAAGVLEALGRLWAAGGSVSWPGVFPTAGRRVPLPTYPWQRQRYWIEAPAEGLGATAADALAQWFYRVDWPEMPRSSVDSRRARSGGWLVLADRGGVGEAAAAALSSQGCSCAVLHAPAEASAVAEQVTQALGGRNDWQGVLYLWGLDAVVEAGASAEEVAKVTHLAAAPVLALIQALGTGPRSPRLWIVTRGACTVGGEPDAAPCQAALWGMGRVAALEHPGSWGGLVDLDPEESPTEVEALVAELLSPDAEDQLAFRQGRRRAARLVAAPPEGNAAPVSLSAEGSYLVTGGLGALGLLVARWLVERGAGHLVLISRHGLPDREEWGRDQPPEVRARIAAIEALEAQGARVTVAAVDVADAEGMAALLAAVEPPLRGVVHAAGLLDDGLLAHQDAGRLARVLRPKVEGAWVLHTLTREQPLDLFVLFSSASGVFGSIGQGSYAAGNAFLDALADLRRTQGLAALSIAWGLWAEGGMGSQAQRREHEASGIWAMPTSRALAAMEWLLGTRATQRVVIQMDWAHAGAAPRDASRGRFWDRLVTATKEASSSAVPAVERWRNASVVETRSALYELVRGVVAGVMGFTDQGTLDVRRGFAEQGLDSLMAVEIRKRLQGELGMPLSATLAFDHPTVERLVEYLLSQALELQDRTDVRSVRLPATEDPIAIVGAACRFPGGVEDLESYWQLLTEGVVVSTEVPADRWNGADGRVPGSGEAQRQTYVPRGGFLREVETFDAAFFHISPREAMSLDPQQRLLLEVSWEAIERAGQDPSALRESPTGVFVGAGPNEYAERVQELADEAAGLYSGTGNMLSVAAGRLSFFLGLHGPTLAVDTACSSSLVALHLGCQSLRRGECDQALVGGVNMLLSPKTFALLSRMHALSPGGRCKTFSADADGYARAEGCAVVVLKRLSDAQRDRDPILAVIRGTAINHDGPSSGLTVPSGPAQEALLRQALAHAGVVPADVDFVECHGTGTALGDPIEVRALSDVYGQARPADRPLILGAAKANLGHMEPAAGLAGLLKAVLALGQEQIPAQPELGELNPLLPWEALPVAVARAAVPWPRTDRPRFAGVSSFGMSGTNAHVVLEEAPAVELWPAAPERSAELLVLSGKSEGALDAQAARLREHLDMHPELGLGDVAFSLATTRSAMNHRLAVAVTSREGLLAALSAVAQGQTPPGAARCIASSSRGKLAFLFTGQGAQTPGMGRGLCAAWPAFREAFDRCVALFDRELDRPLREVMWAEPGSAESLLLDQTAFTQPALFTVEYALTALWRSWGVEPELVAGHSAGELVAACVAGVFSLEDGVRLVAARGRLMQGLSAGGAMVSLGAPEAEVAAAVAPHAASVSIAAVNGPEQVVIAGVEQAVQAIAAGFAARGARTKRLHVSHASHSPLMEPMLEEFGRVAASVTYRRPSVSLVSNLSGKVVADELSAPGYWVRHVREAVRFADGVKALHEAGAGTFVEVGPKPTLLGLLPACLPEAEPTLLASLRAGREEAAGVLEALGRLWAAGGSVSWPGVFPTAGRRVPLPTYPWQRQRYWPDIEPDSRRHAAADPTQGWFYRVDWPEIPRSLQKSEEASRGSWLVLADKGGVGEAVAAALSTRGLPCVVLHAPAETSATAELVTEAAGGRSDWQVVLYLWGLDAVVGAEASIDEIGDATRRATAPVLGLARFLSTVSCSPRLWVVTRGACIVGDEPAIAPCQAALWGMGRVAALEHPGAWGGLVDLDPRASPPQASPIDGEMLVTELLSQETEDQLAFRHGRRHAARLVAAPPQGQAAPVSLSAEASYLVTGGLGGLGLIVAQWLVELGARHLVLTSRRGLPDRQAWCEQQPPEIRARIAAVEALEARGARVTVAAVDVADVEPMTALVSSVEPPLRGVVHAAGVSVMRPLAETDETLLESVLRPKVAGSWLLHRLLHGRPLDLFVLFSSGAAVWGSHSQGAYAAANAFLDGLAHLRRSQSLPALSVAWGLWAEGGMADAEAHARLSDIGVLPMSTSAALSALQRLVETGAAQRTVTRMDWARFAPVYTARGRRNLLSALVAGRDIIAPSPPAAATRNWRGLSVAEARVALHEIVHGAVARVLGFLDPSALDPGMGFNEQGLDSLMAVEIRNLLQAELDVRLSTTLAFDHPTVQRLVEHLLVDVLKLEDRSDTQHVRSLASDEPIAIVGAACRFPGGVEDLESYWQLLAEGVVVSAEVPADRWDAADWYDPDPEIPGRTYVTKGAFLRDLQRLDATFFRISPREAMSLDPQQRLLLEVSWEALESAGIAPDTLRDSPTGVFVGAGPNEYYTQRLRGFTDGAAGLYGGTGNMLSVTAGRLSFFLGLHGPTLAMDTACSSSLVALHLACQSLRLGECDQALVGGVNVLLAPETFVLLSRMRALSPDGRCKTFSADADGYARGEGCAVVVLKRLRDAQRAGDSILALIRGSAVNHDGPSSGLTVPNGPAQQALLRQALSQAGVSPVDVDFVECHGTGTALGDPIEVQALSEVYGPGRSGDRPLVLGAAKANVAHLEAASGLASLLKAVLALRHEQIPAQPELGELNPHLPWNTLPVAVPRKAVPWGRGARPRRAGVSAFGLSGTNVHVVLEEAPEVEPAPAAPARPVELVVLSAKSAAALDAAAARLSAHLSAHPELSLGDVAFSLATTRSPMEHRLAIATTSREALRGALDAAAQQKTPQGAVRGKAVSSRGKLAFLFTGQGAQMPGMGRGLYETWPAFREAFDRCVALFDREIDQPLREVMWAAPGLAQAARLDQTAYAQPALFALEYALAALWRSWGVEPHVLLGHSIGELVAACVAGVFSLEDAVRLVAARGRLMQALPAGGAMVAIAASEAEVAASVAPHAATVSIAAVNGPDAVVIAGAEVQVLALGATFAARGIRTKRLAVSHAFHSPLMDPMLEDFQRVAATIAYRAPDRPVVSNVTGHVAGPEIATPEYWVRHVRSAVRFGDGAKALHAAGAATFVEVGPKPVLLGLLPACLGEADAVLVPSLRADRSECEVVLAALGAWYAWGGALDWKGVFPDGARRVALPMYPWQRERHWMDLTPRSAAPAGIAGRWPLAGVGLCMPGAVLHHVLSIGPRHQPFLGDHLVFGKVVVPGAFHVAVILSIAAERWPERAIELTGVEFLKAIAMEPDQEVELHAVLTPEAAGDGYLFELATLAAPETERRWTTHARGRVQPTDGAPGALPRLEVLEDRAIQPLDFAGFLDRLSAVRIGWGPLWRWLQDGRVGDEASLATLVPTYPNAHDVAPLHPILLDNGFAVSLLSTRSEPEDDGTPPLPFAVERVRWWRAPVGRVRCGGVPRSQAFGVSSFVLVDETGEVVAEVEGFVCRRAPREVFLRQESGASTAALYRLDWPEAPLPDAPAERIEESWVVVAAPGSEMAAALATRLNRCVLAEPKGLEAALAGVSPAGVICLWEAGAHEEAPAAAQRVATEGLSVVQALRDRAVRLWWVTMGAVAVEAGERVQVATAPVWGLGRTVMQERPELSCTLVDLEPEADAARSADVLLRELGRADDETQVAFRSGKRRVARLVKATTPEGLLVPDAESYRLEAGQKGTLDQLRLAPAQRRAPGPGEVEIKVTASGLNFRTVLAVLGMYPGDAGPMGGDCAGVATAVGQGVRHVAVGDAVMTLGTLHRFVTVDARLVVRQPAGLTPAQAATVPVAFLTAWLALHDLGNLRRGERVLIHAAAGGVGMAAVQIARWIGAEVFATASPSKWAAVQAMGVPRTHIASSRTLEFAETFRQVTGGRGVDVVLNALAGEFVDASLSLLSTGGRFLEMGKTDIRDRAAVAAAHPGVRYRVFDILELAPDRTREILERVVEGFAAGHLRALPVHAFAITKAEAAFRFMAQARHQGKVVLLPAPSAAPLAPTGTVLLTGGLGALGLHVARWLAQQGVPHMVLTGRRGLDTPGAAKAVAEIEALGARVTIAASDVADRNALEAVLQAIPAEWPLQGVIHAAGALDDGVLDEQTTDRFSRVLAPKVTGAWNLHELTAGNDLAFFVLFSSMSGLLGSAGQSNYAAANTFLDALAAHRRAEGLAAQSLAWGPWSDGGMAAGLSAALQARLARHGMGALSPAQGTALLGQALARPETQLGAMSLDVRAASQASGAAVPPVWRALVRAEARHTAAGAQGALAARLGALPEARRADEVRKVVQAEIARVLSWSAASAVPVDRPLSDLGLDSLTAVELRNVLGQRVGATLPATLAFDHPTVDALTRWLLDKVLAVAEPSVSSAKSSPQVALDEPIAIIGIGCRFPGGVADPESFWRLLEEGSDAVVEVPHERWDIDAFYDPDPDVRGKMTTRFGGFLSDIDRFDPAFFGISPREATTMDPQQRLLLETSWEAFERAGILPERLMGSDTGVFVGLFYQEYAALAGGIEAFDGYLGTGTTASVASGRISYVLGLKGPSLTVDTACSSSLVAVHLACQALRRGECSVALAGGVALMLTPATFVEFSRLRGLAPDGRCKSFSAAADGVGWSEGCAMLLLKPLRDAQRDGDPILAVIRGTAVNQDGRSNGLTAPNGSSQQEVIRRALEQAGLAPADVSYVECHGTGTTLGDPIEVQALGAVLAQGRPSDRPLVIGSVKSNIGHTQAAAGVAGVIKVALALERGLIPRSLHFDAPNPHIPWSELAVQVAAKPVEWTRNGVPRRAGVSSFGVSGTNAHVVLEEAPAAAFAPAAARSAELFVLSAKSAAALDAQAARLSAHVVAHPELGLGDLAFSLATTRSPMTYRLAVAATSREALSAALDTAAQGQAPPAAARGHASTGSAPKVVFVFPGQGSQWLGMGQKLLSEEPVFRDALSACDRAIQAEAGWSLLAELAADETTSQLGRIDVVQPALFAIEVALSALWRSWGVEPDAVVGHSMGEVAAAHVAGALSLEDAVAIICRRSLLLRRISGQGEMAVVELSLAEAEAALLGYEDRLSVAVSNSPRSTVLAGEPAALAEVLAILAAKGVFCRRVKVDVASHSPQIDPLRDELLAALGELEPRQATVSMRSTVTSTIMAGPELVASYWADNVRQPVRFAEAVQSLMEDGHGLFVEMSPHPILTTSVEEIRRATKREGVAVGSLRRGQDERLSMLEALGALWVHGQAVGWERLFSAGGAGLRRVPLPTYPWQRERYWVDAPTGGAAGGSRFAHAGSHPLLGEMQTLSTQRSTRVWETTLDLKRLPWLGDHRVQGAVVFPGAAYLEMALSSGAEALGDGPLQVSDVVLAEALAFADDTPAAVQVMATEERPGRLQFHVASRVPGHGGAAFRSHARGVLRQIERAEVPARLDLAALRARLQASAPAAATYAALAEMGLEYGPAFQGLVELWRGEGEALGRVRLPEAAGSPAACRLHPALLDACFHVSSAFADRGEATPWVPVEIGSLRWFQRPSGELWCHARSVSHGKPTPDRRSTDFWVVDSTGAIVAEISGLVAQRLAGGVRRREEDDWFMEPAWEPTAVPGSEVMAGRWLLIGSGGGLGAALHSALTEAGHSVVHATGRGTSAAGLQALLTASFDGQAPTSVVHLGSLDERGVLDADAPFDADALEESLVRGCDSVLWTVQAVAGAGFRDPPRLWLVTRGAQAIGAGDVSVAQAPLLGLGRVIALEHAELRCARIDLDPARRDGEVDELLAELLADDAEEEVAFRGGERRVARLVRRLPETDCREKIEPAEGRPFRLEIDGSGVLDDLVLRATERRPPGPGEVEIAVEAAGLNFLDVMRAMGIYPGPGDGPVALGAECSGRIVAMGEGVESLRIGQDVVAVAPFSFGTHVTIDARMLAPRPAALTAAQAAALPVAFMTAWYGLVHLGRLRAGERVLIHSATGGTGLAAVQIARHLGAEIFATAGTPEKRAWLREQGIAHVMDSRSLDFAEQVLAATKGEGVDVVLNSLSGAAIDASLSTLVPDGRFIELGKTDIYADRSLGLAHFRKSLSYSAVDLAGLAVRRPERVAALLAEVVDLLARGALQPLPVEIFPLSRAADAFRKMAQAQHLGKLVLALEDPDVRIRVPGESGVAIRADGAYLVTGGLGGLGLSVAGWLAEQGAGHLVLVGRSGAVSAEQQTAVAALEAHGARVTVARADVADRAQMERILREVTASGMPLRGVVHAAGILDDGLLMQQTPARFRAVMAPKVRGALHLHALTREAPLSFFVLYASGAGLLGSPGQGNYAAANTFLDALAHHRRAQGLPALSIDWGLFADVGLAAGQQNRGARLVTRGTRSLTPDEGLWALERLLDGDRTQAGVMPFDVRQWVEFYPAAASSRRLSRLMTARRVASGRLAGDRDLLERLATAEAGARAGMLQEVVRAQVSQVLRLSEGKLDVDAPLTSLGMDSLMGLELRNRIEAVLGITMPATLLWTYPTVAALSAHLASHVVSTGDGESARPPDTGSVAPTTHEVASLDEDGLFALIDESLARAGKR

SEQ ID NO: 12808 - protein, 2439 aa, Polyangium cellulosum
MATTNAGKLEHALLLMDKLAKKNASLEQERTEPIAIVGIGCRFPGGADTPEAFWELLDSGRDAVQPLDRRWALVGVHPSEEVPRWAGLLTEAVDGFDAAFFGTSPREARSLDPQQRLLLEVTWEGLEDAGIAPQSLDGSRTGVFLGACSSDYSHTVAQQRREEQDAYDITGNTLSVAAGRLSYTLGLQGPCLTVDTACSSSLVAIHLACRSLRARESDLALAGGVNMLLSSKTMIMLGRIQALSPDGHCRTFDASANGFVRGEGCGMVVLKRLSDAQRHGDRIWALIRGSAMNQDGRSTGLMAPNVLAQEALLREALQSARVDAGAIGYVETHGTGTSLGDPIEVEALRAVLGPARADGSRCVLGAVKTNLGHLEGAAGVAGLIKAALALHHELIPRNLHFHTLNPRIRIEGTALALATEPVPWPRAGRPRFAGVSAFGLSGTNVHVVLEEAPATVLAPATPGRSAELLVLSAKSAAALDAQAARLSAHIAAYPEQGLGDVAFSLVSTRSPMEHRLAVAATSREALRSALEVAAQGQTPAGAARGRAASSPGKLAFLFAGQGAQVPGMGRGLWEAWPAFRETFDRCVTLFDRELHQPLCEVMWAEPGSSRSSLLDQTAFTQPALFALEYALAALFRSWGVEPELVAGHSLGELVAACVAGVFSLEDAVRLVVARGRLMQALPAGGAMVSIAAPEADVAAAVAPHAALVSIAAVNGPEQVVIAGAEKFVQQIAAAFAARGARTKPLHVSHAFHSPLMDPMLEAFRRVTESVTYRRPSIALVSNLSGKPCTDEVSAPGYWVRHAREAVRFADGVKALHAAGAGLFVEVGPKPTLLGLVPACLPDARPVLLPASRAGRDEAASALEALGGFWVVGGSVTWSGVFPSGGRRVPLPTYPWQRERYWIEAPVDREADGTGRARAGGHPLLGEVFSVSTHAGLRLWETTLDRKRLPWLGEHRAQGEVVFPGAGYLEMALSSGAEILGDGPIQVTDVVLIETLTFAGDTAVPVQVVTTEERPGRLRFQVASREPGERRAPFRIHARGVLRRIGRVETPARSNLAALRARLHAAVPAAAIYGALAEMGLQYGPALRGLAELWRGEGEALGRVRLPEAAGSATAYQLHPVLLDACVQMIVGAFADRDEATPWAPVEVGSVRLFQRSPGELWCHARVVSDGQQASSRWSADFELMDGTGAVVAEISRLVVERLASGVRRRDADDWFLELDWEPAALGGPKITAGRWLLLGEGGGLGRSLCSALKAAGHVVVHAAGDDTSTAGMRALLANAFDGQAPTAVVHLSSLDGGGQLGPGLGAQGALDAPRSPDVDADALESALMRGCDSVLSLVQALVGMDLRNAPRLWLLTRGAQAAAAGDVSVVQAPLLGLGRTIALEHAELRCISVDLDPAEPEGEADALLAELLADDAEEEVALRGGDRLVARLVHRLPDAQRREKVEPAGDRPFRLEIDEPGALDQLVLRATGRRAPGPGEVEISVEAAGLDSIDIQLALGVAPNDLPGEEIEPLVLGSECAGRIVAVGEGVNGLVVGQPVIALAAGVFATHVTTSATLVLPRPLGLSATEAAAMPLAYLTAWYALDKVAHLQAGERVLIHAEAGGVGLCAVRWAQRVGAEVYATADTPENRAYLESLGVRYVSDSRSGRFVTDVHAWTDGEGVDVVLDSLSGERIDKSLMVLRACGRLVKLGRRDDCADTQPGLPPLLRNFSFSQVDLRGMMLDQPARIRALLDELFGLVAAGAISPLGSGLRVGGSLTPPPVETFPISRAAEAFRRMAQGQHLGKLVLTLDDPEVRIRAPAESSVAVRADGTYLVTGGLGGLGLRVAGWLAERGAGQLVLVGRSGAASAEQRAAVAALEAHGARVTVAKADVADRSQIERVLREVTASGMPLRGVVHAAGLVDDGLLMQQTPARFRTVMGPKVQGALHLHTLTREAPLSFFVLYASAAGLFGSPGQGNYAAANAFLDALSHHRRAQGLPALSIDWGMFTEVGMAVAQENRGARQISRGMRGITPDEGLSALARLLEGDRVQTGVIPITPRQWVEFYPATAASRRLSRLVTTQRAVADRTAGDRDLLEQLASAEPSARAGLLQDVVRVQVSHVLRLPEDKIEVDAPLSSMGMDSLMSLELRNRIEAALGVAAPAALGWTYPTVAAITRWLLDDALVVRLGGGSDTDESTASAGSFVHVLRFRPVVKPRARLFCFHGSGGSPEGFRSWSEKSEWSDLEIVAMWHDRSLASEDAPGKKYVQEAASLIQHYADAPFALVGFSLGVRFVMGTAVELASRSGAPAPLAVFTLGGSLISSSEITPEMETDIIAKLFFRNAAGFVRSTQQVQADARADKVITDTMVAPAPGDSKEPPVKIAVPIVAIAGSDDVIVPPSDVQDLQSRTTERFYMHLLPGDHEFLVDRGREIMHIVDSHLNPLLAARTTSSGPAFEAK

SEQ ID NO: 12809 - protein, 193 aa, Torreya nucifera
DDHGEVISEIRRSDLEPYLGLHYPATDIPQAARYLFMKNRVRMICDCVAPPVKVVEDKRLPRELSLCGSTLRAPHGCHTDYMSNMGSIASLVMAVVINGKEEEEGDTDRQNQQKKGRRLWGLVVCHHTEPRFVPFPLRYACEFLMQVFGIQLNKEVELAAQLREKQILRTQTMLCDMLLRDAPLGIIRQEPNI

SEQ ID NO: 12810 - protein, 407 aa, Methanothermobacter thermautotrophicus str. Delta H
MMLNSGDTAWMLISTALVILMTVPGVAMFYSGLTKRENVLNTIFLSFVSLGIVSLLWFLFGYGLIFGGDVSGIIGSHQVGISLINLGSASKYAPTIPEGLFAIFQMTFAAITVALISGAVVERIKFSSWILFIPLWFALVYVPVAHWVWGGGFLQNLGVHDFAGGIVVHITSGIAALALALVTGPRYDQKLMPHHLGYSVIGTGLLWFGWFGFNAGSALSAGSLAANAMIVTNTSAAAGMIGWILMDRLKTGKPTLLGALSGAVAGLASITPAAGFVDIGASIVTGLVAAVICYLAVSWLKPAAGYDDALDVFGIHGVSGIIGTLGVGLFAVPALNPSLTSGGLLTGSTSLLVSQLIGVVTVTVYTFVVTYILAMLLMKFKGLRVEREEEIQGLDINLHEETGYRLT

SEQ ID NO: 12811 - protein, 398 aa, Methylobacillus flagellatus KT
MELSQRVQSIKESPTLAVTARAAKLKAEGRDIIGLGAGEPDFDTPQHIKDAAKQAIDQGFTKYTPVAGIPGLKKAIVAKFKKENGFDYTEKEVIVGVGGKQCIFNLALAVLNPGDEVIVPAPYWVSYADIALVAGAKPVIIECGIEQGFKLTAAQLEAAITPQTKLFMINSPSNPTGAVYSLEELKALGAVLKKHPHILVATDDMYEHVNLTGDKFYNILNAAPELKERCIVLNGVSKAYSMTGWRIGYAAGPAKIIKAMEILQSQSTSNPTSISQVAAQAALEGPQECITPMLDAFRERHEFVVKRFNEIKGLKCIKAGGAFYAFPDAREAIHNLFAAGKIKQATDMALSEYLLEQEGVAVVPGSAFGAEGYFRISFATSMDNLKKALERIERALAN

SEQ ID NO: 12812 - protein, 368 aa, Ranunculus sp. Qiu 95024
MKSYKLAAKAISKLQAMPSGNIPLSCDMLVQEVRDLTGYDRVMVYKFHEDDHGEVIAEWRVSSLEPYLGLHYPATDIPQASRFLFMKNKIRMICDCSAIPVKVVQDKKLGQPLSLGGSALRAPHGCHAQYMSNMGSVASLVMSVTINEDDEQMETGQQKGRKLWGLVVCHHTSPRFVPFPLRYACEFLIQVFGMQINKEVELANQTREKHILHTQTVLCDMLLRDAPIAIVTQSPNVMDLVMCNGAALYYRDRLCLLGVTPTDDQIRDIAQWLLEYHNESTGLSTDSLMEAGYPSASLLGNAVCGMAAIKITSKDFLFWFRSHTAKEIKWGGAKHNPAEKDDRWKMHPRSSFKAFLEVVKHRSLPWED

SEQ ID NO: 12813 - protein, 381 aa, Pseudomonas fluorescens
MNVSTEILHIRVDDREAHPSVTPIYQCSAFSADSAFFYSRKANPNVTELEQVVAALEGSEYALAYSTGMSAIYMVLELLKPGGSLVINKYIYGCSYKLFQRYAARIGAKLTILDLTTESGLKELPSDVDMVIFETPTNPFLKDIDIHAVSKAVKQNNPHALVVVDNTWATPIFQKPLNFGADISLYSATKYFSGHSDVMGGLVLVNNEMIYTRLLEGRFYSGSILAPNSAWLLRRSMQTFNLRMEKHSNTTSSMLNYLRELPFIEHVYYPRVDGKQLTGYGGIVFVDIRPDLVPFYKTFTSSLKWFGTGTGMACVTSMVAQPFSGSHASMTEQEKADMGIEKGLVRLCFGLEALEDLKEDLLQAFVAMENMANQKSALKPA

SEQ ID NO: 12814 - protein, 371 aa, Reinwardtia indica
GALTSYKIAAKAISRLQSVPSGSINLLSDVLVNELRDLTSYDRVMVYRFHEDEHGEVVAESIAPGLEPYLGLHYPATDIPQASRFLFMKNKVRMICDCLAPSVKVTQDRNLAEPINLSGSTLRAPHGCHAQYMANMGSIASLVMSVTINDNEDGNEMESDQMMGRKLWGLVVCHHTTARFVPFPLRYACEFLIQVFGVQISKEVELEAQRKEKHIIQTQTVLCDMLLRDAPVAIMTQSPNVMDLVKCDGAALLYRKKCWLLGVTPTEEQITDITEWLLEYHNDSTGLTTDSIMEAGYPGASVLASTICGMAAIRITSKDFMFWFRSHTAKEIKWGGAKHDPDDKDGVRKMHPRSSFKAFLEVVKWRGLPWE

SEQ ID NO: 12815 - protein, 398 aa, Streptococcus pneumoniae R6
MNDKTEVNMTIGIDKIGFATSQYVLKLQDLAEARGIDPEKLSKGLLLKELSIAPLTEDIVTLAASASDSILTEQERQEVDMVIVATESGIDQSKAAAVFVHGLLGIQPFARSFEIKEACYGATAALHYAKLHVENSPESKVLVIASDIAKYGIETPGEPTQGAGSVAMLITQNPRMMAFNNDNVAQTRDIMDFWRPNYSTTPYVNGVYSTQQYLDSLKTTWLEYQKRYQLTLDDFAAVCFHLPYPKLALKGLKKIMDKSLPQEKKDLLQKHFDQSILYSQKVGNIYTGSLFLGLLSLLENTDSLKAGDKIVLYSYGSGAVAEFFSGELVEGYEAYLDKDRLNKLNQRTALSVADYEKVFFEEVNLDETNSAQFAGYENQDFALVEILDHQRRYSKVEK

SEQ ID NO: 12816 - protein, 1342 aa, Cochliobolus heterostrophus
MSQSSDQIPQDGSSAPDNGHHQFSTVSPVAEEPSSPSAATDAIDFAATQPSQRSRASTTETTGPLSPSTSDRVFPIRSAISVDPSPTPKSQNAQGDYFHPFSRTNDPRLATDIRRASQGSLTSQSSHASQRAWAMRHGPGKTAQRGPQPIPSQLFNDMSSNKSNGSINDDSRSPSFKPEQAPSTKSGISSVDMGDLVTHRFRHVSTEGGHMIITGREGETLQRCEDEPIHLPGAVQGFGLLVALRDDPDGNLQVRIVSENSKRILGRTPKELFALESFTDILSEEQADNLLDHIDFVKDEESNVTSNGPEVFTMSIKIAGHTRTRKLWCAIHTNEANPGLVICEFELEEDPLYPLVPPNNNTPDLPEDTLSSQPTADEFLESTEIKSKPLRILRSARKRKGEAAAMEVFNIMSQVQEQLAAAPSLERFLKVLVGVVKELTGFHRVMIYQFDQSFNGRVVTELVDPRATKDLYKGLNFPASDIPKQARELYKINKVRMLYDRDLQTARLVCRTAEDLEVPLDLTHSYLRAMSPIHLKYLANMAVRSSMSISINAFGELWGLIACHTYGPRGMRVSFPIRKMCRMIGDSASRNIERLSYASRLQARKLINTVPTQHNPSGYIIASSDDLLKLFNADFGLLSIRDETKILGTLENSQESLAMLEYLRMRRIQAVMTSTDIATDFPDLRYPPGFHAIAGMLIVPLSVDGEDFIVFFRKGQLRQVKWAGNPYEKFIKEGTEGYLEPRKSFKTWSETVVGKCLEWTEEEIETASVLCLVYGKFIEVWRQKEAALQSSQLTRLLLANSAHEVRTPLNAIINYLEIALEGALDQETRENLSRSHSASKSLIYVINDLLDLTKTEEGGPLIKGELFDLKDTIREATDMFRNDAKRKNIEYQIIQHPGLPNHCIGDQRRIRQAISNITANAIQHTTQGCVKVEAYVAARTGRDHVDIEVAVSDTGAGMSQKKLDQLFNDLEQVQSEPASMLEDALIPDQKKLAEQGEKSTLGLGLAIVGRIIRNMNGQLRLRSEEGKGTRFVIQLPFEIPDSEADSVTTGGASPAGSVTPHAEESLPNVVSSTAGERTLIAPSLSRQGSAGEDDKQTSNVVVRKTSAGSLASKNSLRSFKTSSSQRSDVDRLIDAIQEPHLIGRGDTSPGSRSMRPTLTKRSSLDANASAAARRRSKSLEDFSNQTVVPPHQRIMQSTVPGKEAIPGSDAPVVALKVPDEGGSSPIGVRPSGNILGEVAEDKPIQPAAEPEPLSADNMHVLVAEDDPVNSRIVKKRLEKLGHHVHLTVNGEECASAYCDNSKDIDVVLMDMQMPIVDGLTSTKMIRSFEKSHSNMYSPRAAL

SEQ ID NO: 12817 - protein, 363 aa, Sabia swinhoei
TAAGALKSYKLAAKAISRLQSLPSGNISLLCDVLVREVSDLTGYDRVMVYKFHEDEHGEVIAECRRSDLEPYLGLHYPATDIPQASRFLFMKNKVRMICDCSARPVKVVQDKRLARPLSLCGSTLRAPHGCHAQYMANMGSIASLVMSVTINEDDDDEMESDQKKGRKLWGFVVCHHTSPRFVPFPLRYACEFLIQVFGIQVNKESELAAQLREKHILQTQTMLCDMLLRDAPVGIVSQSPNVMDLVKCSGAALYYKNKFWLLGVTPTEEQIRDIIGWFVENHDQSTGLSTDSLMEAGYPGASVLGDAVCGMAAIKITSKDFLFWFRSHTAKEIKWGGAKHDPVDKDDGRKMHPRSSFKAFLE

SEQ ID NO: 12818 - protein, 391 aa, Chromobacterium violaceum ATCC 12472
MKFNKLSEQNLSGKRALIRVDMNVPLKNGVIGDDTRIRASLPTIEHCLKAGAAVLLMTHLGRPTEGEPKPEDSLAPVVARLSELLGKPVRLIADFHAGVELAPGEVAMLENVRLNKGEKKNNDELGRAYAALCDVFVHDAFGTAHRAEASTHAVAKFAPVACAGLLLSAELDALGKALQAPARPLVAIVAGSKVSTKLTILEALADKVDQLIVGGGIANTFLLAEGKAIGKSLAEADLVEDARRVIAKIRARGGDVPLPADVVCAKEFAETAAAATKNVAEVVADDMILDIGPDAAKQLAAIIAQAGTVVWNGPVGVFEFDQFGNGTKTLAQAIAQSKAFSIAGGGDTLAAIAKYGITDDISYISTGGGAFLEFLEGKELPAVAILAERAQ

SEQ ID NO: 12819 - protein, 434 aa, Fusobacterium nucleatum subsp. vincentii ATCC 49256
MTGIVDVIGREILDSRGNPTVEVDVILECGVKGRAAVPSGASTGSHEAVELRDEDKTRYLGKGVLKAVNNVNTEIREALLGMDALNQVEIDRVMLELDGTANKGRLGANAILGVSLAVSKAAAEALGLPLYKYLGGVNAKELPLPMMNILNGGAHADSAVDLQEFMIQPVGAKSFREAMQMGAEVFHHLGKILKANGDSTNVGNEGGYAPSKIQGTEGALSLISEAVKAAGYELGKDITFALDAASSEFCEKVNGEYQYHFKREGGIIRNTDAMIKWYEELINKYPIVSIEDGLGEDDWDGWVKLTKAIGDRVQIVGDDLFVTNTERLKKGIELGAGNSILIKLNQIGSLTETLDAIEMAKRAGYTAVVSHRSGETEDATIADVAVATNAGQIKTGSTSRTDRMAKYNQLLRIEEELGSVAQYKGRDVFYNIKK

SEQ ID NO: 12820 - protein, 142 aa, Cochliobolus heterostrophus
MSIPGAEDQIDPATFEQILEMDEDEEEREFSKSIVYDFFGQADQTFKKMDKELEKKEGKYLKELSELGHFLKGSSATLGLTKVKDSCEKIQHYGQLKDDAGTKDITEEQAQENLGKIIKQAKKEFADVKDILKEFYKDDDEA

SEQ ID NO: 12821 - protein, 580 aa, Oryza sativa
  unsure (1)..(580): unsure at all Xaa locations
MASSASLQRFLPPSSHVAASRRRPPAVRTRPVQSLTVSAPSSSTPVADDAVSAERLEPRVEQREGRYXVLKEKYRAGLNPXEKVKLGKEPISLFMEGGIKELAKMPMEEIEADKLSKEDIDXGRFMMRLKLPNGVTTSEQTRYLASVIEAYGKDGCADVTTRQNWQIRGVTLPDVPAILDGLNAVGLTSLQSGMDNVRNPVGNPLAGIDPDEIVDTRSYTNLLSYITSNFQGNPTITNLPRKWNVCVIGSHDLYEHPHINDLAYMPAVKDGKFGFNLLVGGFISPKRWEEALPLDAWVPGDDIIPVCKAVLEAYCDLGTRGNRQKTRMMWLIDELGMEVFWSEVEKRMPNGVLERAAPEDLIDKKWQRRDYLGVHPQKQEGLSYVGLHVPVGRVQAADMFELARLADEYGSGELRLTVEQNIVIPNVKDEKVEALLAEPLLQKFSPQPSLLLKGLVACTGNQFCGQAIIETKQRALLVTSQVEKLVSVPRAVRMHWTGCPNSCGQVQVADIGFMGCLTKDSAGKIVEAADIFVGGRVGSDSHLAGVYKKSVPCDELAPIVADILVERFGAVRREREENEE

SEQ ID NO: 12822 - protein, 508 aa, Oryza sativa (japonica cultivar-group)
MMAEALREVLPLPYFPGQPCWYLQERRGAEAWSAEENKVFERALAQVDLDSPNRWEMVAAMLPRKTVIDVMNHYRDLENDVGSIEAGLVPFPHYSSSLSPASSGFTLQDWDGSDGGFRRGCYLKRGRAPDQERKKGVPWTEEEHKSFLMGLKKYGRGDWRNISRYFVTSRTPTQVASHAQKYFIRLNSGGKDKRRSSIHDITTVNLPEEDTSNPSPSPPSVLTTASDQLGSLVDTKPVPPPPSLGAQRHFMSPLPGALGVSHHPYGNVKLEPNASFLAGGDAMRTLVTAVLSGGEPHKEEHRAPPPIISTGTTRLRPSRSPVSVCDWLASWLQSCFMRLRIAKYWTEGPLTGYCFDQEHQGFPRKRKRKALLDRCDYTIHCMNLSLDCLFGKPHRPASAGGQCISTPTPSAIPIPDRMHGEIGDHRPEIKWHRCYCRFVLCSSDFCSCEVEESASTGGGALLSSICSAIGHGRESESIIDAIALLGRHVRPRLRANIQILQMDDIIEE

SEQ ID NO: 12823 - protein, 244 aa, Oryza sativa (japonica cultivar-group)
MSFTNCFHGRTMGSLALTSKVQYREPFAPVMPGATFAEYGNLEEAKKVIQSGKIAAVFVEPMQGEGGIHSATKEFLQGLRDACDEAGALLVFDEVQCGLGRTGYLWAYEAYGVVPDIMTLAKPLAGGLPIGVVLVTEKVASAINYGDHGTTFGGGPLVCQAALTTLDKIQKPGFLAEVAKKGENFKQLLSTKLSGNAHVKEIRGIGLIVGIELDVPAGPLVDACLDRGVIVLTAGKGNVVRQCC

SEQ ID NO: 12824 - protein, 503 aa, Mycoplasma gallisepticum R
MKKALLMILDGYGISSTTHGNAVKNAKTPHLDNLMNNNPTIMLQASGEAVGLPKNQIGNSEVGHLNIGAGRIIYTGLSLINKEIENKKFFTNQALLNAIDHAKKNNSKLHILGLVSNGGVHSHINHIYAIMELANQHNVPAILHIFGDGRDVPPTQLLADLDQLIKKAETTKTKIGTISGRFYAMDRDQRWDRIDLAYNNLLSNTGKSFADLKTYVKDSYQQNITDEFIVPAYNNNYKSDEITIQDNDSVVFANFRPDRARQLSHYVFGSNYYDHHPQLRRKNLYFVIMMQYEGINPSAICYPPKIEKNTLGEVLKNANKKQLRIAETEKYAHVTFFFDGGVEVEYQNEDKVLVPSRKDVKTYDLAPEMSAAAIVDQLLKVYTKYDLTVLNFANPDMVGHTGNYEATLKGLEALDHEIGRLLADAKKNNITVFFTADHGNAEEMIDENNQKVTKHTTNVVPFSITDPNVKFTKKEGILANVAPTILKYLEIQIPEEMDQEPLI

SEQ ID NO: 12825 - protein, 411 aa, Microbulbifer degradans 2-40
MENSIFELQYALDTFYFLVCGALVMWMAAGFAMLEAGLVRSKNTTEILTKNVALFAIACIMYFVCGYAIMYGGDYFLTTITGDGVTGAEEPASYAPSADFFFQVVFVATAMSIVSGAVAERMKLWAFLAFAVVMCGVIYPVEGGWTWGGNSVFGMYTLGDLGWSDFAGSGIVHMAGAAAALAGVLVLGARKGKYGPNGQINAIPGANLPLATLGTFILWMGWFGFNGGSVLATASVESANSVAIVFMNTNAAAAGGLVSALILARILFGKADLTMALNGALAGLVAITAEPSTPSALQATLFGGLGGLLVVFSILTLDKLKIDDPVGAISVHGVVGLLGLLLVPVTNDASSFSGQIIGALTIFTWVFGTSLAVWFLIKLVIGVRVSEEEEFEGVDLSECGMEAYPEFTNGK

SEQ ID NO: 12826 - protein, 93 aa, Zea mays
  unsure (1)..(93): unsure at all Xaa locations
WTYIYVITRRRGGDDHTDTWLKSRHMFHRGCNPTIXVDMVLIDESYARGAVPSGASTGIYDALELRDGGSXYLGXGVVKAERNVNNIFVPINC

SEQ ID NO: 12827 - protein, 512 aa, Triticum aestivum
MSPRTPVLFPFHFHTTSLRVVRGRASMDSSSEAPLLLSRGSEHKEVPDEAGGKRPWWREAAEESGRLAALAAPMIAVALLQLLMQLISTVMVGHLGEVALAGAAIANSLTNVSGFSVLIGLACALETICGQAYGAEQYHKLSLYTYRSIIVLLIVSVPIAIVWVFIPEVLPLIGQQPEIANEAGKYALWLIPGLFAFSVAQCFSKFLQCQSLIFPMVLSSMITLAVFIPLCWFLVYKVGMGNAGAALSVSICDWVEVIVLGLYIKFSPSCEKTRAPLTWEAFKGIGSFMSLAVPSALMICLEWWSYELLVLLSGILPNPALETSVLSICISTVVLLYNLPYGIGTAASVRVSNELGAGNPEGARLVVGVALSIVVCSAVLVSTTLLALRHFIGIAFSNEEEVVDYVTRMVPVLSISVITDSFQGVLSGVSRGCGWQHLGAYVNLGAFYLVGIPVALFFGFTMQLRGMGFWIGMIAGGATQVTLLSVITATTKWDKMADKAKERVFEDRLPTQ

SEQ ID NO: 12828 - protein, 240 aa, Zea mays
MAHALGCTGDSSSPPARPGGERRARARSITRAAYLCKGVLIRDSGGVPANILCRFTRNHFSLDSKSTIGVEFATKSLQMDGKTIKAQIWDTAGQERYRAITSAYYRGAVGALLVYDITKRQSFDNVHRWLRELRDHADSSIVIMMVGNKSDLIHLRAISEDEGKALAEKEGLFFLETSAMEAINVEQAFQTIMTEVYGIVNRKALAAKEAAAATASLPSQGKIISIDSTAGNTKRACCST

SEQ ID NO: 12829 - protein, 177 aa, Synechococcus elongatus PCC 7942
MAILDSQGRLFGRFSLIDLGAGIILVAAIAGIFLSPTLTTSVAQVTGQRQALQVDVMIRGLTAKNPTALFATIEKEAKTNLIIRNQPYGQIDLVSIQPLPRSVLVPQPDGGVKALPDPRPEQAYTSDTIITLAGQAQPTPDGYVLGNVKLKVGTPIELEGKDYRFGGSVIDIRPVQP

SEQ ID NO: 12830 - protein, 798 aa, Schizosaccharomyces pombe
MQTASSLSVLTPLNEENVDRKSSWSKDTIAVQAVGSSPSSSSSHDFESKEDAEGMNKDESAPSPSTSSPSSASSRSQSKYVRKEALPPQLFHHLDSAKDKALTTFEEIQECQYASANIGKPPENEAMICDCRPHWVDGVNVACGHGSNCINRMTSIECTDEDNVCGPSCQNQRFQRHEFAKVDVFLTEKKGFGLRADANLPKDTFVYEYIGEVIPEQKFRKRMRQYDSEGIKHFYFMMLQKGEYIDATKRGSLARFCNHSCRPNCYVDKWMVGDKLRMGIFCKRDIIRGEELTFDYNVDRYGAQAQPCYCGEPCCVGYIGGKTQTEAQSKLPENVREALGIEDEEDSWENITARRQRRKKGIDETSKIIEEVQPTPLTSESATKVIGVLLQTKDDLLTRKLMERIFLTSDPSVCRSIIALRGYNIFGLMLKKFSIDIEFILRSIKTMLSWPRLTRNKIQDSNIEPVVQEFCDHENEEVKDHAKTLLKEWESLEIAYRIPRRKPGQVAPQSTNAEPSNNQSNPPLRDQEPQRGDKGDIKSAINNSTEDLSKKHPALHSSRPSDSRSRSKFGNDYQSHSKHNLFRKNSFPKRRRLSNSDTPSETTTPNNEQEQVSNQANKVDLNKIISAAMESVNQKNVLKAQKEEEERIAQQKREEKRRLAYEESLKRHAKKLHEKKTKSSQDATIDHHLTSHSPESIAFKAVLAKFFANKTARYQEKLGKAEFKLRVKKMTEIILKKHIQLVLSKKEKALPDELSDSQQRKLRVWAFRYLDTVVSRSGTATTTPTDSPSIGESPKKAA

SEQ ID NO: 12831 - protein, 483 aa, Streptomyces avermitilis MA-4680
MTQGPLTTEAGAPVADNQNSETAGVGGPVLVQDQLLLEKLAHFNRERIPERVVHARGAAAYGTFTLTRDVSQWTRAAFLSEVGKQTETFLRFSTVAGNLGSADAVRDPRGWALKFYTEEGNYDLVGNNTPVFFIKDAIKFPDFIHTQKRDPYTGSQEADNVWDFWGLSPESTHQVTWLFGDRGIPASYRHMNGYGSHTYQWNNEAGEVFWVKYHFKTDQGIKNLTTEEAVNVSGLDPDSHQRDLRESIERGDFPTWTVQVQIMPAAEAAGYRFNPFDLTKVWPHEDYPPIEIGKLELNRNPENIFAEVEQSIFSPAHFVPGIGPSPDKMLQGRLFAYGDAHRYRVGINADHLPVNRPHATEARTNSRDGFLYDGRHKGTKNYEPNSFGGPFQTDRPLWQPISVTGVTGDTEAPVHTEDNDFVQAGNLYRLMSEDEKTRLVDNLAGFISKVSRDDIAERAINNFRQADGDFGKRLEAAVQALRG

SEQ ID NO: 12832 - protein, 192 aa, Torreya nucifera
DDHGEVISEIRKSELEPYLGLHYPATDIPQASRFLFMKNRVRMICNCCSPPVRVVENKRLPRELNMCGSTLRAPHACHAQYMSNMGSIASLVMAVIINEKEEEQGESDGQQQQKGRRLRGLIVCHHTSPRFVPFPLRYACEFLMQVFGIQLNKEVESAAQLREKHILRTQTLLCDMLLRDAPMGIVTQKPNI

SEQ ID NO: 12833 - protein, 305 aa, Escherichia coli CFT073
MLGNPLLCRAFAFRHSSVYASASDYQNNEFHGRSEAMEKKIGFIGCGNMGKAILGGLIASGQVLPGQIWVYTPSPDKVAALHDQFGINAAESAQEVAQIADIIFAAVKPGIMIKVLSEITSSLNKDSLVVSIAAGITLDQLARALGHDRKIIRAMPNTPALVNAGMTSVTPNALVTPEDTADVLNIFRCFGEAEVIAEPMIHPVVGVSGSSPAYVFMFIEAMADAAVLGGMPRAQAYKFAAQAVMGSAKMVLETGEHPGALKDMVCSPGGTTIEAVRVLEEKGFRAAVIEAMTKCMEKSEKLSKS

SEQ ID NO: 12834 - protein, 1257 aa, Corynebacterium glutamicum
MLQLGLRHNQPTTNVTVDKIKLNKPSRSKEKRRVPAVSSASTFGQNAWLVDEMFQQFQKDPKSVDKEWRELFEAQGGPNATPATTEAQPSAPKESAKPAPKAAPAAKAAPRVETKPAAKTAPKAKESSVPQQPKLPEPGQTPIRGIFKSIAKNMDISLEIPTATSVRDMPARLMFENRAMVNDQLKRTRGGKISFTHIIGYAMVKAVMAHPDMNNSYDVIDGKPTLIVPEHINLGLAIDLPQKDGSRALVVAAIKETEKMNFSEFLAAYEDIVTRSRKGKLTMDDYQGVTVSLTNPGGIGTRHSVPRLTKGQGTIIGVGSMDYPAEFQGASEDRLAELGVGKLVTITSTYDHRVIQGAVSGEFLRTMSRLLTDDSFWDEIFDAMNVPYTPMRWAQDVPNTGVDKNTRVMQLIEAYRSRGHLIADTNPLSWVQPGMPVPDHRDLDIETHSLTIWDLDRTFSVGGFGGKETMTLREVLSRLRAAYTLKVGSEYTHILDRDERTWLQDRLEAGMPKPTQAEQKYILQKLNAAEAFENFLQTKYVGQKRFSLEGAEALIPLMDSAIDTAAGQGLDEVVIGMPHRGRLNVLFNIVGKPLASIFNEFEGQMEQGQIGGSGDVKYHLGSEGQHLQMFGDGEIKVSLTANPSHLEAVNPVMEGIVRAKQDYLDKGVDGKTVVPLLLHGDAAFAGLGIVPETINLAKLRGYDVGGTIHIVVNNQIGFTTTPDSSRSMHYATDYAKAFGCPVFHVNGDDPEAVVWVGQLATEYRRRFGKDVFIDLVCYRLRGHNEADDPSMTQPKMYELITGRETVRAQYTEDLLGRGDLSNEDAEAVVRDFHDQMESVFNEVKEGGKKQAEAQTGITGSQKLPHGLETNISREELLELGQAFANTPEGFNYHPRVAPVAKKRVSSVTEGGIDWAWGELLAFGSLANSGRLVRLAGEDSRRGTFTQRHAVAIDPATAEEFNPLHELAQSKGNNGKFLVYNSALTEYAGMGFEYGYSVGNEDSVVAWEAQFGDFANGAQTIIDEYVSSGEAKWGQTSKLILLLPHGYEGQGPDHSSARIERFLQLCAEGSMTVAQPSTPANHFHLLRRHALSDLKRPLVIFTPKSMLRNKAAASAPEDFTEVTKFQSVIDDPNVADAAKVKKVMLVSGKLYYELAKRKEKDGRDDIAIVRIEMLHPIPFNRISEALAGYPNAEEVLFVQDEPANQGPWPFYQEHLPELIPNMPKMRRVSRRAQSSTATGVAKVHQLEEKQLIDEAFEA

SEQ ID NO: 12835 - protein, 195 aa, Torreya nucifera
DEHGEVVAEIRRSDLEPYLGLHYPATDIPQASRFLFMQNRVRMICDCRATPVKVKQAEELKQPLCLVGSTLRAPHGCHAQYMANMGSIASLVMAVIINGNGIDEDGVSGSGSGSGRSSLKLWGLVVCHHTSPRAVPFPLRSACEFLMQTFGLQINMELQLAAQLIENSILRTQTLLCDMLLRDAPIGIVTQSPSI

SEQ ID NO: 12836 - protein, 412 aa, Methanothermobacter thermautotrophicus str. Delta H
MEMTLMDAVLNSGDTAWMLVSTALVMLMTVPGVALFYGGLTKKENVLNTMFLSLIAFAVTSIIWVLYGYQFAFGADIMGFIGSPVNLLMNGVGVNTAAALAPTIPDFLYIAFQLTFAAITVALISGAVVERMKFSAWLAFIVLWVSLVYVPVAHWVWGGGFLAQLGALDFAGGTVVHINSGVAALALVYLLGKRKDTRLLPHNLGYSVIGASLLWFGWFGFNAGSALTAGGLAASAFLVTNTAAAAGMVSWVIMDYLKVGKPTVLGGISGAVAGLVAITPAAGFVTVPAALIIGLVTSVISYLAVSYLKPRLGYDDALDVFGIHGMSGIWGSVATGLFAAPFINELGTGLIYGNPGQLTAQVIAVAVVAAYSFVVTLIIGKLLDFTVGLRVSGKEEMEGLDTHLHEETGYRI

SEQ ID NO: 12837 - protein, 576 aa, Zea mays
  unsure (1)..(576): unsure at all Xaa locations
LAARGGSNRDSSSRAPQGQPSRRRTRKLAPCSPAARAVPAMESFGVPPAPVAAPEKRKKPLDLKDPVPAAAANGGGATKASPAAKWAEKKKLVGGDAGYVLEDVLHLTDYLPQLPTYPNPLQDNPAYSVVKQYFVNPDDTVTQKIVVHKTSARGTHFRRAGPRQRVYFQPDEVNAAIVTCGGLCPGLNTVIRELVCGLYDMYGVTSVVGIEGGYKGFYSKNTVALTPRSVNGIHKRGGTVLGTSRGGHDTAKIVDCLQDRGINQVYIIGGDGTQKGASVIYEEEVRRQGLKCSVVGVPKTIDNDIAVIDKSFGFDTAVEEAQRAINAAHVEAESAENGIGVVKLMGRNSGFIAMYATLASRDVDCCLIPESPFYLEGKGGLLEFVERRLKDNGHMVIVVAEGAGQDLIARSMNFVDTQDASGNKLLLDVGLWLSQKIKDHFKKKPSFPITLKYIDPTYMIRAVRSNASDNVYCTLLAHSALHGAMAGYTGFTVAPVXGRHAYIPFYRITEKQNKVVITDRMWARVLCSTNQPCFLSHEDVENMKHDDDEHHHMHNTQLLEGGSSPVSKCNGSAAAV

SEQ ID NO: 12838 - protein, 531 aa, Methylobacillus flagellatus KT
MRDMFTKDGRRFEKFSLEAEGLLLDYSKHRITDETLPLLFKLARDSKVEEWRDRMFAGEKINFTENRAVLHTALRNRSNTPVYVDGKDVMPDVNRVLAQMRKFSTSIRSGEWKGYSGKRITDVVNIGIGGSDLGPVMVCGALKPYAQAGLNAHFVSNIDGTHLAQTLERCDPETTLFIVASKTFTTQETMTNARSARSWFLQAAKDEAHVAKHFVAISTNADEVGKFGIDAANMFEFWDWVGGRYSLWSAIGLSIAIYIGMDHFEELLQGGYEIDRHFKNAPLEQNIPVIMALLGIWYNNFFGADSLAILPYDQGLARFPAYLQQADMESNGKFVARDGRIVQCTTGPIIWGEAGTNGQHAFYQLIHQGNRLIPCDFMMPLQSHYSMGKNGNEHHLILLANCFAQTSALMQGKTLDEAKAELVAQGLTGEALETLLPHKVFEGNRPSTTILFDKLTPKTLGKLIAIYEHKIFVQGIIWNINSFDQWGVEYGKQIAKKILPQLSEDQASTEYDSSTNGLMNYFKSRTQSSGT

SEQ ID NO: 12839 - protein, 324 aa, Arabidopsis thaliana
RTSVSTDGDTDHNNLMFDEGHLGIGASDSSDRSKSKMDQKTLRRLAQNREAARKSRLRKKAYVQQLENSRLKLTQLEQELQRARQQGVFISSSGDQAHSTAGDGAMAFDVEYRRWQEDKNRQMKELSSAIDSHATDSELRIIVDGVIAHYEELYRIKGNAAKSDVFHLLSGMWKTPAERCFLWLGGFRSSELLKLIACQLEPLTEQQSLDINNLQQSTQQAEDALSQGMDNLQQSLADTLSSGTLGSSSSGNVASYMGQMAMAMGKLGTLEGFIRQADNLRLQTYQQMVRLLTTRQSARALLAVHNYTLRLRALSSLWLARPRE

SEQ ID NO: 12840 - protein, 401 aa, Populus tremuloides
MATKKSVSSLKEADLKGKRVFVRVDLNVPLDDNFNITDDTRIRAAVPTIKYLMGHGARVILSSHLGRPKGVTPKYSLKPLVPRLSELLGVDVKMANDCIGVEVEKIVAEIPEGGVLLLENVRFYKEEEKNDPEFAKKLASLAEIYVNDAFGTAHRAHASTEGVAKYLKPAVAGFLMQKELDYLVGAVANPKKPFAAIVGGSKVSSKIGVIESLLEKVDLLFLGGGMIYTFYKAQGHSVGSSLVEEDKLDLATSLIEKAKVKGVKLLLPADVVVADKFAPDANSKVVAASEIPDGWMGLDIGPDSIKTFNEALDTTKTIIWNGPMGVFEFEKFAAGTEAIARKLAELSGKGVTTIIGGGDSVAAVEKAGLADKMSHISTGGGASLELLEGKPLPGVLALDDA

SEQ ID NO: 12841 - protein, 317 aa, Erwinia carotovora subsp. atroseptica SCRI1043
MTDKLTSLRQVTTVVADTGDIAAMKLYQPQDATTNPSLILNAAQIPEYRKLIDEAIAWAREQSSDRKQQVVDATDKLAVNIGLEILKLIPGRISTEVDARLSYDTEASVAKAKHLIKLYNDAGISNERILIKLASTWQGICAAEQLEKEGINCNLTLLFSFAQARACAEAGVFLISPFVGRILDWYKANGDKKEFAPHEDPGVVSVSEIYDYYKEHGYETVVMGASFRNVGEILELAGCDRLTIAPALLKELSESEGEVVRKLSYVGDVKVRPARMTEAEFYWQHNQDPMAIDKLADGIRKFAIDQEKLEKMIADLL

SEQ ID NO: 12842 - protein, 394 aa, Coxiella burnetii RSA 493
MNDVLSVRAQQLEPSVTLAVSDLARELLNKGHDVISLSAGEPDFDTPDFIKQSAIKAIQEGFTKYTNVDGTPALKAAIVHKLKRDNHLNYEPSEILVSGGAKQSIYNVLMGTLNAGDEAIIPAPYWVSYPPMVQLAEAKPIIISATIDQNFKLTPGQLSQAITPQSRLLILNSPNNPSGVAYTESELKALADVLMEHPQILILSDEIYEYILWGQNRFVNILNVCPELRDRTIIINGASKAYAMTGWRIGYAAGPKSIIQAMKKIQSQSTSSPNSIAQVAATTALGAQRGDFAYMYEAYKTRHDLVLKALNQMKGVHCIPADGAFYLFPDVSAAIQQLGLEDDIKLGTYLLDKTKVAVVPGSAFGSPGHVRLSCATSTEKLQEALERLASVLDY

SEQ ID NO: 12843 - protein, 764 aa, Pseudomonas stutzeri
  unsure (1)..(764): unsure at all Xaa locations
MLSQPRRIAERVVEGVNALKDEGAELVGLGGFTSIVGNRGLQTLDRTQIPVTTGNSLTAYAAYMNLLGVLSALEIPPEKAEVAVLGYPGSIALAIVCLLAPLGCRLRLVHRGGKQQVDTLLEYLPSQFHGQVTLHAGLEDCYAQVRLFVAATSTGGVIDPRRLACGSVVVDAALPKDMQPGWEKRDDILVIDGGLVSATDAVDFGAMALGLGPKRNINGCLAETMILALQGRAEAFSIGRELPAEKVLEIGRIAEGHGFLPYPMASGGESVDGARFDELRRFHGARPPAVVHDLNTGSQELRSEVLRCFGTHINPILREFYEFNHVERVFSNGQGCWLTDLDGRRYLDFVAGYGCLNTGHNHPEIAARLQEYLTQQHPTFVQYLSAPLHASLLAKRLAELAPAGLERVFLSNSGTEAVEAALKLALAASDKSTLLYCTNGYHGKTLGALSVTGREKHRKAFEPLLPRCEEIPFADVSALRNRLLKGDVAXFIMEPIQGEGGVTMAPDGYLRVVRDLCSEHECLWILDEIQTGLGRTGKMFACEWEDVSPDIIVLSKSLSGGLVPIGATLSSKEVWQRAYGNIDRFALHTSTFGGGNFAAAAAMAALDVIEHEDLPGNAALVGAHLRQGLEALARKHYFIKEVRGRGLMIAIEFQNDVSNGIEAFVRDMTSRMPANAAATYRMMPAKAREHLEAAMRELESTLADMFVLRIMTKLSQEHGILTFVTANNNRVMRIQPPLVLSLAEADRFIKALGEVCEDLSTFES

SEQ ID NO: 12844 - protein, 560 aa, Zea mays
  unsure (1)..(560): unsure at all Xaa locations
MGSSGFSWTLPDHPKLPKGKPVAVVVLDGWGEANPDQYNCIHVAQTPVMDSLKNGAPEKWRLVKAHGTAVGLPSDDDMGNSEVGHNALGAGRIFAQGXAKLVDQALASGKIYDGDGFNYIKESFESGTLHLIGLLSDGGVHSRLDQLQLLLKGVSERGAKKIRVHILTDGRDVLDGSSIGFVETLENDLLELRAKGVDAQIASGGGRMYVTMDRYENDWDVVKRGWDAQVPGEAPYKFKSALEAVKTLRAQPKANDQYLPPFVIVDDSGNAVGPVLDGDAVVTINFRADRMVMLAKALEYADFDNFDRVRVPKIRYAGMLQYDGELKLPSRYLVSPPEIDRTSGEFLVKNGIRTFACSEAVKFGHVTFFWNGNRSGYFDETKEEYVEVPSDSGITFNVAPKMKALQIAEKARDALLSGKFDQVRVNLPNGDMVGHTGDIEATVVACKAADEAVKIILDAVEQVGGIYLVTADHGNAEDMVKRNKSGKPLLDKNGGIQILTSHTLQPVPVAIGGPGLHPGVKFRNDIQIPGLANVAATVMNLHGFEAPADYEQTLIEVADN

SEQ ID NO: 12845 - protein, 520 aa, Pseudomonas putida
MTHLKITGMTCDSCAAHVKEALEKVPGVQSAIVSYAKGAAQLALDPGTAPDALTAAVAGLGYKAMLADAPPTDNRTGLFDKVRGWMGAADKGSGGERPLQVAVIGSGGAAMAAALKAVEQGAQVTLIERGTIGGTCVNVGCVPSKIMIRAAHIAHLRRESPFDGGMPPTPPTILRERLLAQQQARVEELRHAKYEGILDGNSAITVLHGEARFKDDQSLIVSLNEGGERVVMFDRCLVATGASPAMPPIPGLKESPYWTSTEALVSDTIPERLAVIGSSVVALELAQAFARLGSQVTILARNTLFFRDDPSIGEAVTAAFRAEGIKVLEHTQASQVAHVNGEFVLTTGHGEVRADKLLVATGRTPNTRSLALDAAGVTVNAQGAIVIDKGMRTSTPHIYAAGDCTDQPQFVYVAAAAGTRAAINMTGGDAAINLTAMPAVVFTDPQVATVGYSEAEEHHDGIETDSRTLTLDNVPRALANFDTRGFIKLVIEEGSGRLIGVQVVAPEAGELIQTAVLAIR

SEQ ID NO: 12846 - protein, 183 aa, Fusobacterium nucleatum subsp. vincentii ATCC 49256
MKIYDFSVKNRKDEDISLKSYKGKVLLIVNTATRCGFTPQYDELENLYEKYNKEGFEVLDFPCNQFGNQAPESDEEIHTFCQLNYKVKFDQFAKVEVNGENALPLFQYLKEQKGFSGFDPKHKLTSVLTEMLSKNDPDFAKKSDIKWNFTKFLVDKSGNVVARFEPTTSVKVIEQEIKKLLEK

SEQ ID NO: 12847 - protein, 641 aa, Gossypium hirsutum
MCFRFSNLLTLLLISFAAAEDVGFIYNGFRSANLNLDGIAELTSNGLLKLTNKTVQETGHAFYPHPVDFKNSTNGSVFSFSSTFVFAILPEYPTLSGHGIAFVIAPTKGLPGSLPSQYLGLFNGSNNGNDTNHVVAVELDTIRSTEFDDINDNHVGIDINGLKSPTSSPAGYYEDDSHDFKNLTLISGKQMQVWVEYHGLEKRMDVTLAPFKVPKPDTPLLSLSRDLSSIVNRENVCWFFIVNWFGPHISLCFGLELSRLMVQAEELTLSQLPKLPRLGPKKKPKVLTIGLPLILVSLALAGVSGAAYLVRRKRKFADVVEDWELEYGPHRFKFKDLYIATKGFKDKELLGAGGFGRVYRGVLPSNKLEVAVKRVSHESRQGMREFVAEIVSIGRLRHRNLVQLLGYCRRKDELLLVYDYMPNGSLDKYLHDQPKVTLNWRQRFRVIKGVASGLFYLHGEWDQVVVHRNVKASNVLLDGELNGRLGDFGLARLYDHGTDPQTTHVVGTLGYLAPEHTRTGKATPSTDVFAFGAFLLEVACGRRPIEAKSPTEDVILVDWVYSCWSNGDIMEAKDPNLGSGYEAEEVELVLKLGLLCSHSEPEARPTMRQSPSVFRRGSSISRNVITQSHFQWTNIWTSTRV

SEQ ID NO: 12848 - protein, 148 aa, Glycine max
SYRHLLFAIYVFGVGVPLFNHNVRSTHTIKWSLWIIHKLLLAAAYGFILFANFSKWREKLPPRPSFHNYVAVMFVFSVITLFACGLAAIDAGLGNWLYDLTVLCYHSLYLPFLYVTFLADFFQEEDFLLDNAYYSEMKDAGFFDADWE

SEQ ID NO: 12849 - protein, 123 aa, Lactobacillus delbrueckii subsp. lactis
  unsure (1)..(123): unsure at all Xaa locations
MKLQTKAMLITYPDSLGHNLKDLSQVMDRYFSKAIGGIHLLPFFPSHGDRGFSPMTYEKVAPEFGTWSDVEKLGEQYYLMFDFMINHISAHSDYYLDLXKNKEKSPWRXLFLSWDKFWPAGRP

SEQ ID NO: 12850 - protein, 496 aa, Pseudomonas sp. VLB120
MNSSLSAIDGLRLPHQMLIGGQWVSAQSGKTLNVYNPATGDILTEVPDGDVEDVNAAVESAAATLRSDTWRPCLPVLASVFCCAWRISSEVHGDELARLETLNNGKLLIYSKLMEVGASAQWLRYMAGWATKLTGSTLDLSLPLPPEVRSRASTQRVPVGVVAAIIPWNFPLLMAVWKIAPALACGNTVVLKPAEETPLTALRLAELAMEAGLPAGALNVVTGRGETAGDALVRHPKVAKVAFTGSTEVGRIIGSACGRSLKAVSLELGGKSPVIVLADCDPQEAAEGAAAAIFFNHGQVCTAGSRLYVHESIYEDVIQRLAVIGESIVVGSGLEQGVHMGPMVSKKHHENVLRHIRNGIEDGADLICGGTEAPCAQGFFVKPTIFANREKKDIRLLSQEVFGPVLVATPFSDIAEVVNEANRSVYGLGASIWTNDLSAALRINDELEAGTVWVNTHNMVDPNLPFGGFKDSGVGREHGAAAIEHYTTTRSLVIAY

SEQ ID NO: 12851 - protein, 451 aa, Pichia angusta
MGTKSMTDVTAEELSKDSVAMMLAKDRELKNKYLKQKHISEQPWTWENWHRHINWLNFTLVLAVPLAGLISTKWVPLKLHTFVTAVILYCFGGLSITAGYHRHWAHRAYDCRLPVKIFFALFGASAVEGSIKMWGHQHRVHHRYTDTPRDPYDAKRGFWYSHMGWMLLVPNPRYRARADISDLLDDWVVRVQHRHYLLLMVVMAFFFPAILTHFLFNDFWGGFIYAGLLRAVFIQQATFCVNSLAHWIGEQPFDDRRTPRDHILTALVTFGEGYHNFHHEFPSDYRNALKWYQYDPTKVVIYLLSKVGLAYNLKRFSQNAIDQGILQQQQKKLDRMRAKLNWGPQLSELPVWDKSTFFEKAKEQKGLVIISGIVQDCSNFLTEHPGGQALLKTSFGKDATMAFNGGVYAHSNAAHNLLATMRVAVIRDGGANGDTFDAQLRYLASKENKKE

SEQ ID NO: 12852 - protein, 456 aa, Desulfovibrio vulgaris subsp. vulgaris (strain Hildenborough)
MTYDVVILGAGPGGSRAALEAAAAGLRVAIVDKGSFGGTCLNWGCIPTKLLLGGTAAHPLLEVQKKLKTAQGTIDFDLTALQARKTRFINGTRQALEKQLRQAGIEVITGTARLAGPGHVEVVDGEGTRELAARNVIVATGSVPASFPGLAPDGEAVLDSTALLDVTEVPDSLIIVGGGAIGLEMGDFFSRLGTAITIVEGLDRLAPTEDPEIGQTLGKLLKREGWAIHTGRRVASLSTVEGKAQLRFEDGTELVADKALMAVGRRPATAGLGLETAGATLLGAGWVETNDHLLAAPGLYAIGDVNGRTLLAHAADHQARFVISHIASGSASSASGYPAPVMPSCIYGHTEVMRAGATVAELVASGHDVHVSTSQLIANPIAQAYGTTGGFIRVLWVEGQVRGISAVGHGVSHLVTLATVIVSQRWRWEDVHGIIFAHPTLDEALEAALLAPSQKV

SEQ ID NO: 12853 - protein, 425 aa, Bordetella parapertussis 12822
MVFPSRGNGSGPFRRQAPDAIHTGTEYSMSNVNTLSALAKSGALSGKRVFIRADLNVPFDDAGRISEDTRIRASVPGIRLALDAGEAVMVTSHLGRPKEGALTEADSLAPVAQRLSELLGMQVRLVPDWVDGVSVEPGEVVLLENCRGNVGEKKDDEGLSRKMAALCDVYVNDAFGTAHRAEATTHGIARFAPVACAGPLLEAELEALGRALHDPKRPLVAIVGGSKVSTKLSILQSLADKVDQLVVGGGIANTFMLAAGLPIGKSLAEPEQVEQARAVIEIMKRRGAEVPIPTDVVCAKSFGADAAATVKAAADVAEDDMILDIGPQTAQRLADILKAAGTIVWNGPVGVFEFDQFAHGTEVVARAIADSAGFSIAGGGDTLAAIAKYGIADQTGYISTGGGAFLEFLEGKALPAVAVLQARAA

SEQ ID NO: 12854 - protein, 429 aa, Mycobacterium avium subsp. paratuberculosis str. k10
MPIIEQVGAREILDSRGNPTVEVEIALTDGTFARAAVPSGASTGEHEAVELRDGGERYGGKGVQKAVQAVLDEIGPAVIGLNADDQRLVDQALVDLDGTPDKSRLGGNAILGVSLAVAKAAADSAELPLFRYLGGPNAHILPVPMMNILNGGAHADTAVDIQEFMVAPIGAPSFAEALRWGAEVYHSLKSVLKKEGLSTGLGDEGGFAPDVAGTTAALDLIGRAIESAGFKLGTDVALALDAAATEFYSDGTGYKFEGSTRTAEQMAEFYAGLLGAYPLVSIEDPLSEDDWDGWAALTASIGDRVQLVGDDVFVTNPERLEEGIEKGVANALLVKVNQIGTLTETLDAVALAHHSGYRTMMSHRSGETEDTTIADLAVAVGSGQIKTGAPARSERVAKYNQLLRIEEALGDAARYAGDLAFPRFALETR

SEQ ID NO: 12855 - protein, 551 aa, Desulfovibrio vulgaris subsp. vulgaris str. Hildenborough
MSVHPLAGERPSHDRLVNIPALMGEYYTGHPDTTAVERRVAFGTSGHRGSSLHGTFNEEHILAVTQAVCDIRREDGIAGPLFLGMDTHALSECAHRTALEVLAANGVNVRLQTGGGFTPTPVISHAILCWNAHRDRPRADGVVITPSHNPPEDGGFKYNPPHGGPADTTVTRRIERRANELLDNGLAGVRRVVLHKALRTPGIEAVDLVSAYVNDLASVLDMDAIRGAGLRIAADPLGGSSLAYWDPIAEKYGLDITVVNREADPTFRFMPQDKDGKVRMDCSSPWAMRGLIDLRQSYDIAFGNDPDADRHGIVTAQGLLNPNHYIAAAVWYLYRHRPGWNTTCGIGKTLVTSSMVDRVAKLLGRKVVEVPVGFKWFVPLLLDGSCGFGGEESAGASFLRSDGTPWSTDKDGIIMNLLAAEMMAVEERSPSEIYAELTERCGTPYYERLQSPATAAQRAVFAGLTPERVKATSLAGAPITAMLTHAPGNGAAIGGLKVVTDDGWFAARPSGTEDMYKIYTESFVSPEHLQRIQKDAVDIVASIFADADASS

SEQ ID NO: 12856 - protein, 589 aa, Pseudomonas aeruginosa PAO1
MCGISGEFRFDNQAADLAAVERITHHLAPRGPDAWGFHAQGPIALGHRRLKIMDLAEASGQPMIDPDLGLAMVFNGAIYNYPELRGELESLGYRFFSGGDTEVLLKGYHAWGADLLPRLNGMFAFAVWERDRQRLFLARDRLGIKPLYYSLDRSRLRFASSLPALLKGGDIASDLDPQALNFYLNFHAVVPAPHTLLEGVKKLPPATWMSVDLDGSCEQRTWWTLDYGPRPDERELTLDDWQERVLDGLREAVAIRQRAAREVGVLLSGGVDSSLLVGLLHEAGVDNLLTFSIGFEDAGGERGDEFQYSDLIAERYHTRHHRLRIGEHEVIEQLPAAFRAMSEPMVSHDCIAFYLLAREVSKHCKVVQSGQGADELFAGYHWYPKVDGADDAFAAYRAAFFDRDHEEYLATVGERFRVEDVAGRFVRDHFASPGAEAAVDKALRLDSTIMLVDDPVKRVDNMTMAWGLEARVPFLDYRLAELSARIPARFKLGDGGKQVLKGAARKVIPSEVIDRPKGYFPVPGLKHLQGRTREWVRELLLDPSQDRGLFQPAIFDRLLSDPDGDLTPLRGSKLWQLAALNLWLSEQGL

SEQ ID NO: 12857 - protein, 233 aa, Zea mays
  unsure (1)..(233): unsure at all Xaa locations
AGPGPCPHPPFXSLVRSVLYQQLAFKAAASVYSRFIALVGGEAGVLPDAVLALSAEQLRQIGVSARKASYLHDLARKYASGILSDDNIVAMDDRSLAAMLTMVNGIGAWSVHMFMIFSLARPDVLPSADLGIRKGVQMLYGLEDVPRPSQMEKLCERWRPYRSVAAWYMWRLIESKAAQTAGAMPVVPPAMPAPSEEFMLQQHQQQHHHQHQQQQQQAAIQMLDPVQMLPGLG

SEQ ID NO: 12858 - protein, 519 aa, Pseudomonas putida
MTHLKITGMTCDSCAAHVKEALEKVPGVQSAIVSYAKGAAQLALDPGTAPDALTAAVAGLGYKAMLADAPPTDNRTGLFDKVRGWMGAADKGSGGERPLQVAVIGSGGAAMAAALKAVEQGAQVTLIERGTIGGTCVNVGCVPSKIMIRAAHIAHLRRESPFDGGIAATVPAIDRSKLLAQQQARVDELRHAKYEGILDGNPAITVLHGEARFKDDQSLVVRLNEGGEREVTFDRCLVATGASPAVPPIPGLKESPYWTSTEALVSDTIPARLAVIGSSVVALELAQAFARLGSQVTILARSTLFFREDPAIGEAVTAAFRAEGIEVLEHTQASQVAHVNGEFVLTTGHGELRADKLLVATGRAPNTRSLALDAAGVTVNAQGAIVIDQGMRTSNPNIYAAGDCTDQPQFVYVAAAAGTRAAINMTGGDAALNLTAIPAVVFTDPQVATVGYSEAEAHHDGIETDSRTLTLDNVPRALANFDTRGFIKLVIEEGSGRLIGVQAVAPEAGELIQTAVLAI

SEQ ID NO: 12859 - protein, 284 aa, Vibrio parahaemolyticus RIMD 2210633
MTTNKHPSLLGECLAEFIGTGLLIFFGVGCVAALVLTGASFGQWEISIVWGLGVSIAIYCTAGVSGAHINPAVTIALAMFHGFDKAKVVPYIIAQMLGAFFSAALVYSLYSNLFTDYEIAHNFVRSSQDALATAGIFSTYPHASLSFFGAFAVEFVITAVLMFAILALGDENNGAARGAMNPLLIGILIAVIGGSLGPLTGFAMNPARDFGPKLFAYFAGWDYALTGAKDIPYFIVPLLAPIAGACFGGWLYPKAIAAYLPRQGHGCTIPNQCDTEEETEEARA

SEQ ID NO: 12860 - protein, 527 aa, Pseudomonas putida
MTHLKITGMTCDSCAAHVKEALEKVPGVQSALVSYPKGTAQLAIVPGTSPDALTAAVAGLGYKATLADAPLADNRVGLLDKVRGWMAAAEKHSGNEPPVQVAVIGSGGAAMAAALKAVEQGAQVTLIERGTIGGTCVNVGCVPSKIMIRAAHIAHLRRESPFDGGIAATVSTIYRRKLLAQQQARVDELRHAKYEGILDGNPAITVVHGEARFKDDQSLTVRLNEGGERVVMFDRCLVATGASPAVPPIPGLKESPYWTSTEALVSDTIPERLAVIGSSVVALELAQAFARLGSKVTVLARNTLFFREDPAIGEAVTAAFRAEGIEVLEHTQASQVAHMNGEFVLTTGHGELRADKLLVATGRAPNTRSLALDAAGVTVNAQGAIVIDQGMRTSNPNIYAAGDCTDQPQFVYVAAPAGTRAAINMTGGDAALNLTAMPAVVFTDPQVATVGYSEAEAHHDGIETDSRTLTLDNVPRALANFDTRGFIKLVIEEGSGRLIGVQAVAPEAGELIQTAALAMRNRMTVQE

SEQ ID NO: 12861 - protein, 108 aa, Ceratophyllum demersum
YSATDIPQAPRFLFKQNRVRVIVDCNAKPIEIIQDSRLNQPLCLVNSTLRSPHGCHMQYMANMGSIASLVMAIIINGNDSSKLWGLVVCHHTSARYLLFPLRYACEFL

SEQ ID NO: 12862 - protein, 369 aa, Nostoc punctiforme PCC 73102
MQVKAAVAYSAGKPLTIETVQLSGPQAGEVLVEVKASGICHTDAFTLSGDDPEGLFPAILGHEGAGVVVEVGAGVTSLKPGDRVIPLYTPECRQCEYCLSFKTNLCQAIRLTQGRGVMPDGTSRFSIDGQMIHHYMGTSTFANYTVLPEIAVAKIREDAPFEKVCYIGCGVTTGIGAVINTAKVEPGANVVVFGLGGIGLNVIQAARMVGANMIVGVDINPSKRALAEKFGMTHFVNPQEVEGDLVPYLVDLTKGGADYSFECIGNVKIMRQALECCHKGWGVSVIIGVAGAGQEISTRPFQLVTGRVWKGSAFGGARGRTDVPKIVDWYMQGKINIDDLITHVMPIEQINDAFELMHKGESIRSVVTF

SEQ ID NO: 12863 - protein, 157 aa, Candida albicans
LLSLDGTPNKSKLGANAILGVSLAAANAAAAAQGIPLYKHIANISNAKKGKFVLPVPFQNVLNGGSHAGGALAFQEFMIAPTGVSTFSEALRIGSEVYHNLKSLTKKKYGQSAGKLGDEGGVAPDIKTPKEALDLIMDAIDKAGYKGKVGIAMDVAL

SEQ ID NO: 12864 - protein, 487 aa, Glycine max
  unsure (1)..(487): unsure at all Xaa locations
MASAAAPTTFSLLHSATPASSSSATSASPSPSRVQLSSSLRARPLRRLGFAAADPLLAANVAARVAAVRGGGKGARGVVSMAKKSVGELSAADLKGKKVFVRADLNVPLDDNQNITDDTRIRAAIPTIKHLIQNGAKVILSSHLGRPKGVTPKYSLAPLVPRLSELIGIQIVKAEDSIGPEVEKLVASLPDGXGVLLLENVRVLKRYEEKNEPEHAKKLASLADLYXNDAFGTAHRAHASTEGVTKYLKPSVAGFLLQKELDYLVGAVSNPKRPFAAIVGGSKVSSKIGVIESLLEKVDILLLGGGMIFTFYKAQGLSVGSSLVEEDKLDLATSLLAKAKEKGVSLLLPSDVVIADKFAPDANSKVVPASAIPDGWMGLDIGPDSVKSFSEALDTTQTIIWNGPMGVFEFDKFAVGTEAIAKKLADLSGKGVTTIIGGGDSVAAVEKVGVASVMSHISTGGGASLELLEGKELPGVLALDEAVPVAV

SEQ ID NO: 12865 - protein, 180 aa, Nicotiana plumbaginifolia
MASSVLSSAAVATRSNVAQANMVAPFTGLKSAASFPVSRKQNLDITSIASNGGRVQCMQVWPPINKKKYETLSYLPDLSQEQLLSEIEYLLKSGWVPCLEFETERGFVYREHHHSPGYYDGRYWTMWKLPMFGCTDATQVLAEVEEAKKAYPQAWVRIIGFDNVRQVQCISFIAYKPEGY

SEQ ID NO: 12866 - protein, 279 aa, Nicotiana plumbaginifolia
MASSASSLHFLSLTPQTLLLPKPTSQTTSLSFFSLPPSSLNLSLSSPSSCFSSRFVRKVTLPDFDQIEDVEDGDEGVEEERNFSPDLKIFVGNLLFSADSAALAELFERAGNVEMVEVIYDKLTGRSRGFGFVTMSSKEEVEAACQQFNGYELDGRALRVNSGPPPEKRENSSFRENSSFRGGSRGGGSFDSSNRVYVGNLAWGVDQDALETLFSEQGKVVDAKVVYDRDSGRSRGFGFVTYSSAEEVNNAIESLDGVDLNGRAIRVSPAEARPPRRQF

SEQ ID NO: 12867 - protein, 460 aa, Pseudomonas syringae pv. syringae B728a
MQHSALKELWIILRLAGPLIASQMAHMLMVFTDTVMMGKIGPEALAGGGLGAATYSFVSFFCVGVMAAVGTLVSIRHGAGDTEGATRLTQAGLWLAWGMALVAALLLWNLEPILLQFGQAEANVHMAAQFLITLPFALPGLLSFMALRGFTSALGRAGPVMTISLAGAAANFVLNYALIHQWLGLPNLGLMGIGLVTAIVTNCMALALALHIRLHPAYAAYPIRKGLSKLSRSHLGELWRLGLPIGGTYAVEVGLFTFAAFCMGAMGSTQMAAHQIALQTVSMAFMVPVGMSYAVTMRIGQHYGAGNLLMVRMAGRLGIGFGGCVMLMFGLLFWLAPHLVIGLFLDINDPAFAEIVVLATKLLAIAALFEFFDGTQTIAMGAIRGLKDARTTFLIGLGCYWLIAAPAAWLLGFSTDAGASGVWWGLALGLFCSAVALTYAFEWKTARLLRQDAAGLPVPG

SEQ ID NO: 12868 - protein, 411 aa, Pseudomonas syringae pv. tomato str. DC3000
MRALTYHGANSVKVDSVPDPELQEADDIILRVTATAICGSDLHLYRGKIPTVEHGDIFGHEFMGIVEETGSAVTAVQKGDRVVIPFVIACGSCFFCNIDLFAACETTNTGRGAIMNKKSIPPGAALFGFSHLYGGIPGGQAEYVRVPKANVGPFKVPGTLADEKVLFLSDILPTAWQAVTNAGIGPGSSVAIYGAGPVGLMSAACAKMLGAERIFMVDHHPYRLAYAQKTYGVIPINFDDDDDPADTIIRQTPGMRGVDGVVDAVGFEAKGSTTETILATLKLEGSSGKALRQCIAAVRRGGVVSVPGVYAGFIHGFMFGDAFDKGLTFKMGQTHVHRFMPELLEHIEAGRLAPEAIISHRMSLEDAAKGYKLFDKKEEDCRKVILTPGDNTIVVPDTQTEALVGGVVPAM

SEQ ID NO: 12869 - protein, 496 aa, Triticum aestivum
  unsure (1)..(496): unsure at all Xaa locations
MDPCKFRPSSSFDTKTTTTNAGQPVWNDNEALTVGPRGPILLEDYHLLEKIAHFARERIPERVVHARGASAKGFFECTHDVTGLTCADFLRAPGARTPVIVRFSTVIHERGSPETIRDPRGFAVKFYTREGNWDLLGNNFPVFFIRDGIKFPDVIHAFKPNPKSHVQEYWRVFDFLSHHPESLHTFFFLFDDVGIPTDYRHMDGFGVNTYTFVSRAGKSHYVKFHWXRPTCGVSCLMDDEATLVGGKNHSHATQDLYDSIDAGNFPEWKLFVQVIDPDDEDRFDFDPLDDTKTWPEDLVPLQPVGRLVLDRNVDNFFNENEQLAFGPGLVVPGIYYSDDKMLQCRVFAYADTQRYRLGPNYLMLPVNAPKCGFKNNHYDGAMNFMHRDEEVDYYPSRHAPLRHAEPASFPVPTRPVVGKREKTRIKKENDFVQPGXERYRSWAPDRQDRFVRRFADALAHPKVSHELRVIWIDFLSKCDKSCGMKVANRLNVKPSM

SEQ ID NO: 12870 - protein, 117 aa, Flammulina velutipes
HPFHLHGARIASTILRDEQLYKLWESEVKHMADRIIQMRDRLYDNLVGQNTPGEWSHIKKQIGMFSFTGLTQPQTKALAEKAHIYMTADGRISMAGLNGNNIDYFSESVSKAVKGDL

SEQ ID NO: 12871 - protein, 466 aa, Caulobacter crescentus CB15
MADYDFDLFVIGAGSGGVRAARLAALSGAKVAVAEEYRVGGTCVVRGCVPKKFMVYASEVTSQLKTAKGYGWTIEDARFDWKTFLHEKDVEIARLSGIYVTNLQKAGAHLLHGRAQIVDAHTVEVLPKDGSDDAGTYTARKILVATGGRPVRPVFPGAELGITSDEAFHLPTLPKSVLVVGGGYIAVEFAGIYAGLGVQTTLLYRGANILRGFDDDVRMHLADELEKRGIKVVLGCSHKSIEKLDDGRLLSTLSNDLTFETEAVMFATGREPYVQGLGLEKAGVKLNDKGAIAVDKYSKTNVDSIWAVGDVTDRINLTPVAIREGAAFAQTEFYGNPTTFDHDLVASAVFSQPPVGAVGMSEAEARQAFGKVDIYRSIFRPMKVTFYGGQERCLIKLVVKQDDERILGVHVVGPDSPEIIQMAAIAVKMGVTKPQWDSTCAVHPTLAEELVTMREKYVPAEVGGAG

SEQ ID NO: 12872 - protein, 468 aa, Glycine max
  unsure (1)..(468): unsure at all Xaa locations
CLILCVGVLLQTYPNPLQDNPAYSVVKQYFVHVDDSVPQKVVVHKDGARGVHFRRAGPRQXDEVQAAIVTCGGLCPGLNTVIRELVCGLHHMYGVKKVLGINGGYRGFYARNTITLTPKSVNDIHKRGGTVLGTSRGGHDTKKIVDSIQDRGINQVYIIGGDGTQKGASAIFEEVRKRGLKVSVVGIPKTIDNDIPVIDKSFGFDTAVEEAQRAINAAHVEAESVENGIGVVKLMGRNSGFIAMYATLASRDVDCCLIPESPFYLEGPGGLYEYIEKRLKENGHMVIVIAEGAGQELVSESVQSMSKQDASGNKLFQDVGLWISQKIRDHFAAQKTLPITLKYIDPTYMIRAIPSNASDNVYCTLLAQSAVHGAMAGYTGYTSGLVNGRQTYIPFYRITERQNHVVITDRMWARLLSSTNQPSFLDAKGDNEEKEEEEALNQLPDGHCAKDTSLASKEINSSIYPTAC

SEQ ID NO: 12873 - protein, 250 aa, Mesorhizobium loti
MLLKGKAVVISGAASPRGIGRSTATLMAEQGARIAILDLDEEQARDAAASLGPEHIGLACNVADLDSCKRAAAEVTEAFGRVEVLCNIAGITQPVKTLDIGPADWDRILDVNLRGVLYLSQAFIPHMRENGGGSIICMSSVSAQRGGGIFGGPHYSAAKAGVLGLAKAMAREFGPDGIRINCVTPGLIQTDITGGKLTDAMRADIIKGIPLSRLGDARDVAGAYLFLASDLASYITGAVIDVNGGMLIHG

SEQ ID NO: 12874 - protein, 490 aa, Leptospira interrogans serovar lai str. 56601
MIRGRIPGGRLTSEQYLVWDELGDKFGGGAIRLTTRQSVQLHTLRIFHLRDVMKAIHEVNLSSMGACGDVVRNVTQAVNPLGKKELQLLDGVSQILSDHFKYKTNAYAEVWLGDKQLNKDEEDPIYGKTYLPRKFKIAVTLAGNNTVDIYANDMGFAATLSSDGNRIDGYFVFAGGGFGMTHNKPETFARAASLLGWVPENALIPVAEAIVTAHRDFGDRTNRKHARLKYVLAEKGVEWFQSEVESRSNVKLDKDKPLPNWETPSYLGWNERQDGTLSLGFHTLAGRIKDFPGKPLKSALKEIIGAYKLSVQITADQDLILIGIQKSDQEKVEKRLEELNVSWKSPSRLYDRALACPALPTCALALTESERSFPEVLNGIQKVLDKLGLSDRAPVVRMTGCPNGCARPYSAEVGIVGQQAGGKYSLFFGADSEGTKVGEYVAKKIALADIPAQLEKAFVLWKNEGDSDEKFGDFVNRFPLERFREALGSM

SEQ ID NO: 12875 - protein, 193 aa, Cucumis sativus
  unsure (1)..(193): unsure at all Xaa locations
TGDEGNNEYKKGLWTVEEDKILMDYVKAHGKGHWNRIAKKTGLKRCGKSCRLRWMNYLSPNVKRGNFTEQEEDLIIRLHKLPGNRWSLIAKRVPGRTDNQVKNYWNTHLSKKLGIKDQKTKQSNGDIVYQINLPNPTETSEETKISNIVDNNNILGDEIQEDHQGSNYLSSLWVHEDEFELSTLTNMMDFINX

SEQ ID NO: 12876 - protein, 211 aa, Oryza sativa
  unsure (1)..(211): unsure at all Xaa locations
MGHPHPHPYAPAELHLPGFVPLQLSQAQILVPYLATSXGGTXCSRRLSDTDRWLMCWWAFTGLTHIIIEGTFVFAPNFFSNQNPSYFDEVWKEYSKGDSRYVARDPATVTVEGITAVLEGPASLLAVYAIASGKSYSHILQFTVCLGQLYGCLVYFITAYLDGFNFWTSPFYFWAYFIGANSSWVVIPTMIAIRSWKKICAAFQGEKVKTK

SEQ ID NO: 12877 - protein, 111 aa, Dianthus caryophyllus
TDIPQASRFLFKQNRVRVIVDCHAKPVCVVQDERLQQPLCLVGSTLRAPHGCHSQYMANMGSIASLVMAVIINGNDDESGGRNAMALWGLVVCHHTSPRSIPFPLRYACEF

SEQ ID NO: 12878 - protein, 313 aa, Lactococcus lactis subsp. cremoris
MKQTTIPNKARKVRKAVIPAAGLGTRFLPATKAIAKEMLPIVDKPTIQFIVEEALKSGIEDILIVTGKAKRPIEDHFDSNIELEQNLLEKGKTELLKLVEETTDINLHFIRQSHPKGLGHAVLQAKAFVGNEPFVVMLGDDLMNITGNETPLTKDLINDYEKTHASTIAVMKVPHEDVDKYGVIDPNGEVSKGLYNVERFVEKPKVEEAPSDLAIIGRYLLTPEIFDVLETQVPGAGNEIQLTDAIERLNKTQRVFAHEFTGKRYDVGDKLGFVETTIEYGLEHPQIGDNLKNYIIEKAKELSKDELKQNTKK

SEQ ID NO: 12879 - protein, 112 aa, Dianthus caryophyllus
TDIPQASRFLFLKNKVRMICDCLSSPVKVVQGEDLSQPLSLGGSTLRAPHGCHAQYMANMGSIASLVMAVTINDEEVEVTDQRKTRKLWGLVVCHHTSSRFIPYPLRYACEF

SEQ ID NO: 12880 - protein, 119 aa, Equisetum arvense
HYPATTIPQASRFLFMKNRVRMICDCRTNPVRVIQDKQLGQPISLAGSTLRAPHGCHAQYMANMGSIASLVMAVVVNDNEDESSSSSRLYQPKKRKLWGLIVCHHTSPRAVPYPFRYAC

SEQ ID NO: 12881 - protein, 113 aa, Ginkgo biloba
YSATDIPQASRFLFMQNRVRMICDCCATPVKVIQDEELRQPLCLVGSTLRAPHGCHAQYMANMGSIASLVMAVIINGTDEEGLSGRSSMKLWGLVVCHHTSPRASPFPLRYAC

SEQ ID NO: 12882 - protein, 114 aa, Ginkgo biloba
HYPATDIPQASQFLFMKNRVRMIYDCCVTPIKVIQDEEWGQPLCLVGSTLQSPHGCRASYMANMGSIASFVMAVIINGIDEEGISGRSSMKLWGLVVFHHISPCAVPFPLRYAC

SEQ ID NO: 12883 - protein, 292 aa, Nicotiana plumbaginifolia
MASSSVSSLQFLFVTSQTPSSLKPNSTLSFFSLPSSSLNLSLSSSSIGHSASIKPFESSFSTRVALSDFDQLEDDVEVAEQPRFSEDLKLFVGNLPFSVDSAALAGLFERAGNVEIVEVIYDKLSGRSRGFGFVTMSTKEEVEAAEQQFNGYEIDGRAIRVNAGPAPAKRENSSFGGGRGGNSSYGGGRDGNSSFGGARGGRSVDSSNRVYVGNLSWGVDDLALKELFSEQGNVVDAKVVYDRDSGRSRGFGFVTYSSAKEVNDAIDSLNGIDLDGRSIRVSAAEERPRRQF

SEQ ID NO: 12884 - protein, 303 aa, Bacillus subtilis subsp. subtilis str. 168
MTWHEVNDVIVITLPEIFDMNANLGYLTREKNECMYEIENNIITKVIAIGEIRSLVQVSVINNKQMIVQFLNDSRPVEQWKREEIVKYIHEWFDLDNDLTPFYEMAKADPLLKMPARKFYGLRVIGIPDLFEALCWGVLGQQINLAFAYSLKKQFVEAFGDSIEWNGKKYWVFPPYERIARLTPTDLADIKMTVKKSEYIIGIARLMASGELSREKLMKMNFKDAEKNLIKIRGIGPWTANYVLMRCLRFPTAFPIDDVGLIHSIKILRNMNRKPTKDEILEISVPWKEWQSYATFYLWRVLY

SEQ ID NO: 12885 - protein, 388 aa, Oryza sativa
MAALTSYEMAASILLCAEDSSSVLGFGGEEEEEEEDVVAGKRARCAGPPPPPCVDVAGVDFAVPSEECVARLVETEADHMPREDYAERLRAGGGDGDLDLRVRMDAIDWIWKVHSYYSFAPLTACLAVNYLDRFLSLYQLPDGKDWMTQLLAVACLSLAAKMEETDVPQSLDLQVGEERYVFEAKTIQRMELLVLSTLKWRMQAVTPFSYVDYFLRELNGGDPPSGRSALLSSELILCIARGTECLGFRPSEIAAAVAAAVVGEEHAAFSHVNKERMSHCQEVIQAMELIHPKPSSPSRVFVSSSIPRSPTGVLDAAGCLSYRSDDSAVASHYAASSWGYEHDSSPRRGDSGTRQSELGTDTPDVLLTPFPFPTSTHPAPVALFPTGG

SEQ ID NO: 12886 - protein, 250 aa, Zea mays
  unsure (1)..(250): unsure at all Xaa locations
YVRSSTVQGPRGSADTGRDVLCFVLKFYTEEGNYDLVGNNMPVFFIQDAIKLPDFVHAVKPEAPNEMPTGAXAHDTFWDFVSLVPETTHTELWLMSDRALPASYRAMDSLGVHTYRFVNAAGAEHFVXFHWRPESGAYSLLWDEAQCIARHDPDFDQLDLWMAIERGGYQELEHGEQLIDPSDASKFDFDMLDPSKLVPPELVPVXPIGRMMLCRNPGILFAQTEQVAFHPAHVVPGLDVPNDPRLQVEL

SEQ ID NO: 12887 - protein, 1015 aa, Salmonella typhimurium LT2
  unsure (1)..(1015): unsure at all Xaa locations
MDVSRRQFFKICAGGMAGTTVAALGFTPKMALAQARNYKLLRAKEIRNSCTYCSVGCGLLMYSLGDGAKNAKEAIYHIEGDPDHPVSRGALCPKGAGLLDYVHSEDRLRYPEYRAPGSDKWQRISWDDAFTRIAKLMKADRDANFIEKNEQGVTVNRWLSTGMLCASAASNETGMLTQKFARSLGMLAVDNQARVXHGPTVASLAPTFGRGAMTNHWVDIKNANVVMVMGGNAAEAHPVGFRWAMEAKNNNDATLIVVDPRFTRTASVADIYAPIRSGTDITFLSGVLLYLIENNKINAEYVKHYTNASLLVRDDFAFDDGLFSGYDAQKRQYDKSSWNYQFDENGYAKRDETLTHPRCVWNLLKQHVSRYTPDVVENICGTPKADFLKVCEVLASTSVPDRTTTFLYALGWTQHTVGAQNIRTMAMIQLLLGNMGMAGGGVNALRGHSNIQGLTDLGLLSTSLPGYLTLPSEKQADLQTYLAANTPKATLADQVNYWGNYPKFFVSLMKSFYGDAAQQENDWGFAWLPKWDQSYDVIKYFNMMDSGKVTGYFCQGFNPVASFPDKNKVVQSLSKLKYLVVIDPLVTETSTFWQNHGESNDVDPTTIQTEVFRLPSTCFAEEDGSIANSGRWLQWHWKGQDAPGEARNDGEILAGIYHRLREMYRAEGGKGAEPLLKMSWNYKQPDEPHSEEVAKENNGYALEDLYDANGTLLARKGQLLSSFALLRDDGTTSSSCWIYTGSWTEQGNQMSRRDNADPSGLGNTLGWAWAWPLNRRVLYNRASADPQGKPWDPKRMLIQWNGAKWTGNDIPDFNNAAPGSGTNPFIMQPEGLGRLFAIDKMAEGPFPEHYEPMETPLGTNPLHPNVVSNPAARLYEEDALRMGKKEQFPYVGTTYRLTEHFHTWTKHALLNAIAQPEQFVEISETLAAAKGIANGDYVKVSSKRGFIRAVAVVTRRLRTLHVNGQQVETVGIPIHWGFEGVARKGYIANTLTPNVGDANSQTPEYKAFLVNIEKA

SEQ ID NO: 12888 - protein, 218 aa, Nicotiana plumbaginifolia
MAGYRADDEYDYLFKLVLIGDSGVGKSNLLSRFTKNEFNLESKSTIGVEFATKSLNIDNKVIKAQIWDTAGQERYRAITSAYYRGAVGALLVYDVTRHVTYENVTRWLKELRDHTDPNIVVMLIGNKSDLRHLVAVSTDEAKGLAEREGLYFMETSALEATNVENAFTEALTQIYRIVSKKAVEAGDEGATSSAPPKGETINIKDEGSSWKKFGCCSS

SEQ ID NO: 12889 - protein, 222 aa, Streptococcus pneumoniae R6
MKKFVAELIGTFMLVFVGTGAVVFGNGLDGLGHLGIAFAFGLAIVVAAYSIGTVSGAHLNPAVSIAMFVNKRLSSSELVNYILGQVVGAFIASGAVFFLLANSGMSTASLGENALANGVTVFGGFLFEVIATFLFVLVIMTVTSESKGNGAIAGLVIGLSLMAMILVGLKITGLSVNPARSLAPAVLVGGAALQQVWIFILAPIAGGVLAALVAKNFLGTEE

SEQ ID NO: 12890 - protein, 686 aa, Oryza sativa
MEGVGGGKRRGDDGAEATPRWRFSRPSSQGGPLAAAGLTSIRAVLNRVNSSVDAAAAGGPRPVLRLGNGDPTASACYRTAPAAEDAVVDALRSGAHNGYSLTVGVLSARRAIAEYLSRDLPYELSANDIYLTSGCVQAIEVMISVLAQPGSNILLPKPGFPLYESRTTFSNLEVRHFDLIPERGWEVDLEGVQAIADENTVAIVVINPSNPCGSVYSYDHLAKIAETARKLGLLIIADEVYDHLAFGNNPFIPIGVFGKTVPVITLGSISKRWLVPGWRLGWIATCDPNGILKEAKVNQSIENYINISTDPATFVQGAIPQIIANTKEDYFNKILDQLRNAADLCYDKIKDIKGITCPHKPEGSMFVMVKLDLSYLDGFHDDMDFCCRLAKEESVIVLPVDISILQFVRILNFVGDKSRVRQGTVIYLGIKSTGTFLNPKARFRTCTRVKQISHTSMCFSHEQQADEGVCPWEHGRRHERARAVEPLELVGVTERAEMHRSKVKLSGVLHMGFKPDKCKTALRMALARIKLLRNRKEVQSARRHSSITRFYTRTAPPSDAARTAISSPAALPATDAASRSPHVGHVGRAAPAAAERLQHLPPRGVPGPRGGKDVPRERQAEGALRRGQLLPTATPLLPLLSLAAAPRAATLRRRARHRAGRLSPSPATAAPASMPAASRRVCRRAC

SEQ ID NO: 12891 - protein, 505 aa, Pseudomonas syringae pv. tomato str. DC3000
MSTATILELMRPYWGDRSVIASYVGGAFIEGHGAPVEVRNAHNDSLLLSFPDADESLVEVADKAAKAAQQQWWAMTAQARGRAMYQVGNLIREEQENLAQIESLTANKPIRDARVEVLKVAEMFEYYAGWADKLHGEVIPVPTTHLNYVTYEPLGTVLQITPWNAPIFTCGWQIAPAIAAGNAVILKPSELTPLSSLVVGVLIERAGVPKGLVNVIAGFGHSIGQAFIAKADIRKVVFVGSPATGRHIAVAAAQRCIPAVLELGGKSANIVFDDADLEVALRGAQAAIFSGAGQSCVSGSRLLVQQSIFEKFTNALAVAATQFKVGDPGDPETQIGPINNAKQYNHVKSMVERALKDGAKLVGEQADPIPDRPGYYINPTVLAGTNELHCAQEEIFGPVVVAIAFKDEEDAIRIANDSRFGLAGGVWTRDVGRAHRVAKQVRAGTFWVNGYKTIHVSSPFGGYGESGYGRSSGLDALREYSEVKSVWVETAAKPAASFGYGASLE

SEQ ID NO: 12892 - protein, 160 aa, Synechococcus sp. PCC 7942
MAPQVTDIAVTTIDGAAKSLSDYAGQVLLIVNVASYCGYTSQYSGLEALYRQYRDRGLQVLAFPCNDFGAQEPGSNEEIKTFCSTRFDVSFELFDKVHAKGADQHPLYAALTQTDPAGDVAWNFEKFLVGKDGTVLARFKSGVAPNDASLIQAIEAALAA

SEQ ID NO: 12893 - protein, 557 aa, Arabidopsis thaliana
MATSSAWKLDDHPKLPKGKTIAVIVLDGWGESAPDQYNCIHNAPTPAMDSLKHGAPDTWTLIKAHGTAVGLPSEDDMGNSEVGHNALGAGRIFAQGAKLCDQALASGKIFEGEGFKYVSESFETNTLHLVGLLSDGGVHSRLDQLQLLIKGSAERGAKRIRVHILTDGRDVLDGSSVGFVETLEADLVALRENGVDAQIASGGGRMYVTLDRYENDWEVVKRGWDAQVLGEAPHKFKNAVEAVKTLRKEPGANDQYLPPFVIVDESGKAVGPIVDGDAVVTFNFRADRMVMHAKALEYEDFDKFDRVRYPKIRYAGMLQYDGELKLPSRYLVSPPEIDRTSGEYLTHNGVSTFACSETVKFGHVTFFWNGNRSGYFNEKLEEYVEIPSDSGISFNVQPKMKALEIGEKARDAILSGKFDQVRVNIPNGDMVGHTGDIEATVVACEAADLAVKMIFDAIEQVKGIYVVTADHGNAEDMVKRDKSGKPALDKEGKLQILTSHTLKPVPIAIGGPGLAQGVRFRKDLETPGLANVAATVMNLHGFVAPSDYEPTLIEVVE

SEQ ID NO: 12894 - protein, 394 aa, Pseudomonas syringae pv. syringae B728a
MLYNGLLDLSVWQLIAVTLVMTHITIIGVTVYLHRYSAHRSLELNAGLKHFFRFWLWLTTAQNTREWTAIHRKHHAKCETVDDPHSPVVKGLSTVLRKGAELYREEAQNQDTLRIYGKNCPEDWIERNLYSRYKLLGIALMAVIDVALFGVLGITVWAVQMMWIPFWAAGVVNGLGHAVGYRNFECRDAATNLVPWGIVIGGEELHNNHHTYPNSAKLSVKPWEFDMGWAWIKVFSFLRLAKVQRVAPIAHRVEGKGHMDMDTAMAILNNRFQIMAQYRKLVIAPLVAQELAKADESVRHQFRRAKRLLSRETSLLDDKHHLRIQTMLEHSHALKVIYEKRLALQQIWVKTSSNGHDMLSAMKEWIHEAEASGIQSLREFADQLKTYSLRPAHA

SEQ ID NO: 12895 - protein, 426 aa, Pseudomonas syringae pv. syringae B728a
MSKTNESLMQRRHAAVPRGVGQIHPIFAASAKNATVTDVEGREFIDFAGGIAVLNTGHLHPKIIAAVQEQLTKLSHTCFQVLAYEPYVELCEKINAKVPGDFDKKTLLVTTGSEAVENAVKIARAATGRAGVIAFTGAYHGRTMMTLGLTGKVVPYSAGMGLMPGGIFRALYPCELHGVSVDDSIASIERIFKNDAEPKDIAAIIIEPVQGEGGFYVAPKAFMLRLRELCDKHGILLIADEVQTGAGRTGTFFAMEQMGVAADLTTFAKSIAGGFPLAGVCGKAEYMDAIAPGGLGGTYAGSPVACAAALAVLDIFEEEHLLERCKAVGEQLVTSLKAMQAKYPVIGEVRALGAMIAVELFEDGDSHKPNAAAVAQVVAKARDKGLILLSCGTYGNVLRVLVPLTAEDELLKRGLAILDECFAEIA

SEQ ID NO: 12896 - protein, 349 aa, Myxococcus xanthus
MIPVRGYAAQDAKSPLAPFQFERREPGPSDVQIEILYCGVCHSDLHQVRDEWGGSRFPMVPGHEIIGRVVRVGDQVKKVKVGDMAGVGCMVDSCRTCPSCQEGLEQYCEKGNVQTYNGKEKDGQTATQGGYSEAIVVDEAFTLKIPENLDPAAAAPLLCAGITTYSPLRHWKVQPGQRVGVVGLGGLGHMGVKLAKAMGAHVTVFSHTDSKKQDATRLGADAVVVSSNKEEMAAQTGGFDFILDTVSAQHDINAYLRLLRRDGHLVLVGAPEKPLDVRPFSLIPTRRSFSGSMIGGIQETQEMLDFCGKHNIVSDIELISIQQVNDAYERLLKGDVKYRFVIDLASLRK

SEQ ID NO: 12897 - protein, 369 aa, Neurospora crassa
MAVDQESFVHLSRPLAPNVLGFGVSNAPLTVNIQPQAVFSIIDHAVRRDDRDTQSTRVIGALVGVRSEDGSEVEVRSTFAIPHTENEDQVEVDVEYQKNMLALTLKANPRETLLGWYTTSHELNSFSALIQNFFASPETGTFPHPAVHLTIGTEAGATIDTKTYISAPVAVSPERAAESCLFIEVPHKLLFTDAERGALGSVAAAADAESRSAPVVSDIENLAQALETVSDLLERVSGFVGEVLDEERDGNHALGQYLMNALSLAPKVSNLAIENDFNNHIQDVLMVSYLANTIRTQIELSQRLATAKLDEGKEGGEKKDGEGAEGDKKTDGQRGQRGQGGKRGGRSGGAGGRGGREQREPREPREAAE

SEQ ID NO: 12898 - protein, 115 aa, Pseudotsuga menziesii
HYPATDIPQASRFLFMQNRVRMICDCMATPVKLIQSEELMQPLCLVGSTLRAPHGCHAQYMANMGSVASLVMAVIINGNDDEGGGSGRNSMKLWGLVVCHHTSPAAVPYPLRYAC

SEQ ID NO: 12899 - protein, 112 aa, Elodea sp.
YPATDIPQASRFLFMKNKVRMICNCHASPVHVIQDKRLGQPLSLCGSTLRAPHGCHAQYMANMGSIASLVMSVVINEDINDPDSPEPQRSRKLWGLVVCHHTSSRFVPFPLR

SEQ ID NO: 12900 - protein, 428 aa, Shigella flexneri 2a str. 2457T
MKIATIKTGLASLAMLPGLVMAAPAVADKADNAFMMICTALVLFMTIPGIALFYGGLIRGKNVLSMLTQVTVTFALVCILWVVYGYSLAFGEGNNFFGNINWLMLKNIELTAVMGSIYQYIHVAFQGSFACITVGLIVGALAERIRFSAVLIFVVVWLTLSYIPIAHMVWGGGLLASHGALDFAGGTVVHINAAIAGLVGAYLIGKRVGFGKEAFKPHNLPMVFTGTAILYIGWFGFNAGSVGTANEIAALAFVNTVVATAAAILGWIFGEWALRGKPSLLGACSGAIAGLVGVTPACGYIGVGGALIIGVVAGLAGLWGVTMLKRLLRVDDPCDVFGVHGVCGIVGCIMTGIFAASSLGGVGFAEGVTMGHQLLVQLESIAITIVWSGVVAFIGYKLADLTVGLRVPEEQEREGLDVNSHGENAYNA

SEQ ID NO: 12901 - protein, 387 aa, Erwinia carotovora subsp. atroseptica SCRI1043
MSVIKMTDLDLAGKRVLIRADLNVPVKEGKVTSDARIRASLPTIEIALKQGARVMVTSHLGRPTEGEYNEDFSLLPVVDYLKEKLSSPVRLAKDYLDGVDVAEGELVVLENVRFNKGEKKDDEVLSKKYAALCDVFVMDAFGTAHRAQASTHGVGKFATIACAGPLLSGELEALGKALSKPARPMVAIVGGSKVSTKLTVLDSLSKIADQLIVGGGIANTFVAAQGHNVGKSLYEADLISEAKKLLETCDIPVPSDVRVASEFSETAAATLKSVTEIKDEEQILDLGDVSAERLAEILKNAKTILWNGPVGVFEFPNFRKGTEIIARAIADSDAFSIAGGGDTLAAIDLFGIADKISYISTGGGAFLEFVEGKKLPAVVMLEERAKQ

SEQ ID NO: 12902 - protein, 426 aa, Helicobacter pylori J99 [sequence omitted]

SEQ ID NO: 12903 - protein, 276 aa, Zea mays
MALYAFAAVWLCWVMWGYQMSFGQKLLPFWGKAGHTLGQGFLLSQAGLPATTHFFHGSGVVETGEITPLYPMASMVYFQCVFAAITLILLAGSLLGRMNFKAWMLFVPLWLTFSYTIGAFSIWGGGFLFHWGVIDYSGGYVIHLSSGVAGFTAAYWVGPRLTKDRERFPPNNVLLMLTGAGILWMGWAGFNGGDPYAANIDSSIAVVNTNICAATSLLVWTCLDVIFFKKPSVIGAVQGMITGLVCITPGAGLVQGWAAIVMGMLSGSIPWCTMMV

SEQ ID NO: 12904 - protein, 108 aa, Lemna gibba
PQASRFLFLKNKVRMICDCSAQPVRIIQDKRLSQPLSLCGSTLRAPHGCHAQYMKNMGSIASLVMSVTINDEGVDHGGEEQQKSRKLWGLVVCHHSSPRFIPSPRYAC

SEQ ID NO: 12905 - protein, 369 aa, Oryza sativa
  unsure (1)..(369): unsure at all Xaa locations
IDPMQIVRLEVGSETEIDKSKSIKTWLMHIFEESGNTDIEGVDSSNACYGGTAALLNXVNWVESKSWDGRYGLVVCTDSAVYAEGPARPTSGAAAIAMLIGPNAPISFESKYRASHMAHVYDFYKPDLASEYPVVDGKLSQTCYLMALDSCYRQYCTKYEKIVGEQFSISDAXTVSSIFSIITGEESYQSRDLEKASQQVAKPLYDIKVQPSTLLPKQIGNMYTASLYAALASVLYNKHASLDDQRIVMFSYGSGLTSTMFSLKLNNGQDPFSLSNIASVLNATEKLESRHMTLPEKFVETLKLMEHRYGAKDFETCKDTSLLPPGTFYLTRVDSMYRRFYERKADEEIAAAKAKYSNGHATNGYANGH

SEQ ID NO: 12906 - protein, 104 aa, Lemna gibba
PQASRFLFLKNKVRMICDCKAKPVRVAGEVSLCGSTLRAPHGCHAQYMENMGSVASLVMAVVVNDGEEEGEEQQQQRSRLWGLVVCHHGSPRFVPFPLRYACEF

SEQ ID NO: 12907 - protein, 385 aa, Helicobacter hepaticus ATCC 51449
MLHQFESYPFEKLRTLLAHSSPPSGEEIFSLTIGEPQFPTPTNIIQSWQSNASLLNKYPKSSGEDELKDAQLHFINKRYNLTLTKSQIIPTLGTREVLFNFPQFYLFDLPQPTIAYPNPFYQIYEGAAIASKAQVLLMNLTSENDFTPSLTPKELKKVHLVILNSPNNPTGRILDMQALTEWVKKALEYDFVIINDECYSEIYESSPPPSILQASIQAGNTSFKNIIALNSISKRSSAPGLRSGFIAGDAEILKAYNLYRTYLGCALPLPLQKAAAVAWKDMQTPESIRHIYAKNLALAREILELSTEQISPYTFYVWLKVDNDEAFCKFAYEKKGVLTLPGSYLGRENQGKGYVRIALVYDNNTTKKALLALKEAIKLYKQECQ

SEQ ID NO: 12908 - protein, 469 aa, Prosthecochloris vibrioformis
MQQSESSSAQFDVAVIGSGPGGYEAALHAARHGMKVCLVEKRSLGGVCVNWGCIPTKALLRSAEVYDLAKNPSEFGVNVSELSFDLAQAVKRSRKVSLKSSKGVEFMLKKAKVEVWRGEAVLTGSKGVKVTAEDGSERSLEAANIIVATGAQPRVIPGLEPDGKKIITSREALILKDVPESMIVVGGGAIGVEMAWFYAKAGAKVTIVELMPRLLPAEEAEVSEALKRSFEKVDITVQCGAKLGNVAISEFGVNADLLAEGKEPQKIEASCMLVAVGVTGVIDGLGLDAAGIETERGFIRTDELCRTSASGIYAIGDVRGGMLLAHKASAEAAIAVEAIAGKLPEPLSEPLIPRCVYAQPSVASVGLTEEAAIAAGYKVLVGRSQFAASGKANAYGQLEGFVKLVFNAETGKMLGGHLIGHDAVELIGELGLACRYGVTAEGLVGTVHAHPTLSETVREAAFSALPNKG

SEQ ID NO: 12909 - protein, 815 aa, Vibrio cholerae O1 biovar eltor str. N16961
MTKITRRGFLKGTGMAAGAMAFTSFSPLSIASDNARGKGVLTAGRMGPLLCEVQDGKMVATKNALAQTVPNSLQSTGPDQVYTQARVKYPMVRKGFLANPAAPKGVRGSDEFVRVSWDDAYRLIHEQHMRIRKTYGPASVFAGSYGWRSSGVLHKAQTLLQRYMSMAGGYSGHLGDYSTGAAQIIMPHVVGSIEVYEQQTTYPVVLEHSDVVVLWGLNPINTLKIAWSSTDCAGLEFFHQLKKSGKTIIGIDPIRSETIEFFGEQAQWIAPHPMTDVAMMMGIAHSLIKQGKHDKAFLDKYTVGYDRFEAYLLGKEDGVEKSAQWAEGICGVPAKQLETLAEIFSNHRTMLMAGWGMQRQQYGEQRHWMVVTLAAMLGQIGLPGGGFGFSYHYSNGGNPARDAGVLPAISAAIGGGSSAGNDWAISGATQSFPVARIVEALENPGGAYQHNGHTLTFPEIKMIWWAGGANFTHHQDTNRLIKAWQKPELIVISEPYWTAAAKHADIVLPITTTFERNDLTMTGDYSNQHLVPMKQVVEPQGEARNDFDVFADMAEMIRPGGRDVFTEGKTEMEWLYGFYKTAQKSGRAARVAMPNFSKFWEDNQLIEMKWNAKNAQFVRYADFRADPILNPLGTPSGKIEIYSKTLAGFNLPDCPAHPTWLAPDEFTGNAKQGELQLMTAHAAHRLHSQFNYAQLREEYAIANREPIWIHPEDAASRGIQTGDLVRAYNQRGQVLVGALVTDRIKQGSVCIHEGGWPDLDPQTGLCKNGGANVLTSDIPTSRLANGCAANSSLVRIEKYTGPALELTAFMPPKNG

SEQ ID NO: 12910 - protein, 286 aa, Zea mays
MGRASPRASAVAALTFRRDPTPQAGARRRQEEARRQRTQYPYVTGNSVIALKYKDGVIMACDTGASYGSTLRYKSVERIKAVGKHSIIGASGEFSDFQEILRYLDELTLSDHMWDDGNSLGPKEIHSYLTRVMYNRRNKFDPLWNSLVLGGVKKGPKGDEKYLGMVNMIGTHFEENHVATGFGNHMAIPILRAEWRDDMTFEEAVKLVEKCLVVLLYRDRSSINKFQIAKITSEGSTIYPPYSLKTYWGFTHFENPAQGAGGIMVDLCSACRVSCHELRGESNLCC

SEQ ID NO: 12911 - protein, 355 aa, Ustilago maydis 521
MSAPTTMKAVVIQGPEQVAVLERPIPKPGKGEVVVKVNLAALCGSDLHIYRGHQAVPRYDFVLGHEFVGEIHEAGEGIKNWKRGDKVVSPFTISCGDCFFCNRNQTGRCTQSRVFGSVPLDGAQAEYVLVPLADTTLYPIPDDVPEEIMLLTADIFPTGYFVANNAYTMLNEAERKDVTAVVIGCGPVGLCAITAACSFFKTVYAVDSVPERLAEAKKHGAIPLHLTDDDPVKTVKEATGGRGADVALEVVGAGPALDLAVSIVRNFGVISSCGIHTHTVTLQGPDLYNKNLRFQFGRCPVRAVFDPAVKLLSKHHDLFASFIQHTRPIEDAPEYYKLFNDRKVLKTVFKMNHAQ

SEQ ID NO: 12912 - protein, 415 aa, Pseudomonas syringae pv. tomato str. DC3000
MSEHISESISFVHSMTLSHGRNAEVWDTTGKRYIDFVGGIGVLNLGHCNPQVVKAIQDQAARLTHYCFNATPHDPYIQFMRQLTQFVPVSYPLSGMLTNSGAEAAENALKIVRGATGRSAVIAFDGGFHGRTLATLNLNGKVSPYKQKVGVLPGPVFHIPFPSKDNGVSTEQALKALERLFSVEIDVNDVACIIFEPVQGEGGFLAMQADFAQALRAFCDEHGIVLIADEIQSGFGRTGQRFAFTRLGIEPDLILLGKSIAGGIPLGAVVGRKALIDSLPKGGLGGTYSGNPIGCAAGLASLAQMTDENLSTWGEQQESAIVSRYNAWQASNLSPYLGRLTGVGCMRGIELITPDGNPGTRQLAELLGAARDAGLLLMPSGKSRHIIRLLIPLTIEPDVLHEGLDIFERCLAALA

SEQ ID NO: 12913 - protein, 408 aa, Sinorhizobium meliloti 1021
MPRLIPTSHADLMPSRDLLPMLERKSRSDRAETTAAAHGVATDPAFGSVVPPLYLSSTYEFAGFDTPRAYDYGRSGNPTRDLLAQALAKLEGGADAVVTPSGMAALDLLLGRLRRNHLVLAPHDCYGGTLRLLKARADLGHLTFRLTDQRDFGGFEAALSDAPALVLIESPSNPLMRVTDIARLSTLAKAAGSAVAVDNTFLSPALQQPLSLGADYAIHSATKFLNGHSDVIAGAVIAAEPQEAHDLKRWANVTGAVAAPFDAWLTLRGLRTLFARMSSQERSAMTIAEYLDAHPAVRHVHYAGLPDHADHEVARRQQRGFGAMMSFELEGGVPAVRRFLAHIRCFTLAESLGGVESLVAHPATMTHLDMGPEARERAGIRDELLRLSIGLEHIDDLMEGLELGLGAC

SEQ ID NO: 12914 - protein, 364 aa, Hypocrea jecorina
MKGLILVGGFGTRLRPLTLTLPKPLVEFCNKPMIVHQIEALVAAGVTDIVLAVNYRPEIMEKFLAEYEEKYNINIEFSVESEPLDTAGPLKLAERILGKDDSPFFVLNSDVICDYPFKELLEFHKAHGDEGTIVVTKVEEPSKYGVVVHKPNHPSRIDRFVEKPVEFVGNRINAGMYIFNPSVLKRIELRPTSIEKETFPAMVADNQLHSFDLEGFWMDVGQPKDFLSGTCLYLSSLTKKGSKELTPPTEPYVHGGNVMIHPSAKIGKNCRIGPNVTIGPDVVVGDGVRLQRCVLLKGSKVKDHAWVKSTIVGWNSTVGRWARLENVTVLGDDVTIGDEIYVNGGSVLPHKSIKANVDVPAIIM

SEQ ID NO: 12915 - protein, 177 aa, Glycine max
  unsure (1)..(177): unsure at all Xaa locations
ALSMISSSAVTTVYRACAGMVAPFTVLKSMAGFPTRKTNNDITSIANNGGRVHCMHVWPPSVKKKFDTLFFLPHLADAQLANGSEYLPMMGWISCLQFKLEHGSVYREHNRSPGYYYGLYCTMSKLPIFACTDASHASKDLLEAXTVFPDGFLRIIRFHNVRQEHCIIFISYNRSCF

SEQ ID NO: 12916 - protein, 828 aa, Salmonella typhimurium LT2
MKLSRRSFMKANAVAAAAAAAGLSVPGVARAVVGQQEAIKWDKAPCRFCGTGCGVLVGTQQGRVVACQGDPDAPVNRGLNCIKGYFLPKIMYGKDRLTQPMLRMKDGSYHKDGEFTPVSWEQAFDVMEEKFKTSLKEKGPEAIGMFGSGQWTIWEGYAAAKLFKAGFRSNNIDPNARHCMASAVVGFMRTFGMDEPMGCYDDIEQADAFVLWGSNMAEMHPILWSRITNRRLSDPNVKVAVLSTFQHRSFELADNGIVFTPQSDLVILNYIANYIIQNNAVNQDFFTKHVNLRKGATDIGYGLRPTHPLEKAAKNPGSDASEPMSFDEYKAFVAEYTLDKTAEMTGVPKDQLEQLAQLYADPNKRVISYWTMGFNQHTRGVWANNLVYNLHLLTGKISQPGCGPFSLTGQPSACGTAREVGTFSHRLPADMVVTNEKHRDICEKHWQIPAGTIPAKVGLHAVAQDRALKDGKLNVYWVMCNNNMQAGPNINEDRMPGWRDPRNFIIVSDPYPTVSALSADLILPTAMWVEKEGAYGNAERRTQFWRQQIKAPGEAKSDLWQLVQFSRRFKTEEVWPEALLAQKPELRGKTLYDVLFATPAVSKFPLSELKEDQLNDESRELGFYLQKGLFEEYAWFGRGHGHDLAPFDDYHNARGLRWPVVEGKETQWRYSEGNDPYVKAGEGYKFYGKPDGKAVIFALPFEPAAESPDNEYDLWLSTGRVLEHWHTGSMTRRVPELHRAFPEAVVFIHPLDAKARDLRRGDKVKVSSRRGEVISIVETRGRNRPPQGLVYMPFFDAAQLVNNLTLDATDPLSKETDFKKCAVKLAKV

SEQ ID NO: 12917 - protein, 400 aa, Bacillus subtilis
MNNLAFLFPGQGSQFVGMGKPFWNDFVLAKRLFEEASDAISFDIKKLCFNGDMNELTKTMNAQPAILTVSVIAFQVYMQEIGIKPRFLAGHSLGEYSALVCTGALSFHDAVTLVRQRGILMQNADPQQQGTMAAVTQLSLQTLQEICSKVSTEECPADVACMNSDQQHVVSGHREAVERVIRMAEEKGAKYTYLNVSAPFHSSMIRSASEQFQTVLHQYSFRDAAWPIISNVTAHPYSSGNSINEHLKQHMTMPVRWAESIHYLLLQGVTEVIEMGPNNVLSGLLKKITNHIAPYPLGQTSDIHQLSNSAVRNKLVVRLRKKQLNKLMIQTVIARNYNKDSLAYSNMTTPLFTQIHELKERMERHGDELSEQELEHSIHLCKLICKAKQLPAWAQLRILK

SEQ ID NO: 12918 - protein, 313 aa, Triticum aestivum
  unsure (1)..(313): unsure at all Xaa locations
MGRPPCCDKEGVKKGPWTPEEDLVLVSYVQEHGPGNWRAVPTRTGLMRCSKSCRLRWTNYLRPGIKRGNFTDQEEKLIVHLQALLGNRWAAIASYLPERTDNDIKNYWNTHLKRKLQAXGDAAAKPAAQRPASSSKGQWERRLQTDINMARRALREALTTLDDIKPQQPDAADGVNGPAAAGADSGSPAASSSSAASLSQCSPSAAGPYVLTTANISRMLDGWASKGRSAGPAADSPSGSSASEVSYGSGAAARALGSAFEYDRKPAVLAPDQTQLNAIETWLFADDNNNNDHHGHAAGGSGLLGVPAMGYPF

SEQ ID NO: 12919 - protein, 296 aa, Zea mays
  unsure (1)..(296): unsure at all Xaa locations
AAFFAKHSVSALLEQSDYWLEYQGRLTEPMSYDAETDRYKPISWESAFDLIGKHLNALPNPDMAEFYTSGRASNEAAYLYQLFVRAYGTNNFPDCSNMCHEASGVALAQSVGVGKGTVTFDDFEHADAIFVWGQNPGTNHPRMLEPLREAVKRGAQVVCINPLKERGLERFQHPQHPLEMLTNGDKPTNTAYFRPALGGDMAILRGMAKFLLLWERQAQAEGKEAVFDHDFLNEHTANVLDYLGKIDDTSWDEIVEQSGLTLVEIEQAARMYAKGKNVIMCWAMGITXHRHSVPTI

SEQ ID NO: 12920 - protein, 151 aa, Rhizobium leguminosarum
MMRRLLLAFALLLMAAPAFAVNPDEVLADPALETRARALSAELRCMVCQNQSIDDSNADLAKDLRLLVRERITDGDSDEAVLNYIVSRYGEFVLLKPRVGMKTVLLWGAPVLLVLAGGLSLLVFARKRAGKPTGSKLTADEQARLSELLKK

SEQ ID NO: 12921 - protein, 174 aa, Dendrobium grex Madame Thong-IN
MGRGRVEMKRIENKINRQVTFAKRRTGLLKKAYELSVLCDVEVALIIFSNRGKLYEFCSSRSMLKTLEKYQKCSDGAPEMTMTSRETQSSQVEYLKLKSQVEALQRSQRNLLGEDLNPLGGKDLDQLERQLEASLKQIISTRMQYMLDQLGDLQQRELLLFETNKSLGTRVSAL

SEQ ID NO: 12922 - protein, 404 aa, Enterococcus faecium
MNTLPINTGDTAFMILCTAMVCLMTPGLAFFYGGLARKNNILTIMSQSFLSVGITTIMWVFGGFGLAFGRDIGGVIGNPADFFLMRHVTSFPNMFHGATIPFLMFFLYQLMFIVITVPLMTGAFAGRLNLKGYIILVIFWNLLIYFPVCHWIWGGGFLDQMGFRDFAGGAVIHTTAGFGSLACILTLGQRKIPLGERSQHSSLMAAAIGTGLLWFGWFGFNSGGALRADEQAVNAFGSTFIALAFAMITWLIIAKVKGNGFDFVDVLTGSVAGLAAITPCAGYVEAKSAMLIGIIAGIVCHAAVDFRKKKQWDDALDVWGVHGMGGFTGTILIGIFASNSHLLTNPSSWYFLGIQVIGVIITAVYAYVLTTVILKSAMHFTTITTTKEEQEEGLDFFFFGNKLN

SEQ ID NO: 12923 - protein, 288 aa, Azospirillum brasilense
MKGIILAGGSGTRLYPLTQVTSKQLLPVFDKPMIYYPLSTLMLAGIRDILIITTPQDQSQFQRLLGDGSQWGISLTYAEQPNPEGLAQAFLIGREFVGTDSVCLILGDNIFFGHDLEPALVRAAGRTDGATVFGYHVRDPERYGVVSFDAEGRPNAIEEKPVQPKSNYAVTGLYFYDNSVLDVAATIKPSPRGELEITDVNNVYLEQRRLAVEKLGRGYAWFDTGTHQSLLQAAEFVQTIEARQGLKIASPEEIAWRKGFIDGEQLARIARPLAKSGYGSYLLHLLTE

SEQ ID NO: 12924 - protein, 247 aa, Dendrobium grex Madame Thong-IN
MGRGRVQLKRIENKINRQVTFSKRRSGLLKKAHEISVLCDAEVALIVFSNKGKLYEYSTDSSMEKILERYERYSYAERALFSNEANPQADWRLEYNKLKARVESLQKSQRHLMGEQLDSLSIKELQRLEQQLESSLKFIRSRKTQLILHSISELQKMEKILLEQNKTLEKEIIAKEKAKALVQHAPWEKQNQSQYSSALPPVISDSVPTPTSRTFQARANEEESPQPQLRVSNTLLPPWMLSHMNGQ

SEQ ID NO: 12925 - protein, 429 aa, Glycine max
  unsure (1)..(429): unsure at all Xaa locations
VHARGASAKGFFEVTHDISHLTCADFLRAPGVQTPVIVRFSTVIHERGSPETLRDPRGFAVKFYTREGNFDLVGNNLPVFFVRDGMKFPDMVHALKPNPKNHIQENWRILDFFSHFPESLHMFTFLFDDLGVPQDYRHMDGFGVNTYTLINKAGKAVYVKFHWKTTSGIKCLLEEEAIKVGGANHSHATQDLHDSIAAGNYPEWKLFVQTIDPEHEDKFDFDPLDVTKTWPEDIIPLAPVGRLVLNKNIDNFFAENEQLAFCPAIVVPGVYYSDDKMLQTRIFSYADSQRHRLGPNYLQLPANAPKCAHHNNHHEGFMNFIHRDEEVNYFPSRYDPVRHAETFPIPPAICSGRREKXGIEKENNFKQPGERYRSWAPDRQDRFNRRWVDALSDPRVTHEIRSVWISYWSQADRSLGQKIASRLSMRPNI

SEQ ID NO: 12926 - protein, 414 aa, Arabidopsis thaliana
MENGATTTSTITIKGILSLLMESITTEEDEGGKRVISLGMGDPTLYSCFRTTQVSLQAVSDSLLSNKFHGYSHTVGLPQARRAIAEYLSRDLPYKLSQDDVFITSGCTQAIDVALSMLARPRANILLPRPGFPIYELCAKFRHLEVRYVDLLPENGWEIDLDAVEALADENTVALVVINPGNPCGNVYSYQHLMKIAESAKKLGFLVIADEVYGHLAFGSKPFVPMGVFGSIVPVLTLGSLSKRWIVPGWRLGWFVTTDPSGSFKDPKIIERFKKYFDILGGPATFIQAAVPTILEQTDESFFKKTLNSLKNSSDICCDWIKEIPCIDSSHRPEGSMAMMVKLNLSLLEDVSDDIDFCFKLAREESVILLPGTAVGLKNWLRITFAADATSIEEAFKRIKCFYLRHAKTQYPTI

SEQ ID NO: 12927 - protein, 220 aa, Dendrobium grex Madame Thong-IN
MGRGRVELKRIENKINRQVTFAKRRNGLLKKAYELSVLCDAEVALIVFSNRGRLFEFCSSTSMTKTLERYQKCSYNASESAVPSKDAQNSYHEYLTLKAKVEYLQRSQGNLLGEDLIELSSKELDQLELQLEMSLKQIRSTKTQLMLDQLCDIKRKEQMLHEANRALSMKLKEDGPEIPLELSWPGGETNGSSERQQPQSDKFFQPLPCSNPSLQIGYSP

SEQ ID NO: 12928 - protein, 308 aa, Ralstonia eutropha JMP134
MSVLLTFPGQGSQRAGMLADLPDHRAVAAVLAEAAEVLQTQPADMDTASRLQSTVWVQLCLLTAGVAMARCLAAEGGHADAVAGLSIGAYAAAVSAEVLPFSDALRIVRLRGELMEQAYPNGYGMTAILGLERMRLEPLVAQIHTPQTPVYLANFNAPAQIVIAGSVPAMEAVAALAIASGAQAAKRVAIHVPSHCALLDDAAAELGKEMAHIAMSPPRLRYFSASLARELRDPRRIADDLALNMAVPVRWHETMLLAYATGARVVIEAPPGDVLTRLAQPVFADGIVMAADRTRVDSLAAIMRRGQP

SEQ ID NO: 12929 - protein, 146 aa, GIBBERELLA ZEAE PH-1
MPARSKEEQPQAEDTNMEDAPASAQPETNDEEVEDEEEEEEIEAQRVRILPGSTDTAASFEFTDEGHTLGNALRYIIMKNPDVEFCAYSIPHPSEPKMNIRIQTYSGTAVDALKKGLVDIQEVCDVVADEFWTKREAYNAEQGIDR

SEQ ID NO: 12930 - protein, 229 aa, Arabidopsis thaliana
MMGSVELNLRETELCLGLPGGDTVAPVTGNKRGFSETVDLKLNLNNEPANKEGSTTHDVVTFDSKEKSACPKDPAKPPAKAQVVGWPPVRSYRKNVMVSCQKSSGGPEAAAFVKVSMDGAPYLRKIDLRMYKSYDELSNALSNMFSSFTMGKHGGEEGMIDFMNERKLMDLVNSWDYVPSYEDKDGDWMLVGDVPWPMFVDTCKRLRLMKGSDAIGLAPRAMEKCKSRA

SEQ ID NO: 12931 - protein, 111 aa, Hordeum vulgare
ATDIPQASRFLFMKNKVRMICDCAASPVKLIQDGNLSQPISLCGSTMRAPHGCHAQYMANMGSIASLVMSVTVNEDDDEDGDTGSDQQPKGRKLWGLVVCHHTSPRFVLPL

SEQ ID NO: 12932 - protein, 110 aa, Muscari sp.
YSATDIPQASRFLFKQNRVRMIADCHAVPVRVVQDESLAQPLCLVGSTLRAPHGCHAQYMANMGSVSSLAMSVLSTGARGRTRNTMKLWGLVVCHHTSQRCIPFPLRYAC

SEQ ID NO: 12933 - protein, 396 aa, Methylobacillus flagellatus KT
MNPDLYKLQPYPFQRLRDLFAGTVPNPEYAPINLSIGEPKHPTPTLISSALAENLSGLATYPTTIGTARLRETISGWIAQRYQVPAPNPDTEIIPVNGSREALFAFAQTVVDSSLPQPVVISPNPFYQIYEGAALLAGAEPYFLNTLPGNDFSMALDAVPESVLQRTQLLYVCSPGNPSGKVLSIEQWKEIFAFSDRYGFVIAADECYSEIYFDEADPPLGALQAARLLGRDYSRLVVFSSLSKRSNVPGMRSGFVAGDAKLLEKFLLYRTYHGCAMNPAVQAASIAAWQDEVHVVENRRLYAEKFAAVTPLLQDVLDVQMPDAAFYLWAYTGQADTEFALKLYREYNVTVLPGSFLAREAHGVNPGQGFIRIALVASLAECVEAAERIHQLCVAS

SEQ ID NO: 12934 - protein, 176 aa, Triticum aestivum
  unsure (1)..(176): unsure at all Xaa locations
MAPTVMASSATSVAPFQGLKSTAGLPVSRRSNGSCLGSVSNGGRIRCMQVWXPIEGIKKFETLSYLPPLSTEALLKQVDYLIRSKWVPCLEFSKVGFIFREHNASPGYYDGRYWTMWKLPMFGCTDATQVINEVEEVKKEYPDAYVRIIGFDNMRQVQCVSFIAFKPPGCEESGKA

SEQ ID NO: 12935 - protein, 170 aa, Zea mays
MAPTVMMASSATAVAPFQGLKSTASLPIARRSSRSLGNVSNGGRIRCMQVWPAYGNKKFETLSYLPPLSTDDLLKQVDYLLRNGWIPCLEFSKVGFVYRENSTSPCYYDGRYWTMWKLPMFGCNDATQVYKELQEAIKSYPDAFHRVIGFDNIKQTQCVSFIAYKPPGSD

SEQ ID NO: 12936 - protein, 353 aa, Nostoc punctiforme PCC 73102
MVSTNPQSKFNNPTQFIEGWYWTLPSKKLKIGKVKAITLLGRNLAIYRGVSSQVVAIDAYCPHMGAHLAEGKVEGDGIRCFFHNWKYDSRGICVDVPSLGKPLPVCIKTWHTAEKYGMIWIWVGQEKPSLLPFVPELEQADCDYILGTKFVKNCHPNVLLINAIDAHHFNTVHNLPLEIIFDSQNFSPNAITFSNTTRGGDDSWLIRLIRPLYRNEVTYSMCYWYGSTGTVTLGPDFLHFYIIFTLRMIEGGKTEGQTILVTPKRPGFWGWVLNRGLLWLTQQVGNYFAKGDTQVFQTIQFDLKTPTKADQSILEFIQHVNHQKALTWATWDTVNYPNIQTLSTPSPEHGFKI

SEQ ID NO: 12937 - protein, 184 aa, Triticum aestivum
  unsure (1)..(184): unsure at all Xaa locations
SSAAAAGKRMAAPQQVRAVPLARALRLRTRASAAAPPETSRRALLGLTEPELRQLAVDLGQQSYRGKQLHDLVYKNRAKQVEEFAYVPKVFREALVGAGWKVGRSPVHHAVTATDGTTKILLKLEDNRLVETVGIPVDDRGTPRLTACVSSQVGCPLRCSFCATGKGGFARNLKGHEIVEQXLP

SEQ ID NO: 12938 - protein, 110 aa, Lactobacillus delbrueckii subsp. lactis
  unsure (1)..(110): unsure at all Xaa locations
LQPDTKIRTFAIGMDQNPIDLKYAREVADYLGTDHTEFIMTREDVLGVLREVIYTLETWDITTIRASIGMYILCKKIHETTDLKVILTGECSDELFGYKYXDFAPSPEEF

SEQ ID NO: 12939 - protein, 212 aa, Eucalyptus globulus
FVVKIPDGLESEQAAPLMCAGVTVYSPLVRFGLKQSGLRGGILGLGGVGHMGVKIAKAMGHHVTVISSSDKKRTEALEHLGADAYLVSSDENGMKEATDSLDYIFDTIPVVHPLEPYLALLKLDGKLILTGVINAPLQFISPMVMLGRKSITGSFIGSMKETEEMLEFCKEKGLTSQIEVIKMDYVNTALERLEKNDVRYRFVVDVVGSKLD

SEQ ID NO: 12940 - protein, 518 aa, Ustilago maydis 521
MNAALSSVRSRAFEAISQLSAGSRSSLPTSSSRSNDKPRRSLDRPRLFKRHGSNVDHIHTQLFDKAVAPPSRSTVLFVLGCLAWYISSSLSSNTSKALLSKGRNHVDSGLPQVRPPAFPYPVTLTLIHFGFVNVCCAICASRRMLGHRALTRLVPPSLSRVAEVGQLAFFNVVGQALSSLAIARVPVSTVHTIKALSPLFTVLSYTYLFNVSYSSKTYMSLFPLTAGVMMACTGFAFNADDMVGFAAALASTLVFVAQNIYSKKLLRKGERSEGEKMDKINILFYSSGCSIVLMIPMALYYDGSSLLFRPSWNASEAYPYDRRTFVLSWLLCNGLVHFAQNILAFNVLSMVSPVTYSIASLLKRVFVIVLAILWFRQSVTRLQWFGIGLTFYGLWMYNDSKTKDDVDKGDKKVERQQGVGNHAILPLTSASTASTASGASGWTDALHNRPHPFAPSTSAYAFAAQQPSAHAAPARLHQPVYPPAPTKGWNDIPDSTLTSYINDPTKSLPSPPDSDKEV

SEQ ID NO: 12941 - protein, 223 aa, Ustilago maydis 521
MATATSHNKKSSAVKRILSEARELGCDSSDLYTAAPLEDNIFEWHFTLRGPANTEFADGLYHGRILLPAEYPMRPPNLMLLTPNGRWELNKKICLTFTGFHEEMWQPAWGIRTALLGLQTFMTAKAEAAVGIGSLDYPVEARKRMASESRRWRCDICEKSTLEMLPDADEQGREKRQEALPEGLQLLLPLLLQHHNSTTDHLQQLPLQRPQPRLRLQPLRLHP

SEQ ID NO: 12942 - protein, 240 aa, Zea mays
  unsure (1)..(240): unsure at all Xaa locations
YDSIAAGSFPEWTLYVQVMEPDTEEQYDFDPLDDTKTWPEDLLPLRPVGRLVLDRNVDNFFNENEQLAFGPGLVVPGIYYSDDKMLQCRVFAYADTQRYRLGPNYLMLPVNAXRCAHHNNHYDGAMNFMHRDEEVDYYPSRHAPLRQAAPPTPXLPPRPVAGRREKATIRKPNDFKQPGERYXRPGHADRQDRFVRRFADSLGHPKVSQELRSIWIDLLAKCDASLGMKIATRLNMKANM

SEQ ID NO: 12943 - protein, 514 aa, Zea mays
  unsure (1)..(514): unsure at all Xaa locations
MTIARRLLRSNASAQAISLLKHVTGTASLQGHAHSPLDASVRHFSSAPSAQSDTTEENGFKGHGMLAPFTAGWQSNDLHPLIIERSEGSYVYDINGNKYLDSLAGLWCTALGGSEPRLVKAATEQLNNLPFYHSFWNRTTKPSLDLAQEILSMFTAREMGKVFFTNSGSEANDSQVKLVWYYNNALGRPDKKKFIARSKAYHGSTLISASLTGLPALHQKFDLPAPFVLHTDCPHYWRYHLPGETEEEFATRLATNLEDRVLKEGXETIAAFIAEPVMGAGGVIPPPKTYFDKVQAVVKKYDILFIADEVITAFGRLGTMFGCDYYNIKPDLVSLAKALSNAYVPIGATLVSPEISEVIHSQSNKLGSFAHGFTXYGHPVACAVAIEALKLYRERDIPGHVKQIAPKFQDGIRALADSPIIGEIRGLGMIMGTEFTNNKSPTDLFPAEWGVGAIFGEECQKRGMLVRVAGDAIMMSPMLIMTPGEVDELVSIYGEALRATEERVSDLKMKSEKN

SEQ ID NO: 12944 - protein, 570 aa, uncultured bacterium
MRMPASLKLALPLLVWLAFFSLDAQAQALDSAGLFDDVLNRYNAAASGWAGVITDAASWLFWTLVVISMVWTFGMMALRKADIGEFFAELVRFTIFTGFFWWLLTNGPNFASTIYASLRQVAGNATGLGNALSPSGIVDVGFAIFYKVMDQSSVWSPVDSMAGILMAVAILVVLALTGVNMLLLLASGWVLAYGGVFFLGFGGSRWTSDMAINYYKTVLGVAAQLMATVLLVGIGKTFLDDYYARMSAGINLKEMGVMLIVCVILLALVNKIPALIAGIITGASVGGAGIGNFGAGAALGAAGMAAAAAATGGAALAAGAASAAGGASAVMAAFSKANGNVSSGSDVMSMLGGGGGGDSGGGGGGGGDAGTSTPLGQAAGFGGGGGGGGGGGGESKGGDKAGGDKAGSSSKGGEGGGQKASGGGDAGGAKGGQGGGQQGQGAGQGGQQAAPGSTDPGLLATAASALGKAGRVTADAGANLAKGAGAVAAAKAASLRDAAAERIADTTGGKIAAAIKAQGSSSADAATDTPDQQPSPTFGDNSLAGATSADPESEVAAFANRDGDRSDKSA

SEQ ID NO: 12945 - protein, 250 aa, Triticum aestivum
MSRRYDSRTTIFSPEGRLYQVEYAMEAIGNAGSALGILAADGVVLVGEKKVTSKLLQSSRSAEKMYKIDSHLACAVAGIMSDANILINTARLHAQRYALSYQEPIPVEQLVQSLCDTKQGYTQFGGLRPFGVSFLFAGWDKNHGFQLYMSDPSGNYGGWKAAAVGANSQAAQSMLKQDYKDGMTREEAVALALKVLSKTMDSTSLTADKLELAEVFVQPGTWEVQYQVCSPDAMGKLLAKAGLTQPAPEA

SEQ ID NO: 12946 - protein, 682 aa, Amycolatopsis mediterranei
MTQVETHCPYCALQCGMSLEGTRVTPRDFPVNAGGLCQKGWTSGSLLTSPRRLTTPMLRVNGALEPVSWDFALDHVARKLAEIQGEHGPDGVAIFGGGGLTNEKAYLLGKFARVALGTSQIDYNGRFCMSSAAAAGIKAFGADRGMPFPVTDLKNADVVLLAGANPAETMPPFTQHLRGTDLIVVDPRRTPTAELASLHLAPAPGTDLALALGILHAVVESGHLDRSYVDDRTSGFAEMWRIAASWWPERAERVTGVSAADMRLAAEKLAAARNAYVLTARGTEQHATGTATVGAWINLALSLGLPGRPGSGYGCLTGQGNGQGGREHGQKADQLPGYRKLDDPAAREYVASVWGVDADSLPGPGRSATELLEALGQENGPKALMVFGSNVVVSAPRSQRVQDRLSGLDFLVVADFVLSETAALADVVLPVTQWAEEDGTLTNLEGRVLLRRKALTPPPGVRSDLDVLNGLALRLGQPENRFPADAETVFEELRIASKGGIADYSGVSYDRLRAGEALHWPVPADDHPGTPRMFLESFAHPDGRARFVPVEHTGPAELPDDEFPLQATTGRVLQHYQSGAQTRLIGELNDVVPEVFVEVHPDTAKRAGLEEGDRAVVRSRRGETVARVRFTQSLKPDLIFLPFHFPGEQRANLFTNPALDPVSRMPEFKVCAVSLSTVDGAA

SEQ ID NO: 12947 - protein, 339 aa, Pseudomonas aeruginosa PAO1
MSTVDPVEQLLANGLKNLWYPICPVGFIEDKPVSLRRLGYKLAVWRDTDGTLHALEDHCPHRGAPLSRGVNLGDRLQCPYHGVEVRCDGVTARVPGSPGCKLEGSQATRFFHITEAAGAVWLYNSAGNVEEAPPLVLPEQLTDPEFSHFLCYTEWRGDYRYVLDNVMDPMHGTYLHKQSHSMSEGESQARFVTRDTDTGFIFEKDGQRGVNFDWTEWADTGMHWMRLEIPYPKTGGPGGNFHIVGSYTPIARDLCAVFHWRCRPLTGWQRDTWRFLYRNRLEARHWAVLEQDREMLEFMEPDANQRENLYQHDLGLVRLRRHLKNLAKAQLELIEARQL

SEQ ID NO: 12948 - protein, 495 aa, Alternaria alternata
MTSVKLSTPQTGEFEQPTGLFINNEFVKAVDGKTFDVINPSTEEVICSVQEATEKDVDIAVAAARKAFNGPWAKETPENRGKLLNKLADLFEKNADLIAAVEALDNGKAFSMAKNVDVPAAAGCLRYYGGWADKIEGKVVDTAPDSFNYIRKSLLVFAVRSSMELPILMWSWKIGPAIATGNTVVLKTAEQTPLSAYIACKLIQEAGFPPGVINVITGFGKIAGAAMSAHMDIDKIAFTGSTVVGRQIMKSAAGSNLKKVTLELGGKSPNIVFADADLDEAIHWVNFGIYFNHGQACCAGSRIYVQEEIYDKFIQRFKERAAQNAVGDPFAATLQGPQVSQLQFDRIMGYIEEGKKSGATIETGGNRKGDKGYFIEPTIFSNVTEDMKIQQEEIFGPVCTISKFKTKADVIKIGNNTTYGLSAAVHTSNLTTAIEVANALRAGTVWVNSYNTLHWQLPFGGYKESGIGRELGEAALDNYIQTKTVSIRLGDVLFG

SEQ ID NO: 12949 - protein, 402 aa, Brassica oleracea
MQSSAVFSASPSLPLLKPGRLSLRHPVTASSNLSVSPPNVVSVPPLPRRSWRLASSDSPLRAWSGLPSVSSPSLDTNRFKTAATAVPEEGEGSGKMTKVLELGLLFAMWYLFNIYFNIYNKQVLKALHAPMTVTLVQFAVGSVLITFMWALNLYKRPKISAAQLAAILPLAVVHTLGNLFTNMSLGKVSVSFTHTIKAMEPFFSVVLSAMFLGEVPTPWVIGSIIPIVGGVALASVTEVSFNWAGFLSAMASNLTNQSRNVLSKKVMVKKDDSLDNITLFSIITLMSLFLMAPVTFFSEGIKFTPSYIQSAGVNVQQIYTKSLIAALCFHAYQQVSYMILARVSPVTHSVGNCVKRVVVIVSSVIFFKTPVSPVNAFGTGIALAGVFLYSRVKRIKPKPKTA

SEQ ID NO: 12950 - protein, 785 aa, Escherichia coli O157:H7 EDL933
  unsure (1)..(785): unsure at all Xaa locations
MASSALTLPFSRIAHAVDSAIPTKSGEKVIWSACTVNCGSRCPLRMHVVDGEIKYVETDNTGDDNYDGLHQVRACLRGRSMRRRVYNPDRLKYPMKRVGARGEGKFERISWEEAYDIIATNMQRLIKEYGNESIYLNYGTGTLGGTMTRSWPPGNTLVARLMNCCGGYLNHYGDYSSAQIAEGLNYTYGGWADGNSPSDIENSKLVVLFGNNPGETRMSGGGVTYYLEQARQKSNARMIIIDPRYTDTGAGREDEWIPIRPGTDAALVNGLAYVMITENLVDQAFLDKYCVGYDEKTLPASAPKNGHYKAYILGEGPDGVAKTPEWAXQITGVPADKIIKLAREIGSTKPAFISQGWGPQRHANGEIATRAISMLAILTGNVGINGGNSGAREGSYSLPFVRMPTLENPIQTSISMFMWTDAIERGPEMTALRDGVRGKDKLDVPIKMIWNYAGNCLINQHSEINRTHEILQDDKKCELIVVIDCHMTSSAKYADILLPDCTASEQMDFALDASCGNMSYVIFNDQVIKPRFECKTIYEMTSELAKRLGVEQQFTEGRTQEEWMRHLYAQSREAIPELPTFEEFRKQGIFKKRDPQGHHVAYKAFREDPQANPLTTPSGKIEIYSQALADIAATWELPEGDVIDPLPIYTPGFESYQDPLNKQYPLQLTGFHYKSRVHSTYGNVDVLKAACRQEMWINPLDAQKRGIHNGDKVRIFNDRGEVHIEAKVTPRMMPGVVALGEGAWYDPDAKRVDKGGCINVLTTQRPSPLAKGNPSHTNLVQVEKV

SEQ ID NO: 12951 - protein, 103 aa, Lycopersicon esculentum
TDIPQAARFLLQNRVRMICDCNAQPVKVVQSEELKQPICLVNSTLRSPHECHSSNMANMGSISSLVMAVLINSGDSMKLWGLIVCHHTSPRYVPFPLRYACEF

SEQ ID NO: 12952 - protein, 112 aa, Lycopersicon esculentum
TDIPQASRFLFKQNRVRMIVDCTAIPVRVIQDESLMQPLCLVGSTLRAPHGCHPQYMVNMGNVASLTLAVVINGNDDEVVGGRNAMRLWGLVVGHHSSARFIPFPLRYACEF

SEQ ID NO: 12953 - protein, 113 aa, Lycopersicon esculentum
TDIPQASRFLFKQNRVRMIVDCHATPVRVTQDESLMQPLCLVGSTLRAPHGCHAQYMANMGSIASLTLAVIINGNDEEAVGGGRNSMRLWGLVVGHHTSVRSIPLPLRYACEF

SEQ ID NO: 12954 - protein, 317 aa, Burkholderia fungorum LB400
MTTALDQLKQYTTVVADTGDFQQLAQYKPQDATTNPSLILKAVQKDDYKPLLEKTVKAHASKPVGAIIDQLLIAFGTEILKIIPGRVSTEVDARLSFDTEGSIAKGRELIALYKEHGIGRERVLIKLASTWEGIRAAEVLQKEGIHCNMTLLFSLAQAAACAEAGAQLISPFVGRIYDWYKKNAGSAWDEAKDGGANDPGVKSVRRIYAYYKKFGYKTEVMGASFRTPGQILELAGCDLLTISPDLLQKLHESTEKVERKLSPDIAKESDIERVPVDESSFRFLVNDEAMATEKLAEGIRAFAADAIKLEKLIDALR

SEQ ID NO: 12955 - protein, 109 aa, Quercus turbinella
HYSATDIPQASRFLFKQNRVRMIVDCNAMPVGVIQDDRLMQPLCLVGSTLRAPHGCHAQYMANMGSIASLAMAVIINGNDEEGVGRRSAMRLWGLVVCHHTSARCIPFP

SEQ ID NO: 12956 - protein, 102 aa, Triticum aestivum
  unsure (1)..(102): unsure at all Xaa locations
MAPTVMASSATSVAPFQGLKSTAGLPVXSRRSNGASLGSVSNGGRIRCMQVWPIEGIKKFETLSXLPPAQHGGLLKQVDYLXIRSKWVPCLRXXAXLGFNFR

SEQ ID NO: 12957 - protein, 368 aa, Prunus cerasus
MGKGGMSSQGGALEPMDGEQENMAAWLVGVNTLKIQPFKLPTVGPNDVRVKIKAVGICGSDVHYLKTMKCADFIVQEPMVIGHECAGIVDEVGSMVKNLLPGDRVALEPGISCWRCEQCKGGRYNLCPDMKFFATPPVHGSLANQIVHPADLCFKLPENVSLEEGAMCEPLSVGVHACRRANIGPETNVLVIGAGPIGLVSVLSARAFGAARIVIVDVDDERLSIAKSLGADDSVKVSTNPQDLENEVSKISKAMRGGVDVSFDCVGFNKTMSTALSATRPGGKVCLVGMGHGVMTVPLTPAAAREVDVVGIFRYKNTWPLCLEFLRTGKIDVKPLITHRFGFTQKEIEEAFETSARGGNAIKVMFNL

SEQ ID NO: 12958 - protein, 481 aa, Salmonella typhimurium LT2
MTIWENAMQYQLLINGVLVDGEGERQSVYNPATGEVILEIAEASPAQVDAAVQAADNAFAEWGQTTPKARAECLLKLADSIEQNALEFARLESQNCGKPLHCVINDEIPAIVDVFRFFAGAARCLSGLAAGEYLEGHTSMIRRDPIGVVASIAPWNYPLMMAAWKLAPALAAGNCVVIKPSEITPLTALKLAVLAKDIFPPGVLNVLFGRGQTVGDVLTGHEKVRMVSLTGSIATGEHILRHTAPAIKRTHMELGGKAPVIVFDDADLDAVAQGVRTFGFYNAGQDCTAACRIYAQRGIYDALVEKLGNAVSSLKMGAPEDESTELGPLSSLAHLKRVTAAVEEAKALSHIRVITGGSQTEGKGYYFAPTLLADAKQEDAIVQREVFGPVVSITVFDDEDQVLRWANDSRYGLASSVWTQDVGRAHRLSARLQYGCTWINTHFMLVSEMPHGGQKQSGYGKDMSLYGLEDYTLVRHIMVKH

SEQ ID NO: 12959 - protein, 205 aa, Ustilago maydis 521
MSSPIVTLATLPAAFRCDMRLMLKQGVDAASGSAGDLSPLIIDMDIFSQLLEMDDEDDREFSKSIVWNYFDQAITTFKEMDVALDTKNLTELSTLGHFLKGSSAAVGVIKVRDSCEHMQHYGKCHGEDGISDLTEDEALKKLTATLRDVKVQYREAAKALKAFYDEQDAEEANEANDDDDDDEEQQQDVPKHDAESNDPDVAPPA

SEQ ID NO: 12960 - protein, 427 aa, Methylobacillus flagellatus KT
MSAIVDIIAREIIDSRGNPTVEVDVLLESGVIGRAAVPSGASTGTKEAVELRDGDAARYLGKGVLQAVENVNTEITEAIIGLDVEEQSFIDQTLIDLDGTENKSRLGANAILAVSMACARAAAEESGLPLYRYLGGSGFMQLPTPMMNIINGGAHAENSVDMQEFMIIPAGLPTFREALRAGAEVFHALKKILHSEGLATTVGDEGGFAPDLPSNEAAIQYILQAITAAGYEPGRDILLGLDCASSEFYKDGLYHLESEGLQLTSAQFADYLATWVDKYPIVSIEDGMSEHDWDGWKLLTDRIGKKVQLVGDDLFVTNAKILREGIQKGVGNSVLIKVNQIGTLTETFTTIETAKRAGYTAVISHRSGETEDTTIADISVATNALQIKTGSLSRSERIAKYNQLLRIEEELGDATSYAGKEAFYNLK

SEQ ID NO: 12961 - protein, 190 aa, Ophioglossum vulgatum
DDHGEIFAEIRRSNLEPYLGLHYPATDIPQASRFLFMKNRVRMICDCSASPVKVIQDEKLGQPLSLTSSTLRAPHGCHSLYMGNMGSIASLVMAVVINDNEDDISNNGHAYQGRRLWGLVVCHHTAPRFVPFPVRSACEFLMQVFGLQLNMEVGLAAQVREKHILKTQTVLCDMLLRDAPIGIVSKSPNM

SEQ ID NO: 12962 - protein, 446 aa, Triticum aestivum
MAIGGGGGGGSWSIHGRPDVTSRYDVLGRAGSGAYADVYRGRRRSDGAPVALKEVHDAVSAQREVDALLAAASESSPHVITLLDHFPGGDHDDDVLVLEWLPLDLAAVVREGRRAGGLPAGQLKRWMLQVIEGVAACHRAGLVHRDLKPGNLLISEDGVLKVADFGQARILQEQPSDEPEIPAAQEPETLTAADYLHEIDQLRAKSTYGDVDRMSLQDGNTSCLATCSTADIDDDPFRASYSYDAEEDIGDEESGAFTSCVGTRWFRAPELLYGSTSYGQEIDLWSLGCILAELLSLEPIFPGQSDIDQIGRIIGVLGNITEESFPGCSNLPDYNKIFFSKVEKPTGLKASLPNRSASEVSIVKRLLCYDPAKRASASELLNDPYFTEEPLPVPTEALQVPASKGEDDDSSAEEWGNYRDGNSDSDIDEFGSMDVTKTDKGFSIRF

SEQ ID NO: 12963 - protein, 443 aa, Shigella flexneri 2a str. 301
MCVPEMIKKELVMVSLEKNDHLMLARQLPLKSVALILAGGRGTRLKDLTNKRAKPAVHFGGKFRIIDFALSNCINSGIRRMGVITQYQSHTLVQHIQRGWSFFNEEMNEFVDLLPAQQRMKGENWYRGTADAVTQNLDIIRRYKAEYVVILAGDHIYKQDYSRMLIDHVEKGARCTVACMPVPIEEASAFGVMAVDENDKIIEFVEKPANPPSMPNDPSKSLASMGIYVFDADYLYELLEEDDRDENSSHDFGKDLIPKITEAGLAYAHPFPLSCVQSDPDAEPYWRDVGTLEAYWKANLDLASVVPELDMYDRNWPIRTYNESLPPAKFVQDRSGSHGMTLNSLVSGGCVISGSVVVQSVLFSRVRVNSFCNIDSAVLLPEVWVGRSCRLRRCVIDRACVIPEGMVIGENAEEDARRFYRSEEGIVLVTREMLRKLGHKQER

SEQ ID NO: 12964 - protein, 500 aa, Bacillus anthracis str. A2012
MAEQTVRVTVDGKEFSASGEKTILQLFNESNLEHPQICHVPEVDPIQTCDTCIVEVDGKLMRACSTQIENGMHIERQSQRAKEAQTEAMDRILENHLLYCTVCDNNNGNCKVHNTVHMMGIEEQKYPYEPKVSACEVDMSHPFYRYDPNQCIACGQCVEVCQNLQVNETISIDWSLDRPRVIWDHGVSINDSSCVSCGQCVTVCPCNALMEKSMLGEAGFMTGLKPDVLDPMIDFVKDVEPGYSSILAVSEVEAAMRKTKVNKTKTVCTFCGVGCSFEVWTKDRHILKVQPVSDAPVNGISTCVKGKFGWDFVNSEDRITKPLIRQGDMFVEASWEEALEVVASNMQHIKSAYGSDAFGFISSSKVTNEENYLMQKLARQIYGTNNVDNCSRYCQSPATDGLFKTVGMGGDAGTVKDIAEAGLVIIVGANPTEGHPVLATRVKRAHKLHEQKLIVADLRKHEMAERADLFIHPRQGTDYVWLAGITKYIIDQDWHDKTDS

SEQ ID NO: 12965 - protein, 466 aa, Bacillus anthracis str. A2012
MVEKYTLDYTEKITGISKENLKEMARMVYEADGTCVLWGMGVTQNTGGSTTSAAISNLLLVTGNYRRPGAGAYPLRGHNNVQGACDMATLPNWLPGYQAVSDDTLRAKFEKAYGTTIPKAPGLNNIAMLLAAEEGKLRGMYVMGEEMALVDSNANHVQHILANLDFLVVQDMFLSKTARFADVILPAAPSLEKEGTFTNTERRIQRLYEVLKPLGDSKPDWWILQKVARALGGDWNYESPSEIMDEIASLAPLYSQATYDRLEGWNSLCWGSHDGSDTPLLYVDGFNFPDKLARLSLDEWIPPVVAPDEYDLLLNNGRMLEHFHEGNMTNKSAGILSKVSEVFVEISPELAIERNVKDGGLVELASPFGKIKVQALITDRVTGKELYLPMHATINEEAINILTGTATDLYTCTPAYKQTMVKMRVLREKGNRPLPPSNPRDKNRNPQNGVEIEQKWQRKQYVSLVD

SEQ ID NO: 12966 - protein, 402 aa, Pseudomonas fluorescens PfO-1
MAEQGSPRRFARIDRLPPYVFNITAELKMAARRRGEDIIDLSMGNPDGATPPHIVEKLVQVAQREDTHGYSTSKGIPRLRRAISNWYKERYEVEIDPESEAIVTIGSKEGLAHLMLATLDQGDTVLVPNPSYPIHIYGAVIAGAQVRSVPLVPGVDFFAELERAIRGSIPKPKMMILGFPSNPTAQCVELDFFERVIALAKQYDVLVVHDLAYADIVYDGWKAPSIMQVPGAKDMAVEFFTLSKSYNMAGWRIGFMVGNPELVSALARIKSYHDYGTFTPLQVAAIAALEGDQQCVRDIAEQYRQRRNVLVKGLHELGWMVENPKASMYVWAKIPEAYAHLGSLEFAKKLLAEAKVCVSPGVGFGEYGDDHVRFALIENQDRIRQAVRGIRGMFRADALGTK

SEQ ID NO: 12967 - protein, 790 aa, Actinobacillus pleuropneumoniae serovar 1 str. 4074
MTALAASGGIALPFVAKAETKDNVAGQAQDEKVVWSACTVNCGSRCPLRMHVKDNQILYVETDNTGTETYNLDHQVRACLRGRSMRRRVYNPDRLKYPMKRVGKRGEGKFKRISWDEALTEIAQSLRKNIEKYGNESIYLNYGTGTLGGTVTKSWPPGSTLVARLMNCIGGYLNHYGDYSTAQIAVGLDYTYGGGWALGNGLADIENTKLIVLFGNNPAETRMSGGGLTYCFEQAKEKSNAKVIIIDPRYTDTGVGKEDEWIPIRPSTDAALVSALAYVLITENMVDQAFLDKYCVGYDEKTLPADAPKNGHYKAYILGQGDDGIAKTPEWASKITGIPVERIIKLAREIGQTKPAYISQGWGPQRRSNGELISRAIAMLPILTGNVGISGGNTGARESAYGIPFVRMPTLTNPVQASIPMFLWTDAILRGPEMTATTDGIQGVEKLSAPIKVIWNYASNCLINQHAEINRTHEILQDESKCELIITIDNHMTSTAKYSDILLPDCMTSEQMDFCLDAYVANMNYVIFADQVVKPSFECRNIYDMLSDLAEKLGVKEQFTEGRTQEQWLRHIYEQSRQKLPELPTFEEFRQQGIFKKVDPKGFFIAYKDFRENPEANPLKTPSGKIEIYSSRLAEIARTWKLEKDEVIHPLPIHTDSFEHYGDPLMQKYPLQLSGFHYKARTHSTYGNVDVIKEANPQEIWINPIDAQTRGIQNGELVRIFNDRGEVRINAKVTPRIIPGVVALSEGAWYAPDKNGVDYSGCINVLTTQRPSPLAKGNPQHSNLVQIEKL

SEQ ID NO: 12968 - protein, 573 aa, Glycine max
MTTSFGPATTSAPLKDHKVQIPSFHGLRSSSASALPRNALSLPSSTRSLSLIRAVSTPAQSETATVKRSKVEIFKEQSNFIRYPLNEDILTDAPNISEAATQLIKFHGSYQQYNREERGSRSYSFMIRTKNPCGKVSNQLYLTMDDLADQFGIGTLRLTTRQTFQLHGVLKKDLKTVMGTIIRNMGSTLGACGDLNRNVLAPAAPLARKDYLFAQQTAENIAALLAPQSGFYYDIWVDGEKILTSEPPEVVQARNDNSHGTNFPDSPEPIYGTQFLPRKFKIAVTVPTDNSVDILTNDIGVVVVTDDDGEPQGFNIYVGGGMGRTHRLETTFPRLAEPIGYVPKEDILYAVKAIVVTQRENGRRDDRKYSRLKYLISSWGIEKFRSVVEQYYGKKFEPFRALPEWEFKSYLGWHEQGDGKLFYGLHVDNGRIGGNMKKTLREVIEKYNLNVRITPNQNIILTDVRAAWKRPITTTLAQAGLLQPRFVDPLNITAMACPAFPLCPLAITEAERGIPNILKRIRDVFDKVGLKYSESVVVRITGCPNGCARPYMAELGLVGDGPNSYQIWLGGTP

SEQ ID NO: 12969 - protein, 314 aa, Caulobacter crescentus CB15
MSIAFIFPGQGSQSVGMGADLAEAFSAAREVFQEVDDALGQKLFALMKEGPEGDLTLTENAQPALMAVSLAVTRTLEKEFGVGIDKAAFVAGHSLGEYSALAAAGAISLSDTARLLKLRGQAMQRAVPVGEGAMASLIGPKTDLALAEAAAAAGSEVGVCVVANDNNNGNVVISGAKAAVDKAIEKAKELGARAIPLNVSAPFHCPLMQPAADEMATALAAATIVAPRAPLVANVTAAPIHDPDVIRKLLVEQVTGRVRWRESMTWMATEGGVTRFAEAGAGKVLSGMAKRIAPDAEAVPLNTPADLEAFAKSL

SEQ ID NO: 12970 - protein, 263 aa, Physcomitrella patens
MARHNATKPVTLILAALMVLSATDNVEGRHHVRDGKNWRKAHATFYGGADASGTMGGACGYGNLYSTGYGVDSTALSTALFNNGAKCGACFAIQCYRSQYCVPGSPVITVTATNFCPPNHKGDGTPGWCNPPMRHFDLAQPSFTKIAKYRAGIVPVLFRRVPCEKKGGVRFTINGNKYFNLVLVHNVGGKGDVHAVDIKGSNTEWIPMKRNWGMNWQTDAVMTGQALSFRVTTSDGKTIVSMNATPSHWSFGQTFEGGQFAMN

SEQ ID NO: 12971 - protein, 597 aa, Glycine max
  unsure (1)..(597): unsure at all Xaa locations
MELQDLPEGCIAKILSYTTPVDVCRLSLVSKAFRSAAESDTVWDCFLLSDFTSIIPISSTSKKDLYFTLSDHPTIIHQGRKPEQKTKQNSKLSFTAMPATPFSCSFLTLQPRFNSYVNPIFRSLTFQLSSSPLPFNANFSSVRLHSSLSRAAETDSPTGGRSGALTPGPAVAGEVQKIDVNPPKGTRDFPPEDMRLRNWLFNHFKEVSRLYGFEEVDYPVLESEALFTRKAGEEIKDQLYCFEDRGNRRVALRPELTPSLARLVIQKGKSVSLPIKWFTVGQCWRYERMSXRNLAIIWGDTVQHWEWTGLPESKFLELALLQAVCWFEIKXSDVGFNLFSRKALQEVLCGYSVPENLFGKVCVIIDKIEKIPADEIKKELKAVGLSQEAVQELLQVLSVKSLTELEERLGSSGEAVADLKQLFSLAEKIGYSKWLQFDASVVRGLAYYTGIVFEGFDREGKLRAICGGGRYDHLFSTFGADDIAACGFGFGDAVIVELLKEKGLLPELNLQIDDIVCALDEDLQGCAAMVANILREKGQIVELVLESKPLKWVFKRAARLNAERLVLVGNSEWQRGVVGVKILSTAEQYEVKLDDLK

SEQ ID NO: 12972 - protein, 489 aa, Agrobacterium tumefaciens str. C58
MRERSMIKLKNAALLRDACLVNGRWLKAADGKTIAVENPANSMIIGHVPSLSADEVKAAVESAGKAFSEWSRRSAKDRAAILRRWFDLMVANADDLGALMTAEQGKPFAEAKGEALYAASFVEWFAEEAKRVYGDTIPSPTTDKRITILKQPIGVCAAITPWNFPAAMITRKAAPALAAGCAMIVKPAEQTPLTALALGVLAEEAGVPAGVFQVVTGAARDIGKVFTESDTVRKISFTGSTEVGRLLMAQSAPTIKKLSLELGGNAPFIVFDDADLDAAVEGAIVSKYRNAGQTCVCSNRIYVQDGVYDAFAEKLVKRVESLSVGEGTEPGVLIGPLIDQEAVAKVEDHVADALGKGAKIVIGGKRHALGGTFYEPTVLTGATQAMKVAREETFGPVAPLFRFGTEDEAVAMANDTEFGLAAYFYTENVRRTWRVAEALEYGMVGHNTGLISNEVAPFGGVKQSGLGREGSHYGIDEYLEIKYLCSAIG

SEQ ID NO: 12973 - protein, 447 aa, Chloroflexus aurantiacus
MTAPAVRHIRLVTEIPGPRSRALLARRDAAVVAGLGRATPIAIASGQGALVTDVDGNTLIDFVSGIGTLAVGHCPPEVVQAIQAQAEQLIHLSALVGTYEPYVALCERLNALAPISEPCKTLLSNSGAEGVENAIKFARAATGRPAIIVFDGAYHGRTLLTLSLTSRTYFKKKFGPFAPEIYRAPFPYAYRMGMSEAEAVEQCWAAFERMQIAGVDPETVAAVLIEPVQGEGGFIPVPVEFMRRLREFCTRNGSLLIVDEVQSGFGRTGTLFAIEQFGVEPDIIVAAKSIAAGMPLAATIGRARIMDCAHYGGVGGTYGGNPLACVAALATIDLIERERLLERAKVIGQQIRARFEPLLTDDSLDPLVGDVRGLGAMIGIELVKDRRKRTPAAAEEVLAILGRALERGVLAMRAGLYVNCIRLLVPLVITDDQLDEGLEVLIGAMRH

SEQ ID NO: 12974 - protein, 129 aa, Synechococcus elongatus PCC 7942
MFAPASTVKALQRDAEDLLIPAGSVIFSEGEAAAEMYGILAGEVELKVGDRTVEVLQAGDVFGEGALVQAQKFRATTAIARQDCRLARLDRRRFLFAIQETPTFALDVIRSFSRRLRALKNAKLTTASH

SEQ ID NO: 12975 - protein, 555 aa, Caulobacter crescentus CB15
MSGADVTTNSATRAPSTVTRRLLFMALTLAAPAILLMAALVAVQYTEGQRRFAAQLVTTTRALSLATDRQIGQGQSVLQGLAVSPALSQGDLATFEKQAREAVDGRDGWIVLMDKDRQWINTRMPPGAPPPNAPPSEQSWREMTTGKSNVSNLIPRPNAGPIIGVNMPVLVDGQIFVLAYMQHPAVFHALMTGQGLPETWTASIVDRNAALLARSHDQEKMLGRHAGLDMQRAMALAQDGVVDTHTLDGVQTLSAFSRSPTYGWTFIVGVPHDELNRTILGSLGPALLGSALMIALGVMAALAFARPISRDVRGLVAEAEALAAGAPLAPAPSALQEIAEVRGSLRAAAEILRHREEEARTAAERQQLMINELNHRVKNTLVVVQSLARHSLKGGGELGLAQFNERLLALAGAHDLLTRRSWEGADLGELVAEALQPYATQVSIEGPATPLAPNAAVALAMILHELATNASKYGALSTEAGRIQVSWTMESRTRLRLIWRERGGPPVKPPSRRGFGSRLITSSLRGDLSGASEFDYAPEGLTCVFRLQTPPRAAS

SEQ ID NO: 12976 - protein, 755 aa, Desulfovibrio desulfuricans
MSTSRRDFLKYFAMSAAVAAASGAGFGSLALAADNRPEKWVKGVCRYCGTGCGVLVGVKDGKAVAIQGDPNNHNAGLLCLKGSLLIPVLNSKERVTQPLVRRHKGGKLEPVSWDEALDLMASRFRSSIDMYGPNSVAWYGSGQCLTEESYVANKIFKGGFGTNNVDGNPRLCMASAVGGYVTSFGKDEPMGTYADIDQATCFFIIGSNTSEAHPVLFRRIARRKQVEPGVKIIVADPRRTNTSRIADMHVAFRPGTDLAFMHSMAWVIINEELDNPRFWQRYVNFMDAEGKPSDFEGYKAFLENYRPEKVAEICRVPVEQIYGAARAFAESAATMSLWCMGINQRVQGVFANNLIHNLHLITGQICRPGATSFSLTGQPNACGGVRDGGALSHLLPAGRAIPNAKHRAEMEKLWGLPEGRIAPEPGYHTVALFEALGRGDVKCMIICETNPAHTLPNLNKVHKAMSHPESFIVCIEAFPDAVTLEYADLVLPPAFWCERDGVYGCGERRYSLTEKAVDPPGQCRPTVNTLVEFARRAGVDPQLVNFRNAEDVWNEWRMVSKGTTYDFWGMTRERLRKESGLIWPCPSEDHPGTSLRYVRGQDPCVPADHPDRFFFYGKPDGRAVIWMRPAKGAAEEPDAEYPLYLTSMRVIDHWHTATMTGKVPELQKANPIAFVEINEEDAARTGIKHGDSVIVETRRDAMELPARVSDVCRPGLIAVPFFDPKKLVNKLFLDATDPVSREPEYKICAARVRKA

SEQ ID NO: 12977 - protein, 783 aa, GIBBERELLA ZEAE PH-1
MAPKKKIAVMTSGGDSPGMNAAVRAVVRMSLHMGCDAFCVYEGYEGLVQGGDFIRQMQWDDVRGYLGEGGTLIGTARCMAFYERPGRLVAAKNMVLSGIDALIICGGDGSLTGADRFRAEWPSLLEELISTGHLKEEQTTPYKHLNIVGLVGSIDNDLTGTDATIGCYSALARICEMVDYVEATASSHSRAFVVEVMGRHCGWLALMAGVATGADFVFIPERPRENDWQEEMKVVVRRHRALGKRKTIVIVAEGARDNNGTKIGAEEIKDILADKSKGGLALDTRITTLGHVQRGGTAVAYDRMLATLQGVEAVKAVLEATPETETPFIAINENKIVRKPLMQAVAETQELAKAVDAKDFDKAMSLRDAEFADQWNSYMLTTNVMVDDEKLPERERMRIGFINVGAPAGGMNAAVRAAVAYCLSKGHEPLAIHNGFAGFARHHDDKPLGAVRPFDWLEVDGWASKGGSEIGTNRELPAESGMELIANLIEEHNFDALFIVGGFEAFHSVTQMRKARTQFPSLCIPMCLLPATISNNVPGTEYSLGSDTCLNELVNYCDKIKQSASATRRRVFVIETQGGRSGYIATLAGLDVGASAVYIPEEGISLEMLNSDVNHLKEVFRKDKGQTRAGRLILVNEKASKVYSAKLIADIIREEAHDRFESRESIPGHVQQGGVPSPMDRCRAVRLAIKCIQHLEGYGRNAHNHVKKDPKSASVIGIQGSEVVFSGVEDLEENGTDWPNRRPKTAHWMGLSETVDMLAGRPSYPVPEKSLTGLIAKDTKRGL

SEQ ID NO: 12978 - protein, 423 aa, Vibrio parahaemolyticus RIMD 2210633
MTNQQLHQRRSQVIAQGMGALYPLYVEKAENAYVWDIEGNKYIDFAAGIAVTNTGHSHKRISEAVKAQLDNFSHTCAMVTPYASFVELAEKLTELAPGETKKKAIFLTTGAEAVENAVKVARAHTGRSGVIAFKGGFHGRTNMTMGLTGKVAPYKAGFGPFPNEIYHAPYPNAFHGISVEQSLQAIDDLFACDIEPSRVAAIIFEPVQGEGGFYKAPDAFAQGLRQLCDKHGIMLIADEIQTGFARTGKMFATEYLGIEPDLMTMAKGIAGGFPISAVVGKADVMDSALPGGLGGTYAGSPLGCVAGLEVLKIIEEEDLCAKAMGIGEVVNARMTKLQQSVPAIGEIRTTGAMMAIEFTDPESGKPLQEMTKAVISKAQENGLILLSCGVKANVIRLLPPLTIEPEVLSEGLDKLEKVILEVA

SEQ ID NO: 12979 - protein, 496 aa, Davidiella tassiana
MTSVQLETPHSGKYEQPTGLFINNEFVKGQEGKTFDVINPSDESVITQVHEATEKDVDIAVAAARQAFEGSWRLETPENRGKLLNNLANLFEKNTDLLAAVESLDNGKATSMARVTSACASGCLRYYGGWADKITGKVIDTTPDTFNYVKKEPIGVCRSDHSLELPLLMWAWKIGPAIACGNTVVLKTAEQTPLGGLVAASLVKEAGFPPGVINVISGFGKVAGAALSSHMDVDKVAFTGSTVVGRTILKAAASSNLKKVTLELGGKSPNIVFEDADIDNAISWVNFGIFFNHGQCCCAGSRVYVQESIYDKFVQKFKERAQKNVVGDPFAADTFQGPQVSKVQFDRIMEYIQAGKDAGATVETGGSRKGDKGYFIEPTIFSNVTEDMKIVKEEIFGPVCSIAKFKTKEDAIKLGNASTYGLAAAVHTKNLNTAIEVSNALKAGTVWVNTYNTLHHQMPFGGYKESGIGRELGEDALANYTQTKTVSIRLGDALFG

SEQ ID NO: 12980 - protein, 481 aa, Vibrio parahaemolyticus RIMD 2210633
MSKGMTMQQIQNQSLVSFMVANPQQGIAVTNPATGELLGYAPVSTENDILNSIERAHVAQKEWSALPAKTRAGMLNRWFQLLLENKADLGRLMTLEQGKPLAEAQGEVLYGASFIEWFAEEAKRTYGETIPAPSADKRLVTIKQPIGVACAITPWNFPIAMITRKAAPALAAGCSFVVKPSESTPLSAFAVAELAYQAGIPRDVLQVVLGENSRQVGAIFTSHPLIRKLSFTGSTQVGRVLMQQSAADIKRTSMELGGNAPFIVFDDADIDAAVAGAMASKFRNAGQTCVCANRFYVHSKVYDEFVAKFDAAVQQLKVGNGLEEGVNIGPVISESAKQGIQALIDGAIEQGAKPVSALKELDGLFMQPVVLKGVTHDMKIVSEEIFGPVAPVIRFDSDEQLIEMANDTIYGLASYFYSQNIHRVWKIAEALEYGMVGINEGMISTEVAPFGGVKQSGIGREGAKQGIDEYMDVKYLCFGGN

SEQ ID NO: 12981 - protein, 355 aa, Oceanobacillus iheyensis HTE831
MSKSSIYGLTYEKLKDWLIEHGEKRFRAEQVWNWLYKKRINSFDEMNNVNQSAIQLLKDNFVLHTMGEEIRQESQDGTIKFLFKLEDGNLIETVLMRFHYGLSVCVTTQVGCNIGCTFCASGLLRKSRDLSSGEVVEQIMNVQKHLDERGEKDRVSHIVVMGIGEPFDNYNNLMDFLYTVNDDRGLNIGARHITVSTSGLAHKIYEFADDPIQVNLAISLHAPNDELRTKIMKINRAFPIDKLMKSVDYYLQKKNRRITYEYIMLDDVNDHKKEAIELANLIKNHRHLAYVNLIPYNTVDEHIDYRRSKSENIQAFYETLTELGINCGVRWENGADIDAACGQLRSKQIKKSKAV

SEQ ID NO: 12982 - protein, 494 aa, Oceanobacillus iheyensis HTE831
MGKQTGFMEYERQTRPGRNPQERVKDWNDYTAPMSDEEVQKQGARCMDCGVPTCHQGIEIAGVTSGCPVYHLIPEWNNLVYEGKWREALDKEHQMNNFPEFTGIACPAPCEGACVLGINEPAVAIRTVERSIIEKGFEEGWVVPNPPKIRTGKRVAIVGSGPAGLAAADQLNKAGHSVTVYERDKRVGGLLTYGIPEMKLSYDIVIRRVSILEQEGIEFITNTEVGKDITNEELQETYDSVVLCGGASLHRDMPVEGSQLKGVHPAMDFLHANVESLLDSNLEDGSYISAKDKNVIVIGGGDTGTDCLATSVRHNCKSLTQFDIYEKRNLLRDEEANPWPQYPKIHRVEYGQKEAEAQFGEDPRAYAVQTTKFVGDENGHVKEVHTINVKTRYEGGKKIREEIPGTEKVWPADLVLVAIGFQGPDQDLIESLDVETTTRSTVKAKYGEFQTNIDGVFAAGDMRRGQSLIVWAINEGRGAARECDRFLMGDTILP

SEQ ID NO: 12983 - protein, 75 aa, Glycine max
  unsure (1)..(75): unsure at all Xaa locations
ASSMISSPAXTTVNRAGAGMVAPFTGLKSMACFPTQKTXHDITFIASNRGRMQXLQVLQPICKKNFETFSYFQTL

SEQ ID NO: 12984 - protein, 298 aa, Staphylococcus aureus
IIFPGQGAQKVGMAQDLYNNNDQATEILTSAANTLDFDILETMFTDEDGKLGETENTQPALLTHSSALLAALKNLNPDFTMGHSLGEYSSLVAADVLSFEDAVKIVRKRGQLMAQAFPTGVGSMAAVLGLDFDKVDEICKSLSSDDKIIEPANINCPGQIVVSGHKALIDELVEKGKSLGAKRVMPLAVSGPFHSSLMKVIEEDFSSYINQFEWHDAKFPVVQNVNAQGETDKEVIKSNMVKQLYSPVQFINSTEWLIDQGVDHFIEIGPGKVLSGLIKKINRDVKLTSIQTLEDVKG

SEQ ID NO: 12985 - protein, 535 aa, Treponema pallidum subsp. pallidum str. Nichols
MNWRNLDECAAYARLQAIRAPSLKTVLCGPEGIERVRRYCTDAGAGLRYHYAAKTVNEEILTALAALADEQELVAKYDALRAGAQINTGEKRKVLHHLTRLGVQGSSLASLPCEVRDMHAFYTKEYERVCAFARQVHEGGLRTSRGAPFTDVVQIGIGGSDLGPRALYLALEGWAQRHQAVKMRTHFISNVDPDDAALVLSKLPLETTLFILVSKSGTTLETLSNELFVAHVLRQAGLEPHTQFVAVTSETSPLANNPQYLASFYMDDFIGGRYSSSSVCGAVVLTLAFGPQVFGHFLSGAAEADRAAQEQDIRRNAALLDALIGVYERTILGYEHTAVLPYSQALARFPAHLQQLDMESNGKSVNRFGIPITYKTGPVIFGEPGTNGQHSFYQHLHQGTSVVPLQFIAFQHSQLGQDPIIRGSTGQQKLLANVVAQIVAFARGKEHADANKTFSGERPSSLLYAKALTPQTLGALLAHFENKIMFQGFAWNLNSFDQEGVQLGKTLAQHILAGEVEGVLRAYADLFDLAHAPTC

SEQ ID NO: 12986 - protein, 103 aa, Glycine max
  unsure (1)..(103): unsure at all Xaa locations
MASSMISWPGVTTVKRADAGMVASFTGLKSMAGFPTSNTNNDITFIAINGGRRRCTQASPPIGNKKFXTLSYLTDLDNAQXAKEVLFLLTKGLIPCFKFELEH

SEQ ID NO: 12987 - protein, 543 aa, Methylobacillus flagellatus KT
MAIHIISTQPFDDQRPGTSGLRKRVSVFQQPHYLENFVQSIFDAVQVPAGATLVVGGDGRFYNLEAIQTILKMAAANGIGRVLVGKNGILSTPAASCVIRKYKTFGGIILSASHNPGGPTGDFGIKFNSANGGPAPEKVTEEIFARSQEMTQYKIVDAPDVALDIVGEIELAGMTVEIIDAVSDYVDLMAKLFDFEAIRQLLASGFRLRFDAMHAVTGPYARAILVDCLGADPDAVMNADPLPDFGGGHPDPNLTYAHDLVEIMYGDDAPDFGAASDGDGDRNMILGKRFFVTPSDSLALIAANARLVPGYAQGIAGVARSMPTSAAVDRVAQELDIPCFETPTGWKFFGNLMDAGKVTLCGEESFGTGSDHVREKDGLWAVLFWLNILAIKRQPVETIVKRHWARFGRNVYSRHDYEELPSDAANGLIEHVRAQFASLPGRDFGRYTVKTCDDFSYTDPVDGSVSQKQGIRILFEDGSRIVFRLSGTGTAGATLRIYLESFEPDISKHDQDAQDALADLIAIAHQISELKQRTGRDQPTVIT

SEQ ID NO: 12988 - protein, 218 aa, Bdellovibrio bacteriovorus HD100
MIKSKVRTASKGFPRAFSCDLPPPPLEYAHQGETMRIFTLIALILCTSFAWAKDTPSSFFDLSANSLSGKKVNFSTYRGKVVLVVNTASQCGFTPQLKELEEMYKKYADRGFVVLGFPSNDFKQEKGTNDEVQTFAAKEFGVTFPLFDKAPVSGKDIQPVYQFLTTQKPGLIFKDVAWNFEKFLINRKGQVVERWSSITKPSSDSITKSVEKALNEPL

SEQ ID NO: 12989 - protein, 404 aa, Shewanella oneidensis MR-1
MRPIIKSNKLDTVCYDIRGPVHKEARRLEDEGHRILKLNIGNPAPFGFEAPEEIVRDVILNLPSAQGYCESKGLFSARKAIVQHYQAQGIYDVDIEDVYIGNGVSELIMMAMQGLLNTADEILIPSPDYPLWTAAANLAGGKAVHYRCDEEADWFPDLDDIKSKISSRTRGIVLINPNNPTGAVYSKELLLQVVELCREHNLILFADEIYDKILYDEAKHIPAASLSDDILTVTFNGLSKAYRAAGFRIGWMMLSGNLKAAKSYIEGLDMLASMRLCANVPNQHAIQTALGGYQSINELILPSGRLTVQRDTCYELLNQIPGVSVKKPKGALYAFPKLDMKKFNLRDDERLVLDLLRDKKILLVHGTAFNWPEPDHLRVVFLPYKEDLTKALTEFGNFLETYKQ

SEQ ID NO: 12990 - protein, 371 aa, Glycine max
  unsure (1)..(371): unsure at all Xaa locations
SKAIAQYTEDARLHAVFEQSGESGRSFNYSESIRIASESVPEQQITAYLVKIQRGGFIQPFGSMIAVDEPSFRILGYSDNARDMLGITPQSVPSLDDKNDAAFALGTDVRALFTHSSALLLEKAFSAREISLMNPIWIHSRTSGKPFYGILHRIDVGIVIDLEPARTEDPALSIAGAVQSQKLAVRAISQLQSLPGGDVKLLCDTVVESVRELTGYDRVMVYKFHEDEHGEVVSESKRPDLEPYIGLHYPATDIPQASRXXFKQNRVRMIVDCHASAVRVVQDEALVQPLCLVGSTLRAPHGCHAQYMANMGSIASLVMAVIINGNDEEGVGGRSSMRLXXLVVCHHTSARCIPFPLRYACEFLMQAFGLQ

SEQ ID NO: 12991 - protein, 316 aa, Bifidobacterium longum DJO10A
AVGYGAKEAGTSCFMTPKTFKLISRLREEGVKRGLEILIEVHSYYKKQVEIASKVDRVYDFALPPLLLHSLFTGHVEPVAHWTEIRPNNAVTVLDTHDGIGVIDIGSDQLDRSLKGLVPDEDVDNLVNTIHANTHGESQAATGAAASNLDLYQVNSTYYSALGCNDQHYLAARAVQFFLPGVPQVYYVGALAGRNDMELLRRTNNGRDINRHYYSTAEIDENLERPVVKALNALAKFRNELPAFDGEFSYEVDGDTSITFRWTAADGTSTAALTFEPGRGLGTDNATPVASLAWSDAAGDHETRDLLANPPIADID

SEQ ID NO: 12992 - protein, 368 aa, Ralstonia eutropha JMP134
MKTKAAIAWKAGAPLTIEDVDLEGPRAGEVLVEIKATGICHTDYYTLSGADPEGIFPAILGHEGAGIVTDVGPGVTSLKPGDHVIPLYTPECRQCKFCLSRKTNLCQAIRATQGKGLMPDGTSRFSIDGKPIFHYMGTSTFANHIVVPEIALAKIRPDAPFDKVCYIGCGVTTGVGAVIFTAKVEAGANVVVFGLGGIGLNVIQGAKMVGADKIIGVDLNPEREAMARKFGMTHFINPKDVGNVVDHIIQLTDGGADYSFECIGNTQVMRQALECCHKGWGKSIIIGVAEAGAEISTRPFQLVTGREWKGSAFGGARGRTDVPKIVDWYMDGKLNIDDLITHTLPLDRINEGFELMRRGESIRSVVLY

SEQ ID NO: 12993 - protein, 248 aa, Vibrio parahaemolyticus RIMD 2210633
MSGTRKPIIGVVSCTKELGGYQIQAVNDFYLRAVKDFGGLPIMLAPEMSGDDVATILDMCDGFLFPGSHSNVAPHRYNATHEESHKDEARDELSLTLIRHAVDQNIPCLGICRGFQEMNVALGGSLNPAVHDSGFNDHREATVEDFEQKYAPAHAVLVQKQSLFEQWLVQNHWENTTFFEVNTLHNQGVDQLAPQLQVEAKAPDGLVEAFSLPQQKFFVGVQWHPEWKAKNNHFSQILFNEFMMAASR

SEQ ID NO: 12994 - protein, 468 aa, Bradyrhizobium japonicum USDA 110
MEAARVFDSKPNSAEARDIAFHLHSQTNPQRHAEIGPLIMARGEGVHVYDASGKRYLEAMAGLWCTSLGFSETRLKAAAATAYDKFGFYHSFNHKTPDNTIELAEKLVEISPIPDAQAYFATSGSEATETMVKLAWVYHAVRGKPGKRKIIARDRGFHGSTIVAASMCGLPRMHREFGLPLDGFLHTHCPDAYRGTRPGESEAAFVDRLAADLEALIMAEGPDTIAAFIGEPINAGGGIVVPPKGYFAAIEAVLRRHDILVLGDEVVCGFGRTGNWFGCETVGMKPDMVALAKGITSSYFPMSAVLLGRPIRDALSEMNKGGELFGHGFTNSGHPVGAAIALETLNIYHEMDVVPHVRRMGSRLRAGLEQIARDSRIVGQVRGEGLMIGVELVAAPATRQAFDPALKVGAMFDALAIENGLIIRAMGDTIGFCPPLIIDEAGVDEALDLFGRTLFSAEAKLAEKRPSA

SEQ ID NO: 12995 - protein, 336 aa, Synechocystis sp. PCC 6803
MIKAYAALEANGKLQPFEYDPGALGANEVEIEVQYCGVCHSDLSMINNEWGISNYPLVPGHEVVGTVAAMGEGVNHVEVGDLVGLGWHSGYCMTCHSCLSGYHNLCATAESTIVGHYGGFGDRVRAKGVSVVKLPKGIDLASAGPLFCGGITVFSPMVELSLKPTAKVAVIGIGGLGHLAVQFLRAWGCEVTAFTSSARKQTEVLELGAHHILDSTNPEAIASAEGKFDYIISTVNLKLDWNLYISTLAPQGHFHFVGVVLEPLDLNLFPLLMGQRSVSASPVGSPATIATMLDFAVRHDIKPVVEQFSFDQINEAIAHLESGKAHYRVVLSHSKN

SEQ ID NO: 12996 - protein, 349 aa, Erwinia carotovora subsp. atroseptica SCRI1043
MLVNAYGAHAGDKPLEPLKIVRRAPGAHDVQIEIAYCGICHSDLHQVRAEWAGTQFPCVPGHEIVGRVSAVGPHVSAFKAGDLVGIGCIVDSCRHCEECDEGLENYCDGMVGTYNGPTADEPGWTLGGYSQQIVVHERYVLRVRHSEAELAAVAPLLCAGITTYSPLRHWNAGPGKKVGVVGIGGLGHMGIKLAHAMGAYVVAFTTSESKREDAKALGANEVVVSRNAEEMAAHAGSFDLILNTVAAPHDLDAFLVLLKRDGALTLVGAPASPHPSPNVFNLIMKRRTVAGSMIGGIPETQEMLDFCAEHGIVSDIELIRADEINEAYERMLKGDVKYRFVIDNATLSA

SEQ ID NO: 12997 - protein, 131 aa, Glycine max
HVKWNLWVIHKLLLTLVYGFILFMYHSRWRERLPGYIVYLPLFAARPAYYKYVTIMFILNAIALFACGITGNGAAFGFWLYHFTVVCYHAAYLPLLYITFLADFFQEEDLHLENVYYSEMKDAGFFEADWN

SEQ ID NO: 12998 - protein, 425 aa, Rhizobium sp. NGR234
MPSKLAGPLAKAESRSPTMARPHTAGHPSLAWETLALDGGLTIDPATKAIAPNISMSVNNLLVPGDGAFSADGVEDLTALPFLYARWTNPTVRQLELRMAALEGADDALATATGVAAIAATFLTCLKRGDHLIISDVCYAGANELARRMLPDYGIEVTAVNMSRLDEVAAAFRPNTRLVHCESPCNPILRLTDLSAVAALAHRHGALVSVDSTLATPVATRPLALGVDLVIHSLTKFINGHGDALGGIVCGRKELVEKIRSRAGVYLGASLSAQNAWLIMRGIDTLFPRLKAMSDSAMRIAHFLRDHPGVRSVTYPGLETHPQHALARRQMRIFGGIVTFQTDDPQKIALRLAERLRVVHYAFSLGHQRSIVVLLDTKEMMNSTYGLEGPQLDDYRAFAGDGVFRLSVGLESVDDIIADLDRALR

SEQ ID NO: 12999 - protein, 439 aa, Arabidopsis thaliana
MPSLKSFSAAEEEDDQLGRNSEAERFNPEAVEKEEDPDKMDEKDESGDEEDDVKRDQVEAEDEEALGEEEVSDSKERSQSSSAGELSESEYMVVDLADICKDVQCSIWIIRKTRTVMECLHRFCRECIDKSMRLGNNECPTCRKHCASRRSLRDDPNFDALIAALFKNIDKFEEEELNFRQDDEARNKQIQASIAQVSQRQSKALVKRKSVGKGTAILSRSRRSGGGSRRRRNCRNIEQDTSEANDDDDQNKRGKDSSSDEPCERQRKKRSATQPSSSNANNNDNCAGNGTEQTHQRDSRVISPVLVWNSELIAWGRGGTRSNTRQGNNNQGAISKRNARLKRLVEYLGSLEGNSVEYVARHLKLKAEEVELLVSKDGDTVIGNKTSTEKMQSLQDDETVAKLKVDCISSNGYMVLVPEKANRVEEVEASNSNSVNELD

SEQ ID NO: 13000 - protein, 434 aa, Pseudomonas syringae pv. syringae B728a
MNSKVDETPHLLRQRDQFVPRGIVTAHPLVIDRAQGSELWDVDGKRYLDFVGGIGVLNIGHNHPNVVKAIQAQLTKVTHACFQVASYQPYLDLAKRLSHLIAGQSGIDHKAVLFTSGAEAVENAVKIARAHTNRPAIISFRGGFHGRTLLGTTLTGMSQPYKQNFGPMAPEVFHTPYPNEYRGVTTDVALAALHELLATQVAPERVAAILIEPMQGDGGFLTAPVEFMKALRALTEQHGIVLIADEIQSGFGRTGKWFGFEHSGIQPDLVTVAKSLAGGMPLSGVVGRAEIMDAPLPGGLGGTYGGNALSCAAALAVIDTYEQENLLARGEQLGNQLRAGLLKLKERYSCIGDVRGTGFMLAMEMVKNDAARSPDADLNQKVIDQARLGGLLVIKCGVYRNVLRFLAPLVTTEQQIDEALGILDAALARVLKSS

SEQ ID NO: 13001 - protein, 493 aa, Mesorhizobium sp. BNC1
MIKEFCVAESYDVIIIGSGPGGYVTAVRSAQLGLKTAIVEREHLGGICLNWGCIPTKALLRSAEILHYAQHAKDYGLKLDGSIAPDTAAVVDRSRKVSARLNTGVGFLMKKNKVDVIWGEAKISKAAKANEPGEIVVSKPSKKAMEPQHPAPKNTLGEGTYKAKHIILATGARPRVLPGIEPDGKLIWTYFEAMVPKEMPKSLIVMGSGAIGIEFASFYRTMGADVTVIELLPQILPVEDAEVSKFARRQLEKQGMKFHVEAKVTKVEKGANQITAHVEMKDGKVEKITADRLISAVGVQGNVENLGLEALGVKVERGTVAVDGYGRTNVPGIYAIGDVAGPPMLAHKAEHEGVICVEKIAGVPGVHALDKSKIPGCTYCQPQVASVGLTEEKAKEAGRDIRVGRFQFGANGKAIALGEDQGFIKTILDKKTGELLGAHMVGAEVTELIQGFVVAMNLETTEEELMHTIFPHPTLSEMMKESVLDAYGRSLNA

SEQ ID NO: 13002 - protein, 105 aa, Antirrhinum majus
HYSATDIPQAARFLFKQNRVRMICDCNAQPVKIVQTEELKQPLCLVNSTLRAPHGCHMQYMVNMGSIASLAMAVLSNNGDSMKLWGLVVCHHTSPRYVPYPLRYA

SEQ ID NO: 13003 - protein, 363 aa, Zea mays
VDQASAPKYQKHPQSHPESGGSQANLRPPSMGEQSLSQPKAQPLSPFPSPPASAALPPPASASASASAASTSRTTSAAASRPKKKVTNPSPDRNPAKKHRLTFSIPGRPLSAAGEVGVAIRYLRAADPALAAVIDAHEPPVFQCPHRPFHSLVRSILYQQLAFKAAASVYSRFLALLGGESSVAPDAVLALSPHQLRQIGVSPRKASYLHDLARKYASGILSDASIVNMDDRSLAAMLTMVKGIGSWSVHMFMIFSLARPDVLPSADLGVRKGVQMLYALEDVPRPSQMDKLCERWRPYRSVGAWYMWRLIESKVPQPAPAIPVGSLAFPSPDGQSMLQQQEQQQQQTVIQMIDPLQMLPGMG

SEQ ID NO: 13004 - protein, 243 aa, Zea mays
  unsure (1)..(243): unsure at all Xaa locations
TYLDGCDYPSWHAIHIFDSRGNPTVEIDMFGSNVTIVRLAVLTGAYPGVYDALELRDDGSDYLYKAVTKGVXNVNXVIGPALIAKVPYRSDCMIDNFMXHHVDGTIYECLWSKHNLAANAILYVTLAVCIAGNSINSIPLYHHIDNLCDNNNLMMPAAAFHVIDGXGSHAXNKLAMQEFMIXLPTGAGSLNEAMNMNGEHYHHLKYRIINEYAKEATNDEAKCALAPNIPHNEEGLELLKTAL

SEQ ID NO: 13005 - protein, 452 aa, Mesorhizobium sp. BNC1
MPIQITMPALSPTMEEGNLAKWLVKEGDSVSPGDVIAEIETDKATMEVEAVDEGTVAKIVVPEGTQGVKVNALIAILAGEGEDAAQAAKASGNGGAAAAPEPKPEAKPEATPSASKQPEEAENRPAPAAKPAAPQPSADKDGRVFASPLARRIAKDAGIDLSAISGSGPRGRVVRADVEAAISGGTAKPAAAAPEGPAPAPKPMSDEAVLKLFEEGSYELVPHDGMRKTIARRLVEAKSTIPHFYLTLDCEIDALLALRKQLNDAAPMVKAEAGEKPAYKLSVNDLIIKAWALALKAVPEANASWTESAMIKHKHADVGVAVSIPGGLITPIVKRADEKTLSVISNEMKDLAARARNRKLKPEEYQGGTSAISNLGMFGIKDFAAVINPPHATILAIGAGEERPVVRNGEIKIATVMSVTLSTDHRAVDGALGAELLTAFKRLIENPFGMLV

SEQ ID NO: 13006 - protein, 106 aa, Aquilegia sp.
HYPATDIPQAARFLFKQNRVPMICDCQASSVGIVQSGELKRPLCLVNSTLRAPHGCHTQYMANMGSIRSLVMAVVVNWRDQSSLWGLVVCHHTSPRYVPYPLRYAC

SEQ ID NO: 13007 - protein, 198 aa, Gossypium arboreum
MAPKKDGVSKRVFNKGSWTAEEDRRLAKYIEIHGAKRWKTIAIKSGLNRCGKSCRLRWLNYLRPNIKRGNISDEEEDLIIRLHKLLGNRWSLIAGRLPGRTDNEIKNYWNSHLSKKIINHDVRTEQTSSSEQIVPHKAWETVQMEEEEVVKGSDEIENSEFSIDVDEFFDFTTEGCFSLDWVNKFLELDDQQDPLAMV

SEQ ID NO: 13008 - protein, 396 aa, Escherichia coli O157:H7 EDL933
MFENITAAPADPILGLADLFRADERPGKINLGIGVYKDETGKTPVLTSVKKAEQYLLENETTKNYLGIDGIPEFGRCTQELLFGKGSALINDKRARTAQTPGGTGALRIAADFLAKNTSVKRVWVSNPSWPNHKSVFNSADLEVREYAYYDAENHTLDFDALINSLNEAQAGDVVLFHGCCHNPTGIDPTLEQWQTLAQLSVEKGWLPLFDFAYQGFARGLEEDAEGLRAFAAMHKELIVASSYSKNFGLYNERVGACTLVAADSETVDRAFSQMKAAIRANYSNPPAHGASVVATILSNDALRAIWEQELTDMRQRIQRMRQLFVNTLQEKGANRDFSFIIKQNGMFSFSGLTKEQVLRLREEFGVYAVASGRVNVAGMTPDNMAPLCEAIVAVL

SEQ ID NO: 13009 - protein, 107 aa, Aquilegia sp.
PQASRFLFKQNRVRMIVDCHATPVHVIQDEALMQPLCLVGSTLRAPHGCHAQYMANMGSIASLALAVVINGNDEEGTSGRNPMKLWGLVVCHHTSARCIPFPLRYAC

SEQ ID NO: 13010 - protein, 565 aa, Zea mays
MGSTAAVSVSASAIASRGCARSEAARRPGGIRVCGLRSEALTCHSLRISQAPARLTVARPPPPAAATNGAAAGTCGFDYDLVIIGAGVGGHGAALHAVEEGLKTAIIEGDVVGGTCVNRGCVPSKALLAVSGRMRELHDEHHMKSLGLQVSSPGYDRQAVADHANNLASKIRINLTNSMKALGVDILTGVGTIVGKQKVRYGKAGFPDKEITARNIIIATGSVPFVPKGIEIDGKTVFTSDHALKLESVPDWIAIVGSGYIGLEFSDVYTALGSEVTFVEALDQLMPGFDPEIAKLAQRVLINPRKIDYHTGVFASKITPAKDGKPVLIELIDAKTKEHKETLEVDAALIATGRAPFTKGLGLENINVVTQRGFVPVDERMRVMDADGNVVPNLYCIGDANGKLMLAHAASAQGISVVEQISGKDHILNHLSIPAACFTHPEISMVGLTEPQAREKADKEGFEINVVKTSFKANTKALAENEGDGIAKLIYRPDTGEILGVHILGLHAADLIHEASNAIALGTRVQDIKFAVHAHPTLSEVLDELFKAAKVNSGVSHSVNEPVAA

SEQ ID NO: 13011 - protein, 303 aa, Oryza sativa
MARPTTLLACCKLYISESRNDAALRAIEQAARGGGGGAVVVNRFTDDAYNRVGYTLVAPLTPSPAPPPLRHAVLGMVRAALEAIDFGAHAGTHPRLGAVDHICFHPLAHASLRHVADLAGAVAADIGDELQVPTFLYGAAHREGRTLASIRRQLGYFKPNSSGDQWRGAPETDALPVAPDAGPERPPRSKGVVVVGATSWVDNYNVPVHTGDVEAARRIARAVSERGGGLPSVQAMGLAHGGGVVEVACNLLDPARVGAEQVQGMVERLAAGEGLSVGKGYFTDFSQDKIVDLYFRSAANTEG

SEQ ID NO: 13012 - protein, 372 aa, Salmonella typhimurium LT2
MKSRAAVAFGPGQPLKIVEIDVAPPKKGEVLVKITHTGVCHTDAFTLSGDDPEGVFPAVLGHEGGGVVVEVGEGVTSLKPGDHVIPLYTAECGECKFCKSGKTNLCQAVRATQGKGLMPDGTTRFSYNGEPVYHYMGTSTFSEYTVCAEISLAKVNPQAPLDKVCLLGCGVTTGIGAVHNTAKVKAGDTVAVFGLGGIGLAVIQGAVQAKAGRILAVDTNPEKFTLAGEMGATDFINPNDYDKPIQDVIVELTDGGVDFSFECIGNVNVMRAALECCHKGWGESIIIGVAGAGQEIKTRPFQLVTGRVWRGSAFGGVKGRTQLPGMVEDAMNGKIRLDPFITHRLPLEQINDAFELMHQGKSIRTVIHFGDN

SEQ ID NO: 13013 - protein, 305 aa, Xylella fastidiosa 9a5c
MQHRRWTRATATMIASFSSIAMPHVSLLPSPSPIAFIGGGNMARSMIAGMIRQGAPSTSICVIEPIAALRDALIADFNIKAVTTATEAATDTSTWVLAVKPQVMPDVCATLPLPVQPNTPLVISIAAGITTCKLKHWLGDTCAIVRAMPNTPALLGAGVTGLFATSHTTATQRTLAEELFNSVGKTLWITEEALMDAVTAVSGSGPAYAFLLAEAMEAAAIMQGLSTANARTLVQQTLLGAARMMTELGETPAALRHRVTSPHGTTEAAIATFQENDFQALVAKAIDAATRRARALGKANDTEPT

SEQ ID NO: 13014 - protein, 139 aa, Pisum sativum
NTDITSITSNGGRVKCMQVWPPIGKKKFETLSYLPPLTRDQLLKEVEYLLRKPWVPCLEFELEKGFVYREHNKSPGYYDGRYWTMWKLPMFGTTDASQVLKELDEVVAAYPQAFVRIIGFDNVRQVQCISFIAHTPESY

SEQ ID NO: 13015 - protein, 715 aa, Escherichia coli; identical to SEQ ID NO: 8975
  unsure (1)..(715): unsure at all Xaa locations

SEQ ID NO: 13016 - protein, 533 aa, ASPERGILLUS NIDULANS FGSC A4
MANVTLPSGSMSYPELLQVAKQDSSLSWPEQLWWAHYTFWNNDVLATGVMTFLAHELIYFGRCIPWIVADALPSVFRRFKIQDHKTPSFSDQWTCVKYILAIHFIVELPLIVLFHPMMEVCHVQYTLPFPKLSLFAAQVALFFIVEDTYHYWLHRAMHWGPLYRSIHRIHHQYAAPFGLTAEYASPAETFLLGLGTICPPLILGSITGDVHLITVLGWMALRQLQAIDAHSGYDFPWSLRRIVPFWGGADWHDDHHRYFWGNYSSSFTHWDIYVAVTRTRGKEVQVLGTEVCEVAVPVPDPRAKLGANQGHIIVGNGASPTGRIYPASAASSFLRKAALLCSGPLVPLFAWMQHTKRLFSPLHLPRPTAILRLFCVCYPLSPICWHIMAHSMRVLVYARVSDIPGNPQARHIALGDLLTGNLLGRRFYATPRPPVYDHVHIPADFDSSQPLERWFIFDLNVGETLSRSEVTRLPHLVYLASRQGDEWIFIRRDTSIENAKSKAASFTWGGRSEQKLVSELQNQSGGHSVGPDT

SEQ ID NO: 13017 - protein, 537 aa, Neurospora crassa
MTLLALKEDRPTPKAVYNWRVYTCAAIASFASCMIGYDSAFIGTTLALPSFTKEFDFASYTPGALALLQSNIVSVYQAGAFFGCLFAYATSYFLGRRKSLIAFSVVFIIGAAIMLAADGQGRGIDPIIAGRVLAGIGVGGASNMVPIYISELAPPAVRGRLVGIYELGWQIGGLVGFWINYGVNTTMAPTRSQWLIPFAVQLIPAGLLFLGSFWIPESPRWLYANGKREEAMKVLCWIRNLEPTDRYIVQEVSFIDADLERYTRQVGNGFWKPFLSLKQRKVQWRFFLGGMLFFWQNGSGINAINYYSPTVFRSIGITGTDTGFLTTGIFGVVKMVLTIIWLLWLVDLVGRRRILFIGAAGGSLCMWFIGAYIKIADPGSNKAEDAKLTSGGIAAIFFFYLWTAFYTPSWNGTPWVINSEMFDQNTRSLGQASAAANNWFWNFIISRFTPQMFIKMEYGVYFFFASLMLLSIVFIYFFLPETKSIPLEAMDRLFEIKPVQNANKNLMAELNFDRNPEREESSSLDDKDRVTQTENAV

SEQ ID NO: 13018 - protein, 519 aa, Sorghum bicolor
RLISAVILAVCSLISRRKPSPGSKKKRPPGPWRLPLIGNLLHLATSQPHVALRDLAMKHGPVMYLRLGQVDAVVISSPAAAQEVLRDKDTTFASRPSLLVADIILYGSMDMSFAPYGGNWRMLRKLCMSELLNTHKVRQLAAVRDSETLSLVRKVVYAAGAGGGGRGQRGEAPVVNLGRLVLSCSMAITGRATLGKLCGDEIMSVVDVAVLYGSGFCAGDLFPSLWFVDVVTGLTRRLWTARRRLDAIFDRILAECEARQRQEEKMTGDDGFLGVLLRIRDDDGEPETGGISTTSIKAILFDMLAGGTETTSSAAEWIMSELMRKPEAMAKAQAEVRGALDGKSPEDHEGQMDKLSYTRMVVKEGLRLHPVLPLLLPRSCQETCDVGGFEVTKGTKVIVNAWALARSPERWHDPEEFRPERFADDDGSSAAVAVDYRGSQFEYIPFGSGRRMCPGNTFGLAALELMVARLLYYFDWSLPDGMRPEELDMDTVVGSTMRRRNHLHLVPSPYKETELTVGI

SEQ ID NO: 13019 - protein, 473 aa, Neurospora crassa
MTTINKRDQLPSLLLLPFPPHPSNRTLLDAAYRPPLTAVLSKLKHANPHGASKLIIAVAVPILQGPPYQLRSKTLLWSQAQALIAGLYAIISVICARLKISTEIDGGPGSVDATVVLVDHDRGRKPLSAEDRALRGDSKSSNSLIETNNTVVVDLATFADAYHPWNYIFHVRTEQGIRLNEVYLQMAEGKMIGAHALRQEQLVGVEGGLTLHHGLVGDDTTAGAGAAGGAGNGEGRRVSGVPVVCLGGTFDYLHPGHKLLLTAGALLLGVPSKDELSLPATSPRRREPCKYIIGITGDELLKNKKFAEYVQSWETRARNVIYFLSRLLQLSDKGWREAMGPAAGDNIHSAAAAGVQIDEKDGDFRAAFRDGTIIVQCVRIQDAFGPTVTEENIDVLVVSGETRSGGKAVNDKRAEQGWKTLEVFEVDVLNADEIPEDVGEDVKATEDFTSKISSTVIRQQRAAQATGKSEPKI

SEQ ID NO: 13020 - protein, 424 aa, Mesorhizobium sp. BNC1
MTAIVDIVGREILDSRGNPTVEVDVVLEDGSIGRAAVPSGASTGAHEAVELRDGGPRYLGKGVARAVEAVNGEIFEAIGGLEAEDQIHIDRTMIELDGTPNKSRLGANAILGVSLAVAKATAAASGLPLYRYVGGASAHILPVPMMNILNGGAHADNPIDFQEFMIMPVGAPTLRDAVRWGSEIFHTLKSGLKAAGHNTNVGDEGGFAPNLKDANAALDFIMASIEKAGFKPGDEVAIALDCAATEFFKDGKYVYEGEGQTRDAQAQAEYLSKLAGEYPIISIEDGMAEDDFEGWKALTDLAGSKVQLVGDDLFVTNAARLKDGINMGIANSILVKVNQIGSLTETLEAVETAHKAAYTAVMSHRSGETEDSTIADLAVATNCGQIKTGSLARSDRLAKYNQLIRIEEQLGRAARYAGRTVVRG

SEQ ID NO: 13021 - protein, 218 aa, Bacteroides thetaiotaomicron VPI-5482
MKFFIDTANLEQIQEAYDLGVLDGVTTNPSLMAKEGIKGTENQREHYIKICKIVNADVSAEVIATDYEGMIREGEELAALNPHIVVKVPCIADGIKAIKYFTEKGIRTNCTLVFSVGQALLAAKAGATYVSPFVGRLDDICEDGVGLVGDIVRMYRTYDYKTQVLAASIRNTKHIIECVEVGADVATCPLSAIKGLLNHPLTDSGLKKFLEDYKKVNG

SEQ ID NO: 13022 - protein, 245 aa, Trichodesmium erythraeum IMS101
MLKTSIPSQGIQQNPLVCQLANSIEAVWQRYLNLEPYYLPADLGYVEGRLEGEKLIIQNKCYQTAQFRKLHLELATIGPKLDILHCVMFPRISYPLPIFGTDLVGARGQISAAVVDISPQSQDRKLPEVYNYQLQALPIKEFAHPRQLPQWGEIFSEFCLFIRPTGLEEEQKFISIVESYLEIHCQQAIAQKPVSPEQQLEILKAQHHYCTQQRQNDKTRRVLEKAFGPEWTDYYLTTVLFDSPN

SEQ ID NO: 13023 - protein, 429 aa, Dechloromonas aromatica RCB
MSQTLQAVRGMNDVLPDEAEFWELFEDTIRSWLKGYGYRPIRMPIVEPTPLFKRAIGEVTDIVEKEMYSFVDGLNGEALTLRPEGTAGCVRAVIEHNLAARQTQRLYYIGQMFRHERPQKGRYRQFHQVGVESFGMAGPDIDAEMILMGARLWADLGLDGIELQLNSLGQPEERALHRAALITYFEENAELLDEDAKRRLHTNPLRILDTKNPAMQELCAAAPKLIDYLGAESLAHFEGVQRVLRDAGVPFTINPRLVRGLDYYNLTVFEWVTDKLGAQGTVCAGGRYDGLVEQLGGKPTPACGFAMGVERLIALIRESGGEPAAPAPDVYLVHQGEAAARQAFRVAEGLRDQGINVLQHCGGGSFKSQMKKADGSGATFAVIIGDDEAATGEAQLKSLRAEGSAQLKLKVDDLAEAIIGQLIDSDEEE

SEQ ID NO: 13024 - protein, 400 aa, Ralstonia eutropha JMP134
MDNWKTGTDAMFILLGAIMVLAMHAGFAFLELGTVRKKNQVNALVKILVDFAVSTIAYFFIGYTVAYGVQFMSGADTLAQKSGYELVKFFFLATFAAAIPAIISGGIAERSRFNPQLCATFVLVGFVYPFFEGIAWNQRFGIQDWITHLTGAPFHDFAGSVVVHAVGGWIALPAVLLLGARRGRYQKDGRISAHPPSNIPFLALGAWVLAVGWFGFNVMSAQTVDKISGLVAINSLMAMAGGTLAAWWAGRNDPGFAYNGPLAGLVAVCAGSDLMHPVGALVTGAVAGVLFVHLFTLAQNKWHIDDVLGVWPLHGLCGAWGGIAAGIFGSHALGGIGGVSLGAQLIGTLLGIVIAVAGGTIVYGTLKKLVGIRLDAEAEFNGADLTLHRISATPERETNW

SEQ ID NO: 13025 - protein, 444 aa, Spinacia oleracea
MVTIKSVKARQIFDSRGNPTVEADIHLDDGTFARAAVPSGASTGIYEALELRDGGKDYMGKGVFKAVQNVNEIIGPALVGKDPTEQTAIDNFMVQELDGTTNEWGWCKQKLGANAILAVSLAVCKAGAQVKKIPLYQHIAEISGNKKMVLPVPAFNVINGGSHAGNKLAMQEFMILPTGASSFREAMKMGSEVYHHLKSVIKKKYGQDATNVGDEGGFAPNIQENKEGLELLKTAIEKAGYTGKVVIGMDVAAAEFYSKDKTYDLNFKEENNDGSQKISGDALKDLYKSFVSEYPIVSIEDPFDQDDWEHYGKLTAEIGDKVQIVGDDLLVTNPKRVEKAINGKSCNALLLKVNQIGSVTESIEAVKMSKRAGWGVMASHRSGETEDTFIADLSVGLSTGQIKTGAPCRSERLAKYNQLLRIEEELGDKAIYAGADFRAPVEPY

SEQ ID NO: 13026 - protein, 112 aa, Billbergia nutans
HYPATDIPQASRFLFKQNRVRMIVDCNAKPVSVIQDETLMQPLCLVGSTLRAPHGCHAQYMANMGSIASLVMAVIINGSDEEGSRNPTKLWGLVVCHHTSPRCIPLPLRYAC

SEQ ID NO: 13027 - protein, 112 aa, Calamovilfa longifolia
HYPATDIPQASRFLFMKNKVRMICDCSAKPVKILQDDSLAQPLSLCGSTLRAPHGCHAQYMANMGSVASLVMSVTVNEDEDDDAETRSDQQPKGRKLWGLVVCHHTSPRFVP

SEQ ID NO: 13028 - protein, 254 aa, Ralstonia eutropha JMP134
MSLFDLSGKVAIVTGSSRGIGRAIAEQMAVQGAKVVISSRKLEACQEVVDAINARHGAGTAIAVPANISSRDDLQRLVDETNRTFGKVDVLVCNAASNPYYGPMSGVSDDQFRKVLDNNVISNHWLIQMVAPQMIERKEGSIIIVSSIGGLRGSPTIGVYNISKAADFQLARNLAVEFGPHNVRVNCIAPGLIKTDFARALWEDPERYKQSTQGAPLRRIGEPIEIAGAAVYLASAASSFMTGQAMVVDGGVTI

SEQ ID NO: 13029 - protein, 114 aa, Daucus carota
HYPATDIPQASRFLFQQNRVRMIVDCHATSVPVIQDDSLMQPLCLVGSTLRAPHGCHAQYMANMGSIASLAMAVIVNATGEEGTRGRNSTRLWGLVVCHHTSARSIPYPLRYAC

SEQ ID NO: 13030 - protein, 845 aa, Rhodopseudomonas palustris CGA009
MPRKVDLTSCDREPIHIPGSIQPCGCLLACDAQAVRITRISENAGAFFGRETPRVGELLADYFGETEAHALRNALAQSSDPKRPALIFGWRDGLTGRTFDISLHRHDGTSIVEFEPAAADQADNPLRLTRQIIARTKELKSLEEMAARVPRYLQAMLGYHRVMMYRFADDGSGKVIGEAKRSDLESFLGQHFPASDIPQQARLLYLKNAIRVISDSRGISSRIVPERDASGAALDLSFAHLRSVSPIHLEYLRNMGVSASMSLSIIIDGTLWGLIACHHYEPRAVPMAQRVAAEMFADFFSLHFTAAHHQRRFQSSLRTRRTLDSLTSEMSFDASVDDFLRGNLKRIADLIPSDGVGLWMNGVWTAHGSTPPADALPSILHLLTGRAGNEIVATHALTDRIAAATDYAGAAAGMLAIPLSQVAGDYLLFFRKEQVQTLNWAGDPNKTYDTGPLGDRLTPRKSFSIWKEQVDGQSVPWSPDDRDTAATIQVGLREVLLRQSEILSAERKKAEVRQRVLNEELNHRVKNILALIKSLVNQPAGEGKSLEEFASALRGRIMALSFAHDQVVRSDGGGALLDLIQAELSPYPASQITLEGPDVGVDARAYSVLALVLHELATNAAKYGALSRSSGRLKVAWTVGDDGRCDIEWTESCGPPVRPPTRQGFGTVLLSRSIPFDLGGWSEVDYLPGGVVARLGIPGQFVTETLQRLSSVQASGQSTDSSALNIADASILLVEDQLVIALDAEDMLGAIGAKLVTSVASAEEALQTIAQQPPTLAILDVNLGNGSSLPVADELERLGIPFIFATGYGDTAMIPERMRGLPIVRKPYSIDSLRGALSAMLDDRE

SEQ ID NO: 13031 - protein, 114 aa, Daucus carota
HYPATDIPQASRFLFQQKWVRMIVDCHAISVPVIQDDLLMHPLCLVGSTLRAPHGCHAQYMANMGSVASLVVAVMSMRLVRKVRGGRHSTRLWGLVVCHHMSARSIPYPLRYAC

SEQ ID NO: 13032 - protein, 185 aa, Glycine max
FIHAEQGTKLTFLPYVVKALVSALKKYPALNTSFNEEAGEVVHKHYWNIGIAADTDKGLLVPVVKHADRKSIFEISDEINELAVKARDGKLTSEEMKGATCTISNIGSAGGQWFTPVINHPEVAILGIGRIAQKPIVKDGEIVAAPVLALSLSFDHRQIDGATGQNAMNHIKRLLNNPELLLMEG

SEQ ID NO: 13033 - protein, 110 aa, Daucus carota
HYSATDIPQAVRFLFQKNKSRMIVDCHATFVPVIQDESLDKPLCLGGSTLRAPHGCHAQYMANMGSIGTLVMAVIVHANDKVTGSHQKHEEKLWGLVACHHKSARSLPFP

SEQ ID NO: 13034 - protein, 549 aa, Erwinia carotovora subsp. atroseptica SCRI1043
MKNINPSQTAAWQALQTHFDAMKDVKISELFAQDSDRFAHFSATFDDQMLVDYSKNRITAETMGKLHALARETDLPAAIHAMFAGEKINRTEDRAVLHVALRNRSNTPILVDGKDVMPEVNAVLAKMKDFSERVIGGEWKGYTGKTITDVVNIGIGGSDLGPFMVTEALKPYKNHLNMHFVSNVDGTHIAETLKPLNPETTLFLVASKTFTTQETMTNAHSARDWFLKTAQDEKHVAKHFAALSTNAKAVGEFGIDTNNMFEFWDWVGGRYSLWSAIGLSIILSLGFDNFEKLLSGAHAMDKHFASTPAEKNLPVLLALIGIWYNNFFGAETEAILPYDQYMHRFAAYFQQGNMESNGKSTDRNGNPVDYQTGPIIWGEPGTNGQHAFYQLIHQGTKLVPCDFIAPATSHNPLSDHHSKLLSNFFAQTEALAFGKSREVVEAEFTAAGKSAKEVEHVAPFKVFEGNRPTNSILLRDITPYSLGALIALYEHKIFTQGAILNIFTFDQWGVELGKQLANRILPELESDSTIDSHDSSTNGLINRFKAWRN

SEQ ID NO: 13035 - protein, 483 aa, Vibrio vulnificus YJ016
MAFADRKHPNVPRTLSIFIFFLNNGVNVHRYKKEASSLIKLATPVLIASVAQTGMGFVDTVMAGGVSATDMAAVSVAASIWLPSILFGIGLLMALVPVVAQLNGAGKREQVPFEIQQGAVMALLISIPIIGVLFQTQWILGYMNVDAVMATKTIGYIHAVMFAVPAFLLFQTLRSLTDGLSLTKPAMVIGFIGLLLNIPLNWMFVYGKLGAPALGGVGCGVATAIVYWIMFLLLLLYVTTSQRLRQVQLFTTFHPPQLNAQVKLFKLGFPVAAALFFEVTLFAVVALLVAPLGSTVVAAHQVAINFSSLVFMLPMSIGAATSIRVGHMLGEKSTEGARIASHVGILVGLSTAVFTALLTVILREQIALLYTDNRVVITLAMQLLIFAAIYQCTDAIQVIAAGALRGYKDMRAIFNRTFIAYWLLGLPTGYVLGLTDWIVEPMGAQGFWIGFIVGLSSAAAMLGVRLHWLHRQNDEIQLNYEAR

SEQ ID NO: 13036 - protein, 528 aa, ASPERGILLUS NIDULANS FGSC A4
MTIDEDEKTAPVHLEYDGHEADDDSIENIATSWFVWLVSLTASIAGSLFGYDTGIISAVLVYLGSDLDGRPASENEKQLITSLCSGGSFVGAIIAGLTADKFGRKPAIYVGCVLFTVGAVLQGAAYSIAQMSVGRLIVGFGVGSASMVVPLYIAELSPTKVRGRLIGLNNMSITGGQVISYGIGAAFAHVPHGWRYMVGLGGVPSIILACLLPFCPESPRQLVYHGKTQEAETVIRKIYKGASDAQVAAKVRLIVRACDESRELNKDSTRWAKIKLLHSNPAYFRALVCACGFAVIAQMSGFNTLMYYSATLFDLVGFSDPVAVGIVVAGTNFVMTWVNMMLVDPLGRRRVVLLTAWGMSAGLIAVAIAFKFIPVDTSTLELETDTVSPPAIVVLIFIIWFVFFYGASMGNTAWMNTDFFPMEVRAIGTMFQTCCTWGSNIIVSSTFLSMMQGITPSGAFGFYAAICGFGYILIYFFYPEVSGLSIEEIREVFQHGFGVAYSRKLRKTRKAAARAASAAGEEVEAKTV

SEQ ID NO: 13037 - protein, 906 aa, Pseudomonas syringae pv. syringae B728a
MNSLALHTPRITASTCCYCGVGCGVLIEHDGEHILGVSGDPKHPANFGKLCSKGSSLHLTGDIEARALYPELRLSKGLARSVTHWDTALEHAANVFAQTIREHGPDSVAFYISGQLLTEDYYAFNKLARALIGTNNIDSNSRLCMSSAVAGYKRSLGADAPPCSYEDIELSDCVMIVGSNMAYAHPILFRRLEEAKNHRPQMKLIVIDPRRTDTCELADLHLAIQPGTDVALFHGILHILMSERLIDPAFIAAHTQGYEELATLVHDYPPEHVAALCGITLEQLHTCARWVGEAPAFLSLWCMGLNQSTAGSAKNSALINLHLATGQIGKPGAGPFSLTGQPNAMGGRETGSLSNLLPGHRDAANPQHRQEVADYWGVDSLPASPGLSAIELFEQMQNGTIKALWIACTNPAQSLPDQNRIRQALETCPFVVLQEAFKTTETARYADLLLPAASWGEKEGTVTNSERRISNVRKAIQAPGEARSDWAITVDFAQRLQQRLQPDAPALFDFATPKALFDEFKGLTVGRDLDMSGIDRELIDQQGPQQWPFPRGASSGTQRLYSEGIFPTDSGRAQFLSEPYIAARELRDADYPLTLNTGRLRDQWHGMSRTGTAARLFGHVSEAVLSINPQDMLSHDLQPGDLVKLISRRGELLLPVSSEDSVAVGQAFVPMHWGDRFLKGGVNVLTQPAFDPISKQPELKHAGVRIEKAHLPWQFFALVEGNVQQRMETLRALCDTFTYLSMGLAGRGRPALVIRAASAEAPDSALLQQIDRVLGLDEGPVMAYDDPKRSIGKRVRIDDDRITAIRLAGETLARHWLQTLWLEERVEASLRRWLLAPLSSEPGKDSTQTRDKTLCNCMNVSQNAVMSAIERGLDLNQLKTQLGCGTQCGSCVPEIRRLIHTVAVTE

SEQ ID NO: 13038 - protein, 426 aa, Caulobacter crescentus CB15 [sequence omitted]

SEQ ID NO: 13039 - protein, 440 aa, Davidiella tassiana
MPISKIHSRYVYDSRGNPTVEVDIVTETGLHRAIVPSVASTGSHEACELRDGDKSKWAGKGVTKAVANVNEIIAPALIKENLDVKDQAAVDAFLNKLDGTTNKTKIGANAILGVSMAVAKAAAAEKRVPLYAHISDLSGTKKPFVLPVPFMNVVNGGSHAGGRLAFQEFMIVPSGAPSFTEAMRQGAEVYQKLKSLTKKRYGQSAGNVGDEGGVAPDIQTAEEALDLITDAIEEAGYTGQIKIAMDVASSEFYKADEKKYDLDFKNPDSDKSKWITYEQLADQYNELAAKYPIVSIEDPFAEDDWEAWSYFYKTSGSDFQIVGDDLTVTNPEFIKKAIETKACNALLLKVNQIGTITEAINAAKDSFAAGWGVMVSHRSGETEDVTIADIVVGLRAGQIKTGAPARSERLAKLNQILRIEEELGDKRLYAGDNFRTAINL

SEQ ID NO: 13040 - protein, 440 aa, Mycobacterium smegmatis
MDPVSQLEADARHLVRYSGRGGFTPTVIGSARGSLMFTEDGRELIDFTSGQMSAILGHSHPEIVATVQSQIAHLDHLYSGMLSRPVIELSRRLAETLPPTLDKVLLLSTGAESNEAAVRMAKLVTGKHEIVSFARSWHGMTQAAANATYSAGRRGYGPAAPGNFALPVPHRFRPDITDELGELDWRRQLDLGFDLIDAQSVGSLAACLIEPILSSGGIIELPPGYLAALAQKCREREMLLIVDEAQTGLCRTGDWYAFEHDGVVPDILTLSKTLGAGLPLAAVITSSEIEQRAQEREFLFFTTHVNDPLPAAVGLTVLDVLSRDRLDVRARELGQRLRAGLDELAGRHPIVADVRGRGLLLGMELSAEDTPGVSADQLGAVVTRRCFELGLHMNIVQLPGMGGTFRLAPPLTATDNEIDRALEIMDEALAYAREPAVHRS

SEQ ID NO: 13041 - protein, 177 aa, Zea mays
  unsure (1)..(177): unsure at all Xaa locations
MASSSAAFAILLFFFAVAVQSARGGHQLACEELPPDACAFAVSSGGRRCVLERTPEGAHRCQTSAVVGMQMQGGWVETRXDACVRACGVDRAALGLPVASAAAEDRRAFRALCSPACRDGCPNVVDLYATLAAAEGVSLPALCEAEKKAGNRRMMTGKAPLGAPVAAPEAAPAPCEE

SEQ ID NO: 13042 - protein, 165 aa, Leptospira interrogans serovar lai str. 56601
MRFNMNETLYDLTATLNNGKEQKLENYKGKVLLIVNTASECAFTPQYAGLQNLYSKYKTEGLEILGFPCDQFKHQEPGSDETIKNFCQKNYGVEFPIFKKIEVNGDNAHPVFRFLRNKASGFFGNSIKWNFTKFLVDKQGNVIKRYSPITTPENIEKEIQNLLKR

SEQ ID NO: 13043 - protein, 119 aa, Ceratophyllum demersum
HYSATDIPQASRFLFMKNKVRMICDCHAKPIKVYQDENLPIDLTLCGSILRAPHSCHVQYMLNMGSVASLVMAVVVNEGEDDQGESTESGQQRKKKLWGLVVCHNTSPRFVPFPLRYAC

SEQ ID NO: 13044 - protein, 280 aa, Streptococcus agalactiae
MTDTMILNDNHKIPTLGLGTWMIDNDRVAQVVKDAIELGYRHINTAQAYNNEKGVGVGIKESGITRESLFVTTKIAAEHKDYESATKSIDQSLEALGLDCIDLMIIHSPQPWKEWRETDKHFDQGNLEAWRALEDAQKSGKVKSIGVSNFLEKDLKNGHVKPAVNQILAHIGNTPFDLIDYCQSKGIQVEAYSPIAHGQALKSDGIQKMAEKYGVSVAQLCIQYLLQLNLIVLPKASSKEHLQSNLDFDFVISDEDMSILKSLMFDDYGEFSNFPVFSEK

SEQ ID NO: 13045 - protein, 370 aa, Sulfitobacter sp. EE-36
MKTRAAVAVAAGQPLEVMDVNLEGPKRGEVLIEINATGLCHTDEFTRSGDDPEGIFPAILGHEGAGVVLEVGEGVTTLEVGDHVIPLYTPECRECEYCLSGKTNLCQAIRVTQGQGLLPDGTTRFSMMDGTPIHHYMGCSTFANHTVIPEIALAKVRKDAPFDKICYIGCGVTTGIGAVINTAKVEIGARCVVFGLGGIGLNVIQGLRMAGADQIVGVDLNDDKEETGRYFGMTDFVNPTKVEGDMVAHLVELTKGGADYTFDATGNTKVMRQALEAAHKGWGESIIIGVAPAGAEISTRPFQLVTGRVWKGTAFGGAKGRTDVPKIVDWYMNGKIEIDPMITHKLTLDQINEGFELMHKGESIRAVVEF

SEQ ID NO: 13046 - protein, 444 aa, Desulfovibrio vulgaris subsp. vulgaris str. Hildenborough
MPGTRFEKDGLVIDTTIPHLGPAKIPSPLVYCHHTNDTGVPLYLDSEFIEELAGESTALNFEAAGPRRNLYFDPSKAKCAIVTCGGLCPGINDVIRAIVMEARHAYDVPAVLGIRYGLEGFIPKYRHDVVELTPDVVSDIHQFGGTILGSSRGPQSPEEIVDALERMNISALFMIGGDGTLKAASNIVQEVMRRNLKISVIGVPKTIDNDINFISQSFGFETAVYKATEAIQCAHTEAIGAMNGIGLVKLMGRESGFIAAHATLSLKEVNFVLIPEAPFTLHGEGGLLPTLERRLRARAHAVIVVAEGAGQNLLADTGKKDASGNPILGDIAQLLRAEIKAYCDERGLPHTLKYIDPSYIIRSVPANANDRVYCGFLGQHAVHAAMAGRTGMVVAKLMDRYVHLPLELVTLRRRKLNIRSDYWRAVLESTGQAELAGMVPGLDE

SEQ ID NO: 13047 - protein, 129 aa, Synechocystis sp. PCC 6803
MTSIMMNTVQTYGKTVEKNYKAGEVIFQEGAVELSMFGVLEGEVEMTLQGKFIETIEAGGIFGIGAIVHSDHQRASTAIAKTDCKLVAMDREHFLFAVQQTPMFALEVIQNYSDRYRSLKALYEKAIAE

SEQ ID NO: 13048 - protein, 1156 aa, Glycine max
MLQQAERRIPPFRRRKSTPHEQRLSHHSSNNNNNIDSMSKAIAQYTEDGVHAVFEQSGESGRSFNYSESIRIASESVPEQQITAYLVKIQRGGFIQPFGSMIAVDEPSFRILGYSDNARDMLGITPQSVPSLDDKNDAAFALGPQSVPSLDDKNDAAFALGTDVRALFTHSSALLLEKAFSAREISLMNPIWIHSRTSGKPFYGILHRIDVGIVIDLEPARTEDPALSIAGAVQSQEALVRAISQLQSLPSADVKLLCDTVVESVRELTGYDRVMVYKFHEDEHGEVVSESKRPDLEPYIGLHYPATDIPQASRFLFKQNRVRMIVDCHASAVRVVQDEALVQPLCLVGSTLGAPHGCHAQYMANMGSIASLVMAVIINGNDEEGVGGRSSMRLWGLVVCHHTSARCIPFPLRYACEFLMQAFGLQLNMELQLAAQSLEKRVLRTQTLLCDMLLRDSPTGIVTQSPSIMDLVKCDGAALYFQGNYYPLGVTPTEAQIRDIIEWLLAFHGDSTGLSTDSLGDAGYPGLPRLGMQFVGWQVAYITEKDFLFWFRSHTAKEIKWGGAKLILRTRMMGQRMHPLSSFKAFLEVVKSRSLPWENAEMDAIHSLQLILRDSFKDAEHRNSKAVVDPHVSEQELQGVDELSSVAREMVRLIETATAPIFAVDVDGHVNGWNAKVSELTGLPVEEAMGKSLVHDLVFKESEETVNKLLSREEDKNVETKMRTFGKEHQNKAAFLVVNACSSKHFTNNVVGVCFVGQNVTGQKIVMHKFINIQGDYKAIVHSPNPLIPPIFASDDNTCCLEWNTAMEKLDPSNENVTVGGVDVIGKMLVGEVFGSCCQLKGSDSITKFMIVLHNALGGQDTDKFPFSFLDRHGKYVQTFLTANKRVNMEGQIIGAFCFLQIMSPELQQALKAQRQQEKEFLGRMKELAYICQGVKKPLSGIRFTNSLLEATSLTNEQKQFLETSVACEKQMLKIIRDVDLESIEDGSLELEKGEFLLGNVINAVVSQVILLLRERNLQLIRDIPEEIKTLAVYGDQLRIQQVLSDFLLNIVRYAPSPDGWVEIHVRPRIKQISDGLTLLHAEFRMVCPGEGLPPELIQDMFNNSRWGTQEGLGLSMSRKILKLMNGEVQYIREAERCYFYVLLELPVTRRSSKKC

SEQ ID NO: 13049 - protein, 324 aa, Xanthomonas campestris
MSKRIRKAVFPVAGLGTRFLPATKTVPKEMLPIIDKPLIQYAVDEAIQAGCDTLIFVTNRYKHSIADYFDKAYELEQKLERAGKLEQLELVRHALPEGVRAIFVTQAEALGLGHAVLCAKAVVGDEPFAVLLPDDLMWNRGDAALTQMADVAEASGGSVIAVEDVPHDKTASYGIVSTDAFDGRKGRINAIVEKPKPEVAPSNLAVVGRYVLSPKIFEYLESTGAGAGGEIQLTDAIAELLKQEQVDAFRFEGRRFDCGAHIGLIEATVHFALEHEKHGAPAKEIIRSALAAADARVSVRLAVLQRTAPLAPFWVRALEEWCHA

SEQ ID NO: 13050 - protein, 505 aa, Hordeum brevisubulatum
MAAPPAIPRRGLFIGGGWREPTLGRHIPVINPATEATIGDIPAATAEDVELAVAAGGPVLARRREHWARASGAVRAKYLNAIAAKIKEKISYLALLETVDSGKPKDEAVADMDDVAACFEYYAGLAEALDGKQHAPISLPMEEFKTYVLKEPIGVVGLITPWNYPLLMATWKVAPALAAGCTAVLKPSELASLTCLELGAICEEIGLPSGVLNIITGLGPDAGAPIASHPHVDKIAFTGSTATGKMIMTAAAQMVKPVSLELGGKSPLVIFDDVADIDKAVEWAMFGCFFNGGRVCSATSRLLLHEKIAARFLDRLVEWVKNIKISDPLEEGCRLGSVISKGQYEKIKKFISTARSEGATILHGGDRPKHLGKGFFIEPTIITDVSTSMQIWREEVFGPVICVKVFKTESEAVELANDTHYGLAGGVISDNLERCERIAKVIHSGIVWINCSQPTLVQAPWGGNKRSGFGRELGEWGLENYLSVKQVTRYCKDELYGWYQRPSKL

SEQ ID NO: 13051 - protein, 252 aa, Mirabilis jalapa
MGLSLILLVSLVLIAFNLFFHGVYANYGGWTNAHATFYGGGDASGTMGGACGYGNLYSQGYGTNTAALSTALFNNGLSCGSCYELKCNGDPKWCLRGSIIITATNFCPPNYALANNNGGWCNPPLQHFDMAQPAFLKIAQYRAGIVPVSFRRVPCMRRGGIRFTINGHSYFNLVLISNVGGAGDIHAVSIKGSRTGWQTMSRNWGQNWQSNAYLNGQTLSFRVTTSDGRSVTSNNIVPYHWQFGQTFVGAQF

SEQ ID NO: 13052 - protein, 71 aa, Glycine max
MGGGMEANKNKFIEDWGTARENLEFNFRWTRRNLALVGIFGIAIPVLVYKGIVREFHMQDEDNGRPYRKFM

SEQ ID NO: 13053 - protein, 355 aa, Corchorus capsularis
MGSLETERKIVGWAATDSTGHLAPYTYSLRDTGPEDVDIKVISCGVCHTDIHQIKKDLGMSHYPMVPGHEVVGEVVEVGSDVTKFNVGDVVGVGVIVGCKNCHPCKSEIEQYCNKKIWSYSDVYTDGKPTQGGFAASMVVDQKFVVKIPDGMAAEQVAPLLCAGVTVYSPLKHFGLMESGLRGGILGLGGVGHMGVKIAKAMGHVTVISSSDKKREEAMEHLGADEYLVSSDVESMQKAADQLDYIIDTVPVVHPLEPYLSLLKLDGKLILMGVINAPLQFVSPMVMLGRKSITGSFIGSMKETEEMLEFCKEKGLASMIEVIKMDYINTAFERLEKNDVRYRFVVDVAGSKLIP

SEQ ID NO: 13054 - protein, 238 aa, Bifidobacterium longum DJO10A
  unsure (1)..(238): unsure at all Xaa locations
MAINPPVDATQTPEWAALQKHYDELQVEGVSLKKWFAEDAERVEKLSFDAGDLHFDLSKNLIKPETLQLFANLAKAVKLDERTKAMYTGVHINNTEDRAVLHTALRRPVEDEGKYIVDGQDTVKDVRETLDKIYAFADDVRSGKWTGVTGRKIETVVNIGIGGSDLGPVMVYEALKPYADAGISARYISNIDPNDLAEKTKGLDPETTLFIIVSKTFTTLXXXXXXXXXXXXXXXXXP

SEQ ID NO: 13055 - protein, 265 aa, Bifidobacterium longum DJO10A
MIFGPARFEEFLHGFHEIDEYFANTPFEKNVVVLLGMLNVWYRNFFKVASHAVLPYDQYLHRFPAYLQQLTMESNGKSVRWDGTPVTSETGEIFWGEPGTNGQHAFYQLIHQGTQLIPADFIAFVNTPNPTKDGDQDVHELFLGNYFAQTKALAFGKTADEVRAEGTPEEIVPARVFSGNRPTTSIFGVALTPFALGELIALYEHITFVEGTVWGLDSYDQWGVELGKQLAKQITPAISQDDDALAAQDASTQSLIKFYRANREF

SEQ ID NO: 13056 - protein, 356 aa, Streptomyces antibioticus
MKALVLAGGSGTRLRPITHTSAKQLVAVANKPVLFYGLEAIAAAGITDVGLIVGDTAGEVPRAVGDGAKFGLDITYIEQSRPLGLAHAVLIAHTYLGDDDFVMYLGDNFIVGGIDDLVRTFRDGRRPAARILLTHVSDPSGFGVAELDDDGRVVGLEEKPRHPKSDLALVGVYFFTPAIHEAVRAIEPSWRGELEITHAIQHLIDNGADIQSMVIEGYWKDTGNVADMLEVNRTVLEDLEPRIEGTVDEHTVVIGRVVVGEGARVTNSRIMGPAIIGAGPEISDSYIGPFTSVGDNCRITGSEMEFSIMLAESAITGVRRIEGSLIGRNVQVTQSLHAPNAHRFVLGDHSKVEIQS

SEQ ID NO: 13057 - protein, 428 aa, Caulobacter crescentus CB15
MSIDILMPALSPTMEEGTLAKWHVKVGDTVKAGDVIAEIETDKATMEVEAVDEGVVEAILVPAGTENVKVNALIAKLAGEGDSPAPAPKVEAPKAAAAAPVPAAAPAPAVPAPAAPVAADGSRVLASPLARRLASAAGLDLKALKGTGPHGRVVKSDVEAAKSGAPAAKAAPASAPAAVAPTAAAPRQIQSLEQMGIPAGSYDLVPLDGMRKTIARRMTESFRDVPHFPLTIDLEIDALLAARAKINSLLEKQGVKVSVNDIVIKAAAVALKQVPEANASYTPEGIAMHHHADIAVAVAVDGGLITPIIRKAETKGLAQISAEMKDLAQRAKDKKLKPEEFQGGTFSISNLGMFGIKSFASIINEPQGAIMSVGAGEQRPVVKNGEIKVATVMTVTLTCDHRVVDGSVGAKFLAAFRPLIEEPLTLIV

SEQ ID NO: 13058 - protein, 474 aa, Actinobacillus pleuropneumoniae serovar 1 str. 4074
MSKEIKTQVVVLGAGPAGYSAAFRCADLGLETVIVERYSTLGGVCLNVGCIPSKALLHVAKVIEEAKHAEKNGITFGEPNIDLDKVRAGKEAVVSKLTGGLAGMAKARKVTVVEGLAAFTDPNTLVARDRDGNPTTIKFDNAIIAAGSRPIQLPFIPHEDPRVWDSTDALKLKEVPKKLLIMGGGIIGLEMGTVYNALGSEVEVVEMFDQVIPAADKDVVAIYTKQIEKKFKLMLETKVTAVEAKDDGIYVSMEGKACNDTKRYDAVLVAIGRVPNGKLIDAGKAGVNVDDRGFIAVDKQMRTNVPHIFAIGDIVGQPMLAHKGVHEGHVAAEVIAGQKHYFDPKVIPSIAYTEPEVAWVGKTEKECKQEGLNYEVAKFPWAASGRAIASECSEGMTKLIFDKDTHRLLGGAIVGSNGGELLGEIGLAIEMGCDAEDIALTIHAHPTLHESVGLAAEVFEGSITDLPNAKAKKR

SEQ ID NO: 13059 - protein, 419 aa, Bacteroides thetaiotaomicron VPI-5482
MQTIDKFNFAGKKAFVRVDFNVPLDENFNITDDTRMRAALPTLKKILADGGSIIIGSHLGRPKGVADKFSLKHIIKHLSELLGVEVQFANDCMGEEAAVKAAALQPGEVLLLENLRFYAEEEGKPRGLAEDATDEEKAAAKKAVKESQKEFTKKLASYADCYVNDAFGTAHRAHASTALIAKYFDTDNKMFGYLMEKEVKAVDKVLNDIQRPFTAIMGGSKVSSKIEIIENLLNKVDNLIIAGGMTYTFTKAMGGKIGISICEDDKLDLALDLIKKAKEKGVNLVLAVDAKIADAFSNDANTQFCAVDEIPDGWEGLDIGPKTEEIFANVIKESKTILWNGPTGVFEFENFTHGSRTVGEAIVEATKNGAFSLVGGGDSVACVNKFGLASGVSYVSTGGGALLEAIEGKVLPGIAAINE

SEQ ID NO: 13060 - protein, 160 aa, Caulobacter crescentus CB15
MAMSIYDYSAKTLDGQDVSLADYRGQVLLIVNTASKCGFTPQYEGLEALYKAHKDRGFTVLAFPCNQFGAQEPGNAEEIANFCSLTYDVSFPVMSKIDVNGADAHPLYKFLKKEQKGVLGTEAIKWNFTKFLIGKDGQVVDRFAPTVKPEDLKVAVEALL

SEQ ID NO: 13061 - protein, 632 aa, Actinobacillus pleuropneumoniae serovar 1 str. 4074
MSKQINVPDIGSDEVSVTEVMVKAGDTITVDQSIINVEGDKASMEVPAPEAGVVKEVLVKVGDKVTTGSPMLVLEAAESAPALVAEAPVQAVAPVATASAVVEVNVPDIGSDEVNVTEIMVKVGDSVEVDQSIINVEGDKASMEVPAPIAGVVKEILINVGDKVTTGKLIMKFETVSAAPAAEEAPAQAAAPVATASAIKEVNVPDIGGDEVNVTEIMVNVGDTVSEEQSLITVEGDKASMEVPAPFAGVVKEILVKSGDKVSTGSLIMKFEVAGAAPAAAPAPAVQAAAPAPAAQPAAQPAQSGNVSGLSQDVVAAAGAYAHATPVIRRLAREFGVNLDKVKGSGRKGRIVKEDIQTYVKTAVQVFEKQGGTAAAATGAANGAGLGLLPWPKVDFSKFGEVEEVELSRINKISGANLHRNWVMIPHVTHFDRTDITDLEAFRKEQNKLAEKQKLDVKITPVVFIMKAVAKALEAFPRFNSSISEDAQRLTLKKYINIGVAVDTPNGLVVPVFKNVNKKGIVELSRELMEVSKKARDGKLTASDMQGGCFTISSIGGLGTTHFTPIVNAPEVAILGVSKSEMAPVWNGKEFEPRLMLPLALSFDHRVIDGADGARFLTYINGVLADIRRLVM

SEQ ID NO: 13062 - protein, 1263 aa, Nostoc sp. PCC 7120
MDTQQKTLKNSALQQTPIAIIGMSALFAKAENLQQYWDNILARINGISEVPETAWSLKDYYDPDPSTPDKTYARAGGFLPEIDFDPLEFGLPPDTLEALDSANLLALVLAKQALKDAGYSEGKEFNRETTGVILGASGLWKSITPLTARLQYPVWEKVLKNSGLSAEQTEKIIEKMQAAFVPWTENSFPGMLPNVVAGRITNRLDLGGTNCVVDAACASSLSALKMAISELIEGRCDMMLTGGFDTDNSILNYMCFSKTPAFSKKDYLNPFDATSDGMMVGEGLGMLVIKRLADAERDGDRIYAVIKGIGTASDGRYKSIYAPRVEGQVRALRRAYEDAGFSPATLGLMEAHGTGTPAGDFCEFTALNQVLTENQAGKQQIALGSVKSQIGHTKAAAGAASLIKATLALHHKILPPTINVTQPNPKFKIEESPFYINTETRPWIQNGDIPRRAGVSSFGFGGTDYHVVLEEYTPTLPQGGDRIHSTAQSILLWADTPQQLSQKCQATLEQLQSDNGGEQYNQLQNHSKTALIPETSARVGFVATSLEEAQKLLKAAIKQLQIQPQAFAWEHPQGIYYRQTGLSLKGKVVALFPGQGSQYLNMGREISLNFPEIQQAYQALDQLMAQDNLPALSDVVFPIPAFSPETIKQQSQQLQRTENAQPAIGALSLGLYKILQKVGFKPDFVAGHSFGELTALWAAGVFSDEDYCYLIKARGQAMTIPQGSHDCDRGTMLAVSGDVAKIKQLIAGMTKVQIANYNAPEQVVLSGSKPEIAALEKVLSKQGYTVTPLTVSAAFHTPFVRHASQPFAEALNRVTFNTPQIPVYANMTGNAYPTEATAIRQLLEAHLLNAVQFAQEIENLYAQGGYCFVEIGPRQILTNLVKQTLGDRPHIAIALNPSRQKDSDVQLRQGVIQLRVMGLSLEDLDASPRKLPAQKSKSKGLSIKLNATNYISDKTKAAFEFAFKPEPVVQLASTPLDQVASDAATVVSDSPAQPLVASSNDEIAITPVSVMEESVSLGEIYHQSDYQLIISKDETNTMNNSTHNTVAYLFQQFYQHQKEMLQVHEQYVKTQSQSFQAFLQLLQQQEVLIPQGSTSAIAEQTVVVPAPVVELPQTPVASVVELPKTPVAPVVESPKVTPAPVAEPVHISHIANYLEPRYSAPTPQPTLVVTETASPAASESYISRALMEVVSDKTGYPTEMLELEMDLEADLGVDSIKRVEIMGTLHESFPQLPKLSPEELAEKRTLAQIVQYLAGQIMVAEKK

SEQ ID NO: 13063 - protein, 361 aa, Saccharomyces cerevisiae
MLYPEKFQGIGISNAKDWKHPKLVSFDPKPFGDHDVDVEIEACGICGSDFHIAVGNWGPVPENQILGHEIIGRVVKVGSKCHTGVKIGDRVGVGAQALACFECERCKSDNEQYCTNDHVLTMWTPYKDGYISQGGFASHVRLHEHFAIQIPENIPSPLAAPLLCGGITVFSPLLRNGCGPGKRVGIVGIGGIGHMGILLAKAMGAEVYAFSRGHSKREDSMKLGADHYIAMLEDKGWTEQYSNALDLLVVCSSSLSKVNFDSIVKIMKIGGSIVSIAAPEVNEKLVLKPLGLMGVSISSSAIGSRKEIEQLLKLVSEKNVKIWVEKLPISEEGVSHAFTRMESGDVKYRFTLVDYDKKFHK

SEQ ID NO: 13064 - protein, 162 aa, Triticum aestivum
  unsure (1)..(162): unsure at all Xaa locations
MAPAVMASSATTVAPFQGLKSTAGLPVSRRSSASLGSVSNGGRIRCMQVWPIXEGIKNSETLSYLPPLSTEXXWKQVDYLDXSKWXPAPXQASWFLSRXXNXSPXYYDGPYWDKXNLPCLXGPHKLNEWRSQEGLTLFPFNCAKWMRQASSNGVRGSGKAKY

SEQ ID NO: 13065 - protein, 466 aa, Caulobacter crescentus CB15
MSTEFDVVVIGAGPGGYVAAIRASQLGLNTAIIERENLGGICLNWGCIPTKALLKSGEVYEQLSHLGGYGLSVEKASFDFGKIIERSRGVAKNMSGGIAFLMKKHKIEVIEGEAKLEKGAPAPKVVVALKAGGSRTVQAKNVILASGARAREIPAIGAVSDGDKIWTYRDALAPKSMPKSLVVIGSGAIGIEFASFYRALGAEVTVVEAIDRIMPVEDEEVSKAAQKAFEKRGIKFRVGAKVSKIEKTKDGVAVTVEAGGKIEQLTAEKCIVAVGIAPNNDGLEALGVSLDRGHVVTDKHCRTNVPGLYAIGDIAGAPWLAHKASHEGIHAAEAIAGYKTPNVLSPIPGCTYANPQVASVGYTEAGAKAAGIEVKAGRFPFRVNGKAVASGETEGFVKTVFDAKTGALIGAHMIGHEVTEMIQGFVTAITLEATEEDLHGVVYAHPTMSEAMHEAALDAYGRVLHI

SEQ ID NO: 13066 - protein, 511 aa, Bacillus megaterium
MSKKPVALIILDGFALRDEDKGNAVTHAKKPNFDRFWNEYPHATLQASGEAVGLPEGQMGNSEVGHLNIGAGRIVYQSLTRVNVAIREGEFEQNETLLAAVKHAKEKGTNLHLFGLLSDGGVHSHIEHLYALLRLAKSEGLEKVYIHGFLDGRDVAPQSAETYLKELNEKIEEYGVGEIATLSGRYYSMDRDKRWERVEKSYRAMVYGEGPSYTSAEECVKDSYDNGIYDEFVLPSVITKEDGSPVATIQDEDAVIFYNFRPDRAIQISNTFANEDFRSFDRGEKHPKHLHFVCLTHFSETVDGYVAFKPINLDNTLGEVLSQNNLKQLRIAETEKYPHVTFFMSGGREAEFPGETRILIDSPKVATYDLKPEMSAYEVTDALLAEIEGDKQDAILLNFANPDMVGHSGMLEPTVKAIETVDECLGKIVDAILAKGGTAIITADHGNADEVITLEGNPMTAHTTNPVPVIVTKQGLELREDGILGDLAPTMLTLFLDVAQPKEMTGKTLIK

SEQ ID NO: 13067 - protein, 511 aa, Geobacillus stearothermophilus
MSKKPVALIILDGFALRDETYGNAVAQANKPNFDRYWNEYPHTTLKACGEAVGLPEGQMGNSEVGHLNIGAGRIVYQSLTRINIAIREGEFDRNETFLAAMNHVKQHGTSLHLFGLLSDGGVHSHIHHLYALLRLAAKEGVKRVYIHGFLDGRDVGPQTAPQYIKELQEKIKEYGVGEIATLSGRYYSMDRDKRWDRVEKAYRAMVYGEGPTYRDPLECIEDSYKHGIYDEFVLPSVIVREDGRPVATIQDNDAIIFYNFRPDRAIQISNTFTNEDFREFDRGPKHPKHLFFVCLTHFSETVKGYVAFKPTNLDNTIGEVLSQHGLRQLRIAETEKYPHVTFFMSGGREEKFPGEDRILINSPKVPTYDLKPEMSAYEVTDALLKEIEADKYDAIILNYANPDMVGHSGKLEPTIKAVEAVDECLGKVVDAILAKGGIAIITADHGNADEVLTPDGKPQTAHTTNPVPVIVTKKGIKLRDGGILGDLAPTMLDLLGLPQPKEMTGKSLIVK

SEQ ID NO: 13068 - protein, 264 aa, Oryza sativa
MAPPSLPILLVLLSLSSSLSSSSAAAAGRWTDAHATFYGGADASGTMGGACGYGNTYGQGYGTDTAALSAVMFGDGLSCGACFELRCGGGGGGDRRGCLPPAAGKSIVVTATDLCPANHALPGDRGGWCNPPLHHFDLSQPAFLRIARFQSGIVPVSYRRVACRRKGGMRFTINGHSYFNLVLVSNVGGAGDVHAVAVKAGGGRKARWQAMARNWGQNWQSGALLDGQALSFTVTTGDRRSVVSYNVAPAGWAFGQTFTGRQFT

SEQ ID NO: 13069 - protein, 322 aa, Magnetococcus sp. MC-1
MNTIAVMTSGGDAPGMNSAIRAVVRTAIGAEMEVLGIRRGYSGLLEGDLIPMDAASVGNILQKGGTVLGTSRCAEFLKPEIRQEAANILRRKHVDGLVVIGGNGSFNGAYQLHQEHDIPVVGVPGTIDNDIQGTHYTIGFDTAVETGVYAVDKIRDTANAHDRIFLVEVMGRHSPAIAIHTGVCTGAEHVIHTPENTDYDTLVSGIRRGRKRGKNSFIIIVAEGQVPGSAYQVQKHLADNYQIASHVAILGHLQRGGSPTAHDRFIAASMGFHAVQALKTGEVATVTACRDGRIQLVPLQECLEKNDAIDAFSLNLTQQLAI

SEQ ID NO: 13070 - protein, 399 aa, Zea mays
  unsure (1)..(399): unsure at all Xaa locations
THASFSSFFPVGFRSGNHFPTTRGRSTRPRAVELGSEASEFCHYKGFYSSNYLPMTPKSVNDIHKRGGTVLGTSRGGHDTKKIVDNIQDRGAIQVYTLGGDGTHQGAHGAINXSRGRGLQVAVAGIPKTIDNDIAVIDKSFGFDTAVEEAQRAINAAHVEASSAENGIGLVKLMGRYSGFIAMYATLASRDVDCCLIPESPFYLEGEGGLFEYIDRRLKENNHMVIVVAEGAGQDLIAQSIPAADQQDASGNKLLLDVGLWLTHKIKDYCKSKKMEMTIKYIDPTYMIRAIPSNASDNVYCTLLAHSAIHGAMAGYSFTVGMVNGRHAYIPFHRVTSTRNKVRITDRMWARLLSSTNQPSFLSQKDIDAAREADKAANRTKSREDAKKQSTPVLANGEK

SEQ ID NO: 13071 - protein, 122 aa, Desulfovibrio vulgaris subsp. vulgaris (strain Hildenborough)
MSKHILIVDDSKTVRNLVAFIMKKEGFKVTTAEDGLDGLEKLYSSEGVDLIISDVNMPRMDGFTFIKTVREQDTYRNLPIVVLSTEGQEKDIQMGMSLGANLYMVKPAQPEKMVKNIKMLLG

SEQ ID NO: 13072 - protein, 390 aa, Streptococcus agalactiae NEM316
MKIGIDKIGFATSQYVLEMTDLAIARQVDPEKFSKGLLLDSLSITPVTEDIVTLAASAANDILSDEDKETIDMVIVATESSIDQSKAASVYVHQLLEIQPFARSFEMKEACYSATAALDYAKLHVEKHPDSKVLVIASDIAKYGIKSTGESTQGAGSIAMLISQNPSILELKEDRLAQTRDIMDFWRPNYSDVPYVNGMFSTKQYLDMLKTTWKEYQKRFNTSLSDYAAFCFHIPFPKLALKGFNKILDNNLDEQKKAELQENFEHSITYSKKIGNCYTGSLYLGLLSLLENSQNLKAGDQIAFFSYGSGAVAEIFTGQLVDGYQNKLQSDRMDQLNKRQKITVTEYEKLFFEKTILDENGNANFNTYRTGTFSLDSICEHQRIYKKINN

SEQ ID NO: 13073 - protein, 546 aa, Cytophaga hutchinsonii
MTNTSDFTSWKKLNEHYSKSSNLQMRDLFAADKDRFSKYSVQFNDILVDYSKNRITDETISLLIALAEEAGLKQAIEDMFAGKKINNTEKRSVLHVALRNRSNTPILSDGKDVMPEVNAVLEKMKGFCEKVRSGAWKGYTGKSITDIVNIGIGGSDLGPVMVTEALKPYGSPTLHVHFVSNVDGTHIVETTKKLNPETTLFIIASKTFTTQETITNAESAKAWFLQTAKDEAAVAKHFVALSTNAKSVAAFGIDTENMFEFWDWVGGRYSLWSAIGLSIALYIGYDNYIELLSGAHAMDKHFKETPFAKNIPVLLALIGIWYNNFYKAESHAILPYDQYMHRFAAYFQQGDMESNGKRVTKDGTAVTYSTGPIIWGEPGTNGQHAFYQLIHQGTKLIPCDFLAPVISQNPIGDHHPKLLANFFAQTEALMKGKTAAEAKAELEKAGLSAEDVAALVNHKVFEGNRPTNSIFFKKLTPFTLGSLIAMYEHKIYTQSVVWQINAFDQWGVELGKQLANAILPELKDNAAVTSHDSSTNGLINFYKANK

SEQ ID NO: 13074 - protein, 455 aa, Oryza sativa
MALPMAAMSVAQNAVQVASNMMVGHLPGVLPLSASAIATSLASVSGFSLLVGMASGLETLCGQAYGAKQYDKLGVQTYRAIVTLTVVTIPISLLWVFIGKLLTLIGQDPVISHEAGRYIVWLIPGLFAYAVCQPLTKFLQSQSLIFPMLWSSIATLLLHIPLSWLLVFKTSMGFTGAALAISISYWLNTFMLAAYIRFSCSCKVTRSPPTIEAFRGVGLFLRIALPSALMLCFEWWSFEILVLLSGLLPNPELESSVLSICLTTTSLMYTIPYGLGGAASTRVANELGAGNPEGARSAVHLVMSIAGTEAVLVTGMLFAAQRILGYAYSSDEEVVTYFTSMVPFVCISVAADSLQGVLSGIARGCGWQHLGAYVNLGSFYLVGIPVALLLGFGFKMEGKGLWLGIACGSVLQFLLLAVIAFFSNWQKMAEKARERIFGETPSEKQHLVLDATNSV

SEQ ID NO: 13075 - protein, 476 aa, Methylobacillus flagellatus KT
MDGEYFDNISPVTGKVFCQVPRSNEKDINLALDAAHAAKEAWARTSGTGRANILLKIADVMEANLETIAIAETIDNGKPIRETMAADIPLAIDHFRYFASCIRTQEGGISEIDHETVAYHFHEPLGVVGQIIPWNFPILMAAWKLAPALAAGNCIVMKPAEQTPASILVVMELIGDLLPPGVLNVVNGHGVEAGKALATSPRIAKIAFTGSTSVGRLIMQYASQNLIPVTLELGGKSPNIFFEDVMDKDDAYFDKALEGFTLFALNQGEICTCPSRALIQESIYEQFIERAIKRVKAIKQGSPLDKSTMIGAQASSEQVEIIMSYIKLGLEEGAQLLTGGNATKLPGDLSEGYYIEPTVFKGHNKMRIFQEEIFGPVLSVTTFKDEKEALEIANDTMYGLGAGLWTRDGSRAYRVGRGIQAGRVWTNCYHLYPAHAAFGGYKQSGIGRENHRMMLDHYQQTKNLLVSYSPNALGFF

SEQ ID NO: 13076 - protein, 357 aa, Saccharomyces cerevisiae
MSQNSNPAVVLEKVGDIAIEQRPIPTIKDPHYVKLAIKATGICGSDIHYYRSGGIGKYILKAPMVLGHESSGQVVEVGDAVTRVKVGDRVAIEPGVPSRYSDETKEGSYNLCPHMAFAATPPIDGTLVKYYLSPEDFLVKLPEGVSYEEGACVEPLSVGVHSNKLAGVRFGTKVVVFGAGPVGLLTGAVARAFGATDVIFVDVFDNKLQRAKDFGATNTFNSSQFSTDKAQDLADGVQKLLGGNHADVVFECSGADVCIDAAVKTTKVGGTMVQVGMGKNYTNFPIAEVSGKEMKLIGCFRYSFGDYRDAVNLVATGKVNVKPLITHKFKFEDAAKAYDYNIAHGGEVVKTIIFGPE

SEQ ID NO: 13077 - protein, 567 aa, Saccharomyces cerevisiae
MASEQSSPEINADNLNSSAADVHVQPPGEKEWSDGFYDKEVINGNTPDAPKRGFLGYLIIYLLCYPVSFGGFLPGWDSGITAGFINMDNFKMNFGSYKHSTGEYYLSNVRMGLLVAMFSVGCSIGGVAFARLADTLGRRLAIVIVVLVYMVGAIIQISSNHKWYQYFVGKIIYGLGAGGCSVLCPMLLSEIAPTDLRGGLVSLYQLNMTFGIFLGYCSVYGTRKYSNTAQWRIPVGLCFLWALIIIVGMLLVPESPRYLIECERHEEACVSIAKINKVSPEDPWVLKQADEINAGVLAQRELGEASWKELFSVKTKVLQRLITGILVQTFLQLTGENYFFFYGTTIFKSVGLTDGFETSIVLGTVNFFSTIIAVMVVDKIGRRKCLLFGAASMMACMVIFASIGVKCLYPHGQDGPSSKGAGNAMIVFTCFYIFCFATTWAPVAYIVVAESFPSKVKSKAMSISTAFNWLWQFLIGFFTPFITGSIHFYYGYVFVGCLVAMFLYVFFFLPETIGLSLEEIQLLYEEGIKPWKSASWVPPSRRGASSRETEAKKKSWKEVLKFPKSFN

SEQ ID NO: 13078 - protein, 1280 aa, Magnaporthe grisea 70-15
MPPRGGRVSKGPSLPLNLLREIGADGASSKGRGRSNRSGGRAFDRRPNRGGDRPKGSSHASHRAVEVTKKPNLKRSKRGHETDSEDSEDGSSEEQDDSGLEDEDDYDDDDEDVSDVEESTDEKSLPKAVRDKIAEDDKEIAELERRLGIKGRKGLPKSFKEDGLGDLLEGIDDAIGVESNEKKKRKAEADEWLAQKRQKANQTTRQVERDDDDEGSDSEDDDIDEDDFDMGDESSQDGGSDGEFEGFESDPETASAPKPQRENPYVAPTSGVTVTKYIPPSMRAKTGSDDELMLRIRRQTQGLVNRLTDANLISILGEIEKLYREYPRQHVTSTLVDLLLIQVCDPSSLPDTLLILTAGFATAAYKVIGMDFGAYLVQTTAEKFKEHYAKTVGRTQEQQEVTKETSNIITFLAQMYNFQMIGCNLVFDHIRFLLGELSELNAELLLRIIRMAGKPLRQDDPMALKDIVALIRPAMAKFGENNVSVRTKFMIETINDLKNNKMKAGATASAINTEHTTRMKKLLGTLSSRKLKATEPLRMGLKDIEEADKKGKWWLVGSSWAGKDKTDKKKTSDKPEADDVSDVNDLEIYDDDDLDVDLEALARRLMLNTDIRRSIFFAVMSALDFEDAYRNLLKLRLNKERQREVSHVLLQCCGSEEQYNPYYALVARKISGDDRRTKWNFQDTLWKFFRRLGESLFDEEADEVDDEDDKATELRRIVNIGKFYGNLISEGVLNLDVLRCLNFVYLKPKTKMLVEVILVTALLDFPCKNRAGADEVIRKMFTLPGKPEFARSLKYFMEKVMPRTDFLILLLLPEQKDLVIIGGGVAGYVAAIKAGQQGMKVTCIEKRGTLGGTCLNVGCIPSKSLLNNSHLYHQILHDTKNRGIEVGDVKLNLQQLMKAKDTSVGGLTKGVEFLLKKNGVEYLKGTGSFVNEHEIKIALNDGGETSRTAKNILIATGSEATPFPGLEIDEKRVVTSTGALALEKVPETMTVIGGGIIGLEMASVWSRLGAKVTVVEYLGQIGGPGMDTEIAKSAQKILKKQGIEFKLNTKVNGGDTTGDKIKLDIDAAKGGKAESIESDVVLVAIGRRPYTGGLGLENVGLETDDRGRVVIDSEYRTSHPHIRCVGDVTFGPMLAHKAEEEAVAVVEYMSKGYGHVNYAAIPSVMYTHPEVAWVGQSEQDLQKAGIQYRVGTFPFSANSRAKTNLDTEGMVKMLADPETDRILGVHIIGPNAGEMIAEGTLALEYGASSEDIARTCHAHPTLAEAFKEAAMATHAKAIHF

SEQ ID NO: 13079 - protein, 220 aa, Zea mays
MDLSVVPSLSLSPRRALPLPARRAARRPAFVCRCSCSLDASPVATRRLFASLLATAAAVGVGVAGGGGEAGAVSTSRRALRASKIPESEFTTLPNGLKYYDIKVGSGAEAVKGSRVAVHYVAKWKGITFMTSRQGLGVGGGTPYGFDVGNSERGNVLKGLDLGVEGMKVGGQRLIIVPPELAYGKKGVQEIPPNATIELDVELLSIKQSPFGTPVKIVEG

SEQ ID NO: 13080 - protein, 239 aa, Enterococcus faecium
MKPIIGIAGNQLIRATDTFQGNQVSYTPQGFVDAVLDAQGLPLILPVMSPDSAPQLIEKIDKLILAGGQDVSPQLYMEDPHPKLTETNIQRDQFEQALILEALKQRKPIFAVCRGLQLLNVVLEGTLYQDLSLYPKWSVKHEQQPTAPQFATHEVKIVSDSLLSDLLPDSYFVNSYHHQAVKDLSPLLKAIAFSNDGLIEAVQSKDNMHKILGVQWHPELSHRVDSSEQRLFDFFVNEF

SEQ ID NO: 13081 - protein, 1381 aa, Mycobacterium tuberculosis H37Rv
MSFVLVSPETVAAVATDLKRIGASLAHENASAAASTTAVVSAAADEVSTAVAALFSQHAQGYQAAAAQVAAFHSRFVQALTAGAGAYAFAEAANASPLQSAMGAVSASAQTLLSRPLIGNGANATTPGGNGGDGGWLFGSGGNGAPGAAGQSGGNGGSAGLWGNGGAGGAGGSGGAAGGNGGNGGWLFGAGGTGGIGGTGAPGAMGGTGGNGGNGALLIGGGGLGGAGGMGGTGGGTGGTGGNGGNGALLIGAGGVGGAGGIGGQGTGAGGAAGAGGTGGNGGAGGLFMNGGDGGAGGQGGDGAAGDAAASAGGTGGKGGQGGDGGTGGAGGAGPVLFGHGGAGGMGGQGGTGGMGGAGGDGTTVIAAGTGGEGGTGGAAGAGGAAGARGALTSGGLAGGVGAGGTGGTGGTGGNGADAAAVVGFGANGDPGFAGGKGGNGGIGGAAVTGGVAGDGGTGGKGGTGGAGGAGNDAGSTGNPGGKGGDGGIGGAGGAGGAAGTGNGGHAGNTGDGGDGGTGGNGGNGTGGVNGADNTLNPDTPGGAGEPGGAGGAGGAGGAAGGPGGTGGTGGNGGNGGNGGNGGNGGNGGNGGNAGNNSTNAPVGGEGGAGGDGGAGGAGGAANGGTAGSQGTGGVGGDGGAGGNGGGGKAGTGNSGNFGVDGEAGFSGGAGGNGGVGGAAGANGGTGGSGGNGGDGGAGGIGGAGGNGIPGTGTEPAGGTGAKGGDGGDGGAGGAGGNAGGAGGQGGNAGQGGAGGAGGNAVIPGDGVGKAPHGDAGGSGGDGGKGGQGGSGGTGGSGAPIGGGAGGTGGSGGHAGKGGAGGIGAQGTTITVPGNGGNAGDGGNGGNAGAGGNGGSGDFGGNTTSGASGSGGNGGNAGTAGSGGAGGTGGTGLSGGNGGNGGNGGNGGDGGNGAHGTVGAQFVPATSLPTPNGGAGGNGGTGSNGGAPGPAGAPGPTTGGNAGSQGIGGDGGNGGDGGKGGDGADAVNVVFMPTEPQAATGTAGSAGDPTGGNGGPGTPGSPMVAPPPPTPITQVQQGGDGGAGGTGSTNANDGTATGGKGGEGGVGSILGGPGGNGGTGGNASATGTNGVANAGNGGKGGDGGQFGAGGNGGAGGSVTDGSAGSTAGNGGNGGNATNGTIAGQPAGGNGSAGGKGGDGGNIAAGATGTAGNGGNGGNGNDGAVNAGTGGSGGNGGNAGGGGANGGDGGAGGAGGAGGRGGKGIDGGFGGDGGNGGSNNGTGAGGNGGNGGTGGVGSVGAAGGDGGNGGTGGFAGFGGTAGNGGSGGTGGAGGDGGTGGDGGNGVIAGGGGTGGNGGASGAGGAGGTGGFAGNGNAGGNGGTGGASEDGDNGNAGSGATGGTGGNGGTGGDGGAAGLGGVA

SEQ ID NO: 13082 - protein, 224 aa, Zea mays
  unsure (1)..(224): unsure at all Xaa locations
RAAAIADTLQHVFFDTEDNGALVSMAGSSSGVHIYAVFVSKASGEELKKYSGQTDAELWIIPTYENSAWSIMAISFISLLVMSAVLAACFFARRHQIRRDRARLPQTREFHGMNSRLAKAMPSLIFTKVQEDDCTSATCAICLEDYSAAEKLRXVLPCRHKFHAACVDLWLASWRTFCPVCKRDADAGTPDPPLPRSSPLLSSSAIRLPEPTASFSFRSTVAAA

SEQ ID NO: 13083 - protein, 1901 aa, Mycobacterium tuberculosis H37Rv
MSFVLIAPEFVTAAAGDLTNLGSSISAANASAASATTQVLAAGADEVSARIAALFGGFGLEYQAISAQVAAYHQRFVQALSTGAGAYASAEAAAAEQIVLGVINAPTQALLGRPLIGDGANATTPGGAGGAGGLLFGNGGAGAAGAPGQAGGPGGPAGLWGNGGPGGAGGSGGGTGGAGGAGGWLFGVGGAGGVGGAGGGTGGAGGPGGLIWGGGGAGGVGGAGGGTGGAGGRAELLFGAGGAGGAGTDGGPGATGGTGGHGGVGGDGGWLAPGGAGGAGGQGGAGGAGSDGGALGGTGGTGGTGGAGGAGGRGALLLGAGGQGGLGGAGGQGGTGGAGGDGVLGGVGGTGGKGGVGGVAGLGGAGGAAGQLFSAGGAAGAVGVGGTGGQGGAGGAGAAGADAPASTGLTGGTGFAGGAGGVGGQGGNAIAGGINGSGGAGGTGGQGGAGGMGGSGADNASGIGADGGAGGTGGNAGAGGAGGAAGTGGTGGVVGAAGKAGIGGTGGQGGAGGAGSAGTDATATGATGGTGFSGGAGGAGGAGGNTGVGGTNGSGGQGGTGGAGGAGGAGGVGADNPTGIGGTGGTGGKGGAGGAGGQGGSSGAGGTNGSGGAGGTGGQGGAGGAGGAGADNPTGIGGAGGTGGTGGAAGAGGAGGAIGTGGTGGAVGSVGNAGIGGTGGTGGVGGAGGAGAAAAAGSSATGGAGFAGGAGGEGGAGGNSGVGGTNGSGGAGGAGGKGGTGGAGGSGADNPTGAGFAGGAGGTGGAAGAGGAGGATGTGGTGGVVGATGSAGIGGAGGRGGDGGDGASGLGLGLSGFDGGQGGQGGAGGSAGAGGINGAGGAGGNGGDGGDGATGAAGLGDNGGVGGDGGAGGAAGNGGNAGVGLTAKAGDGGAAGNGGNGGAGGAGGAGDNNFNGGQGGAGGQGGQGGLGGASTTSINANGGAGGNGGTGGKGGAGGAGTLGVGGSGGTGGDGGDAGSGGGGGFGGAAGKAGGGGNGGRGGDGGDGASGLGLGLSGFDGGQGGQGGAGGSAGAGGINGAGGAGGNGGDGGDGATGAAGLGDNGGVGGDGGAGGAAGNGGNAGVGLTAKAGDGGAAGNGGNGGAGGAGGAGDNNFNGGQGGAGGQGGQGGLGGASTTSINANGGAGGNGGTGGKGGAGGAGTLGVGGSGGTGGDGGDAGSGGGGGFGGAAGKAGGGGNGGVGGDGGEGASGLGLGLSGFDGGQGGQGGAGGSAGAGGINGAGGAGGTGGAGGDGAPATLIGGPDGGDGGQGGIGGDGGNAGFGAGVPGDGGDGGNAGFGAGVPGDGGIGGTGGAGGAGGAGADGDPSIDGGQGGAGGHGGQGGKGGLNSTGLASAASGDGGNGGAGGAGGNGGDGDGFIGGSGGTGGTGGDAGVGGLANTGGTAGNAGIGGAGGRGGDGGAGDSGALSQDGNGFAGGQGGQGGVGGNAGAGGINGAGGTGGTGGAGGDGQNGTTGVASEGGAGGQGGDGGQGGIGGAGGNAGFGAGVPGDGGIGGTGGAGGAGGAGADGDPSIDGGQGGAGGHGGQGGKGGLNSTGLASAASGDGGNGGAGGAGGNGGDGDGFIGGSGGTGGTGGDAGVGGLANTGGTAGNAGIGGAGGRGGDGGAGDSGALSQDGNGFAGGQGGQGGVGGNAGAGGINGAGGTGGTGGAGGDGQNGTTGVASEGGAGGQGGDGGQGGIGGAGGNAGFGAGVPGDGGIGGTGGAGGAGGAGADGDPSIDGGQGGAGGHGGQGGKGGLNSTGLASAASGDGGNGGAGGAGGNGGAGGLGGGGGTGGTNGNGGLGGGGGNGGAGGAGGTPTGSGTEGTGGDGGDAGAGGNGGSATGVGNGGNGGDGGNGGDGGNGAPGGFGGGAGAGGLGGSGAGGGTDGDDGNGGSPGTDGS

SEQ ID NO: 13084 - protein, 390 aa, Dechloromonas aromatica RCB
MSHVMNTYARLPVTFSHGNGSRITDTEGKEYLDALSGIAVSTLGHAHPKLVAAIAAQAGRMLHTSNLYRIGEQEQLADKLCELSGMQEVFFGNSGAEANEAAIKLARFYGHKKNIEIPTVVVMEKAFHGRTMATLSATGNRKTQAGFEPLVAGFVRVPYGDLEAIKAVAEHNKNIVAVMLEIIQGEGGIHLADPSFYRGVRELCDAQDWLMICDEVQCGMGRTGKWFGYLQAGVQPDIATLAKGLGSGVPIGACMAGGKAAGLFGPGNHGSTFGGNPLVSTAALTTIEVIEQDDLLGNAERIGLLIRKLFAEALAGVKGVVDIRGHGLMIGLELDRPCGALVGKALAAGLLINVTADTVLRFLPPLIFSESDAHELVERTAPLIKEFLAA

SEQ ID NO: 13085 - protein, 434 aa, Triticum aestivum
MGAGAEPREEEPLEVEEGAGGKEEKAAVSCSICLDAVVAASAERSTARLQCGHEFHLDCIGSAFNAKGVMQCPNCRKIEKGNWLYANGSRPSHDINMDEWAHEEDLYDVSYSEMPFRFHWCPFGRLAQLPSFFEEGESPPPVTFHDFMGQHVFPENLSVSAAPGAHPCPYVAYLHPLPSLASSSSSHVPERTMDGSAYHDHWNHLAGPSDGRPLQTVQPTDFHHNHWAHLPHSYVQSNGNNGVTEQPGVPFGSMRAARVDGDSQRRGSVVSPSYFSNGSGSRSRAPNVPPLVPQFMRAHGNINEQYTQSSSSSLFAGAHRSGGMRPAPPPPQPENPTFCLFPPGSSGHSSMDTDEAGGSRFYAWERDRFAPYPLMPVDCETSWWSSQQSHGASESTPAPAPRRLFGQWIGLGRSSPENRSPEGSSYRQMHSPRM

SEQ ID NO: 13086 - protein, 300 aa, Actinobacillus actinomycetemcomitans
MKGIILAGGSGTRLYPITRGVSKQLLPVYDKPMIYYPLSVLMLAGVRDILIITTPEDNESFKRLLGDGSEFGVNLQYAIQPSPDGLAQAFLIGEGFINGDSCCLVLGDNIFYGQNFTQMLQQAVARPYGATVFGYLVKDPGRFGVVEFDENFKAVSIEEKPVQPKSNYAVTGLYFYDNRVVDFAKQVKPSARGELEITTLNEIYLKDGSLNVQLLGRGFAWLDTGTHESLHEAASFVRTIESVQGLQVALLRRNRGRNGWLSEIAWRNGWLTSKQVEILARSMVKNEYGQYLLRLINEEK

SEQ ID NO: 13087 - protein, 714 aa, Mycobacterium tuberculosis H37Rv
MSFVLISPEVVSAAAGDLANVGSTISAANKAAAAATTQVLAAGADEVSARIAALFGMYGLEYQAISAQVAAYHQQFVQTLRTGAASYMLAEATNVEQNLLNLINAPTQTLLGRPLIGDGANATTPGGAGGDGGLLFGSGGNGAPGAPGQAGGAGGSAGLLGNGGSGGAGGTGAPGGNGGNAGWLYGRGGVGGAGGIGGGTGGAGGHAWLFGHGGTGGIGGGPGGNGGWLLGNGGHGGAGGIGGGSGGAGGNGGWLLGNGGIGGAGGTGGGAGGTGGNAAWLLGGGGTGGAGGIGGGNGGHGGNGGWLLGNGGNGGLGGDGDGGTGGGHGGNGGNPGWLLGTAGGGGNGGAGSTGTAGGGSGGTGGDGGTGGRGGLLMGAGAGGHGGTGGAGGAGVNGGGAGGAGGAGGNGGAGGQAALLFGRGGTGGAGGYGGDGGGGGDGFDGTMAGLGGTGGSGGTGGDGGAPGNGGAGGAGQLLSHSGVAGASGKGGAGGTGGNGGAGSAGADAPAGSGAMGSTGFAGGAGGDGGNGGGSGASQGNGGNGGNGGTGGKGGTGGAGMNSLDPLLAAQDGGQGGTGGTGGNAGAGGTGFTQGADGNAGNGGDGGVGGNGGNGADNTTTAAAGTTGGAGGAGGAGGTGGAAGTGTGGQQGNGGNGGNGGTGGKGGTGGAGMNSLDPLLAAQDGGQGGTGGTGGNAGAGGTGFTPRRRRQRRQRR

SEQ ID NO: 13088 - protein, 136 aa, Glycine max
  unsure (1)..(136): unsure at all Xaa locations
MSTKKIVLKSSDGESFEVDEAVALESQTIAHMVEDDCVDNGVPLPNVTSKILAKVIEYCKKHVDAAASKSEAVDGGGSSDDDLKAWDAEFMKIDQATLFELILAANYLNIKNLLDLTCQTVADMIXGKTPEEIRTT

SEQ ID NO: 13089 - protein, 1079 aa, Mycobacterium tuberculosis H37Rv
PQGADGNAGNGGDGGVGGNGGNGADNTTTAAAGTTGGAGGAGGAGGTGGTGGAAGTGTGGQQGNGGNGGNGGTGGKGGTGGDGALAGSSGGAGGKGGNGGDAGKAGTGSAPGTAGTGGDGGKGGNGGIGAAGTTGPVGTGASGGTGGSGGAGGTGGDGGAANGGTAGAGGAGGNGGKGGDGGAGVTSSTAGNSGGAGGSGGKGGDAGAGGAGATPGANGIAGNGGDGGDGAAGAVGISGATGAGDGGHGGTGAAGGNGGTGGAGGSGIDGVGGGTGGTGGNGGNGAIGGAGGDAGGSGNSGGNGGIGGKGGNAGAGGAAGSNGGTVGANGTGGDGGNGGAAGAATAGSNGGAGTGSAGGNGGTGGRGGSGGAGGDGIGGVGGGKGGNGADGEVGGAGGAGGSGPNTSPGGNGGQGGQGGSGGAGGAAGAGGAGGGANGTAGNGGQGGAGGTGGAGAASSATNGGSGGAGGTGGDGGSGGAGGTGGAGGTGGAAGDGGQGGQGGAGGGAGGQGGAGGAGGTGGNGGNITGGTAGTAGAAGNGGAAGKGGAGGQGGTGGGTGGQGGAGGDGGAGGTGGDRTVGGGTVPAGSGGQGGNAGGGGAGGQGGADGGSGGDGGDAGTGGNGGNGGNRNSGNGTGGAGGNGGGGANGGAGGAGGSGGGTGGNGGAGGDAGDAGNGGNGNGTGNGGNGGNGGIAGMGGNGGAGTGSGNGGNGGSGGNGGNAGMGGNSGTGSGDGGAGGNGGAAGTGGTGGDGGLTGTGGTGGSGGTGGDGGNGGNGADNTANMTAQAGGDGGNGGDGGFGGGAGAGGGGLTAGANGTGGQGGAGGDGGNGAIGGHGPLTDDPGGNGGTGGNGGTGGTGGAGIGSLGGGTGGDGGNGGNGGTGGEGGEVGGAGGTGGAAGNGGDGGTGGTGGGDGGAGGTGGTGGTGGLGDPRVGGSGGDGGTGGSGGAAGNGGNGGNAGAGGNGNGGTGGAGGIGGTGGNGGDAEPGVPPGAGGAGGAGTTGGKGGTGGNGSGTGSGGTGGDGGTGGGGGNGGTGWNGGKGDTGSGGGAGDGGKAPAGGTGGAGGDGGAGGKGGSGGV

SEQ ID NO: 13090 - protein, 426 aa, Streptococcus agalactiae NEM316
MKLQKPKGTQDILPGESAKWQYVENVIRNLFKQYHYDEIRTPMFEHYEVISRSVGDTTDIVTKEMYDFHDKGDRHITLRPEGTAPVVRSYVENKLFAPEVQKPTKMYYIGSMFRYERPQAGRLREFHQVGVECFGSNNPATDVETIAMGHHLFEDLGIKNVKLHLNSLGNPESRQAYRQALIDYLTPIREQLSKDSQRRLNENPLRVLDSKEPEDKLAVENAPSILDYLDESSQAHFDAVCHMLDALNIPYIIDTNMVRGLDYYNHTIFEFITEIEDNELTICAGGRYDGLVSYFGGPETPAFGFGLGLERLLLILDKQGISLPIENTIDLYIAVLGSEANLAALDLAQSIRHQGFKVERDYLGRKIKAQFKSADTFNAKVIMTLGSSEVDSKEVGLKNNQTRQEVKVSFENIKTDFSSVLKQLGL

SEQ ID NO: 13091 - protein, 476 aa, Oryza sativa
PLAYQGNTSASVADWLNKGDNAWQLVAATVVGLQSVPGLVVLYGGVVKKKWAVNSAFMALYAFAAVWICWVTWAYNMSFGEKLLPIWGKARPALDQGLLVGRAALPATAAVEPLYPMATVVYFQCVFAAITLILVAGSLLGRMSFLAWMIFVPLWLTFSYTVGAFSLWGGGFLFHWGVIDYCGGYVIHVSAGIAGFTAAYWVGPRAQKDRERFPPNNILFTLTGAGLLWMGWAGFNGGGPYAANSVASMAVLNTNICTAMSLIVWTCLDVIFFKKPSVVGAVQGMITGLVCITPAAGVVQGWAALVMGVLAGSIPWYTMMILHKRSKILQRVDDTLGVFHTHGVAGLLGGLLTGLFAEPTLCNLFLPVADSRGAFYGGAGGAQFGKQIAGGLFVVAWNVAVTSLICLAINLLVPLRMPDDKLEVGDDAVHGEEAYALWGDGEMYDVTKHVQLLINDLESGNEFSEEKAKGAIIYNY

SEQ ID NO: 13092 - protein, 298 aa, Zea mays
MHGSLKQTRGGGALGTSRPAGEPPRDPRIYPSHSPQGSVPSAAAAMSLPPGPADSGTGTGDDWFLDCGILDDLPAAACGAFPWDASPSSSNPSVEVGSYVNANDAFKEPNDVFKEPGSSKRLRSGSSDMPTSKACRERMRRNKLNDRFLELGSALEPGKPVKADKAAILSDATRMVIQLRSESQQLKETNGSLEEKIKELKAEKDELRDEKQKLKLEKESLEHQMKLMASAPAYMPHPTLMPAPFAQAPLTPFHAQGQAAGQKLMMPFVGYPGYPMWQFMPPSEVDTSKDSEACPPVA

SEQ ID NO: 13093 - protein, 234 aa, Geobacillus stearothermophilus
MRQSKEERVHRVFENISAHYDRMNSVISFRRHLKWRKDVMRRMNVQKGKKALDVCCGTADWTIALAEAVGPEGKVYGLDFSENMLKVGEQKVKARGLHNVKLIHGNAMQLPFPDNSFDYVTIGFGLRNVPDYMTVLKEMHRVTKPGGITVCLETSQPTLFGFRQLYYFYFRFIMPLFGKLLAKSYEEYSWLQESAREFPGRDELAEMFRAAGFVDVEVKPYTFGVAAMHLGYKR

SEQ ID NO: 13094 - protein, 495 aa, Escherichia coli
DRGIPRSYRTMEGFGIHTFRLINAEGKATFVRFHWKPLAGKASLVWDEAQKLTGRDPDFHRRELWEAIEAGDFPEYELGFQLIPEEDEFKFDFDLLDPTKLIPEELVPVQRVGKMVLNRNPDNFFAENEQAAFHPGHIVPGLDFTNDPLLQGRLFSYTDTQISRLGGPNFHEIPINRPTCPYHNFQRDGMHRMGIDTNPANYEPNSINDNWPRETPPGPKRGGFESYQERVEGNKVRERSPSFGEYYSHPRLFWLSQTPFEQRHIVDGFSFELSKVVRPYIRERVVDQLAHIDLTLAQAVAKNLGIELTDDQLNITPPPDVNGLKKDPSLSLYAIPDGDVKGRVVAILLNDEVRSADLLAILKALKAKGVHAKLLYSRMGEVTADDGTVLPIAATFAGAPSLTVDAVIVPCGNIADIADNGDANYYLMEAYKHLKPIALAGDARKFKATIKIADQGEEGIVEADSADGSFMDELLTLMAAHRVWSRIPKIDKIPA

SEQ ID NO: 13095 - protein, 324 aa, Bdellovibrio bacteriovorus HD100
MFTLVFPGQGSQQPGMGRFLFENFKIAQETFEEGSEALKQDMKKLCFEGSEADLALTENTQPALLLVSTATQRVLTKEFGVKASVAAGHSIGEYAALVAAGVTRFDESMRAVKTRGQAMQSAVPVGQGGMVAVLGLEPDQVETLCNYVVKNSGVGPLSAANFNSPGQIVISGSQKAINWLKDNFKPEAIFAEAPKRAKLIPLTVSAPFHCEMMKPAEDKMREVLTAMKFETAAFPIIQNFHAKAETDGSILRENLIRQVSAPVRWTQSMEVLKGMGHSQVIECGAGKVLQGLLKKIDGDFFKVMTTTSIEDVKIIEEFLKATSH

SEQ ID NO: 13096 - protein, 327 aa, Trichoderma atroviride
MATDTSQKTLSSTTYTLNTGAKIPAVGFGTFANEGAKGETYAAVTKALDVGYRHLDCAWFYLNEDEVGDAIRDFLARRPDVTRKDLFICTKVWNHLHEPEDVKWSAKNSCENLKVDYIDLFLVHWPIAAEKNADRTVKIGPDGKYVINKALTENPEPTWRAMEELVDSGIVKAIGVSNWTIPGLKQLLEFARIKPAVNQIEIHPFLPNTELVEFCFQNDILPEAYSPLGSQNQVPTTGERVRDNPTLNAVADRRGSSLAQVLLAWGLKRGYVVLPKSSTPSRIESNFIIPELSEEDFAAIQKVAEGRHVRFVNMKDTFGYDVWPEDK

SEQ ID NO: 13097 - protein, 178 aa, Glycine max
MASSMISSPAVTTVNRAGAGMVAPFTGLKSMAGFPTRKTNNDTISIASNGGRVQCMQVWPPVGKKKFETLSYLPDLDDAQLAKEVEYLLRKGWIPCLEFELEHGFVYREHNRSPGYYDGRYWTMWKLPMFGCTDASQVLKELQEAKTAYPNGFIRIIGFDNVRQVQCISFIAYKPPGF

SEQ ID NO: 13098 - protein, 355 aa, Oryza sativa
MGKKKKRVEKVFCYYCDREFDDEKILVQHQKAKHFKCHVCHKKLSTAGGMAIHVLQVHKESVTKVPNAKPERESTEIEIFGMQGIPPDVLAAHYGEEEDPSSKVAKVEVPSLRPPVMPNPAGMVYPPRPAYGVAPPMYNPALNPLMARPPIWPAPPPQPWFTQPVVSVPQMASGLAPQQPLFPIQNMPAPMTSAPANLLQTSFPMAHVGVPSPVTPQVSQPLFPVSTSAGNGAVSSPYVASVAPGSIPTSSPSVAPAGVGYAATNQGTGGPAAVPPPASNNKAPATQPGANEVYLVWDDEAMSMEERRLSLPKYQVHDETSQVSSDFYNFISMNSVDAAIDRRISESRLAGRMAL

SEQ ID NO: 13099 - protein, 349 aa, Saccharomyces cerevisiae
MNVTSNATAAGSFPLAFGLKTSFGFMHYAKAPAINLRPKESLLPEMSDGVLALVAPVVAYWALSGIFHVIDTFHLAEKYRIHPSEEVAKRNKASRMHVFLEVILQHIIQTIVGLIFMHFEPIYMTGFEENAMWKLRADLPRIIPDAAIYYGYMYGMSALKIFAGFLFVDTWQYFLHRLMHMNKTLYKWFHSVHHELYVPYAYGALFNNPVEGFLLDTLGTGIAMTLTHLTHREQIILFTFATMKTVDDHCGYALPLDPFQWLFPNNAVYHDIHHQQFGIKTNFAQPFFTFWDNLFQTNFKGFEEYQKKQRRVTIDKYKEFLQERELEKKEKLKNFKAMNAAENEVKKEK

SEQ ID NO: 13100 - protein, 616 aa, Ustilago maydis 521
MTRAESSVADRGRRESHIQRANWNGQLTRFLRSVRDGETQSILLALWPFTHNHECDPALSRDRTEDRQDRNDSRESHRLDQLAAFVLFRFSTSSTNPKLVILFFSFIVVVIESTSTSYNHVSALEGLASLQSTEATERLAVVVIAMLSRSIAQSGARAARSLALRSGSVRMVTPAVARRTLLTLSAQRSLALGAQNTLLSAQRGFSSSSSRKEIVKVPQMAESITEGTLKQWNKKVGDFVKADEEVATIETDKIDVSVNAPQSGTIVEVFASEEDTVEVGKDLFKLEPGEAPAEGASSGDKQPEKKEEKKDEDNKKDESKEQKQPEKKSDDKKPAPSADPQSRPSAASSSPPASKTTSSSASSSSSSPASASSSASKGGLGSREENRVKMSRMRLRIAERLKQSQNTAASLTTFNEIDMSNLMAFRARHKDRILKEKGVKLGFMSAFAKASALALKDVPAANASIEGAGLGDTIVYRDFVDLSVAVSTDKGLVTPVVRNLESMSLIEIEQAIAELGKKARDNKLTLEDMSGGTFTISNGGVFGSLFGTPILNLPGSAILGMHAVKDKAWVVNGKVEIRPIMVVALTYDHRLLDGREAVTFLVKLKQYIEDMPSMLL

SEQ ID NO: 13101 - protein, 340 aa, Boea crassifolia
MGRAPCCDKTGLLMKKGPWSQEEDQKLLDYIQKYGYGNWRTLPTNAGLQRCGKSCRLRWTNYLRPDIKRGRFSFEEEETIIRLHSILGNKWSLIAARLPGRTDNEIKNYWNTNIRKRLLRMGIDPVTHSPRLQLLDLSTILNSSLCNNSPTQMNFSRLQPRFNPELLRFAASLFSSNCQSQDFPMQNQITSNNQIPPPFMQTSVQDVAVLPDLCADTNLGTSFSVHDEVQEFQQNPAGYGMPSALTGEYVPVLNDGYYGSGDQPFVDPTPSSVTSNFQSYCSNSLGFQSIFSTPPSSPTPLNSNSTYVNSCSSTEDETESYYNSMWKFEIPDNLRINDFM

SEQ ID NO: 13102 - protein, 153 aa, Methylococcus capsulatus str. Bath
MKRLILCLCGMLAISAAEAMEIRQFDDPAKEERYETLIKDLRCLVCQNQSLAESDAELAKDLRTEVYNIIQSGKSSEEAVRFLTERYGDFVLYRPPFKRITLLLWLGPFLLLAGGAVFLWKQARRRAAAAQQDATLSAEERRRLQQLKDRFQG

SEQ ID NO: 13103 - protein, 231 aa, Shigella flexneri
MFRKLAAECFGTFWLVFGGCGSAVLAAGFPELGIGFAGVALAIGLTVLTMAFAVGHISGGHFNPAVTIGLWAGGRFPAKEVVGYVIAQVVGGIVAAALVYLIASGKTGFDAAASGFASNGYGEHSPGGYSMLSALVVELVLSAGFLLVIHGATDKFAPAGFAPIAIGLALTLIHLMSIPVTNTSVNPARSTAVAIFQGGWALEQLWFFWVVPIVGGIIGGLIYRTLVEKRD

SEQ ID NO: 13104 - protein, 318 aa, Synechocystis sp. PCC 6803
MLNPLNIEYLYLSKLFDNSLIVFNKRQLFRFFVRFFFMTAALPNDSKPKLTPAWTVIFFFTSIHLVALLAFLPQFFSWKAVGMAFLLYVITGGIGITLGFHRCISHRSFNVPKWLEYIFVICGTLACQGGVFEWVGLHRMHHKFSDTTPDPHDSNKGFWWSHIGWMMFEIPAKADIPRYTKDIQDDKFYQFCQNNLILIQVALGLILFALGGWPFVIWGIFVRLVFVFHFTWFVNSATHKFGYVSHESNDYSRNCWWVALLTFGEGWHNNHHAYQYSARHGLQWWEVDLTWMTIKFLSLLGLAKDIKLPPETAMANKA

SEQ ID NO: 13105 - protein, 234 aa, Zea mays
  unsure (1)..(234): unsure at all Xaa locations
FLTPISGVTALNLLKENPISPPPRCARRYDSRTXTIFSPEGSLYQAEYAMEAIGNDGSALGMLVGDVVVLSXDKKVTSMLVETSRSVYKMYKIDSHLSCAVAGIXSDAYILIITARLHAQSYAFSYEXPIPVEQLVXSALCDTKXDYTHFGGLRPFGVSXFLFAGRDEHHGIQVYMSDPSGNYVACKDAAVAVNRQAAQSMLEQDYKDALTRDEXVGLELIXVSKTVDSTSLTA

SEQ ID NO: 13106 - protein, 1489 aa, Mycobacterium tuberculosis H37Rv
MSFVLIAPEFVTAAAGDLTNLGSSISAANASAASATTQVLAAGADEVSARIAALFGGFGLEYQAISAQVAAYHQRFVQALSTGAGAYASAEAAAAEQIVLGVINAPTQALLGRPLIGDGANATTPGGAGGAGGLLFGNGGAGAAGAPGQAGGPGGPAGLWGNGGPGGAGGSGGGTGGAGGAGGWLFGVGGAGGVGGAGGGTGGAGGPGGLIWGGGGAGGVGGAGGGTGGAGGRAELLFGAGGAGGAGTDGGPGATGGTGGHGGVGGDGGWLAPGGAGGAGGQGGAGGAGSDGGALGGTGGTGGTGGAGGAGGRGALLLGAGGQGGLGGAGGQGGTGGAGGDGVLGGVGGTGGKGGVGGVAGLGGAGGAAGQLFSASGAAGNAGVGGAGGQGGDGGAGGAGADADQPGATGGTGFAGGAGGAGGAGGSSGAGGTNGSGGAGGQGGAGGAGGAGADNPTGIGGTGGDGGTGGAAGAGGAGGAAGTGGTGGMIGTTGNAGVGGAGGQGGDGGAGGAGADADQPGATGGTGFAGGAGGAGGAGGSSGAGGTNGSGGAGGTGGQGGAGGAGGAGADNPTGIGGTGGDGGTGGAAGAGGAGGAAGTGGTGGMIGTTGNAGVGGAGGQGGDGGAGGAGADADQPGATGGTGFAGGAGGAGKAGGSSSAGGTNSSGSAGGTGRQSGTGGAGGAGADNPTGIGGTGGDGGTGGAAGAGGAGGAAGTGGTGGMIGTTGNAGVGGAGGSSGAGGTNGSGGAGGTDGQGGAGGAGGAGADNPTGIGGTGGDGGTGGAAGAGGAGGAAGTGGTGGMIGTTGNAGVGGAGGQGGDGGAGGAGADADQPGATGGTGFAGGAGGAGGSGGSSCAGGTNGSGGAGGTCGQVVAGGAGISFSNGSNGGTGGTGGVGGTGGDGGNAGTGAGDPGKGGTGGTGGTGGSGGAGGSGGANFNGGTGGTGGTGGKGGLNTDGLSSATSGTGGTGGTGGKGGTGGAGDDSAGGTGGTGGAGGNAGAGGLANTGGTAGNAGIGGDGGQGGNGGQGDSGSGLGGQPGFAGGAGGKGGAGGSSGAGGTNGSGGAGGAGGQGGAGGAGISFSNGSNGGTGGTGGVGGTGGDGGNAGTGAGDPGKGGTGGTGGTGGSGGAGGSGGANFNGGTGGTGGTGGTGGKGGMGGIAGDGGPGGDGGNAGVGGKGGTNGNGGSGGTGGTGGAGGNAGAGGLANTGGTAGNAGIGGDGGQGGNGGQGDSGSGLGGQPGFAGGPGGKGGAGGNAGTGGTNGSGAGGAGGQGGAGGAGISFSNGSNGGTGGTGGVGGTGGDGGNAGTGAGDPGKGGTGGTGGTGGSGGAGGSGGANFNGGTGGTGGTGGTGGKGGMGGIAGDGGPGGDGGNAGVGGKGGTNGNGGSGGTGGTGGPGGSGGAPTGSGTGGKGGAGGDGGDGADGGAATGVGDGGDGGNGGNGGNGGTGVGSPGGLGGAGGTGGLGGAGAGGGADGDDGDDGQPGNNGS

SEQ ID NO: 13107 - protein, 262 aa, Cynodon dactylon
MLAVVAVVLASMVGGALCAMGDKPGPNITATYGDKWLDAKATFYGSDPRGAAPDDHGGACGYKDVDKAPFDGMTGCGNEPIFKDGLACGSCYEIKCKEPAECSGEPVLIKITDKNYEHIAAYHFDLSGKAFGAMAKKGEEDKLRKAGELMLQFRRVKCEYPSDTKIAFHVEKGSNPNYLALLVKYAAGDGNIVSVDIKSKGSDEFLPMKQSWGAIWRIDPPKPLKGPFTIRLTSESGGHVEQEDVIPEDWKPDTVYKSKIQF

SEQ ID NO: 13108 - protein, 262 aa, Cynodon dactylon
MLAAVAVVLASMVGGAWCAMGDKPGPNITATYGDKWLDAKATFYGSDPRGAAPDDHGGACGYKDVDKAPFDGMTGCGNEPIFKDGLGCGSCYEIKCKEPAECSGEPVLIKITDKNYEHIAAYHFDLSGKAFGAMAKKGEEDKLRKAGELMLQFRRVKCEYPSDTKITFHVEKGSSPNYLALLVKYAAGDGNIVGVDIKPKGSDVFLPMKLSWGAIWRMDPPKPLKGPFTIRLTSESGGHVEQEDVIPEDWKPDTVYKSKIQF

SEQ ID NO: 13109 - protein, 262 aa, Cynodon dactylon
MLAVVAVVLASMVGGALCAMGDKPGPNITATYGDKWLDAKATFYGSDPRGAAPDDHGGACGYKDVDKAPFDSMTGCGNEPIFKDGLGCGSCYEIKCKEPAECSGEPVLIKITDKNYEHIAAYHFDLSGKAFGAMAKKGEEDKLRKAGELMLQFRRVKCEYPSDTKIAFHVEKGSNPNYLALLVKYAAGDGNIVSVDIKSKGSDEFLPMKQSWGAIWRIDPPKPLKGPFTIRLTSESGGHVEQEDVIPEDWKPDTVYKSKIQF

SEQ ID NO: 13110 - protein, 625 aa, Oryza sativa (japonica cultivar-group)
MASISGAAAPPSSSAACRLRLRRQLLLRPSHLRLRAPHSIADLSRSSSSSSEQQPSSTPAAPLASRPGQNGSTRGAVEKDPIKLWERYVEWLYQHKELGLFVDVSRMGFTEEFLRRMEPRMQRAFAAMRELEKGAIANPDEGRMVGHYWLRDPGLAPNSFLRTKIETTLDRILAFSQDVVSGKIKPPSSPAGRFTQILSIGIGGSALGPQFVSEALAPDNPPLKIRFIDNTDPAGIDHQIAQLGPELASTLVIVISKSGGTPETRNGLLEVQKAFRDAGLDFSKQGVAVTQENSLLDNTARIEGWLARFPMFDWVGGRTSEMSAVGLLPAALQGIDIKEMLVGAALMDEETRNTVVKENPAALLALCWYWASEGIGNKDMVVLPYKDSLLLLSRYLQQLVMESLGKEFDLDGNRVNQGLTVYGNKGSTDQHAYIQQLREGVHNFFVTFIEVLRDRPPGHDWELEPGVTCGDYLFGMLQGTRSALYSNDRESISVTVQEVTPRAVGALVALYERAVGIYASLVNINAYHQPGVEAGKKAAGEVLALQKRVLTVLNEASCKDPAEPLTLDQIAERCHCPEDIEMIYKIIQHMAANDRALIAEGSCGSPRSIKVYLGECNVDEDMLAA

SEQ ID NO: 13111 - protein, 536 aa, Glycine max
  unsure (1)..(536): unsure at all Xaa locations
MRKSAADRFRHLFNRSLILLGHRHHHQALASSSSLSPFSRSRFFSSTPFSMASDSPFPVTAANINPKVLKCEYAVRGEXVTLAQNLQKDLQANPGSHPFDEILYCNIGNPQSLGQQPITFFREVLALCDHPAILDKSETQGLFSTDAIQRAWQIVDQIPGRATGAYSHSQGVKGLRDTIAAGIEERDGFPANPDDIFMTDGASPAVHNMMQLLIRSENDGILCPIPQYPLYSASIALHGGCLVPYYLDEATGWGLEIPELKKQLEAAKSKGINVRALVVINPGNPTGQVLGEANQRDIVEFCKQEGLVLLADEVYQENVYVPEKKFHSFKKVSRSMGYGENDITLVSFQSVSKGYHGECGKRGGYMEVTGFSAEVREQIYKVASVNLCSNISGQILASLVMSPPKVGDESYDSFMAEKENILASLARRAKTLEDAFNKLEGVTCNKAEGAMYLFPQIRLSEKAIKAAEAANATPDNFYCKRLLNATGVVVVPGSGFGQVPGTWHFRCTILPPEEKIPAIVTRLTEFHEKFMDEFRD

SEQ ID NO: 13112 - protein, 602 aa, Zea mays
  unsure (1)..(602): unsure at all Xaa locations
AAAGRRGNARRRRAGRRGGAPEAQEHGRGQAGERRRRRRRGEPRAPSSSTTAWKAMPFIIGNETFEKLGTLGTSANLLVYXLTQVFHMRSVDAATLLNGLNGTTSLAPIVGAFLSDAYLGRYLALAIASIASLIGMFLLTLTGRRGQPAPAGNAPVGEACEKATSYQFAVLFVALXFLVLGLGGGSRPCSMPFGADQFDPHTESGKRGINSFFNWYYFTFTAAMMISATVIIYVQSNVSWPIGLGIPTALMFLACVLFFMGTRLYVRVTPEGSPFTSVVQVLSAALKKRSLKQPKDPKQDLFDPPHTSAIVTQLAHTDQFRCLDKAAIVASQDELRPGGAAPADPWRLCSVQQVEEVKCLIRIVPVWSTGIIYYVAVVQQSTYVVLSALQSDRHLGGAGFQIPAASFTVFAMLAQTLWIPFYDRLLLPKLRKITGKEEGFTLLQRQGIGIALSTVAMVISAIVEDRRRAIALSQPTLGTTITGGAISAMSSLWMVPQLMILGLSEAFNLISQIEFYYKXIPEHMRSVAGALAFCNLALGNYLSGFLVTIVHRTTGSGQNWLAQDLNKGRLDLFYWTIAGIGVFNLIYFVICARWYRFKGTSN

SEQ ID NO: 13113 - protein, 394 aa, Thermoanaerobacter tengcongensis
MKKEFRFDTKAIHGEELKKNPENALNPPIFQTTTFVFEDLDHVEKVMSFESQDYVYTRGNNPTLRLFENRMAELEYGKGAVAFSSGMAAISSVLFSLLRPNDKVLAHKTLYGSSYNVITNLLPKYGVKYKLIDMTSLEELKESLDDTVKVIYFETPSNPDLSIIDIEEVSKIAYQRGIKVVVDNTFATPCFQNPLLLGADVVVHSATKYICGHGDALGGVAISKDEAYIHYLKFDYMCEFGGVMSPFNAWLMLRGIKTLGLRMRQHEKNAMEVAKFLSRHPKVKNVLYPGLESFKGHGIAKKQMRGFGAIISFEIEGGRKELEEFIKGLKLCQLAVSLGDAETLVEVPSIMTHRGYPKEKLEDFGFKENTVRISVGLEDYNDIIEDLEDALKRI

SEQ ID NO: 13114 - protein, 361 aa, Myxococcus xanthus
MRLGVLTGGGDCPGLNALIRGLVKRGTHEFGYEFVGIENGYMGLVEPGLAHPLTEEDTRGILPKGGTILGTSNKANPFSYATREDGHWVERDVSDQVLLRCEELGLDGLIAVGGDGTLSIAHRLVEKGLKVVGCPKTIDNDLSGTDQTFGFDTARLIVTEALDRLHSTAEAHDRVMVVEIMGRHAGFLTLESGIAGGADVILIPEIPYSVESVVEKIRRRSTRRRSFSIIAISEGAFPQGGELAVLDTAEAIPGRGVVRLGGSGKALADLLARHIEAEIRVTVLGHLQRGGSPSAADRVLATRYGCKVLDLVSAGQWDHMVALRAGEIIAVPLSESRKERRVDPAGELVRFTKSMGISFGD

SEQ ID NO: 13115 - protein, 578 aa, Vibrio vulnificus YJ016
MTFSIENNKQVVLGEELGKLSDNERLKTQSNFLRGTIEQDLQDRITGGFTADNFQLIRFHGMYQQDDRDIRNERAKQKLEPLHNVMLRARMPGGIITPKQWLAIDKFATEHSLYGSIRLTTRQTFQFHGVLKPNIKLMHQTLNSIGIDSIATAGDVNRNVLCTTNPVESELHQEAYEWAKKISEHLLPKTKAYAEIWLDGEKVETTEDDEPILGKTYLPRKFKTTVVIPPQNDVDVHANDLNFVAIAENGKLIGFNVLVGGGLAMTHGDTSTYPRRADDFGYIPLEKTLDVAAAVVTTQRDWGNRSNRKNAKTKYTLDRVGTDVFKAEVEKRAGIKFEVSRPYEFTERGDRIGWVEGIDGKHHLTLFIENGRLLDYPGKPLKTGVAEIAKIHKGDFRMTANQNLIVAGVSKSNKAKIEKLAREHGLMDEGVSEQRKNSMACVAFPTCPLAMAEAERFLPQFVTDVEGILDKHGLDKEDNIILRVTGCPNGCGRAMLAEIGLVGKAPGRYNLHLGGNRGGTRVPKMYKENITEKQILEEIDQLVGRWANERLPNECFGDFTVRVGIIEEVIISKRDFYA

SEQ ID NO: 13116 - protein, 345 aa, Neurospora crassa
MSSFLKFLVSSGDASSSRRHKHPYYPREVVVPNYAPNTYTLPMVLGAFGGATALLMVGTVAIGKKVNKQLTWKDAGVLAWFTLCYYVLNHATLASKQDIFAQLWKEYALSDSRYMTSDPFMLCIETLTVLTWGPLSFLAVFAIIKGNTSLRHITQTIVSVGHLYGVALYFGTCFFQEKFRGISYSRPETLYYWVYYAGMNAPWVIVPAILLFQSSKTISQGLSVLNKVKSMKGGSSSTSGSGSSSSIYSGKAESIRSFDGSSESKSSNSSSSSSRKADKESKREPSRDSRDGGERRRDRVSEQAAYFRDEGRPESIAESKYEIWEENRADAREQLRKKRTTGRRE

SEQ ID NO: 13117 - protein, 492 aa, Lycopersicon esculentum
MDPYKYRPSSAFNSPFCTTNSGAPVFNNNSSLTVGARGPVLLEDYHLVEKLANFDRERIAERVVHARGASAKGFFEVTHDIAHLTCADFLRAPGVQTPVIVRFSTVIHERGSPETLRDPRGFAVKFYTREGNFDLVGNNFPVFFIRDGMKFPDMVHALKPNPKSHIQENWRVLDFFSHHPESLHMFTFLFDDIGIPQDYRHMDGSGVHTFTLINRAGKSTYVKFHWKPTCGVKSLLEEKAIRVGGANHSHATQDLYDSIAAGNYPEWKPSIQIMGPEHEDKFDFDPLDVTKTWPEDILPLQPVGRLVLNKNIDNFLYMNEQLAFCPSIVVPGVYYSDDKMLQTRIFSYSDTQRYRLGPNYLQLPANAPKCAHHNNHYDGSMNFMHRDEEIDYFPSRYDQVRHAEVYPIPSTVCSGKREKCIIQKENNFKQPGERYRSFTPDRQERFIRRWVEALSDPRITYEIRSIWITYWSQADKSLGQKLASRLNVRPSI

SEQ ID NO: 13118 - protein, 550 aa, Vibrio vulnificus YJ016
MLKTINPTQTQAWNALTAHFESAQDMDLKDLFAQDAARFDKFSARFGSDILVDYSKNLINEETLKHLFALAKETELSAAIKAMFSGEAINQTEGRAVLHTALRNRSNQPVLVDGEDVMPAVNAVLEKMKSFTDRVIGGEWKGYTGKAITDIVNIGIGGSDLGPYMVTEALAPYKNHLNLHFVSNVDGTHIVETLKKVDPETTLFLIASKTFTTQETMTNAHTARDWFLATAGDQAHVAKHFAALSTNAPAVSEFGIDTDNMFEFWDWVGGRYSLWSAIGLSIALAVGYDNFVELLEGAHEMDNHFVSTELESNIPVILALIGIWYNNFHGAESEAILPYDQYMHRFAAYFQQGNMESNGKYVDRNGNPVTYQTGPIIWGEPGTNGQHAFYQLIHQGTKLIPCDFIAPAVSHNPAGDHHQKLMSNFFAQTEALAFGKNEATVKAELVKAGKNAEEVAAIAPFKVFEGNRPTNSILVKQITPRTLGNLIAMYEHKIFVQGVIWNIFSFDQWGVELGKQLANQILPELADDSEISSHDSSTNGLINAFKAFKA

SEQ ID NO: 13119 - protein, 642 aa, Saccharomyces cerevisiae
MSHSGAAIFEKVSGIIAINEDVSPAELTWRSTDGDKVHTVVLSTIDKLQATPASSEKMMLRLIGKVDESKKRKDNEGNEVVPKPQRHMFSFNNRTVMDNIKMTLQQIISRYKDADIYEEKRRREESAQHTETPMSSSSVTAGTPTPHLDTPQLNNGAPLINTAKLDDSLSKEKLLTNLKLQQSLLKGNKVLMKVFQETVINAGLPPSEFWSTRIPLLRAFALSTSQKVGPYNVLSTIKPVASSENKVNVNLSREKILNIFENYPIVKKAYTDNVPKNFKEPEFWARFFSSKLFRKLRGEKIMQNDRGDVIIDRYLTLDQEFDRKDDDMLLHPVKKIIDLDGNIQDDPVVRGNRPDFTMQPGVDINGNSDGTVDILKGMNRLSEKMIMALKNEYSRTNLQNKSNITNDEEDEDNDERNELKIDDLNESYKTNYAIIHLKRNAHEKTTDNDAKSSADSIKNADLKVSNQQMLQQLSLVMDNLINKLDLNQVVPNNEVSNKINKRVITAIKINAKQAKHNNVNSALGSFVDNTSQANELEVKSTLPIDLLESCRMLHTTCCEFLKHFYIHFQSGEQKQASTVKKLYNHLKDCIEKLNELFQDVLNGDGESMSNTCTAYLKPVLNSITLATHKYDEYFNEYNNNSN

SEQ ID NO: 13120 - protein, 457 aa, Zea mays
MANIRALLVGLSRARGSLAEAGRCASTRPSILASLGAHYKIPMPARWFSSTGLPPHLVVGMPALSPTMVTSRNGENRKGTRYLAKILAPEGSKDVQVGQPIAVTVEDVEDIKSIPADTSFGGEQKEEQSTESAPQNKVVNVSEQSSTVSRISPAAKLLIKEHGLDTSSLRASGPRGTLLKGDVLAALKSGINSSSTKEKKSPAQPSSQPTRDSQSQASSISQKDDTYEDIPNSQIRKVIAKRLLESKQTTPHLYLSKDVVLDPLLAFRNELKELHGIKVSVNDIIIKAVAIALRNVPEANAYWNNDKEETQKCDSVDISIAVATEKGLMTPIIRNADQKTISAISAEVKQLAEKARAGKLAPNEFQGGTFSISNLGMYPVDHFCAIINPPQSGILAVGRGNKVVEPVVDSDGTEKAAAVTKMSLTLSADHRVFDGQVGGKFFTELALNFSDIRRLLL

SEQ ID NO: 13121 - protein, 576 aa, GIBBERELLA ZEAE PH-1
MAPSADTSFSAHVASQFQSYEEDRQSASKESTYATSNGVPVAHAYEAQRCGENGPLLLQDFHLIDLLSHFDRERIPERVVHAKGSGAHGFFECTDPLDDLCLADIFSAKGKKCPVSMRFSTVGGESGSHDMARDPRGFSVKMRTEEGNLDWVFNNTPVFFLRDPAKFPHFIHTQKRDPSTHLTHADDSFAFWDYLSQNPESIHQVMILMGDRGIPKGYRKMHGYSGHTFKLVNKAGDWVYTQIHLKSMQGTDFVTQEDSADYSPDFSQKDLYEAIQNGDYPKWTLEVQTMTPKEAEELWEKEKINVFDLTHVWPQKQFPRRKVGEFTLNENAINYFAEVEQIAFNPAHLPPGIEPSADPVLQSRLFSYPDTHRHRIGVNYQQLPVNATRTGYKFGNFQRDGQMAFYNQGARPNYLSSIDPIKFRTRTVDLDKTHGHFTGEAITFLTAIRPEDFNAPRALWRNVFDEPARERFINNVTGKMKLCKQEEPLKRQIAIFREVDPEIADRLEKSTGIKGYDGIADMKFNGSHNCMNGEMKLANDIIANKGKSATARNGAPAKGCHSRLETNGHLNGTNGK

SEQ ID NO: 13122 - protein, 356 aa, Oryza sativa (japonica cultivar-group)
MAALTSYEMAASILLCAEDSSSVLGFGGEEEEEEEDVVAGKRARCAGPPPPPCVDVAGVDFAVPSEECVARLVETEADHMPREDYAERLRAGGGDGDLDLRVRMDAIDWIWKVHSYYSFAPLTACLAVNYLDRFLSLYQLPDGKDWMTQLLAVACLSLAAKMEETDVPQSLDLQVGEERYVFEAKTIQRMELLVLSTLKWRMQAVTPFSYVDYFLRELNGGDPPSGRSALLSSELILCIARGTECLGFRPSEIAAAVAAAVVGEEHAAFSHVNKERMSHCQEVIQAMELIHPKPSSPSRVFVSSSIPRSPTGVLDAAGCLSYRSDDSAVASHYAASSWGYEHDSSPVSSKRRKISR

SEQ ID NO: 13123 - protein, 457 aa, Iris hollandica
MVGILVYVALFILSLLLFLTAAAKLHNSKSKIKNQAPSPPSLPVVGHLHLLKKPLHRSISLLSARHGPILLLRFGSRPALAVSSLPLAEECLSGKNDLAFANRAHFPHEAAPLQLLTLGSANYGPHWRMLRRISAVELLSSHRINSFSQLRSEEVHSMISTLFRESSDKELNRVELKSKLFELAMNNMMRMIFGKDLASSEGAGRFREMVKESHSLLGASTRLGDFFPFLGWMDWRARRMVLRLVRRRDEFLQSLIDAHARKMEEVEEKTMIRVLVELQKSNRESNNDEGFMLKPLIIGLLQAGTDTSSDTIEWAMSLLLNNRDKLKKARDEIDARVGKERLLRESDLPNLPYLQCVITETLRLYPAAPLLVPHESAEECTVGGYAVPQGTMLLVNAYAIRVVGIVLGTLIQCFEWERVGEEEVDMTEGSGLTLPRANPLEAICRPRQSMISVLAGL

SEQ ID NO: 13124 - protein, 210 aa, Oryza sativa
GCRNSARGEIFTTQTSLTRIRAVPRYSLTIESLDALNTVCPTIGIMPSGIPWLWKNSKGKAKSGVKSPAKSIRCKGLDEGAIEMDYDPLSPPKLFEKDSYSLPYSEHACFAELEDFMLTVRPSTVIGIVSTSFCYVNPRHHFSHLCADNVYSDKTPEKNKGKDISVLTPKKRQNGSKTPKEKKIRIVYGSRVTMKRKECCGAKIVEPEEP

SEQ ID NO: 13125 - protein, 590 aa, Zea mays
  unsure (1)..(590): unsure at all Xaa locations
MRVGGGRDDDDEVSRKLKSMDVDKLENGGGEESPRPAVKYHGWKAMPFIIGNETFEKLGTLGTSANLLVYLTQVFHMRSVDAATLLNGLNGTTSLAPIIGAFLSDAYLGRYLALAIASVASLIGMFLLTMTAGANSLHPPECSVGETCEKATSYQFAVLFVAFAFLVLGSXGIRPCSXPFGADQFDPNTESGKRGINSFFNWYYFTFTAAMMISATVIIYVQSNVSWPIGLGIPTALMFLACVLFFMGTRLYVRVTPEGSPFTSVVQVLSAALKKRSLKQPKDPKQDLFDPPHTSAIVTKLAHTDQFRCLDKAAIVASPDEVRSGGGAPADPWRLCSVQQVEEVKCLIRIVPVWSTGIIYYVAVVQQSTYVVLSALQSDRHLGRAGLQIPAASFTVFAMLAQTLWXPFYDRLLLPKLRKITGKEEGFTLLQRQGIGIALSTVAMVISAIVEDRRRAIXRSASRHSGTTITGGAISAMSSLWMVPQLMILGLSEAFNLISQIEFYYKEIPEHMRSVAGALAFCNLALGNYLSGFLVTIVHRTTGSGQNWLAQDLNKGRLDLFYWTIAGIGVFNLIYFVICARWYRFKGTSN

SEQ ID NO: 13126 - protein, 246 aa, Oryza sativa (indica cultivar-group)
MAIAGVLFLLFLARQASAAGYGGWQSAHATFYGGGDASGTMGGACGYGNLYSQGYGTNTAALSTALFNDGAACGSCYELRCDNAGSSCLPGSITVTATNFCPPNYGLPSDDGGWCNPPRPHFDMAEPAFLHIAQYRAGIVPVSFRRVPCVKKGGIRFTVNGHSYFNLVLVTNVAGAGDVRSVSIKGSRTGWQPMSRNWGQNWQSNAFLDGQSLSFQVTASDGRTVTSNNVAHPGWQFGQTFEGGQF

SEQ ID NO: 13127 - protein, 369 aa, Oryza sativa
MGKGGKGAEAAAAAVAGAGEEENMAAWLVAKNTLKIMPFKLPPVGPYDVRVRMKAVGICGSDVHYLREMRIAHFVVKEPMVIGHECAGVIEEVGSGVTHLAVGDRVALEPGISCWRCRHCKGRRYNLCEDMKFFATPPVHGSLANQIVHPGDLCFKLPENVSLEEGAMCEPLSVGVHACRRADVGPETGVLIMGAGPIGLVTLLAARAFGATRVVIVDVDEHRLSVARSLGADAAVRVSARAEDVGEEVERIRAAMGGDIDVSLDCAGFSKTVATALEATRGGGKVCLVGMGHNEMTVPLTSAAIREVDVVGIFRYKDTWPLCIEFLRSGKIDVKPLITHRFGFSQEDVEEAFEVSARGRDAIKVMFNL

SEQ ID NO: 13128 - protein, 381 aa, Zea mays
TRPTVSASAYRPRRSPLSLSLSLQAHQAMAAPKKTMRALRYDKYGGGAEGLKHVEVPVPSPSKGEVLLKLEAASINPIDWKIQKGMVRPFLPRKFPFMRELDLVSVPKKTVGDMSGEVVELGSGVTDFKPGDKVISITFPNGGGLAEYAVAPASLTVARPPEVSAAEGASLPTAASTALQQLKAAGVSSFDGGSGSGADSDGPKNVLVTAASGGVGHYAVQLAKLAGLRVTATCGARNLGLVAGLGADEVLDYKTPEGARLLSPSGTRYDAVAHCATGTPWSVFAPVLADRATVVDVTPGVAAAAKSFLQKVTFSRKRLVPLVLIPKKEEMEWLVEMTRQGKLRTVVDSRYSLSRAQEAWAKSIDGHATGKIVVEMGGAAE

SEQ ID NO: 13129 - protein, 176 aa, Triticum aestivum
MAPTVMSSAATAVAPFQGLKSTAGLPVSRRSSSAAGLGSVSNGGRIRCMQVWPIEGIKKFETLSYLPPLSTEALLKQVDYLIRSKWVPCLEFSKVGFIFREHNASPRYYDGRYWTMWKLPMFGCTDATQVINEVEEVKKEYPDAYVRIIGFDNMRQVQCVSFIAFKPPGCEESGKA

SEQ ID NO: 13130 - protein, 154 aa, Triticum aestivum
  unsure (1)..(154): unsure at all Xaa locations
MSYLLPHLHSGWAVDQAILAEEERLVVIRFGHDWDETCMQMDEVLASVAETIKNFAVIYLVDITEVPDFNTMYELYDPSTVMFFFRNKHIMIDLGTGNNNKINWALKDKQEFIDIVETVYRGXHRKGRRLVIAPMDYSXKXSSHTKKTLFGLDD

SEQ ID NO: 13131 - protein, 149 aa, Zea mays
  unsure (1)..(149): unsure at all Xaa locations
ASFPVSRKQSLDITSIASNGGRVSCMQVWPPINMKKYETLSYLPDLSDEQLLSEIEYLLKNGWVPCLEXFETEHGFVYRENHKSPGYYDGRYWTMWKLPMFGCTDATQVLAEGQEAKKAYPQAWVRIIGFDNVRQVQRIRFIGYKPEGY

SEQ ID NO: 13132 - protein, 280 aa, Oryza sativa
  unsure (1)..(280): unsure at all Xaa locations
KVAGTGPFGRITPADVEAAPGIQPKPKGVPAASAAPVPLSAPAVGAVPQAAELPPVPGATVVPFTGMQAAVSKNMVESLAVPAFRVGYPIVTDKLDELYEKVKSKGVTMTVLLAKAAAMALAQHPVVNASCRDGKSFTYNTNINIAVAVAIDGGLITPVLEDADKLDIYLLSQKWKELVKKARAKQLQPNEYSSGTFTLSNLGMFGVDRFDAILPPGQGGIMAVGASKPTVVADKDGFFSVKSXLLVNATADHRIVYGADLAAFLQTFAKIIEDPESLTL

SEQ ID NO: 13133 - protein, 429 aa, Escherichia coli
MKALNREVIEYFKEHVNPGFLEYRKSVTAGGDYGAVEWQAGSLNTLVDTQGQEFIDCLGGFGIFNVGHRNPVVVSAVQNQLAKQPLHSQELLDPLRAMLAKTLAALTPGKLKYSFFCNSGTESVEAALKLAKAYQSPRGKFTFIATSGAFHGKSLGALSATAKSTFRKPFMPLLPGFRHVPFGNIEAMRTALNECKKTGDDVAAVILEPIQGEGGVILPPPGYLTAVRKLCDEFGALMILDEVQTGMGRTGKMFACEHENVQPDILCLAKALGGGVMPIGATIATEEVFSVLFDNPFLHTTTFGGNPLACAAALATINVLLEQNLPAQAEQKGDMLLDGFRQLAREYPDLVQEARGKGMLMAIEFVDNEIGYNFASEMFRQRVLVAGTLNNAKTIRIEPPLTLTIEQCELVIKAARKALAAMRVSVEEA

SEQ ID NO: 13134 - protein, 355 aa, Eucalyptus botryoides
MGSLEKERTTTGWAARDPSGVLSPYTYSLRNTGPEDLYIKVLSCGICHSDIHQIKNDLGMSHYPMVPGHEVVGEVLEVGSEVTKYRVGDRVGTGIVVGCCRSCGPCNSDQEQYCNKKIWNYNDVYTDGKPTQGGFAGEIVVGQRFVVKIPDGLESEQDAVMCAGVTVYSPLVRFGLKQSGLRGGILGLGGVGHMGVKIAKAMGHHVTVISSSDKKRTEALEHLGADAYLVSSDENGMKEATDSLDYIFDTIPVVHPLEPYLALLKLDGKLILTGVINAPLQFISPMVMLGRKSITGSFIGSMKETEEMLEFCKEKGLTSQIEVIKMDYVNTALERLEKNDVRYRFVVDVAGSKLD

SEQ ID NO: 13135 - protein, 658 aa, Triticum aestivum
  unsure (1)..(658): unsure at all Xaa locations
MIPLCASSSPSTPAIIAPRPRRLRHRTTTPSLPHSRSPHRHLLLASPSSPAPTPRPLARAHRPGAVATAAEMVFSVTKKETKPYEGQKPGTSGLRKKVTVFQQPHYLANFVQSTFNALPADQVKGATIVVSGDGRYFSKDAVQIIAKMAAANGVRRVWVGQDSLLSTPAVSAIIRERISADGAKATGAFILTASHNPGGPTEDFGIKYNMGNGXGPAPESVTDKIFSNTKTITEYLIAEDLPNVDISVIGVTSFTGPEGPFDVDVFDSATDYIKLMKTIFDFESIKKLLASPKFSFCFDGLHGVAGAYAKRMFVDELGASESSLLNCVPKEDFGGGHPDPNLTYAKELVDRMGLGKTSNVEPPEFGAAADGDADRNMVLGKRFFVTPSDSVAIIAANAVQSIPYFASGLKGVARSMPTSAALDVVAKNLNLKFFEVPTGWKFFGNLMDAGMCSVCGEESFGTGSDHIREKDGIWAVLAXWLSILAYKNKDNLGGDKLVTVEDIVLQHWXATYGRHYYTRYDYENVDAEAAKELMANLVKMQSSLSDVNKSIKEIQPTVADVVSADEFEYKDPVDGSVSKHQGIXRYLFGDGFPTXVFRLSGTGSVGATIRIYIEQYEKDSSKTGRESXSDALSPLVDVALKLSKIQEYTGRSAPTVIT

SEQ ID NO: 13136 - protein, 220 aa, Ralstonia metallidurans CH34
MILSGIHAKTIAADLSPLAYRRAVKFLSELDEDWALHIAAIGPCRHEAKPAREPYEALVRAIAYQQLHARAGDAILGRLLALYPGVSFPAPEQLLASDPELQRACGFSAEKLATIRRIAQATVEGLVPNLEEARRLPDTALIERLTSLRGVGRWTVEMFLIYSLERSDVLPVDDFGVREGYGRLKGLERAPTPRQMREIGEAWSPFRTVAAWYLWRLPSR

SEQ ID NO: 13137 - protein, 433 aa, Oryza sativa
  unsure (1)..(433): unsure at all Xaa locations
APWLATHVASGGRQAASSSSRGTRAVATMAKKSVGXLTAADLEGKRVFVRADLNVPLDDNQNITDDTRVRAAIPTIQYLIKNGAKVILSSHLGRPKGVTPKFSLAPLVPRLSELLGIQVTKAEDVIGPDVEKLVSELPNGSVLLLENVRFYKEEEKNDPEFAKKLASLADLYVNDAFGTAHRAHASTEGVTKFLKPSVAGFLLQKELDYLVGAVSSPKRPFAAIVGGSKVSSKIGVIESLLEKCDILLLGGGMIFTFYKAQGLSVGSSLVEEDKLELATSLLAKAKEKGVSLLLPSDVIIADKFAPDANSQVVPASAIPDGWMGLDIGPDSVASFSSTLETTQTVIWNGPMGVFEFDKFAVGTEAIAKKLADLSGKGVTTIIGGGDSVAAVEKVGVADVMSHISTGGGASLELLEGKELPGVIALDEAVTVAV

SEQ ID NO: 13138 - protein, 357 aa, Enterococcus faecalis V583
MQKESIYGLTREQLVDWFLAHGEKKFRATQVWEWLYTKRVASFSEMSNISKSLMTLLEENFSLNPLKQVIVQEAQDGTVKYLFELPDKNMIETVLMRQEYGLSVCVTTQVGCNIGCTFCASGLLKKQRDLTAGEIVAQIMWVQHYFDERGLDERVSHVVVMGIGEPFDNYANVMNFLRTINDDKGLAIGARHITVSTSGLVPKIREFADSGLQVNLAISLHAPNNEVRTSIMRINRSFPIEKLMAAIDEYIEKTNRRVTFEYIMLSQVNDRPEHAQQLADLLRNKKKLSYVNLIPYNPVSEHDQYSRSSKEAVLKFYDVLKKNGINCVIRKEHGTDIDAACGQLRSKQMKKEKVKNQ

SEQ ID NO: 13139 - protein, 502 aa, Corynebacterium efficiens YS-314
MTAVIPAALQRREQLNLPYTHVDDFYINGAWVTATGEKRNPVVDPATGQEWGSVPEAGQVELDHAVGAAREALPGWGSLTAADRAEYLVRIAEEIEKRAEVLALTNTRENGSPISETRGAAANAAGIFRYFATLAPFLDDPDIRPFPAGGAESLVDKDPIGVCALIAPWNFPINLVVIKLAPALLAGCSVVIKPASPTPLSIRFIIEAVEAAGVPAGVINLLTGSGRFGDAMVRHPGVNKVAFTGSTPVGRKIASACGELLRPVTLELGGKSSAIVLPDADMSVLSARLIRSCMRNTGQTCYISTRIIAPASRYEEVVQVVADTIAAGRQGDPLDEDTIFGPVATASQYATVMEYIESGHAEGARAVTGGAATAGLTGGLENGVFIEPTVFADVTPDMRIAAEEIFGPVISILRYDDSAGVEEAIAIANNTEFGLGGLVFGADEDRALDVARRVDSGSVGINFFGSNHSAPFGGRHDSGMGVEYGIEGLSAYLSYKSIHRMV

SEQ ID NO: 13140 - protein, 288 aa, Lithospermum erythrorhizon
MAGKLMRAVWYEGYGGGAAKLKHVEIPIPKPSKDEVLIKFEAVSLNPIDCKIQEGMARPILPRKFPHIPGYDVTGEIVETGSGAKKFKAGDKVVAIISHTGGGGLAEYGVAKENMIVVRPPEVSPAQAAPLHVTALTAHQALTQAIGLKLDGSGSQKNLLITAASGGVGHYAVQLAKLGNAHVTATCGARNIDLVKSLGADEVLDYKSPDGVALKSPSGKKYDAILHCGPAIPFSVFEPNLSAKGKVIDITPSPKAIFTFVLKKITWSSKTLEPLFSSPQSRESGVCC

SEQ ID NO: 13141 - protein, 585 aa, Elaeagnus umbellata
MCGILALLGCSDDSQAKRVRVLELSRRLKHRGPDWSGLFQFGDCYLAHQRLAIIDPASGDQPLFNEDKTVVVTVNGEIYNHEELRKKLSHHKFRTGSDCDVIAHLYEEYGEDFVDMLDGIFAFVLLDTRDNSFIVARDAIGVTSLYIGWGLDGSIWISSELKGLNNDCEHFETFPPGHLYSSKAGGMRRWYNPVWFSETIPSAPYDPLALRRAFENAVIKRLMTDVPFGVLLSGGLDSSLVASITARHLSGTKAAKQWGTKLHSFCVGLEGSPDLKAAKEVAAYLGTVHHEFHFTVQDGIDAIEDVIYHVETYDVTTIRASTPMFLMSRKIKSLGVKMVMSGEGSDEIFGGYLYFHKAPNKEEFHEETCRKIKALYLYDCLRANKSTTAWGLEARVPFLDKEFINVAMNIDPEYKKIKRDEGRIEKWVLRKAFDDEERPYLPKHILYRQKEQFSDGVGYSWIDGLKAHAAKHVTDKMIRNAAHIFPHNTPNTKEGYYYRMIFERFYPQNSARLTVPGGASVACSTAKAVEWDESWSKNLDPSGRAALGVHLSAYDNQVPSGVVQPEIISNVPQITVNTLGLEIQS

SEQ ID NO: 13142 - protein, 559 aa, Prunus dulcis
  unsure (1)..(559): unsure at all Xaa locations
MGSLEEERSLLEDGLIQDETNGLYTGDGSVDITGKPVLKQSTGNWXACPFILGTECCERLAFYGISTNLVTYLTHKLHEGNVSAARNVTTWSGTCYLTPLIGAVLADAYWGRYWTIAIFSTIYFIGMCTLTISASVPALKPPQCVDSVCPSASPAQYGVFFFGLYLIALRTGGIKPCVSSFGADQFDDTDSRERVKKGSFFNWFYFSINIGALVSSTLIVWVQDNAGWGLGFGIPALFMGIAIVSFFSGTPLYRFQKPGGSPLTRMCQVLVASFRKWNLDVPRDSSLLYETQDKGSAIKGSRKLEHSDELNCLDKAAVISETETKTGDFSNPWRICTVTQVEELKILIRMFPIWATGIVFSAVYAQMATMFVEQGMMMDTSVGSFTIPPASLSSFDVISVIFWVPIYDRFIVPIARKFTGKERGFSELQRMGIGLFLSVLCMSAAAVVEMKRLQLATELGLVDKEVAVPLSIFWQIPQYFLLGAAEIFTFIGQLEFFYDQSSDAMRSLCSALSASDDFIGKLSELFDSDIVTYFTTQGGKAGWIPDNLNDGHLDYFSGS

SEQ ID NO: 13143 - protein, 719 aa, Neurospora crassa
MRVNALLPLSGLIGTALAACPFADPSALGRRAEGGEVDARQRLKEVEVDDNGQFMTTDFGGNIEEQFSLKAGGRGSTLLEDFIFRQKLQHFDHERIPERVVHARGAGAHGIFTSYGDWSNITAASFLGAKDKQTPVFVRFSTVAGSRGSADTARDVHGFATRFYTDEGNFDIVGNNIPVFFIQDAIRFPDLIHSVKPSPDNEVPQAATAHDSAWDFFSSQPSALHTLFWAMSGNGIPRSYRHMDGFGIHTFRLVTEDGKSKLVKWHWKTKQGKAALVWEEAQVLAGKNADFHRQDLWDAIESGNAPSWELAVQLIDEDKAQAYGFDLLDPTKFLPEEFAPLQVLGEMTLNRNPMNYFAETEQISFQPGHIVRGVDFTEDPLLQGRLYSYLDTQLNRHRGPNFEQLPINRPVSGVHNNHRDGQGQAWIHKNIHHYSPSYLNKGYPAQANQTVGRGFFTTPGRTASGVLNRELSATFDDHYTQPRLFFNSLTPVEQQFVINAIRFEASHVTNEQVKKNVLEQLNKISNDVAKRVAVALGLEAPQPDPTYYHNNVTRGVSIFNESLPTIATLRVGVLSTTKGGSLDKAKALKEQLEKDGLKVTVIAEYLASGVDQTYSAADATAFDAVVVAEGAERVFSGKGAMSPLFPAGRPSQILTDGYRWGKPVAAVGSAKKALQSIGVEEKEAGVYAGAQDEVIKGVEEGLKVFKFLERFAVDGDDEE

SEQ ID NO: 13144 - protein, 416 aa, Candida albicans SC5314
MAPFAGIKELPPDPLFGLKARYNADSRTNKVDLGIGAYRDNNGKPWILPAVRQAEQKLINSPDYNHEYLSISGFAPFTESAAKVILGENSLAIKDKKIVSQQSLSGTGALHLAGVFIKEFYQGNHTIYLSQPTWANHKQIFEYIGFKVASYPYWNNDTKSLDLSGFLKAISSAPDGSVFLLHACAHNPTGLDPNQSQWDEILAALEKKKHFIIFDSAYQGFASGDLEKDAYPIRKAIDSKVITSPIIICQSFAKNVGMYGERVGAIHVIPSTVESNDSLNRAIKSQLNRIIRSELSNPPAYGSKIVATILNDPELYSQWRKDLVTMSSRIGEMRNTLRSKLESLGTPGTWNHITEQTGMFSFTGLTPQMVERLEKHHGIYLVSSGRASVAGLNEHNVDQVAKAIDEVVRHFGKSKL

SEQ ID NO: 13145 - protein, 335 aa, Saccharomyces cerevisiae
MSEPAQKKQKVANNSLEQLKASGTVVVADTGDFGSIAKFQPQDSTTNPSLILAAAKQPTYAKLIDVAVEYGKKHGKTTEEQVENAVDRLLVEFGKEILKIVPGRVSTEVDARLSFDTQATIEKARHIIKLFEQEGVSKERVLIKIASTWEGIQAAKELEEKDGIHCNLTLLFSFVQAVACAEAQVTLISPFVGRILDWYKSSTGKDYKGEADPGVISVKKMYNYYKKYGYKTIVMGASFRSTDEIKNLAGVDYLTISPALLDKLMNSTEPFPRVLDPVSAKKEAGDKISYISDESKFRFDLNEDAMATEKLSEGIRKFSADIVTLFDLIEKKVTA

SEQ ID NO: 13146 - protein, 349 aa, Crocosphaera watsonii WH 8501
MTTLLRNCWYVALPGKDLKPGKMVHRKMLGEPVLIGRRKDGQVFAMRDICPHRGIPLRYGWMEGEDVCCCYHGWRFNTEDGGCREIPSLTEHDNLDISRIKIPTYACREVQGHIWVYFAEDSKKEVDPADIPPVPTIPDFGKIGPGVSETIHFACHIDHAIIGLMDPAHGPYVHSSWWWRSGPRKFRVKEKQYEPVSQGFRLVPYDMPVSARPYKILGDNVSIEIVFELPSVRTEILRGDRYSACLLTTITPIDETQCIAFQSIYWTIPWMGVFKPLLSLLTRKFLAQDRDVVIQQQEGLAYNPSLMLIDDADTQAKWYFRIKYEYQKAIAENRPFKNPIEPKILRWRS

SEQ ID NO: 13147 - protein, 513 aa, GIBBERELLA ZEAE PH-1
MSYVVPGPPTPFNGTNEELGGDSTTENLNQWYQSGDQAFILVSACLVLLMVPGIAFLYSGLARRKSALSMLWVVMMSFSVIVFQWYFWGFSLAFSTTSNNPFIGDLKHFGLRHVWGAPSVGSALIPALLYSFYQMMFCAVTAALTIGAVAERGRVIPSMVFIFFWATLVYCPLAYWVWNPSGWGFVNGVLDYAGGVPVEIGSGMSALAYSWVLGRRNEKMMMNFRPHNISLITLGTIFLWFGWLGFNGGSAFGANLRAVMACWNSCLTAMFAAMTWCILDFRLARKWSMVGWCSGTISGLVAATPASGFIDPWASIILGVVAGVACNFATKVKFLIRIDDSLDVFAEHGVGGIVGLIFNAFFARGSIIGLDGVNTGATGGFMDGNYVIIGWQIAAIVGASSYAFVMSAIIAKIIDLIPGLKLRASEEAELLGMDDDQHGEFSYDYVEVRRDFLAWSPQRGEPAEDGDVLEPTHGIHEHQSMMNPSESDDARKTPSLNTPDVIAPDAVINEKHA

SEQ ID NO: 13148 - protein, 194 aa, Saccharomyces cerevisiae
MVTSNVVLVSGEGERFTVDKKIAERSLLLKNYLNDMHDSNLQNNSDSESDSDSETNHKSKDNNNGDDDDEDDDEIVMPVPNVRSSVLQKVIEWAEHHRDSNFPDEDDDDSRKSAPVDSWDREFLKVDQEMLYEIILAANYLNIKPLLDAGCKVVAEMIRGRSPEEIRRTFNIVNDFTPEEEAAIRRENEWAEDR

SEQ ID NO: 13149 - protein, 622 aa, GIBBERELLA ZEAE PH-1
MEASSPLAALHRPSMLPSWGSRDIFRGHPHYATSSVTSASMSLREQMHKHSTGDYFNVKDVRGASPATSLAADISQNFRLDSDSSPKFHTPRRALFTAGMVRSFQDRDSLKTPPLPTSSPAPLTELKELMEISPLPHKAPFFTQFEVTSPTPGSTPAADDEMMLDSPAPISRQSSLEPPRPIMAEIAMPRRPSLTRMKGFSTTAVPNRQADAVDTTPFRFSAGGSRLNHTSSNLSLSECFESASPPQERRPASANSPCPGMPAGRARPQFLNFNACARNNASPSMNAHSRRQSNPFLRNRKQFRRSLSMFEHPADVMKSNSDGEETPSPALQSVMDVEEAQEPVLPHFLLEDPTDTIPRISRETLVDVLDGKYSSHFDQKIVVDCRFEYEYEGGHIDGAVNYNDKDLLTNQLFQTPMDGRTLLIFHCEYSAHRAPLMARHVRSEDRTVNAEHYPKLTYPEVYILDGGYSGFFTEHRGRCYPQEYVEMSDEAHQRTCEREMGRLKSRKGLSRAATFAFGQHLAHDTLICMHLSPDLVPPQSHAAWPHTRRIDLYDLVFVLHVVEPNSIGAGFTLSALSGLGHPNLPPSTNDACLVRLPGLQLILTTIITLMLITTPRPQRLRF

SEQ ID NO: 13150 - protein, 391 aa, Haemophilus ducreyi 35000HP
MSVKKMADLDLTGKRLFIRADLNVPVKEGKITSDARIRATIPTLKLALQKGAKVMVTSHLGRPTEGVFEEANSLQPVVDYLNASDLGVPVRLVRDYLDGVEVNQNEIVVLENVRINKGEKKNDAELAKKYAALCDIFVMDAFGTAHRAECSTYGIAEFAPIACAGPLLAAELEALGKALKEPQRPMLAIVGGSKVSTKLTVLDSLSKIADQLIVGGGIANIFIAAEGHNVGKSLYEADLIPEAKRLASTTHIPVPVDVRVGTEFSETATATEKLVSEVTADESIFDIGDKSAEELAHIIKSAKTIFWNGPVGVFEFANFRKGTEIISNAIAEATANGAFSIAGGGDTLAAIDLFGIADKISYISTGGGAFLEFVEGKVLPAVEILEKRANS

SEQ ID NO: 13151 - protein, 252 aa, Triticum aestivum
MAADLGFDATELRLGLPGGGEGEARSSSGKRGFAETIDLKLKLEPAGEEAPAEEDRADVAVVAAAAAENQEETATDAGGGKMKRSPSQSSVVTSAALPDPAEKPRAPKAQVVGWPPVRSFRKNILAEKSSPAAAAAFVKVSMDGAPYLRKVDLNMYKTYQDLSKALEKMFSSFTIGNCGTPGMNAMNESKLMDLLNGSEYVPTYEDKDGDWMLVGDVPWEMFVESCKRLRIMKGSEAIGLAPRAMEKCKNRS

SEQ ID NO: 13152 - protein, 1276 aa, Synechocystis sp. PCC 6803
MNPNRSLEDFLRNVINKFHRALTLRETLQVIVEEARIFLGVDRVKIYKFASDGSGEVLAEAVNRAALPSLLGLHFPVEDIPPQAREELGNQRKMIAVDVAHRRKKSHELSGRISPTEHSNGHYTTVDSCHIQYLLAMGVLSSLTVPVMQDQQLWGIMAVHHSKPRRFTEQEWETMALLSKEVSLAITQSQLSRQVHQQQVQEALVQRLETTVAQYGDRPETWQYALETVGQAVEADGAVLYIAPDLTGSVAQHYQWNLRFDWGNWLETSLWQELMRGQPSAAMEPMAAVQSTWEKPRPFTSVAPLPPTNCVPHGYTLGELEQRSDWIAPPESLSAENFQSFLIVPLAADQQWVGSLILLRKEKSLVKHWAGKRGIDRRNILPRLSFEAWEETQKLVPTWNRSERKLAQVASTQLYMAITQQFVTRLITQQTAYDPLTQLPNWIIFNRQLTLALLDALYEGKMVGVLVIAMDRFKRINESFGHKTGDGLLQEVADRLNQKLSPLAAYSPLLSRWHGDGFTILLTQISDNQEMIPLCERLLSTFQEPFFLQGQPIYLTASMGISTAPYDGETAESLLKFAEIALTRAKCQGKNTYQFYRPQDSAPMLDRLTLESDLRQALTNQEFVLYFQPQVALDTGKLLGVEALVRWQHPRLGQVAPDVFIPLAEELGLINHLGQWVLETACATHQHFFRETGRRLRMAVNISARQFQDEKWLNSVLECLKRTGMPPEDLELEITESLMMEDIKGTVVLLHRLREEGVQVAIDDFGTGYSSLSILKQLPIHRLKIDKSFVNDLLNEGADTAIIQYVIDLANGLNLETVAEGIESEAQLQRLQKMGCHLGQGYFLTRPLPAEAMMTYLYYPQILDFGPTPPLPKVALPETETEAGQGNVGDRPLPNSLNRENPWTEKLHDYVLLKERLQQRNVKEKLVLKIANKIRASLNINDILYSTVTEVRQFLNTDRVVLFKFNSQWSGQVVTESHNDFCRSIINDEIDDPCFKGHYLRLYREGRVRAVSDIEKADLADCHKELLRHYQVKANLVVPVVFNENLWGLLIAHECKTPRYWQEEDLQLLMELATQVAIAIHQGELYEQLETANIRLQQISSLDALTQVGNRYLFDSTLEREWQRLQRIREPLALLLCDVDFFKGFNDNYGHPAGDRCLKKIADAMAKVAKRPTDLVARYGGEEFAIILSETSLEGAINVTEALQVEVANLAIPHTVSGTGHVTLSIGIAVYTPERHINPNALVKAADLALYEAKAKGRNQWLAYEGSQLPHVDGEV

SEQ ID NO: 13153 - protein, 383 aa, Cryptococcus neoformans var. grubii
MSTEGQVITCKAAIAWEAGKPLSIETVEVAPPKDGEVRIKILYTGLCHTDAYTLSGNDPEGAFPVILGHEGGGIVESVGKGVDEVKVGDHVVPLYTAECRECKFCKSGKTNLCGRVRATQGKGVMPDGTSRFKCKGQDILHFMGCSTFSQYTVVSKFSVVAINPKAPLKTSCLLGCGITTGYGSATKSPGIEGSNVAIFGVGCVGLSVLQGAKAKGCKRIFAIDTNPKKKEWAEKFGATDFVNPKDLPEGKTIVDYLIEETDGGLDFTFDATGNVGVMRNALEACHKGWGVCNIIGVAPAGAEISTRPFQLVTGRVWKGTAFGGVKGRTELPGIVEDYLAGKLWVNEFVTHNETLEGINKGFDDMHAGDCIRCVVDMGFNEAP

SEQ ID NO: 13154 - protein, 333 aa, Oligotropha carboxidovorans
MPDYSLAPLRPALEKSLKRSVRFVETDWRNGAPRAEVAKAIPGDILLMENTRFHPGEEENDPEFSRTLADLGDIFVNDAFSVSHRAHASTEGVARLLPSFAGRGMEAELTALDRALGKPMRSVGAVVGGAKVSTKITVLENLVTRVDELIIGGGMANTFLYAKGINVGRSLCEPDFKETVERILQRAADHHCNIVLPRDVVIAKEFAPNAPHEVVDVHAVPADSMILDVGPESVADIMEQFGDLKTLLWNGPVGAFETEPFGRGTFALARCAARLTKAGKLVTVAGGGDTVAALSAAGIQDDFSYVSTAGGAFLEWLEGRGLPGVDVLKISHA

SEQ ID NO: 13155 - protein, 214 aa, Prunus persica
IDFEPVKPYEVPMTAAGALQSYKLAAKAIARLQSLPSGSMERLCDTMVQEVFELTGYDRVMAYKFHDDDHGEVVSEITKPGLEPYLGLHYPSTDIPQASRFLFMKNKVRMIVDCCAKQVKVLQDEKLPFDLTLCGSTLRSPHSCHLQYMKNMESIASLVMAVVVNEGDDEVASPDSVQPQKRKRLWGLVVCHNTSPRFVPFPLRYACEFLAQSS

SEQ ID NO: 13156 - protein, 477 aa, Azotobacter vinelandii
MSQKFDVIVIGAGPGGYVAAIKSAQLGLKTALIEKYKGKEGKTALGGTCLNVGCIPSKALLDSSYKFHEAHESFKLHGISTGEVAIDVPTMIARKDQIVRNLTGGVASLIKANGVTLFEGHGKLLAGKKVEVTAADGSSQVLDTENVILASGSKPVEIPPAPVDQDVIVDSTGALDFQNVPGKLGVIGAGVIGLELGSVWARLGAEVTVLEAMDKFLPAVDEQVAKEAQKILTKQGLKILLGARVTGTEVKNKQVTVKFVDAEGEKSQAFDKLIVAVGRRPVTTDLLAADSGVTLDERGFIYVDDYCATSVPGVYAIGDVVRGAMLAHKASEEGVVVAERIAGHKAQMNYDLIPAVIYTHPEIAGVGKTEQALKAEGVAINVGVFPFAASGRAMAANDTAGFVKVIADAKTDRVLGVHVIGPSAAELVQQGAIAMEFGTSAEDLGMMVFAHPALSEALHEAALAVSGHAIHVANRKK

SEQ ID NO: 13157 - protein, 72 aa, Triticum aestivum
MGKMPVRMKAVVYALSPFQQQVMPGLWKDITTKIHHKVSENWISATLLITPVVGTYQYAMWYKEQEKLSHRY

SEQ ID NO: 13158 - protein, 456 aa, Securigera parviflora
MCGILAVLGCSDDSQAKRVRVLELSRRLKHRGPDWSGLHQHGDCFLAHQRLAIVDPASGDQPLFNEDQSIIVTVNGEIYNHEELRKQMPNHKFRTGSDCDVIAHLYEEHGENFVDMLDGIFSFGLLDTRDNSFIVARDAIGVTSLYIGWGLDGSVWIASELKGLNDDCEHFETFPPGHLYSSKEREFRRWYNPPWFSESIPSAPYDPLALRQAFEKAVVKRLMTDVPFGVLLSGGLDSSLVASITARHLADTKAAKQWGAKLHSFCVGLEGSPDLKAGKEVADYLGTVHHEFQYTVQDGIDALEDVIYHIETYDVTTIRASTPMFLMSRKIKSLGVKWVISGEGSDEIFGGYLYFHKAPNKEELHKETCRKIKALHKYDCLRANKSTFAWGLEARVPFLDKEFINVAMNIDPENKMIKLDEGRIEKWILRKAFDDEENPYLPKHILYRQKEQFSDG

SEQ ID NO: 13159 - protein, 695 aa, Saccharomyces cerevisiae
MAGILSKTLSEVHPSLRTNGMGIGNTHRRISLGFLPPNKKNPLVRKFRARTRNIDQRSFRSLTDDFGSNVHEPNPYLGNIDEEPDLYYHDEEDGELSRTISLPSRVSETPELSPQDVDWILHEHERRYSSVCNSDNEEASQSNTPDRIQEYSGRELEYDEFMNRLQAQKQKLTRSAVTDAKGTSHHRRPSFVSVTSRGSVPTIYQEIDENDSEALAELAHSHVTFKSEARVLASYSFPLIFTFLLEQIFPMVCSLTVGHLGKNELAAVSLASMTSNITLAIFEGIATSLDTLCPQAYGSGRFYSVGVHLQRCIAFSLVIYIPFAVMWWYSEPLLSYIIPEKELINLTSRFLRVLILGAPAYIFFENLKRFLQAQGIFDAGIYVLTICAPLNVLVSYTLVWNKYIGVGFIGAAIAVVLNFWLMFFLLLFYALYIDGRKCWGGFSRKAFTHWNDLGHLAFSGIIMLEAEELSYELLTLFSAYYGVSYLAAQSAVSTMAALLYMIPFAIGISTSTRIANFIGAKRTDFAHISSQVGLSFSFIAGFINCCILVFGRNLIANIYSKDPEVIKLIAQVLPLVGIVQNFDSLNAVAGSCLRGQGMQSLGSIVNLMAYYLFGIPLALILSWFFDMKLYGLWIGIGSAMLLIGLVEAYYVLFPDWDKIMTYAEILKETEDDEVDSDEYLTDSDDPDENTALLGA

SEQ ID NO: 13160 - protein, 215 aa, Triticum aestivum
MDATAAAAGGGDGTQRTLNPYVTGNSVIAMKYKDGVIMACDTGASYGSTLRYKSVERIKEVGKHSLIGGSGEFSDFQEILRYLDELTRNKFDPLWNSLVLGGVKKGPKGDEKYLGMVNMIGTHFEENHIATGFGNHMAIPILRGEWREDMTFEEAVKLIEKCLLVLLYRDRSSINKFQIAKITTEGSTIYPPYALKTNWGFAAFENPSKGAVGTW

SEQ ID NO: 13161 - protein, 570 aa, Saccharomyces cerevisiae
MSQDAAIAEQTPVEHLSAVDSASHSVLSTPSNKAERDEIKAYGEGEEHEPVVEIPKRPASAYVTVSIMCIMIAFGGFVFGWDTGTISGFINQTDFIRRFGMKHKDGTNYLSKVRTGLIVSIFNIGCAIGGIILSKLGDMYGRKVGLIVVVVIYIIGIIIQIASINKWYQYFIGRIISGLGVGGIAVLSPMLISEVSPKHLRGTLVSCYQLMITAGIFLGYCTNFGTKNYSNSVQWRVPLGLCFAWALFMIGGMTFVPESPRYLAEVGKIEEAKRSIAVSNKVAVDDPSVLAEVEAVLAGVEAEKLAGNASWGELFSSKTKVLQRLIMGAMIQSLQQLTGDNYFFYYGTTIFKAVGLSDSFETSIVLGIVNFASTFVGIYVVERYGRRTCLLWGAASMTACMVVYASVGVTRLWPNGQDQPSSKGAGNCMIVFACFYIFCFATTWAPIPYVVVSETFPLRVKSKAMSIATAANWLWGFLIGFFTPFITGAINFYYGYVFMGCLVFMFFYVLLVVPETKGLTLEEVNTMWEEGVLPWKSASWVPPSRRGANYDAEEMTHDDKPLYKRMFSTK

SEQ ID NO: 13162 - protein, 286 aa, Oryza sativa
  unsure (1)..(286): unsure at all Xaa locations
MAGGEHGVNGQHEETRAMEEGSRDHQARCENSEQDGGSKSSSNNHPMFSVQFAQKVIAEILGTFFLIFAGCAAVAVNKRTGGTVTFPGIFITCKLVLLPLGPYNDPAYDDNHFPTVTLLXHTWDRFTSASVLARAAPRAAGSPVATPTLRSTFAGAPEHLXGTAPPGSDVQSLALEFIITFYLMCAVSGVAADNRAIGELAGLAVGATVLVNVLFAGPISGASMNPARTIGPAIILGRYTGIWVYIAGPVFGAVAGAWAYNLIRFTDKPLREITMTASFIRSTRRN

SEQ ID NO: 13163 - protein, 355 aa, Chlamydomonas reinhardtii
MLLANRVNAGAARRVSGRAAAPIAVRAGRRSLVCEARKVALLGAAGGIGQPLALLLKMNKFVTELALYDIANVVGVAADLSHCNTPVKVTGYTGPEELGACLKGADLIVIPAGVPRKPGMTRDDLFNTNAGIVKALVEAVAKHAPNAVLEIITNPVNSTVPIAVETLKLAGVYDPKKVIGVTSLDIVRANTFVSEAKGLDMKDVDVPVIGGHAGSTILPLLSQTTPPVTFTEAEKKAMTDKIANAGTVVVEAKAGKGSATLSMAYAAARMAESTLLGLNGEPNIYECAFVQSDVVADCPFFASKVLLGPNGVAKVMGLGELDAFEQAAMAAMLPQLKSEIQKGLDFVKSPPAPAS

SEQ ID NO: 13164 - protein, 235 aa, Oryza sativa
MAAAGLESAWEYLITHFSEFQLASIGTFLLHESVFFLSGLPSLLFERLGLFSKYKIQKKSNTPDYQNRCVVRLVLYHVCVNLPLTILSYRTFKFMGLRSTLPLPHCRYATPFGLTSEYAHPAEILFLGFATVAGPALTGPHLFTLWVWMVLRVLETVEAHSGYHFPWSPSNFLPLYGGRGLEHFSAEFHDYHHRVLYTKSGNYSSTFIYMDWLFGTDKDYRKTKALEEKERTKHL

SEQ ID NO: 13165 - protein, 449 aa, Streptococcus agalactiae NEM316
MSKQYDYIVIGGGSAGSGTANRAAMYGAKVLLIEGGQVGGTCVNLGCVPKKIMWYGAQVSETLHKYSSGYGFEVNNLNFDFTTLKANRDAYVQRSRQSYAANFERNGVEKIDGFARFIDNHTIEVNGQQYKAPHITIATGGHPLYPDIIGSELGETSDDFFGWETLPDSILIVGAGYIAAELAGVVNELGVETHLAFRKDHILRGFDDMVTSEVMAEMEKSGISLHANHVPKSLKRDEGGKLIFEAENGKTLVVDRVIWAIGRGPNVDMGLENTDIVLNDKGYIKTDEFENTSVDGVYAIGDVNGKIALTPVAIAAGRRLSERLFNHKDNEKLDYHNVPSVIFTHPVIGTVGLSEAAAIEQFGEDNIKVYTSTFTSMYTAVTTNRQAVKMKLITLGKEEKVIGLHGVGYGIDEMIQGFSVAIKMGATKADFDDTVAIHPTGSEEFVTMR

SEQ ID NO: 13166 - protein, 90 aa, Triticum aestivum
  unsure (1)..(90): unsure at all Xaa locations
MLTKGRRVAGRGEDMSAHYAFGPHEDDAIIKHRLLTRIPTTRGEPPLKKLQKKFMSFATEVDKDADNTSDCERLHKAXFLLDINTFGRCL

SEQ ID NO: 13167 - protein, 618 aa, Oryza sativa
  unsure (1)..(618): unsure at all Xaa locations
ETSKLPETAAVEKSQPKIRQISLCPSSTASSPRSSSAPPTSASAPPTPXADLSRSSSSSSEQQPSSQNGSTRGAVEKDPIKLWERYVEWLYQHKELGLFVDVSRMGFTEEFLRRMEPRMQRAFAAMRELEKGAIANPDEGRMVGHYWLRDPGLAPNSFLRTKIETTLDRILAFSQDVVSGKVIAEVSGRFTQILSIGIGGSALGPQFVSEALAPDNPPLKIRFIDNTDPAGIDHQIAQLGPELASTLVIVISKSGGTPETRNGLLEVQKAFRDAGLDFSKQGVAVTQENSLLDNTARIEGWLARFPMFDWVGGRTSEMSAVGLLPAALQGIDIKEMLVGAALMDEETRNTVVKENPAALLALCWYWASEGIGNKDMVVLPYKDSLLLLSRYLQQLVMESLGKEFDLDGNRVNQGLTVYGNKGSTDQHAYIQQLREGVHNFFVTFIEVLRDRPPGHDWELEPGVTCGDYLFGMLQGTRSALYSNDRESISVTVQEVTPRAVGALVALYERAVGIYASLVNINAYHQPGVEAGKKAAGEVLALQKRVLTVLNEASCKDPAEPLTLDQIAERCHCPEDIEMIYKIIQHMAANDRALIAEGSCGSPRSIKVYLGECNVDEDM

SEQ ID NO: 13168 - protein, 253 aa, Zea mays
MDVKCRRLEGKVAVVTASTQGIGLAIAERLGLEGAAAVVSSRKQKNVDEAVEGLKAKGITVVGAVCHVSDAQQRKNIIETAVKNFGHIDILVSNAAANPTVNVILEMKEVVLDKLWDINVKASILLIQDAAPHLRAGSSVILISSIAGYNPEQGLTMYGVTKTALFGLTKALAGEMGPDIRVNCIAPGFVPTRFASFFIDNETIRKKLNERTMLKRLGSVEDMAAAAAFLASDDASFITAETIVVAGGVPSRL

SEQ ID NO: 13169 - protein, 186 aa, Zea mays
MAGGGGGFLDLERHFAFYGAYHSNPVNVFIHALFVWPIFLTALLLLHIAAPFPRAAAVFTAVYGAFYVSLDRRSGALAALLCLLCWGASSALAARLGFSLGWKVVLVAQLFCWTMQFIGHGVSEKRAPALVDNLVQALLMAPYFVLLEILHKFAAYEPYPGFHANVQKLIDAKRKEWADKKAKKMS

SEQ ID NO: 13170 - protein, 528 aa, Nostoc sp. PCC 7120
MDAKALWQRYQEWLYFHEGLGLYLDVSRMRFDDAFVKSLLPKFDKAFADMAELEKGAIANPDENRMVGHYWLRNPDLAPTPEIAQEIVQTLEQIEAFAEKIQTGAIHPPKANRFTDIISIGIGGSALGPQFVAEALAPEFPPLKIHFIDNTDPAGIDRILTHLRNHLASTLVLVISKSGGTPEPRNGMIEVKKAYAGQNLDFAQYAVAITSTGSNLDKVAQSEGWLATFPMYDWVGGRTSEMSSVGLVPAALQGIDVRAMLEGAKEMDDATRVPEVKNNPAALLALSWYYSGNGKGEKDMVVLPYKDSLLLFSRYLQQLVMESLGKEKDLDGNTVYQGIAVYGNKGSTDQHAYVQQLREGVPNFFATLIEVLEDRHGASPEIDPGVTSGDYLSGFLLGTRQALYENQRDSITVTIPQVNARTVGALVALYERTVGLYASLVNINAYHQPGVEAGKKAAAVILDLQTKVVGLLQKEKTALSLEQIAEKIGAADQVEAIYKILRHLQANQRGVVFQGNLGQPSSLKISLS

SEQ ID NO: 13171 - protein, 578 aa, Arabidopsis thaliana
MCGILAVLGCVDNSQAKRSRIIELSRRLRHRGPDWSGLHCYEDCYLAHERLAIVDPTSGDQPLYNEDKTIAVTVNGEIYNHKDLRENLKSHQFRTGSDCEVIAHLYEEHGEEFVDMLDGMFAFVLLDTRDKSFIAARDAIGITPLYIGWGLDGSVWFASEMKALSDDCEQFMCFPPGHIYSSKQGGLRRWYNPPWFSEVVPSTPYDPLVVRNTFEKAVIKRLMTDVPLGVLLSGGLDSSLVASVALRHLEKSEAACQWGSKLHTFCIGLKGSPDLKAGREVADYLGTRHHELHFTVQDGIDAIEEVIYHVETYDVTTIRASTPMFLMSRKIKSLGVKMVLSGEGSDEIFGGYLYFHKAPNKKEFHEETCRKIKALHQYDCLRANKSTSAWGVEARVPFLDKEFINVAMSIDPEWKMIRPDLGRIEKWVLRNAFDDEKNPYLPKHILYRQKEQFSDGVGYSWIDGLKDHANKHVSDTMLMNASFVFPDNTPLTKEAYYYRTIFEKFFPKSAARATVPGGPSVACSTAKAVEWDAAWSQNLDPSGRAALGVHVSAYGEDKTEDSRPEKLQKLAEKTPAIV

SEQ ID NO: 13172 - protein, 388 aa, Vibrio vulnificus YJ016
MSHRKPATIAVRTGIESDTQYRAVVPPIYLSTNYGFSAFGEVPKYDYTRSGNPNRGLLEQVLFELESGKGAVVTNCGTSALNLWVSAFLSPDDLIVAPHDCYGGTYRLFNTRAKKGDFKVRFVDQSDSAALDAALALNPKLVLLETPSNPLVRVVDIAEVCEKAHKVGALVAVDNTFLTPVYQKPLELGADFVIHSTTKYINGHSDVIGGVVITKTEEHATELAWWGNCLGATGTPFDSYMTLRGIRTLGARMRVHEESSQQILSYLQTQELVGAIYHPSLPAHSGHEIAKKQQSGFGSMLSFEFVGSFEQLKVFVKALDLFSLAESLGGVESLVCHPASMTHRAMGEEALAEAGVTQQLLRLSVGLEDAQDLIADLKQAFQQAKESC

SEQ ID NO: 13173 - protein, 578 aa, Arabidopsis thaliana
MCGILAVLGCIDNSQAKRSRIIELSRRLRHRGPDWSGLHCYEDCYLAHERLAIIDPTSGDQPLYNEDKTVAVTVNGEIYNHKILREKLKSHQFRTGSDCEVIAHLYEEHGEEFIDMLDGMFAFVLLDTRDKSFIAARDAIGITPLYIGWGLDGSVWFASEMKALSDDCEQFMSFPPGHIYSSKQGGLRRWYNPPWYNEQVPSTPYDPLVLRNAFEKAVIKRLMTDVPFGVLLSGGLDSSLVAAVALRHLEKSEAARQWGSQLHTFCIGLQGSPDLKAGREVADYLGTRHHEFQFTVQDGIDAIEEVIYHIETYDVTTIRASTPMFLMSRKIKSLGVKMVLSGEGSDEILGGYLYFHKAPNKKEFHEETCRKIKALHQFDCLRANKSTSAWGVEARVPFLDKEFLNVAMSIDPEWKLIKPDLGRIEKWVLRNAFDDEERPYLPKHILYRQKEQFSDGVGYSWIDGLKDHANKHVSDTMLSNASFFFPDNTPLTKEAYYYRTIFEKFFPKSAARATVPGGPSIACSTAKAVEWDATWSKNLDPSGRAALGVHVAAYEEDKAAAAAKAGSDLVDPLPKNGT

SEQ ID NO: 13174 - protein, 422 aa, Streptomyces coelicolor A3(2)
MTALSPHLRQATPVVAVRGEGVHIEGEDGRRYLDFTAGIGVTSTGHCHPRVVAAAQEQVATLVHGQYTTVMHPPLRRLVDKLGEVLPQSLDSLFFTNSGSEAVEAALRLARQATGRPNVLVCHGGFHGRTVAAASMTTSGTRFRSGFSPLMSGVVVTPFPTAFRYGWDEETATRFALQELDYTLQTISSPADTAAVIVEPVLGEGGYVPANRAFVEGLRERADRHGFLLILDEVQTGVGRTGRFWGHEHFGVAPDILVTAKGLASGFPLSAIAAPEELMRKAWAGSQGGTYGANAVACAAACATLDVVRDEKLVENAEAMGARLRHGLEAVASRNPAVGDVRGMGLMLASEFVTADGEPDPETAARVQRAAVDEGLLLLLCGAWNQVVRMIPALVIDETAVDEGLRAWAAAVEAGTSGAAGR

SEQ ID NO: 13175 - protein, 570 aa, Saccharomyces cerevisiae
MSQDAAIAEQTPVEHLSAVDSASHSVLSTPSNKAERDEIKAYGEGEEHEPVVEIPKRPASAYVTVSIMCIMIAFGGFVFGWDTGTISGFINQTDFIRRFGMKHKDGTNYLSKVRTGLIVSIFNIGCAIGGIILSKLGDMYGRKVGLIVVVVIYIIGIIIQIASINKWYQYFIGRIISGLGVGGIAVLSPMLISEVSPKHLRGTLVSCYQLMITAGIFLGYCTNFGTKNYSNSVQWRVPLGLCFAWALFMIGGMTFVPESPRYLAEVGKIEEAKRSIAVSNKVAVDDPSVLAEVEAVLAGVEAEKLAGNASWGELFSSKTKVLQRLIMGAMIQSLQQLTGDNYFFYYGTTIFKAVGLSDSFETSIVLGIVNFASTFVGIYVVERYGRRTCLLWGAASMTACMVVYASVGVTRLWPNGQDQPSSKGAGNCMIVFACFYIFCFATTWAPIPYVVVSETFPLRVKSKAMSIATAANWLWGFLIGFFTPFITGAINFYYGYVFMGCLVFMFFYVLLVVPETKGLTLEEVNTMWEEGVLPWKSASWVPPSRRGANYDAEEMAHDDKPLYKRMFSTK

SEQ ID NO: 13176 - protein, 172 aa, Glycine max
QTFLRFSARTRVMMMKNKAGGAGGGMSGSGEGAGPTAAAAAAALQKQKALLQRVETDITSVVDNFTQIVNVARVSDLPVKNSQEAYMMEMRASKMVQAADSILKLVSELKQTAIFSGFASLNDHVEQRIAEFDQEAEKTNRLLARIGDDASASLKELEAHYYSSAQRLTPDV

SEQ ID NO: 13177 - protein, 567 aa, Saccharomyces cerevisiae
MNSTPDLISPQKSSENSNADLPSNSSQVMNMPEEKGVQDDFQAEADQVLTNPNTGKGAYVTVSICCVMVAFGGFVFGWDTGTISGFVAQTDFLRRFGMKHKDGSYYLSKVRTGLIVSIFNIGCAIGGIILAKLGDMYGRKMGLIVVVVIYIIGIIIQIASINKWYQYFIGRIISGLGVGGIAVLSPMLISEVAPKEMRGTLVSCYQLMITLGIFLGYCTNFGTKNYSNSVQWRVPLGLCFAWALFMIGGMTFVPESPRYLVEAGQIDEARASLSKVNKVAPDHPFIQQELEVIEASVEEARAAGSASWGELFTGKPAMFKRTMMGIMIQSLQQLTGDNYFFYYGTTVFNAVGMSDSFETSIVFGVVNFFSTCCSLYTVDRFGRRNCLLYGAIGMVCCYVVYASVGVTRLWPNGEGNGSSKGAGNCMIVFACFYIFCFATTWAPIAYVVISETFPLRVKSKAMSIATAANWLWGFLIGFFTPFITGAINFYYGYVFMGCMVFAYFYVFFFVPETKGLTLEEVNDMYAEGVLPWKSASWVPTSQRGANYDADALMHDDQPFYKKMFGKK

SEQ ID NO: 13178 - protein, 328 aa, Mesorhizobium sp. BNC1
MKAMVLKEVRRPLVLSKLPNPTPGRGEIRLKVEACAVCRTDLHVVDGDLEHPKLPLIPGHEIVGIIDMVGEGVDEARLGCRAGVPWLGHTCGACPYCLAGSENLCDQPLFTGYTRDGGFASHVVADADFAFDLDATGDPIALAPLLCAGLIGWRSLKMAGDGRRIGIYGFGAAAHIIAQICVWQGRDVFAFTRSGDTDAQRFALSLGASWAGSSDASPPDLMDAAIIFAPVGDLVPAALQAVRKGGRVVCGGIHMSDIPAMPYSLLWEERQLVSVANLTRADATEFFPVARRAGVRTHTTVYSLERANEALADLRAGRLSGAAVLVPG

SEQ ID NO: 13179 - protein, 397 aa, Oryza sativa (japonica cultivar-group)
MASAVTISSVGAQAGMISKPRNHGFTSYSGLKAASSVSFESGSSFLGRNASLRASVAPRIVPKAKSGSQISPEASYKVAVLGAAGGIGQPLGLLIKMSPLVSELHLYDIANVKGVAADLSHCNTPSQVLDFTGPSELANCLKGVDVVVIPAGVPRKPGMTRDDLFNINASIVKSLVEAVADNCPEAFIHIISNPVNSTVPIAAEVLKQKGVYNPKKLFGVTTLDVVRANTFVAQKKNLKLIDVDVPVVGGHAGITILPLLSKTMPSVTFTDEETEQLTKRIQNAGTEVVEAKAGAGSATLSMAYAAARFVESSLRALAGDPDVYECTFVQSELTELPFFASRVKLGKNGVESIISADLEGVTEYEAKALEALKSELKASIEKGIEFVHKQQTAAASV

SEQ ID NO: 13180 - protein, 539 aa, Enterococcus faecalis V583
MAYQFKLPDIGEGIAEGEIVKWFVKPGDTINEDDTLLEVQNDKSVEEIPSPVTGTVKNIVVPEGTVANVGDVLIEIDAPGHEDNDAAPAAPAQEQTPAQPAAVPTTEAAGGFFQFKLPDIGEGIAEGEIVKWFVKAGDTINEDDSLLEVQNDKSVEEIPSPVTGTVKNIVVPEGTVANVGDVLVEIDAPGHNSAAPSVAAPATDAPKAEASAPAASTGVVAAADPNKRVLAMPSVRQYAREKDVDITQVTATGKGGRVIKADIDAFVSGGSQAAPATEAAATEAAPKAEAAAPKAAPKAFTSDLGEMETREKMTPTRKAIAKAMVNSKHTAPHVTLHDEVEVSKLWDHRKKFKDVAAANGTKLTFLPYVVKALTSTVQKFPILNASIDDAAQEIVYKNYFNIGIATDTDHGLYVPNVKNANTKSMFAIADEINEKAALAIEGKLTAQDMRDGTITISNIGSVGGGWFTPVINYPEVAILGVGTIAQEPVVNADGEIVVGRMMKLSLSFDHRIVDGATAQKAMNNIKRLLADPELLLMEG

SEQ ID NO: 13181 - protein, 468 aa, Enterococcus faecalis V583
MVVGDFAIELDTVVIGAGPGGYVAAIRAAEMGQKVAIIEREYIGGVCLNVGCIPSKALIAAGHHYQEAQDSSTFGVTAKGVELDFAKTQDWKDNTVVKSLTGGVGMLLKKHKVEIIEGEAFFVDENTLRVIHPDSAQTYSFNNAIVATGSRPIEIPGFKFGGRVLDSTGGLNLKEVPKKFVIIGGGVIGAELGGAYANLGSEVTILEGSPSILPTYEKDMVKVVTDHFKKKNVTIVTSAMAKEAVDNGDSVTVKYEVNGKEESVEADYVMVTVGRRPNTDDLGLEQAGVEIGERGLIPVDNQGRTNVKNIFAIGDIVPGAALAHKASYEAKIAAEAISGKKVAVDYKAMPAVAFTDPELASVGMTVAEAKEAGIEAKGYKFPFAGNGRAISLDKTEGFMRLVTTVEDNVIIGAQIAGVGASDMISELALAIESGMNAEDIALTIHPHPSLGEITMDTAELALGLPIHI

SEQ ID NO: 13182 - protein, 412 aa, Medicago sativa subsp. X varia
MTELDPSKKVADRYLKREVLGEGTYGVVYKAIDTQTGQTVAIKKIRIGKQKEGVNFTALREIKLLKELKDPNIIELIDCFPHKGNLHLVFEFMETDLEAVIRDRNIFLAPGDIKSYLQMTLKGLAHCHKKWILHRDMKPNNLLIGPNGQLKLADFGLARIFGSPDRRFTHQVFARWYRAPELLFGTKQYGPGVDVWAAACIFAELLLRRPFLQGSSDIDQLGKIFAAFGTPSPSQWPDMVYLPDYVEYQFVPAPPLRSLFPMATDDALDLLSKMFTYDPKDRISVQQALEHRYFTCPPQPTDPVKLPRPAPKKEIKPSDLNPPEGPTVLSPPRKTRRVMPGRDGLEGNSLQGDRVDDNHGNLKQTGGDNTGKNEPAPMSLDFSVFGLKPPNRPTINSADRSHLKRKLDLEFQ

SEQ ID NO: 13183 - protein, 115 aa, Glycine max
  unsure (1)..(115): unsure at all Xaa locations
MKPMKKQAGAGMDAPFTGLKSMAGFPTRKTINDFSFIAXFGGRVLCMQVWPPVDKKKFVTLSYLPDLDDAQLAKEAEYLLRKGWIPCLEFQLEHGFLYREHIGSPXYYYGRYWSL

SEQ ID NO: 13184 - protein, 302 aa, Escherichia coli
MTNLKAVIPVAGLGMHMLPATKAIPKEMLPIPVDKPMIQYIVDEIVAAGIKEILLVTHASKNAVENHFDTSYELESLLEQRVKRQLLAEVQSICPPGVTIMNVRQGEPLGLGHSILCARPAIGDNPFVVVLPDVVIDDASADPLRYNLAAMIARFNETGRSQVLAKRMPGDLSEYSVIQTKEPLDREGKVSRIVEFIEKPDQPQTLDSDIMAVGRYVLSADIWPELERTQPGAWGRIQLTDAIAELAKKQSVDAMLMTGDSYDCGKKMGYMQAFVKYGLRNLKEGAKFLKGIEKLLSEVTNS

SEQ ID NO: 13185 - protein, 192 aa, Metasequoia glyptostroboides
DDHGEVISEIRRSDLEPYLGLHYPATDLPQASRFLFMKNKVRMICDCYATPVKVVEDSRLPRELILCGSALRAPHGCHAEYMSNMGSIASLVIAVTINAKEEDGDTDGQQHQQKGRRLWGLVVCHHTSPRFVPFPMRYACEFLMQVFAIQLNKEVELADQLREKHILRTQTLLCDMLLRDAPMGIIGQKPNI

SEQ ID NO: 13186 - protein, 181 aa, Metasequoia glyptostroboides
DDHGEVVAEMRRPDLEPYLGLHYPATDIPQASRFLFLKNRVRMICDCRAPAVKVRHDKRVAQALSLSGSTLRAPYGCHAQYMANMGSIASLVMAVTVSNNEEGGRRLWGLVVCHHTVPRFVPYPLRYACEFLMQVFGVQLNKEVELAARLRERHILRTQTVLCDMLLRDAPVGIVTKTPNI

SEQ ID NO: 13187 - protein, 192 aa, Stangeria eriopus
DDHGEVVAEIRRSDLEPYLGLHHPATDIPQAARFLFMKNRVRMICDCCAAPVRVIQDKNLARDLTLCGSTLRAPHGCHSHYMSNMGSIASLVMAVIINEREDEEGDNLGQQQVKGRRLWGLVVCHHASPRFVPFPLRYACEFLMQVFGIQLNKEVELAAQLREKHILRTQTLLCDMLLRDAPIGIVIRSPSI

SEQ ID NO: 13188 - protein, 304 aa, Coxiella burnetii RSA 493
MKGIILAGGTGSRLYPLTAVINKHLLPIYDKPMIYYPLSVFMLAGIRDILIISTPQSVPLMQDLLKDGSQWGINLSYAIQDQPRGLADAFNVGRFFIGNDNVSLILGDNIFYMSQLVNKLREVVQHKHGATIFGYYVNNPSEYGVVEFNKEGHAISLDEKPKCPKSNYAVTGLYFYDNQVVDIVKHIKPSSRGELEITDVNRVYLDRKQLSVVVLGRGAAWLDTGTHHSLTEAGQFVKIIEERQGLKLACLEEIAYLKGFITADQLQRLAEAMPKSSYSDYLMNCVQKLQYSLYRPVEEMVWQV

SEQ ID NO: 13189 - protein, 509 aa, Oryza sativa
MELVCYLDADDVLNYNTPEDAILMSSASGEKYDYIINFAINIGWSLMRPTLTSHGRVVEITPNPGNYIQGGPTMTQSSKSLARAPGYIVTVLTMFANKKITCMSMRNEEMRFTMELAGEGKLKMVANSWHPFEEAAEPWEKSTGGHATRKPEHFLSDSYRINETMTTGEIQELLGIMAAGGGIPATMRAVQYTGYGGGAVSLQHVEIPVPSVKKHEVLIKVEAASVNPIDWSIQKGMLRPFLPKFPFIPVTDVAGEIVEAGSAVHELKVGDKVLSKLNFWKGGGLAEYVAAPESLTVVRPAGVSAVDAAGLPVAGLTALKALMSIGTKFDGTGGTGANVLITAASGGVGTYAVQLAKLGNHRVTATCGARNMDLVRSLGADEVLDYNTPQGAALTSSASDEKYDYIINTAMNVNWSAMKPTLSSRGRVVDITPNPGNYVAAMLTMFARKKITMMALMSLGKEEMRFLMELVGEGKLRTVVDSRCPFEKAAEAWEKSMGGHATGKVIVEM

SEQ ID NO: 13190 - protein, 189 aa, Stangeria eriopus
DDHGEVLAEIRRSDLEPYLGLHYPATDIPQASRFLFMRNRVRMIYDCSSPPVKVIQDKRLPKPLSLCGSTLRAPHGWHAQYMANMGSIASLVMAVTINDSDDDIGSSGQQKGRRLWGLVVCHHTSPRFVPFPLRYACQFLMQVFGIQLNREVELAAQLREKHILRTQTMLCDMLLRDAPVGIVAQTPNI

SEQ ID NO: 13191 - protein, 1136 aa, Picea abies
MSTTRPRAATHSASSGSVSRSSKHSARVITQTPVDAKLQAEFEGSVHSFDYTKSIDISGDSSSVPSETVKAYLQRLQKEMLIQPFGCVLAVEEGSCAVVGYSENAPEMLDVVGGAHAVPSIGGQQQEGGGGGGGLLRIGMDARTLFKPASAAALQKAATFADMHLVNPIFVRCNRSGKPFYAILNRIDAGLVIDFEPVMPSDVPVSAAGALQSYKLAAKAISRLQSLPGGDIRLLCDTVVQEVRELTGYDRVMAYRFHEDEHGEVVAEMRRPDLEPYLGLHYPATDIPQASRFLFMKNRVRMICDCCAPPVNVIQDKRLRQPLSLCGSTLRAPHGCHAQYMANMGSIASLVMSVTTNENGDDSEGGGQQQPQNRRKLWGLVVCHHTSPRVIPFPLRYACEFLMQVFGIQLNKEVELAAQLREKHILRVQPVLCDMLLRDAPVGIVSQTPNIMDLVKCDGAALLYGKRLWLLGTTPTEAQILDIADWLLEHHRDSTGLSTDSLAEAGYPGAASLGDAVCGIAAARITSKDFLFWFRSHTAKEIIWGGAKHDPNDKDDGRRMHPRSSFKAFLEVVKRRSLPWEDVEMDAIHSLQLILRDSFHDIDDSDSKTMIHARLNDLRLQGIDELSAVTNEMVRLIETATVPILAIDSNGLVNGWNTKAAELTGLLADEVIGRPLIDLVQHDSVEIVKKMLYLALQGEEEQNVEIKLKTFGIQEEKGPVVLIVNACSSRDLEENVVGVCFVAQDVTWQRIAMDKFTHLQGDYRAIVQNPNPLIPPIFGADEYGYCSEWNPAMEKLTGWKREEVIGKMLVGEVFGIHRMSCQLKGQDGLTKLRIVLNNAMAGKETEKFPFSFFDRHGKNTEALLSANKRTDAEGIITGVFCFLHVTSTELQQALQVQRMAEQAAMDRLKELAYIRQEIRNPLYGIIFTRKLMESTDLSEEQKQIVQTSALCQRQLVKVLDDADLESIEDGYLELDTIEFTLGTVLDAVVSQGMILSREKGLQLIRDSPEEIKTMCLYGDQLRLQQILSNFLINALRFSTSEGWVGNKVVPTKRHLGSGVNVMHMEFRITHSGQGIPEELIKEMFVHNQDMFQEGLGLYMCQQLVKIMNGDVQYLREAGRSSFIINVEFPLAQTDKQ

SEQ ID NO: 13192 - protein, 251 aa, Escherichia coli
MVDKSQETTHFGFQTVAKEQKADMVAHVFHSVASKYDVMNDLMSFGIHRLWKRFTIDCSGVRRGQTVLDLAGGTGDLTAKFSRLVGETGKVVLADINESMPKMGREKLRNIGVIGNVEYVQANAEALPFPDNTFDCITISFGLRNVTDKDKALRSMYRVLKPGGRLLVLEFSKPIIEPLSKAYDAYSFHVLPRIGSLVANDADSYRYLAESIRMHPDQDTLKAMMQDAGFESVDYYNLTAGVVALHRGYKF

SEQ ID NO: 13193 - protein, 377 aa, Bacillus cereus ATCC 10987
MKAVTYQGPNQVQVKQVDDAKLEKKDDIIVKITSTAICGSDLHLYQGNMPLPQGYIIGHEPMGIVEEVGPDVTKVKKGDRVVIPFNVACGHCFYCQHEMESQCDNSNPHYDSGGYFGYTEKFGNHPGGQAEYLKVPFGNFTPFVIPESCELEDESLLFLSDVLPTAYWSVINAGVKRGDTVIVLGCGPVGLMTQKFAWMQGAKRVIAVDYLDYRINYAKKINNVEVFEFTKFPDMGEHLKEITHGGADVVIDCVGMDGKKSPLEFLEQKLKLQGGTLGPIQIATKAVRKYGTVQMTGVYGGNYNAFPLGAFWVRNINLKMGQAPVIHFMPELFEKITNKEFDPKEIITHKIPLEEASYGYQIFNNREDDCIKVILKP

SEQ ID NO: 13194 - protein, 164 aa, Ustilago maydis 521
MSNPNLAEVMGDGPASIADKLTLLPGYEPDFSAVTFCLKEEDHTLGNSLRYIIMKDPRVEFCGYSNPHPSENKIHLRIQMYDNASALDALRDAIENLDQLFAAIGEAYDRSLSAGNYETYVEPKLDHERLAQMAEQGKKRRAEEKAREAEARKQAAQAAAGRPM

SEQ ID NO: 13195 - protein, 205 aa, Eucalyptus globulus subsp. globulus
MVRGKTQMKRIENDTSRQVTFSKRRNGLLKKAFELSVLCDAEVALIIFSPRGKLYEFSSSSLCKTIEKYQTRAKDMEAKTAEISMQPSKGNTLDMEKKIEHFEISRRRLLGEGLDSCSVEELQQTENQLERSLTKIRARKNHLIREHIERLKAEERKLLEEKRKLLQEIECGKGLTPVSSERPREEIRAESMDVETELFIGPPKR

SEQ ID NO: 13196 - protein, 830 aa, Streptomyces coelicolor A3(2)
MEDATDRIARPWGARVPYGRHETWPARVDTFLAEGVEPEAVQRWVQSASILHSDGDAMDIAVADGRMVGVRGRDVDRVNRGRLGPKDLFGWQANASRDRLTRPLVRRDGQLVETDWDTAMDLVAARSRELLDSRGPGSIGFYTSGQLFLEEYYTLAVLARAGIGTNHLDGNTRLCTSTAAEALKESFGCDGQPGSYDDFDHADVIALFGHNIAETQPVQWMRLLDRLEGADPPRLLCVDPRPTRVAEHAAVHLAPRSGTNVALLNALLHETIRHERIDRDFIDAHTVGFGELAARVADCTPKWAAEICDVPAARIEEAAELVGTAEALVSTVLQGVYQSHQATAAAVQVNNLHLIRGMLGRPGAGLLQMNGQPTAQNTRECGANGDLPGFRNWQNDAHVADLARVWNVEPETIPHFAPPTHAMQIFRYAEQGSLRMLWISGTNPAVSMPELPRIRSILSQERLFTVVQDLYLTETARLADVVLPAATWGEKTGALTNADRTVHLSRKAVEPPGEARPDLDIFLDYARRMDFRDKDGGPLIPWDGPESAFEAWKRCSAGRPCDYTGLSYAKLRDTSGIQWPCDDRAPEGTARLYTDGFGWAHPDVCESYGKDLETGASQEVVEYRSLNPDGRAMLKAAAYLPPHEEPDEEYPFQLTTGRTLYHFHTRTKTGRAPQLNDAAPDVWVEVSAGDAERLGLGEGDLVEVTSRRGSLRGRLRVTGIRTGLLFVPFHYGYWDTAGGSGPGPDTPGRAANETTVTDWDPASKQPLFKTAAAALTLVERGGGRPSPAPTTTASAPVTAGAAPPTSGGPAARTTEREPTEFPHGREEGAR

SEQ ID NO: 13197 - protein, 426 aa, Magnaporthe grisea 70-15
MTASNLHEQAPAVAAVAHQQQQQQQQSSRGFATRAVHAGSSPDPTTGAVIPAISLSTTFRQSAPSQPVGLYEYSRSANPNRDNFEEAVASLENARHGFAFSSGSATTAVVLQSLASGSHVISVSDVYGGTHRYFTQVAQAHNIEVTFSHDIVADVGSQIRPDTKLIWIESPSNPTLSLVDIRAVADAAHARGVLVVVDNTFLSPYIQNPLNLGADIVVHSVTKYINGHSDVVMGVAACNDDALASRLRFLQNAIGAVPSAFDSWLAHRGLKTLHLRAREASRNAAAVAAFLETSPYVISVNYPGLESHPQRDIARRQHRDGMGGGMLSFRVKGGLVAADSFCSTTRVFTLAESLGGVESLVELPSVMTHAGIPRQSREAVGIYDDLIRISCGIEEAEDLVADVRQALEAAALASKLHSSSGNGNGH

SEQ ID NO: 13198 - protein, 358 aa, Laminaria digitata
ASIPTVEYLLSKGARVALSSHLGRPKDDGDKFSLGPVAERLTELIGKECKMAPDCIGDEVAAIANGLGDGEVMLLENVRFYPAETKNDPAFAKKLAAPFDLFVNDAFGTAHRAHGSTEGVTKFLSPSVAGFLLQKELDYLEGAVKVPASPFAAIVGGSKVSSKIGVIESLLAKCDKLIIGGGMVFTFLKARGQGVGSSLVEEDKLELAKELEVKAAAAGVQIILPSDLIVADAFAADAKTQVVRADAIPDGWMGLDNGPEATKEIQAALKECKTVVWNGPMGVFEYEAFARGTFAIAETLAEITSEGCTTIVGGGDSVAAVEKAGLAPKMSHISTGGGASLELLEGKVLPGVAALNDA

SEQ ID NO: 13199 - protein, 175 aa, Zea mays
  unsure (1)..(175): unsure at all Xaa locations
MAPTVMMASSATAVAPFQGLKSAASLPVARRSTRSLGNVSNGGRIRCMQVWPAYGNKKFETLSYLPPLSTDDXLLKQVDYLLRNGWXIPCLEFSKXGFVYRENSXTSPCYYDGRYWTMWKLPMFGCTDAXTQVYKELQEXAIAAYPDAFHRVIGFDNVRQTQCVSFIAYKPPGSE

SEQ ID NO: 13200 - protein, 547 aa, Acinetobacter junii
MTQNSYKIPIQGMTCTGCEEHVTEALEQAGAKDVSADFRRGEAIFELSDDQIEKAKQNISAAGYQPGEEESQPSENSVDFNRDGDYDLLIIGSGGAAFSAAIKANENGAKVAMVERGTVGGTCVNIGCVPSKTMLRAGEINGLAQNNPFTGLQTSTGAADLAQLTEQKDGLVSQMRQEKYIDLIEEYGFDLIRGEASFIDDKTIQVNGQNITSKSFLIATGASPAVPEIPGMNEVDYLTSTSALELKEVPQRLAVIGSGYIAAELGQMFHNLGTEVTLMQRSERLFKTYDPEISEAIDESLTEQGLNLITGVTYQKVEQNGKSTSIYIEVNGQEQVIEADQVLVATGRKPNTETLNLESAGVKTGKKGDVLTNEYLQTSNNRIYAAGDVTLGPQFVYVAAYEGGIVANNALGLAKRKIDLRFVPGVTFTNPSIATVGLTEQQAKEKGYDVKTSVLPLDAVPRALVNHETTGVYKLVVNAQTQKLIGAHIVSENAGDVIYAATLAVQFGLTIEDLTDSFVPYLTMAEGLKLAALTFDKDVSKLSCCAG

SEQ ID NO: 13201 - protein, 383 aa, Enterococcus faecalis V583
MTIGIDKISFFVPPYYIDMTALAEARNVDPGKFHIGIGQDQMAVNPISQDIVTFAANAAEAILTKEDKEAIDMVIVGTESSIDESKAAAVVLHRLMGIQPFARSFEIKEACYGATAGLQLAKNHVALHPDKKVLVVAADIAKYGLNSGGEPTQGAGAVAMLVASEPRILALKEDNVMLTQDIYDFWRPTGHPYPMVDGPLSNETYIQSFAQVWDEHKKRTGLDFADYDALAFHIPYTKMGKKALLAKISDQTEAEQERILARYEESIVYSRRVGNLYTGSLYLGLISLLENATTLTAGNQIGLFSYGSGAVAEFFTGELVAGYQNHLQKETHLALLDNRTELSIAEYEAMFAETLDTDIDQTLEDELKYSISAINNTVRSYRN

SEQ ID NO: 13202 - protein, 257 aa, Mesorhizobium sp. BNC1
MEVLSGKVALVTGAARGLGEAIAVELAAQGARVALLDVLDELGAEVAENIKKSSGNAYYRNCDIRDTEEVRSAVDEVYSTYGKLDVLVNNAAVSTAPTSIPELSEETWNNIFNVNVSSIYRFCRFVLPRMQEAGGGAVINMSSVHQSHSLTGWTAYAATKGAIISMSRQLAAEWGRFNIRVNTVSPGAIDATMTRQILDRDPTGRQEAAFRHMHALERLGRSEEVGKTVAFLASDGAGFITGEDILVDGGLTKLCRL

SEQ ID NO: 13203 - protein, 589 aa, Zea mays
  unsure (1)..(589): unsure at all Xaa locations
MCGILAVLGCSDWSQAKRARILACSRRLKHRGPDWSGLYQHEGNFLAQQRLAVVSPLSGDQPLFNEDRTVVVVANGEIYNHKNVRKQFTGTHNFSTGSDCEVIMPLYEKYGENFVDMLDGVFAFVLYDTRDRTYVAARDAIGVNPLYIGWGSDGSVWIASEMKALNEDCVRFEIFPPGHLYSSAGGGFRRWYTPHWFQEQVPRTPYQPLVLREAFEKAVIKRLMTDVPFGVLLSGGLDSSLVASVTKRHLVETEAAEKFGTELHSFVVGLEGSPDLKAAREVADYLGTIHHEFHFTVQDGIDAIEEVIYHDETYDVTTIRASTPMFLMARKIKSLGVKMVLSGEGSDELLGGYLYFHFAPNKEEFHRETCRKVKALHQYDCLRANKATSAWGLEVRVPFLDKEFINVAMGMDPEWKMYDKNLGRIEKWVMRKAFDDDEHPYLPKHILYRQKEQFSDGVGYNWIDGLKSFTEQQVTDEMMNNAAQMFPYNTPVNKEAYYYRMIFERLFPQDSARETVPWGPSIACSTPAAIEWVEQWKASNDPSGRFISSHDSAATDHTXAVSRRWPTAAATXAANGTVNGKDVAVAIAV

SEQ ID NO: 13204 - protein, 363 aa, Arabidopsis thaliana
MPASKKISDRNHLGQVFDKLLNQIGESEEFELPEWLNKGKPTPYIFIRRNIYLTKKVKRRVEDDGIFCSCSSSSPGSSSTVCGSNCHCGMLFSSCSSSCKCGSECNNKPFQQRHVKKMKLIQTEKCGSGIVAEEEIEAGEFIIEYVGEVIDDKTCEERLWKMKHRGETNFYLCEITRDMVIDATHKGNKSRYINHSCNPNTQMQKWIIDGETRIGIFATRGIKKGEHLTYDYQFVQFGADQDCHCGAVGCRRKLGVKPSKPKIASDEAFNLVAHELAQTLPKVHQNGLVNRHIDAGKSWNNLSQRDTCSRNCIGVVIRLSRPTSDRCFGLVRHFDEYSRKHSVMFEDGVTEFVDMSREDWEIV

SEQ ID NO: 13205 - protein, 554 aa, Azotobacter vinelandii
MPHYQQPLDVTTLSSWEALRQHREVMQSFRMREAFQNDPQRFDEFSLSSSGLFLDYSKNLLTQETRSLLMRLAREAGLERAIHALFEGEAVNASEGRPALHTALRRPIGDRLVVDGENLIPQVHRVLNQMTELVGRIHDGLWRGYSEKPITDVVNIGIGGSFLGPQLVSEALLPFAQHGVRCHYLANIDGSEFHELSCRLRAETTLFIVSSKSFGTLETLKNAQAARTWYLAQGGTESELHRHFIAVSSNIAAAVAFGIRQENIFPMWDWVGGRYSLWSAIGLPTALAIGMANFKDLLSGAYAMDQHFLSAPFESNMPVLLAMLGVWYGNFWGAQSHAILPYDHYLRNITQHLQQLDMESNGKSVRQNGSPVSCETGPVIWGGVGCNGQHAYHQLLHQGTLLIPADFIVPVVSHNPVADHHQWLYANCLSQSQALMLGKTREEAEAELRARGMSEEQVQRLAPHKVIPGNRPSNTLVMERVSPHRLGALVALYEHKVFAQSIIWGINAFDQWGVELGKELGKNVYQRLTGHDESPAEDASTQGLIGYFRGRHRG

SEQ ID NO: 13206 - protein, 160 aa, Bradyrhizobium japonicum
MRRMMAAFVALALLASPAVHAVQPDEIMSDPAKETRARDLSRELRCMVCQNQSIDDSDAPLARDLRLLVRERIAGGDSNSQVLDFLVARYGEFVLLKPRFERQTLLLWLLGPLLLTGGGLALWLQIRRRSRSGADLPAPPLTPDEEARLAALMSDEAKSS

SEQ ID NO: 13207 - protein, 395 aa, Shewanella oneidensis MR-1
MSIEIKVPVLPESVADATIATWHVKVGQQVSRDQNLVDIETDKVVLEVVAPEDGHIGEFLFHEGDTVLGEQVIAKFIAGAVSGQEVTKAQAEAAAPAVASDESNDALSPSVRRLLAEHNVDASKVKGTGVGGRITKEDVEAFIKSAPKAAASAAPVVQPLAAGRSEKRVPMTRLRKTIANRLLEAKNSTAMLTTFNEVNMKPIMDIRKQYQDIFEKRHGIRLGFMSFYVKAVTEALKRFPEVNASIDGDDIVYHNYFDVSIAVSTPRGLVTPVLRDTDTMSLADIEKAVRDLAIKGRDGKLTVADMTGGNFTVTNGGVFGSLMSTPILNLPQSAILGMHAIKDRPMAVNGQVEILPMMYLALSYDHRIIDGRESVGFLVAIKDFLEDPTRLLLDL

SEQ ID NO: 13208 - protein, 202 aa, Candida albicans SC5314
MSTITFVTGNANKLKEVIAILASSETDSSSSSSSLSSSNKVGKFTITNQSVDLDEVQGTIEQVTIHKAQAAAKVIDGPVLVEDTCLGFNAFNDLPGPYIKWFVQSIGLTGLVKMLIGFEDKSAKAICTFGYCEGPDKEVKIFQGITEGKIVDSRGPTNFGWDSIFQPNGFEQTYAEMDKKVKNSISHRYKALDKVRDYLLSQ

SEQ ID NO: 13209 - protein, 500 aa, Zea mays
MASGPPSPSGKPYSRKSHASSKAPSVPSFDAHNGQLLPTVTFSLPSTTTARRELRRRLSSELSQVRAAVKRLNSLPAPAPSSALSATDPSTPHPPYPPASKHKSKKGGGVPQPHLSAEARRKLYAPVFKTCAALLSRLMKHKHSWVFNKPVDASALGLHDYHTIITKPMDLGTVKSKLGAGQYKSPREFAGDVRLTFQNAMTYNPKGQDVHFMAEQLLNMFEEKWPEIEAEIAQLSPQPPTPSSAAPKKPKPKEIDNSRPLERSDSTVHAAGIEATPKTHTGRPQVLKKPKAREPNKRDMTFWEKQRLSNNLQDLPPEKLDNVVQIIKKRNLSLIPHDDEIEVDIDSFDVETLWELDRFVTNYRKSITKNKRKAELSAVRPDEADPDQEPEKVEHVRQGKADQDQIPAVQEPIPEPETVDVDPPKESAADDNERCRMLVDQVVLEALAVTRVHPLVIRTQIVHQQMVLMLGNHPERSIYKPDVDGGTGNHNTLVQERILA

SEQ ID NO: 13210 - protein, 312 aa, Saccharomyces cerevisiae
MPATLKNSSATLKLNTGASIPVLGFGTWRSVDNNGYHSVIAALKAGYRHIDAAAIYLNEEEVGRAIKDSGVPREEIFITTKLWGTEQRDPEAALNKSLKRLGLDYVDLYLMHWPVPLKTDRVTDGNVLCIPTLEDGTVDIDTKEWNFIKTWELMQELPKTGKTKAVGVSNFSINNIKELLESPNNKVVPATNQIEIHPLLPQDELIAFCKEKGIVVEAYSPFGSANAPLLKEQAIIDMAKKHGVEPAQLIISWSIQRGYVVLAKSVNPERIVSNFKIFTLPEDDFKTISNLSKVHGTKRVVDMKWGSFPIFQ

SEQ ID NO: 13211 - protein, 552 aa, SYNECHOCOCCUS SP. WH 8102
MTTSAPAEPTLRLVRLDAPFTDQKPGTSGLRKSSQQFEQANYLESFVEAVFRTLPGVQGGTLVLGGDGRYGNRRAIDVILRMGAAHGLSKVIVTTGGILSTPAASNLIRQRQAIGGIILSASHNPGGPNGDFGVKVNGANGGPTPASFTDAVFECTKTLEQYTIVDAAAIAIDTPGSYSIGAMQVEVIDGVDDFVALMQQLFDFDRIRELIRSDFPLAFDAMHAVTGPYATRLLEEILGAPAGSVRNGVPLEDFGGGHPDPNLTYAHELAELLLDGEEFRFGAACDGDGDRNMILGQHCFVNPSDSLAVLTANATVAPAYADGLAGVARSMPTSSAVDVVAKELGIDCYETPTGWKFFGNLLDAGKITLCGEESFGTGSNHVREKDGLWAVLFWLQILAERRCSVAEIMAEHWKRFGRHYYSRHDYEAVASDAAHGLFHRLEGMLPGLVGQSFAGRSVSAADNFSYTDPVDGSVTKGQGLRILLEDGSRVMVRLSGTGTKGATIRVYLESYVPSSGDLNQDPQVALADMISAINELAEIKQRTGMDRPTVIT

SEQ ID NO: 13212 - protein, 397 aa, Shewanella frigidimarina
MSVVQSSCAYCGVGCGVSVSSNKPNWTDVDAADLILVGDNKHPANYGHLCAKGERLLDSLAQPNVLRYPKLRSGMPLDWDKASTLIADTFAKTIAEHGPDSVALYLSGQLLTEDYYVANKFAKGFLKTANVDTNSRLCMSSAVSAMQRAFGEDVVPGCYDDLEQADVIVLVGANTAWTHPVLFQRILAAIKANNAQLVVIDPLSTATAKQADLHLAIKPGADLTLFHGLLGYLADQNRVDHAYIAAHTEGFDTVVLQAQQLSANLADLATQVGVSVTQLTQFYQLVANNKKVLTASCQGVNQSTIGTDATNAMINCHLALGHIGQAGCGFFSLTGQPNAMGGREVGGLATQLACHMGFSQPEQQLLADFWKVDSIADQKGLVAVEMFDALAEGKIKA

SEQ ID NO: 13213 - protein, 339 aa, Fragaria x ananassa
RNLCPLNFTFAIHRLTMAAAPSESIPSVNKAWVYSEYGKTSDVLKFDPSVAVPEIKEDQVLIKVVAASLNPVDFKRALGYFKDTDSPLPTIPGYDVAGVVVKVGSQVTKFKVGDEVYGDLNETALVNPTRFGSLAEYTAAYERVLAHKPKNLSFIEAASLPLAIETAHEGLERAELSAGKSVLVLGGAGGVGTHIIQLAKHVFGASKVAATASTKKLDLLRTLGAADLAIDYTKENFEDLPEKFDVVYDAVGETDKAVKAVKEGGKVVTIVGPATPPAILFVLTSKGSVLEKLKPYLESGKVKPVLDPTSPYPFTKVVEAFGYLESSRATGKVVVYPIP

SEQ ID NO: 13214 - protein, 414 aa, Bordetella parapertussis 12822
MHQNGFTTTIVHSDRDQSAEHGAVHKPMHPSSEYVYEDARELAAVFQGKAGFTYARQGTPTTTALEARITRMEAGKSTVSFATGMAALAAIFTTLLRRGDHLVSSQYVFGNTNSLLNTLMELGVEVTMVDATDVRQVRDALRPNTRMVFTETIANPGTQIADLAGMGALCRERGLVYVVDNTLTSPWMFRPVEVGASLVMNSLSKYIAGHGHALGGAVTDTGLYDWSGYANIYESYRKGAPTGWGLTQIKKKGLRDMGGTLAAEPAHRIAIGTETLALRMARHCSNALALATFLQGHPGVARVHYPGLSSHAQHQRASELFDGRYGGLLGVELAEGIDCFDFLNRLRIVLMATHLGDTRSLALPAAHTIYYEMGAEKRAQMGIADSLIRVSVGIEDEADLLFDFDQALRGCLQS

SEQ ID NO: 13215 - protein, 474 aa, Glycine max
  unsure (1)..(474): unsure at all Xaa locations
MSVQDYLDKHMLSRKLEDAVNAAVRAKTSDPVLFISNHMRKAVQSVITKIKARQILDSRGIPTVEXVDLHTNKGVFRASVPSGNSTSMYEAVELRDGVTXQRSGNGVAKAVKNINDKISEALIGMDPTLQSQIDQAMIDLDKTEKKGELGANAILAVSIAACKAGAAEKEVPLYKHIADLSGKTSPTLPVPAFTVISGGKHAGSNLAIQEIMILPIGASKFEEALRMGTETYHHLKAVITEKYGAHNCNVGEDGGFAPNISSFREALDLVKEAISRAGYDEKIKIALDVAATDFCIGKRYDLDFQSPQKSGQNFKSAEDMIDLYKELCSEYPIVSIEDPFDKEDWEHIKHISSLGICQVVGDDLLMSNAKRIERAITESACNALLLKVNQVGTITEVIEVVKLAKEAHWGVVTSHRCGETIDSFIADLSVGLASGVIKAGAPCRGERLEKYNQLLRIEEELGDQAVYAGEDWRQ

SEQ ID NO: 13216 - protein, 208 aa, Thermus thermophilus HB27
MLWRKRLFAHLYPGLSARHEALVAERKRALFREALRRARPERVLEIGPGPGTNLAHLPEGVAYLALEPNPFFHPRLREEARKRGLALTLLPGRAEAIPLPGGSVDLVVATLVLCSVADPEKAIEEVHRVLRPGGAYLFLEHVAAPKGAPLRLLQEAATPFFVFFGDGCHPNRKTLAQIQARFPRVEAEAFSLPLPVVAPHVAGLAFKE

SEQ ID NO: 13217 - protein, 506 aa, Oryza sativa
  unsure (1)..(506): unsure at all Xaa locations
MAAPSAIPRRGLFIGGGWREPSLGRRLPVVNPATEATIGDIPAATAEDVELAVSAARDAFGRDGGRHWSRAPGAVRAKYLKAIAAKIKDKKSYLALLETLDSGKPLDEAAGDMEDVAACFEYYADLAEALDGKQRAPISLPMENFESYVLKEPIGXVVGLITPWNYPLLMATWKVAPALAAGCTAVLKPSELASLTCLELGGICAEIGLPPGVLNIITGLGTEAGAPLASHPHVDKIAFTGSTETGKRIMITASQMVKPVSLELGGKSPLIVFDDVDIDKAVEWAMFGCFANAGQVCSATSRLLLHEKIAKRFLDRLVAWAKSIKISDPLEEGCRLGSVVSEGQYQKIMKFISTARCEGATILYGGARPQHLKRGFFIEPTIITNVSTSMQIWREEVFGPVICVKEFRTEREAVELANDTHYGLAGAVISNDLERCERISKAIQSGIVWINCSQPCFVQAPWGGNKRSGFGRELGQWGLDNYLSVKQVTKYCSDEPYGWYRPPSKL

SEQ ID NO: 13218 - protein, 333 aa, Yarrowia lipolytica
MLNLPSLSTCIKFMQDFFISNIFKKFVLQRIGHHSTLQDTMGTVKRDIRIANKEKRKKVFAEMKHKLNKERHEMRRERAKEEAKNPELKEKRLAENVPDTIEAKRVYDETIAQEMEGEDEFKEYFEEGKPPKVLITTSKRARGQAYDFADLLYDIIPGSEFKKRVGDFTMTQIAKMCAERDYTDLVVINEDKKKVNGLTFIHLPEGPTMYFSVSSLKMPKEIKGHGRSTTHIPELILNNFSTRLGKTVGRLFQSMFPQQPEFVGRQVVTLHNQRDWIFFRRHRYVFKNEERVGLQELGPQFTLRLRRLQRGIRGEVEWEHRSAMDKDKKKFHL

SEQ ID NO: 13219 - protein, 73 aa, Triticum aestivum
  unsure (1)..(73): unsure at all Xaa locations
MGGGMEVHKNRWIEEWNAGRENLEFNFRWXTRRSLAVVRLFRLAVPILXVYKGIXRESNMQDEDASPAYRXSL

SEQ ID NO: 13220 - protein, 314 aa, Picea abies
YLGLHYPATDIPQASRFLFMKNRVRMICDCCAPPVNVIQDKRLRQPLSLCGSTLRAPHGCHAQYMANMGSIASLVMSVTTNENGDDSEGGGQQQPQNRRKLWGLVVCHHTSPRVIPFPLRYACEFLMQVFGIQLNKEVELAAQLREKHILRVQPVLCDMLLRDAPVGIVSQTPNIMDLVKCDGAALLYGKRLWLLGTTPTEAQKLDIADWLLEHHRDSTGLSTDSLAEAGYPGAASPGDAVCGIAAARITSKDFLFWFRSHTAKEIIWGGAKHDPNDKDDGRRMHPRSSFKAFLEVVKRRSLPWEDVEMDAIHS

SEQ ID NO: 13221 - protein, 253 aa, Shewanella oneidensis MR-1
MSVLLPLIGVIACNQRLGSHPFNIVGEKYLLGVVNGAKGWPLVIPSLGADQPIEAILARLDGILFTGSPSNVEPHLYAGVPSEAGTHHDPKRDATTLPLIRAAIAAGVPVLGICRGFQEMNVAFGGSLHQKLHEVGHFIEHREDKEASLEVQYGPSHSITVEPGGVIYEAWGRNSAEVNSVHTQGVERLGIGLRPEACAPDGLVEAFSVIDATEFALGVQWHPEWKVSDNPFYLSIFNAFGDACRRRATTRVK

SEQ ID NO: 13222 - protein, 549 aa, Escherichia coli O6
MKNINPTQTAAWQALQKHFDEMKDVTIADLFAKDGDRFSKFSATFDDQMLVDYSKNRITEETLAKLQDLAKECDLAGAIKSMFSGEKINRTENRAVLHVALRNRSNTPILVDGKDVMPEVNAVLEKMKTFSEAIISGEWKGYTGKAITDVVNIGIGGSDLGPYMVTEALRPYKNHLNMHFVSNVDGTHIAEVLKKVNPETTLFLVASKTFTTQETMTNAHSARDWFLKAAGDEKHVAKHFAALSTNAKAVGEFGIDTANMFEFWDWVGGRYSLWSAIGLSIVLSIGFDNFVELLSGAHAMDKHFSTTPAEKNLPVLLALIGIWYNNFFGAETEAILPYDQYMHRFAAYFQQGNMESNGKYVDRNGKVVDYQTGPIIWGEPGTNGQHAFYQLIHQGTKMVPCDFIAPAITHNPLSDHHQKLLSNFFAQTEALAFGKSREVVEQEYRDQGKDPATLDYVVPFKVFEGNRPTNSILLREITPFSLGALIALYEHKIFTQGVILNIFTFDQWGVELGKQLANRILPELKDDKEISSHDSSTNGLINRYKAWRG

SEQ ID NO: 13223 - protein, 438 aa, Magnaporthe grisea 70-15
MSASKWVGSRNFSSAGACFHICQTVRCKVATGRLVIKDPGPFQIHYVCAYFGSGRHKNTAGQEYFHQVTANLTTKTHHFSSEMSSETPNVAALLMGVGEDLVLKEQPVPTPGASEVLIRNHALAVNPVDWKLQTLGFMGGPYPKILGADLAGVVVKVGSSVDVFKPGDRVLADSSGIMTQNANHGCFQTFTAVDVSSVTKIPDSTSLTGAATLPLAVDTAGQVFFDNLGLPYPDGPEDKKANSILRGDVLLVWGAAGSVGRAVVQLARILGLEVYATASARHHDALRKLGASFVVDYHSPIAVEELKATAAAAGKRLRVAVDCNTSADSLAHVFGVLSDGNEDARKTVVTMLPLEWVQPSVVAPKDVDISFVDGGKKYTSRLDIQAWLHGKGLPAWLESGEMVPGPYRVVPGGLGGIQAALDELKAGAVSGEKLVVEV

SEQ ID NO: 13224 - protein, 397 aa, Mesorhizobium sp. BNC1
MRALVWHGKHDVRVETVDDPKIVNPRDAIIKITSTAICGSDLHLYDGVIPAIRPGDILGHEFMGEVVEVGKGNSRLSKGDRVVVPFVIACGKCFFCQKQQYSACDNSNPAEKADMSEMLYGHHMAGLFGYSHLTGGYAGGQAEYVRVPYSDIGPIVVPDDLDDDEVLFLSDILPTGWMAAENCEIEEGDTVAVWGCGPVGLFAIQSALIMGAAQVIAIDHYPHRLELASRIGAKVINYKNSRVYEALMDMTGGIGPDAVIDAVGMESHGFAPDNLYDYAKQTLKLETDRPHVLRQAIYACRKGGRVSVPGVYGGFVDKFPVGAFMQKGLTLRTGQTHVQKYLSSLLDMIRERKIDTTFLISHRLSLEAGPEGYRKFAFEQNETTKVVLKPGWENANG

SEQ ID NO: 13225 - protein, 1449 aa, Oryza sativa
MKYVDVRRRIPDVILLQISGCLNSADLYDFIFVISLLCVHDQAVVCGIFRSGMMHFHPCEDEVLTEKDKLLLIAPVSWRRRAQSTFSNSPNGAQNSSHYSESTEGQRSSSMALEVNETRLNSIRKRPSKTLSKSNDYTLGPREHVLIVGWRPKVTDMIREYDNYLGPGSVLEAIIKFKKSRKHDQNVPFSVVVISDKDWLGGGMGYMPVTEPCYFPVIYKIEVHLLMDSADTAQVDKQLAYTLLLAENICQKHDIKVEHLVSEIVDTGLGKQEIGFYMKEGEKISFSELTERAILRREVAVGYVKGKKQYINPTNKLELLSFEMTDQLIVISEFEVFFRLFLRAPSTTGNLLIWLHEMSSPEQPRGQNTRMRKMTASANGDTDETSGLTTPRSCEVPLCSSYENGITRIPEETRLRDPEAYHPKAVCIGPYFHSGRNSPSFRRMEQHKHWCVNRLLERSNHSLEPLVQAFLLRLSKTIKTKSFQQLYAKPVDMTEEGIGMMLLFDGCFILHFLLRHDPNKGAEHEYWTKLDAGLLDHEYETLQWERPWEWSLVAIDMLLLENQIPFVAVRILFDILKTEHDKAVDLTACARNMFNKYLPAGMCTSTRPIRCQDVRCLLQLLYRSLLPNPKLHSDLMKTPPKPPRTGIDPAKKLDTDGVRITRRQQWYWWPLSHFQEPFTFLDIVFSHGKVRIPQLEVSDASIQLLQNLIAFEKCYQGTTSHVANYAAFMDALNSDHHDTELLRKRSIFDVQFTPAQPELSLRRRCKQDVDPSSENYLSRMMVDVVLYKEARASRKKTQTPISDTAFFAVLAVTAKRMFQRFQYGVAFANLTPQWVIWDHSTLRIRKVANTPSIGKRNQTSSSSPLSTHHRLRFSSLRPTLSEVGSKAAAPRERGMATTATLPFSCSSTLQTLTRTIPLRLRLHRRRFLHHLPSLAALPRLPLPRPPLLPHARRHVSASAAPNGASSEGEYDYDLFTIGAGSGGVRASRFASTLYGARAAVCEMPFATVASDDLGGVGGTCVLRGCVPKKLLVYGSKYSHEFEESHGFGWVYETDPKHDWNTLIANKNTELQRLVGIYKNILNNSGVTLIEGRGKIVDPHTVSVDGKLYTARNILIAVGGRPSMPNIPGIEHVIDSDAALDLPSKPEKIAIVGGGYIALEFAGIFNGLKSEVHVFIRQKKVLRGFDEEVRDFIAEQMSLRGITFHTEQSPQAITKSNDGLLSLKTNKETIGGFSHVMFATGRKPNTKNLGLEEVGVKLDKNGAIMVDEYSRTSVDSIWAVGDVTDRVNLTPVALMEGGAFAKTVFGDEPTKPDYRAVPSAVFSQPPIGQVGLTEEQAIEEYGDVDIYTANFRPLRATLSGLPDRIFMKLIVCATTNKVVGVHMCGEDAPEIIQGVAIAVKAGLTKQDFDATIGIHPTSAEEFVTMRNATRKVRRSTTDEVESKDKVVTQN

SEQ ID NO: 13226 - protein, 808 aa, Escherichia coli O157:H7 EDL933
MSKNERMVGISRRTLVKSTAIGSLALAAGGFSLPFTLRSAAAAVQQASEQVVWGACSVNCGSRCALRLHVKDNEVAWVETDNTGSDEYGNHQVRACLRGRSIRRRINHPDRLNYPMKRVGKRGEGKFERISWDEALDTIASSLKKTVEQYGNEAVYIQYSSGIVGGNITRSSPSASAVKRLMNCYGGSLNQYGSYSTAQISCAMPYTYGSNDGNSTTDIENSKLVVMFGNNPAETRMSGGGITYLLEKSREKSNAKMIVIDPRYTDTAAGREDEWLPIRPGTDAALVAGIAWVLINENLVDQPFLDKYCVGYDEKTLPADAPKNGHYKAYILGEGDDKTAKTPQWASQITGIPVDRIIKLAREIGTAKPAYICQGWGPQRQANGELTARAIAMLPILTGNVGISGGNSGARESTYTITIERLPVLDNPVKTSISCFSWTDAIDHGPQMTAIRDGVRGKDKLDVPIKFIWNYAGNTLVNQHSDINKTHEILQDESKCEMIVVIENFMTSSAKYADILLPDLMTVEQEDIIPNDYAGNMGYLIFLQPVTSEKFERKPIYWILSEVAKRLGPDVYQKFTEGRTQEQWLQHLYAKMLAKDPALPSYDELKKMGIYKRKDPNGHFVAYKAFRDDPEANPLKTPSGKIEIYSSKLAEIARTWELEKDEVISPLPVYASTFEGWDSPERSTFPLQLFGFHYKSRTHSTYGNIDVLKAACRQEVWINPIDAQKRGIANGDMVRVYNHRGEVRLPAKVTPRILPGVSAMGQGAWHEANMSGDKIDHGGCVNTLTTLRPSPLAKGNPQHTNLVEIEKI

SEQ ID NO: 13227 - protein, 490 aa, Leuconostoc mesenteroides
MEIQNKAMLITYADSLGKNLKDVHQVLKEDIGDAIGGVHLLPFFPSTGDRGFAPADYTRVDAAFGDWADVEALGEEYYLMFDFMINHISRESVMYQDFKKNHDDSKYKDFFIRWEKFWAKAGENRPTQADVDLIYKRKDKAPTQEITFDDGTTENLWNTFGEEQIDIDVNSAIAKEFIKTTLEDMVKHGANLIRLDAFAYAVKKVDTNDFFVEPEIWDTLNEVREILTPLKAEILPEIHEHYSIPKKINDHGYFTYDFALPMTTLYTLYSGKTNQLAKWLKMSPMKQFTTLDTHDGIGVVDARDILTDDEIDYASEQLYKVGANVKKTYSSASYNNLDIYQINSTYYSALGNDDAAYLLSRVFQVFAPGIPQIYYVGLLAGENDIALLESTKEGRNINRHYYTREEVKSEVKRPVVANLLKLLSWRNESPAFDLAGSITVDTPTDTTIVVTRQDENGQNKAVLTADAANKTFEIVENGQTVMSSDNLTQN

SEQ ID NO: 13228 - protein, 906 aa, Enterococcus faecalis V583
MKTKLHTQTVTLSIDNQEVTVPKGTTILEAAKGLGVEIPTLCHLKELAPDGSCRMCVVEVEGGRRGGLTTACTAHCQEDMVVATHSEKVADSRRFILDLLLSNHKLECFSCGKNGDCQLQQYALDYGIDVTSFTEGKRMPCHQEDTSNPFFSYDPEKCIMCRRCARVCQLRQGRDVLSIANRGFETKMMPSYGQAFDQSICESCGNCVSSCPTGALTAKDTKEYRKWETQKIPTTCPHCGTGCQMNLLVKNNRLVGVEPLDGPANKNLLCVKGKFASYKFVGSGDRLTEPLIKRNGIFEPASWEEALTLVSSKFNEIKAENGPDALAGFSCSRATNEDNYVFQKMVRAAFGTNNVDNCARVCHSASVHGLAQTLGSGAMTNPIADITEDVDMILLVGSNPEEAHPVIGAQIRQAIQRGTQVVVVDPRKINLVKDSALHLQVQAGTNVAFANGMMHVILKEGLADRHFIEERTEGFLDLEKMVADYTPEKVAEICHIHPEDLIQAARMYAKAEKAPIIYCLGVTEHSTGTEGVMSMSNLAMLVGKVGKPGCGVNPLRGQNNVQGACDMGCMPYDFPGYQKVNNPEVIDKFEKAWHVPLNRNTGLTSTKVLPAATAGSVKGLYIFGEDPIVTDPDTGHVRQALESLDFLVVQELFMTETAAYADVVLPGISYAEKDGTFTNTERRVQRVRKAVEPRGQAREDYEIFCEVMTRMGYPCAYESAKEIMEEISAVTPSFGGINYERLEKESLQWPCRSLTDPGTPIMHVGSFARGKGLFKAIPYKQAQELPDEEYPYLMSTGRMLYHYNTRAMTGRTEGINQIANHSYIEINAVDAQALGIQEGDKVEVHSRRGKIETYAAVGNRVFPQEVFMTFHFPDGNVNEITNAVFDDIATIPEYKVCAVAIKPVNK

SEQ ID NO: 13229 - protein, 583 aa, Securigera parviflora
MCGILAVLCAENSQAKRVRVLELSRRLKHRGPDWSGLHQHGDCYLAHQRLAIVDPASGDQPLFNEDKSLIVTVNGEIYNHEELRKQLPNHKFRTGSDCDVIAHLYEEHGENFVDMLDGIFSFVLLDTRDNTFIVARDAIGVTSLYIGWGLDGSVWISSEMKGLNDDCEHFECFPPGHLYSSKDRAFRRWYNPPWFSETIPSAPYDPLALRHAFEKAVIKRLMTDVPFGVLLSGGLDSSLVASITSRYLATTKAAEQWGSKLHSFCVGLEGSPDLKAAKEVADYLGTVHHEFTFTVQDGIDAIEDVIYHVETYDVTTIRASTPMFLMSRKIKSLGVKWVISGEGSDEIFGGYLYFHKAPNKEEFHRETCRKIKALYQYDCLRANKSTFAWGLEARVPFLDKEFINVAMNIDPENKMIKRDEGRMEKYILRRAFDDEEHPYLPKHILYRQKEQFSDGVGYSWIDGLKEHAAKHVTDKMIFNAANIFPHNTPTTKEAYYYRMIFERFFPQNSARLTVPGGASVACSTAKAVEWDAAWSNNLDPSGRAALGVHLSAYDNQNNLANKPVEFEKIIPMEAPSLGVAIQS

SEQ ID NO: 13230 - protein, 255 aa, Gossypium hirsutum
MCGGAIISDFIAVKRGRKLTAEDLWSELDTFSDLLGLDYGNGKDPFTQFDNTKAGSKAKNLEKVTNESTQKTSRGREKEGKTQRTRKNIYRGIRRRPWGKWAAEIRDPHKGVRIWLGTYNTAEEAARAYDEAAKRIRGDKAKLNFPQTPRLTQPPAKKRCMMAPELTPPSSETKSPPTPQPFMGFGYENGVYRPSEAMESEMELKEQISSLESFLGLEPDEMTTELSGSAEPESVNLWMLDHLVTHHQQQPQLFY

SEQ ID NO: 13231 - protein, 319 aa, Corynebacterium efficiens YS-314
MVTAHTDSAHSTPLRTVVVPAAGLGTRFLPATKTVPKELLPVVDTPGIELVAEEAAEAGAQRLAVITAPAKDGILAHFGDFTELRDHLVTKGKTAEAAKVARAVEIITVQGVVQEEPLGLGHAVSLAEGALDDNEEIFAVMLPDDLVLPIGVTSQMIRVQEQFGGTVLCAMDVPLEEVSKYGVFDIADIPGQPGVKQVLGMVEKPSQEKAPSTFVATGRYVFDRHIFDALRRTTPGKGGEIQLTDAIDLLIREGHPVHILVHEGQRHDLGNPGGYIIACMELGMEHPVYGASIREAVTRAAAALAPATLASVQPLTSSS

SEQ ID NO: 13232 - protein, 482 aa, Shewanella oneidensis MR-1
MLLNDPSLLRQQCYINGQWCDANSKETVAITNPATGAVIACVPVMGQAETQAAIAAAEAALPAWRALTAKERGAKLRRWFELLNENSDDLALLMTSEQGKPLTEAKGEVTYAASFIEWFAEEAKRIYGDTIPGHQGDKRIMVIKQPVGVTAAITPWNFPAAMITRKAAPALAAGCTMVVKPAPQTPFTALALAVLAERAGIPAGVFSVITGDAIAIGNEMCTNPIVRKLSFTGSTNVGIKLMAQCAPTLKKLSLELGGNAPFIVFDDANIDAAVEGAMIAKYRNAGQTCVCANRIYVQAGVYDEFAEKLSMAVAKLKVGEGIIAGVTTGPLINAAAVEKVQSHLEDAIKKGATVLAGGKVHELGGNFFEPTVLTNADKSMRVAREETFGPLAPLFKFNDVDDVIKQANDTEFGLAAYFYGRDISLVWKVAESLEYGMVGVNTGLISTEVAPFGGMKSSGLGREGSKYGIEEYLEIKYICMSV

SEQ ID NO: 13233 - protein, 392 aa, Escherichia coli
KITLQNGKLNVPENPIIPYIEGDGFGVDVTPAMLKVVDAAVEKAYKGERKISWMEIYTGEKSTQVYGQDVWLPAETLDLIREYRVAIKGPLTTPVGGGIRSLNVALRQELDLYICLRPVRYYQGTPSPVKHPELTDMVIFRENSEDIYAGIEWKADSADAEKVINFLREEMGVKKIRFPEHCGIGIKPCSEEGTKRLVRAAIEYAIANDRDSVTLVHKGNIMKFTEGAFKDWGYQLAREEFGGELIDGGPWLKVKNPNTGKEIVIKDVIADAFLQQILLRPAEYDVIACMNLNGDYISDALAAQVGGIGIAPGANIGDECALFEATHGTAPKYAGQDKVNPGSIILSAEMMLRHMGWTEAADLIVKGMEGAINAKTVTYDFERLMEGAKLLK

SEQ ID NO: 13234 - protein, 295 aa, Bacteroides thetaiotaomicron VPI-5482
MKGIVLAGGSGTRLYPITKGVSKQLLPIFDKPMIYYPISVLMLAGIREILIISTPYDLPGFKRLLGDGSDYGVHFEYAEQPSPDGLAQAFIIGEEFIGNDSVCLVLGDNIFYGQGFTHMLKEAVHTAEEENKATVFGYWVADPERYGVAEFDKIGNVLSIEEKPIQPKSNYAVVGLYFYPNKVVEVAKNITPSSRGELEITAVNQQFLNDQELKVQLLGRGFAWLDTGTHDSLSEASTFIEVIEKRQGLKVACLEGIALRHGWITTDKMRELAQPMLKNQYGQYLLKVIDELTQK

SEQ ID NO: 13235 - protein, 425 aa, Shewanella oneidensis MR-1
MSTTNDSLMARRQAAVAGGVGQIHPIFTARAENASVWDVEGREFIDFAGGIAVLNTGHLHPKVKAAVAAQLEDFSHTCFMVLGYESYIQVCEKLNQLVPGDFAKKTALFTSGSEAVENAVKVARAYTKRAGVIAFTSGYHGRTMAALALTGKVAPYSKGMGLMSANVFRAEFPCALHGVSDDDAMASIERIFKNDAEPSDIAAIILEPVQGEGGFYAVSPAFMQRLRALCDREGIMLIADEVQTGAGRTGTFFAMEQMGVSADITTFAKSIAGGFPLSGITGRAQVMDAIGPGGLGGTYGGNPLACAAALAVLEVFEEEKLLERANAIGDRIKSALNTMQVEHPQIADVRGLGAMNAIELMEDGKPAPQYCAQILAEARNRGLILLSCGTYGNVLRILVPLTVSDTQLDAGLGILKTSFNAVLKG

SEQ ID NO: 13236 - protein, 398 aa, Mesorhizobium sp. BNC1
MAGFKTLDDLKDVAGKRVLLRVDLNVPVKDGEVTDTTRIERVAPTITELSDKGAKVILLAHFGRPKGKPDAEASLQPIAHAVEAVLDRRVHFASSCIGEPAKKAVDEMTGGDILLLENTRFHAGEEKNDPEFTKALAANGDIYVNDAFSAAHRAHASTEGLAHLLPAYAGRTIQAELEALQRGLGDPKRPVVAIVGGAKVSTKIDLLTNLVKKVDCLVIGGGMANTFLAARGTSVGKSLCEHDLRETAKQIMIDAAEAGCAIILPVDAVVARKFEAGAETETVDIDAVPEDAMILDVGPKSVEKVKEWLDRADTLVWNGPLGAFELSPFDKATMEVAKYAARRTRESLLVSVAGGGDTVAALNQADVSDDFSYVSTAGGAFLEWMEGKDLPGVAALQK

SEQ ID NO: 13237 - protein, 1015 aa, Shigella flexneri 2a str. 2457T
  unsure (1)..(1015): unsure at all Xaa locations
MDVSRRQFFKICAGGMAGTTVAALGFAPKQALAQARNYKLLRAKEIRNTCTYCSVGCGLLMYSLGDGAKNAREAIYHIEGDPDHPVSRGALCPKGAGLLDYVNSENRLRYPKYRAPGSDKWQRISWEEAFSRIAKLMKADRDANFIEKNEQGVTVNRWLSTGMLCASGASNETGMLTQKFARSLGMLAVDNQARVXHGPTVASLAPTFGRGAMTNHWVDIKNANVVMVMGGNAAEAHPVGFRWAMEAKNNNDATLIVVDPRFTRTASVADIYAPIRSGTDITFLSGILRYLIENNKINAEYVKHYTNASLLVRDDFAFEDGLFSGYDAEKRQYDKSSWNYQFDENGYAKRDETLTHPRCVWNLLKAHVSRYTPDVVENICGTPKADFLKVCEVLASTSAPDRTTTFLYALGWTQHTVGAQNIRTMAMIQLLLGNMGMAGGGVNALRGHSNIQGLTDLGLLSTSLPGYLTLPSEKQVDLQSYLEANTPKATLADQVNYWSNYPKFFVSLMKSFYGDAAQKENNWGYDWLPKWDQTYDVIKYFNMMDEGKVTGYFCQGFNPVASFPDKNKVVSCLSKLKYMVVIDPLVTETSTFWQNHGESNDVDPASIQTEVFRLPSTCFAEEDGSIANSGRWLQWHWKGQDAPGEARNDGEILAGIYHHLRELYQAEGGKGVEPLMKMSWNYKQPHEPQSDEVAKENNGYALEDLYDANGVLIAKKGQLLSSFAHLRDDGTTASSCWIYTGSWTEQGNQMANRDNSDPSGLGNTLGWAWAWPLNRRVLYNRASADINGKPWDPKRMLIQWNGSKWTGNDIPDFGNAAPGTPTGPFIMQPEGMGRLFAINKMAEGPFPEHYEPIETPLGTNPLHPNVVSNPVVRLYEQDALRMGKKEQFPYVGTTYRLTEHFHTWTKHALLNAIAQPEQFVEISETQAAAKGINNGDRVTVSSKRGFIRAVAVVTRRLKPLNVNGQQVETVGIPIHWGFEGVARKGYIANTLTPNVGDANSQTPEYKAFLVNIEKA

SEQ ID NO: 13238 - protein, 163 aa, Oryza sativa
  unsure (1)..(163): unsure at all Xaa locations
MAPIVIASLATSVAPFQGLKSTAGLPVSRRSTNSGFGDITNGGRIKCMQVWPVDGKKKFETLSYLPLLTAEDLLKQIEHLLXSEWVPCLEFSDVGFIYCGNHRSPGYYDGRYWTIWKLPMFGCSDNSQVIKELEEAKKAYPDAFIHIVGFDNVRHVQCISFIA

SEQ ID NO: 13239 - protein, 219 aa, Thermoanaerobacter tengcongensis
MDTMRRTISQRMKKSWTEIPHVTEDIKVDVTELVNLRENLNKSGEHKFTYTDLIAKACVIALKKNPVLNWSIEGDEIIKNPNINLGIAVALEDGLIVPVVKNAENKSLLELSKEIKELSEKARENKLTPDEITGGTFTITNLGMYEIDSFTPIINPPESAILGVNKIYKEPVVIEDNIVIRHTMKLSLSFDHRLIDGATAAKFLLDLKKILENPVSMLI

SEQ ID NO: 13240 - protein, 392 aa, Escherichia coli
KITLQNGKLNVPENPIIPYIEGDGFGVDVTPAMLKVVDAAVEKAYKGERKISWMEIYTGEKSTQVYGQDVWLPAETLDLIREYRVAIKGPLTTPVGGGIRSLNVALRQELDLYICLRPVRYYQGSPSPVKHPELTDMVIFRENSEDIYAGIEWKADSADAEKVINFLREEMGVKKIRFPEHCGIGIKPCSEEGTKRLVRAAIEYAIANDRDSVTLVHKGNIMKFTEGAFKDWGYQLAREEFGGELIDGGPWLKVKNPNTGKEIVIKDVIADAFLQQILLRPAEYDVIACMNLNGDYISDALAAQVGGIGIAPGANIGDECALFEATHGTAPKYAGQDKVNPGSIILSAEMMLRHMGWTEAADLIVKGMEGAINAKTVTYDFERLMEGAKLLK

SEQ ID NO: 13241 - protein, 359 aa, Glycine max
MAHNSDSATSNLLLLCSENSSTCFDDDGLECDAADGSNSRISHHEGGGGSELLLACFVAQSEEAVRAMVEREKEHLPRDDYLMRLRSGGLDLDLLGVRKEALDWIWKAHSYLGFGPLSFCLAVNYLDRFLSVFELPRGVSWTVQLLAVACLSIAAKMEEIKVPQSVDLQVGELKFLFEARTIQKMELLVLSTLRWKMCAITPCSFIDYFLGKITCEQHPAKSSISISVHLILGIIRGIDFLEFWPSEIAAAVAASVLKESQVIEIDKAITDLLVVEKGRVLKCVELIRDLSLINVAASLGSKVPYLPQSPIGVLDAGCLSYKSDELTVGSCPNSSHNISNPNPTKRSKPDGPSNGTSNS

SEQ ID NO: 13242 - protein, 528 aa, Ustilago maydis
MVNITYGVLQAPDGSSATSSAIAKGTDIIVSYGPNGESVASYSPGDISWVLTCTALVWLMIPGLGYLYSGLARRKNAPHLLLLTLAALAVVSFQWFFWGYSLTFSQTSGAFLGNLRNFGYMGVLENPVPQAYNKVPEIVYAIYQCMFANLVPAIAIGAACERGRVWPFLVFTFVWTTLVYDVIACWVWNPTGWAFKWGVLDYAGGGPVEINSGITGLVISYYLGPRTGYGTERLLFKPHNVSYIFLGTAFLWFGWIGFNGGSVFAANLRAAMAISTTNLAASSAGLTWMFLDWRLERKWSVVGFCTGAIAGLVAITPAAGFVGMPAALLVGVVSSAVSNFATVLKGPMRVDDVMDIFSVHALAGIVGTLLTGIFAQASVANNDGNTVIAGGWLDSNWIQLAYQLAYCVAVTCWCGGVTFAIMFVIDHIPYIGPFRSSEMGEVVGMDEDQCGEWAYDYAFINRDLEGNYKPDHGQTLDINEKMPNVHQTDSLRSETHADSSQDNPNSQLAAAEHQSPSTAEPAVEMKQA

SEQ ID NO: 13243 - protein, 253 aa, Halobacterium sp. NRC-1
MQGQNQQQAYDRGITIFSPDGRLYQVEYAREAVKRGTASIGVRTPEGVVLVVDKQTRSPLLEGSSVEKLHKIDDHVGAASAGHVADARQLVDFARQQSQVERVRYDEPIGVRTLTKSVTDHIQQYTQVGGARPFGVALLIAGVEGGEPRLFETDPSGTSNEWKAVAIGSNRGDIQEFLEDEYDAGLSVDDGIDLALRALNEGREDALSGDGVGVGIVDADTGTYRELAADESQSYIDDIEDAADDSDDDDDEE

SEQ ID NO: 13244 - protein, 251 aa, Zea mays
  unsure (1)..(251): unsure at all Xaa locations
MGSSRPAGRSLPDFRWNPQSFSRLLLPHPFSLLFFLFIHLVLTSLNQTFHDTNDLILFIMSSALNQLKATGTTVVSDSGDFASIGKYKPQDATTNPSLILAASKKEEYAKLIDVAIDYAKQKGGSVDQQVDDALDRLLVEFGKEILKIIPGKVSTEVDARYSFDTEASVNKALHLIELYGEQGISKDRILIKIAATXEGIKAAEILQRDHGINTNLXTLMFSLVQAIXAAEAGAYLXSPFVGXILDWVQAL

SEQ ID NO: 13245 - protein, 318 aa, Triticum aestivum
  unsure (1)..(318): unsure at all Xaa locations
TIGQCWRYERMTTAGRREHYQWNMDIFGMPKVRAEAELIQAIVLLFERLGITSSDVGIRLSSRKVLRAVLDMYSVPQHLFTQVCVIVDKLGKLSREEIEKELISTGLSSEAVQGIIEVLSLKSLSKLERPLGSGXEAGADLKKLFSLAEQYGYADWICFDASVVRGLAYYTGIVFEAFDREGELRAICGGGRYDRLLSTFGTEDVPACGFGFGDAVIVELLKEKGLLPDLPRQIDDIVFPLDEELEGPASSVASSLRKKGRSVDLVEDKRLKWVFKHAERINASRLILVGKSEWERGMVRVKILSTREEFEVKAGELQ

SEQ ID NO: 13246 - protein, 251 aa, Oryza sativa
MASRSSALLLLFSAFCFLARRAAADYGSWQSAHATFYGGGDASGTMGGACGYGNLYSTGYGTNTAALSTVLFNDGAACGSCYELRCDNDGQWCLPGSVTVTATNLCPPNYALPNDDGGWCNPPRPHFDMAEPAFLQIGVYRAGIVPVSYRRVPCVKKGGIRFTINGHSYFNLVLVTNVAGPGDVQSVSIKGSSTGWQPMSRNWGQNWQSNSYLDGQSLSFQVAVSDGRTVTSNNVVPAGWQFGQTFEGGQF

SEQ ID NO: 13247 - protein, 438 aa, Azotobacter vinelandii
MSNPSTSIQHVAAREILDSRGNPTVEAVVTLAGGATGVASVPSGASTGSREALELRDGALRYQGKGVMKAVDNVNGAIRERVVGLDALDQRAVDQAMLELDGTDNKAILGANAILAVSLATARAAAAARGLPLYAHLAELYGSPGEYSLPVPMMNILNGGEHADNNVDLQEFMIQPVGAASFKEALRIGAEVFHTLKQVLAERGLSTAVGDEGGFAPSLSSNEEALVVIQAAVERAGYVLGQDITLALDCAASEFYHDGEYRLAGEGKTFDSRGFADYLAGLCERYPIVSIEDGLDESDWAGWAYLTEKLGQKVQLVGDDLFVTNPKILREGIEQGIGNSILIKFNQIGSLSETLEAIRLAQQAGYTAVISHRSGETEDTTIADLAVATRAGQIKTGSLCRSDRVGKYNQLLRIEEALQGKAPYDASALLKRRCCRGR

SEQ ID NO: 13248 - protein, 157 aa, Nostoc punctiforme PCC 73102
MTKKLHEPLLVVEDSNEDFRMLQRLMRLMSVQNPIHRCTNGDEVLEFLYQQGSDAHSKGENLPNSKVALRPSVILLDLNLPGIDGRDILDRLKQDKSFKEIPIVVFTTSSNPKDIELCYQKGANGYLVKPMDAQELKKTIQAFVDYWLDANMPPVLD

SEQ ID NO: 13249 - protein, 427 aa, Coxiella burnetii RSA 493
MTELTGVSIVTYQHIKVPSQGEKITVNKAVLEVPDRPIIPFIEGDGIGIDIAPVMKNVVDAAVEKSYAGKRKIEWMEIYAGEKATKVYGKDNWLPDETLEAIKEYQVAIKGPLTTPVGGGIRSLNVALRQQLDLYVCLRPVRYFTGVPSPVKTPEKVNMVIFRENSEDIYAGIEWPAGSPEAVKLINFLQNEMGVKKIRFPETAGIGIKPVSKEGTSRLVRRAIQYAIDNDRDSVTLVHKGNIMKFTEGAFKDWGYEVAVKEFGAKPLDGGPWHVFENPKTGQKITIKDVIADAFLQQILLRPAEYSVIATLNLNGDYISDALAAEVGGIGIAPGANLSDTVGLFEATHGTAPKYAGQDKVNPGSLILSAEMMLRYLGWKEAADLVVQGIEGAIESKTVTYDFARLMTGAKEVSTSQFGKAIIKHIL

SEQ ID NO: 13250 - protein, 117 aa, Zea mays
MVSAEVGIDYVLWTEDEVSTRVGEVAAELAADLRALPEPAVIVGVATGAFLFLADLVRRVDVRLVVDLVRVESYGAGTESSGKPRITADLKVDVAGKHVVVVSSSTLTRDREPLLCG

SEQ ID NO: 13251 - protein, 194 aa, Glycine max
  unsure (1)..(194): unsure at all Xaa locations
TRPLDLVKEAISRTGYNEKIKIALDVAATNFCIGKRYDLDFQSPQKSGQNFKSAEDMIELFKELCSEYPIVSIEDPFDREDWEHIKHISSXLGICQVVGDDLLMSNAKRIERAITESACNALLLKVNQVGTITEVIEVVKLAKEAHWGVVTSHRCXETIDSFIADLSVGLASGVIKAGAPCRGERLEKYNQVSF

SEQ ID NO: 13252 - protein, 242 aa, Triticum aestivum
MLTKGRRVAGRGEDMSAHYAFGPHEDDAIIKHRLLTRTTTTRGEPPLKKLQKKFMSFATEVEKDADNTSDCERLYKAFLQEINTFELPLLKSKAVVDANLREKESFNELQVEIQRQILQAQTDIEDLKKQLEQSKIERQHKEECEAIRKLISSQPPRSETEKLIANLEKEIANLEAESAACTRTLELRKKQFALLLHVVEELQISIEDEQRNIADELRAATEEPKLSIEEGSGGASDAMAVD

SEQ ID NO: 13253 - protein, 559 aa, Rhodopseudomonas sp.
  unsure (1)..(559): unsure at all Xaa locations
MTTPKLDRRQVLKLEAAAMAALAGGVAMPAGAANLVTERAVSELKWDKAACRFCXXXXXXXXRTKENRVVATHGDTKSEVNRGLNCVKGYFLSKIMYGHDRLTQPMLRKTDGRYDKNGEFEPVSWDEAFDIMAEKFKAALKKRGPSGVGMFGSGQWTVWEGYAASKLFKAGFRSNNIDPNARHCMASAVAGFMRTFGIDEPMGCYDDIEAADVFVLWGSNMAEMHPLLWTRVTDRRLSAPHVKVAVLSTLEHRXXXXXAIRLVFKPQSDXAILTAIANHIIKTXRVNKXFVAKHTTFKXXXTDIGYGXXPEHPLQXXXXXXXXXXXXXXXXXXXXAAFVADYTIEKASQISGVPAAKIEALAELYADPNTKVTSFWTMGFNQDTRGVWANNLAYNLHLLTGKISEPGNSPFSLTGAXFACGTAREVGTFSHRLPADMVVTNKKHRDIAEKIWKLPEGTIPDKPGYHAVLQSRMLKDGLLNAYWVQVNNNLQAGANANEETYPGFRNPDNFIVVSDAYPSVTALAADLILPTAMWVEKEGAYGNAERRTQFWHQLVAAPG

SEQ ID NO: 13254 - protein, 295 aa, Nostoc punctiforme PCC 73102
MQKNQVRKAVIPVAGFGTRLFPATKVVKKELFPIIDRDGRAKPVILAIIEEAISAGIAEVGIVVQPDDREIFEDLLKNPPKKELFKKLSPQNQEYSRYLEDLGSKITFLLQEEQLGYGHAVFCAKDWVQDEPFLLMLGDHVYASDIQKSCASQLLDVYEQVNQSVVSLTTTPAEILHTAGCVTGVWQELNSILEVTQLYEKPTIEYAQQHLHVEGMAENEFLCIFGLYLLSPKIFDFLAEHINQNLRERGEFQLTSSLDRLRQEEGITGYVVKGKCFDTGLPDTYRQTMIDFRNF

SEQ ID NO: 13255 - protein, 392 aa, Escherichia coli
KITLQNGKLNVPENPIIPYIEGDGIGVNVTPAMLKVVDAAVEKAYKGERKISWMEIYTGEKSTQVYGQDVWLPAETLDLIREYRVAIKGPLTTPVGGGIRSLNVALRQELDLYICLRPVRYYQGTPSPVKHPELTDMVIFRENSEDIYAGIEWKADSADAEKVIKFLREEMGVKKIRFPEHCGIGIKPCSEEGTKRLVRAAIEYAIANDRDSVTLVHKGNIMKFTEGAFKDWGYELAREEFGGELIDGGPWLKVKNPNTGKEIVIKDVIADAFLQQILLRPAEYDVIACMNLNGDYISDALAAQVGGIGIAPGANIGDECALFEATHGTAPKYAGQDKVNPGSIILSAEMMLRHMGWTEAADLIVKGMEGAINAKTVTYDFERLMEGAKLLK

SEQ ID NO: 13256 - protein, 459 aa, Fusobacterium nucleatum subsp. vincentii ATCC 49256
MEKIYDLLVIGWGKAGKTLSAKLGAKEKKVAIIEENPKMYGGTCINVGCLPTKSLVHSAKILSEAKKYGIDGDYSFKNNFFKEAMKKKEEMTTKLRNKNFGILDTNENVDIYNGRASFISDNEVKVVSSDNKEIILKADKIVINTGSVSRTLNIEGIDNKNIMVSEGILELKELPKKLLIIGAGYIGLEFASYFANFGSEVSIFQFDDSFLVREDEDEAKIIKEILEKKDIKFFFKTSVKKFEDLGNSVKAICVQNGKEFIEEFDKVLIAVGRKPNTDNLGLKNTSIQLGKFGEILVDDYLKTDAPNVWAVGDVKGGPQFTYVSLDDFRIVFPQILGENNGRKLSDRILIPTSTFVDPPYSRVGINEKEAQRLGIKYTKKFALTNTIPKAHVINEIEGFTKILINENDEIIGASICHYESHEMINLLTLAINQKIKSKVLKDFIYTHPIFTESLNDILG

SEQ ID NO: 13257 - protein, 392 aa, Escherichia coli
KITLQNGKLNVPENPIIPYIEGDGIGVDVTPAMLKVVDAAVEKAYKGERKISWMEIYTGEKSTQVYGQDVWLPAETLDLIREYRVAIKGPLTTPVGGGIRSLNVALRQELDLYICLRPVRYYQGTPSPVKHPELTDMVIFRENSEDIYAGIEWKADSADAEKVIKFLREEMGVKKIRFPEHCGIGIKPCSEEGTKRLVRAAIEYAIANDRDSVTLVHKGNIMKFTEGAFKDWGYELAREEFGGELIDGGPWLKVKNPNTGKEIVIKDVIADAFLQQILLRPAEYDVIACMNLNGDYISDALAAQVGGIGIAPGANIGDECALFEATHGTAPKYAGQDKVNPGSIILSAEMMLRHMGWTEAADLIVKGMEGAINAKTVTYDFERLMEGAKLLK

SEQ ID NO: 13258 - protein, 497 aa, Methanosarcina acetivorans C2A
MCGIAGVFGTPDSNLKVKKMLAALGHRGPDACGIHTAGDLSIGNTLLKITGDMPQPLTGKGALVLNGEIFNFRELAAEIGIKIDSDTELLFSLIETGVKEGSTPIDAVCSALSKVNGDYALAYACGGELVLARDPSGVKPLFYCSGTEGEKPEIAFASEKKALAFISRKAKPFPQGGILGFNTESGKITEKIPEGYLEIKSPEKRIYTEHEALSQLKETLEKAVELRLTPTTGIAFSGGIDSTFLAALAKRIDPGVSLYAVGLPDSHDITQAERAAEAIGMRKNLKVHFLSPEEIEAAVPRVVYATESTDPMTVAIGIPLYIVAKTAKEDGKRVLLTGQGADELFGGYRRHEEFLKKGAEVLDREIYSDLATISKINLERDDMVTMANSVELRVPFLDKEVIKTGLAIRPELKVLKKDGYYEDGYYERKYILRKAAKGLIPPEILWKEKKAMQYGTGVQKVLDRLARDSGFSKKQESHIEKYLMQIASEKGFEFVNN

SEQ ID NO: 13259 - protein, 231 aa, Vibrio vulnificus YJ016
MNKYLAELFGTFWLVLGGCGSAVLAAAFPDVGIGLLGVSLAFGLTVLTMAFAIGHISGCHLNPAVTIGLWAGGRFEAKEIVPYILAQVIGGVIAGGVLYTIASGQMGFDATSSGFASNGYGEHSPGGYSLTSALVTEIVMAMMFLLVILGATDQRAPQGFAPIAIGLCLTLIHLISIPVTNTSVNPARSTGVALYVGDWATAQLWLFWVAPILGALLGAVAYKLISGSNKD

SEQ ID NO: 13260 - protein, 381 aa, Eremothecium gossypii
MSETQGKPIQCTAAVAYAAGEPLRIEKVTVDPPKAHEVRIKIVNSAICHTDAYTLSGSDPEGLFPCILGHEGSGIVESVGEGVTNVKPGDHVVPLYTAECQQCKFCVSGKTNLCGAVRATQGKGVMPDGTSRFRNGKGETLYHFMGCSTFSEYTVVADVSVVAVDQQAPLETVCLLGCGVTTGYGAAVKTADVQEGDTVAVFGAGTVGLSVVQGAKARNASRIIVVDINDAKREWASKFGATDFINPKTDLKEGETIVARLIEMTDGGLDHTFDCTGNTKVMRDALEACHKGWGQSIIIGVAAAGQEISTRPFQLVTGRVWKGSAFGGIKGRSEMGGLVRDYLNGTLKVQEFVTHKRPFEEINSGFEDLHHGDCLRTVLSL

SEQ ID NO: 13261 - protein, 271 aa, Mesorhizobium loti MAFF303099
MTNRLVLAGCGNMGYAMLSGWLKSGKLAPSAVFVIEPNAELRQRAATLGCATSADAGEIPADAVPDLVVIAVKPQVIRDVTAAYKRFGDGRTTFVSIAAGTPVATFEDILGNRAPVVRCMPNTPASIGKGMMVVFSNPLVSDDTKRFVADLLSASGEVATIDDEGLMDAVTAVSGSGPAYIFHFIEALTVAAEKAGLPSATARLLAMQTVYGAASLAAESQEEPGVLRQQVTSPNGTTAAALAVLMGEDRLTNLLTQAVEAARLRSIELGK

SEQ ID NO: 13262 - protein, 379 aa, Yersinia pestis biovar Medievalis str. 91001
MEMIKTRAAVAWGPNQPLSVEEVDLMPPQKGEVLVRIVASGVCHTDAYTLSGADPEGVFPTILGHEGGGIVEAIGEGVTSVAVGDHVIPLYTPECGECKYCRSGKTNLCQAIRSTQGKGLMPDGTTRFSKNGQPIFHYMGTSTFSELTVVPEISLAKINKEAPLEEVCLLGCGVTTGMGAVMNTAKVKPGDTVAIFGLGGIGLSAVIGAQMAGASRIIGIDLNTSKFELARKLGATDLINPKDYDKPIQEVIVELTDGGVDFSFECIGNVNVMRSALECCHKGWGESVIIGVAGAGEEISTRPFQLVTGRVWRGSAFGGVKGRSELPGIVQQYLDGKFALNDFITHTMALDQINEAFDLMHEGKSIRSVIHFNHSSESK

SEQ ID NO: 13263 - protein, 540 aa, Glycine max
MIKSHSLTLLVPRQKGNSQRFFKSFISFFRPKKEKENIVQRSKMLSNRIWQRRALISARTLFSGSASHSSSSSHAISLRFAKANAPSSSHVIFNFARVDRYWFSTQPALELPASKIVDVPLAQTGEGIAECELLKWYVQEGDYVEDFQPLCEVQSDKATIEITSRYKGKISNILYVPGDIVKVGETLLKILSPDSDQTLVNESVFTTVIDDSDNGKLIDSDPGKGRQTGVSSTPAVRSLAKQHGIDITEICGTGKDGRILKEDVLNFSVKKGIIKNPSTVLQSDSGEQLQGAEGYNCNVATKSYRPSEDRTLPLRGFQRAMVKSMSLAAKVPHFHYVDEINCDALVELKTSFQKNNPYPDVKYTFLPILIKSLSMALSKYPFMNSCFKEDALEVILKGSHNVGIAMATSHGLVVPNIKNVQSLSIMEITKELARLQQLASNNKLTSEDICGGTITLSNIGAIGGKFGSPLINLPEVSIIAVGRIQKVPRFADNGNVYPASLVNVNIGADHRVLDGATVARFCNEWKQLIENPELLTLHLK

SEQ ID NO: 13264 - protein, 398 aa, Pseudomonas putida KT2440
MNHALTQLQPYPFEKLRALLGSVKPAADKRAIALSIGEPKHESPAFVAQAMADNLDKLAVYPSTLGLPALRQAIGQWCERRFGVPAGWLDADRHILPVNGTREALFAFTQAVVNRADDGLVISPNPFYQIYEGAALLAGATPHYLPCLENNGFNPDFDAVPAEVWKRCQILFLCSPGNPTGALVPMNTLKKLIALADEHDFVIAADECYSELYFDEDAPPPGLLSACAELGRSDFARCVVFHSLSKRSNLPGLRSGFVAGDAQIIKPFLLYRTYHGCAMPVQTQLASIAAWQDEAHVRENRDQYRAKYDAVLDILQPVLDVQRPDGSFYLWAKVPGDDAEFTRDLFEAQHVTVVPGSYLSREVDGVNPGAGRVRMALVAPLAECIEAAERIRAFLQNR

SEQ ID NO: 13265 - protein, 286 aa, Triticum aestivum
AARFACDHLLPALLEAASGPGGVTADAIRDAFAATEAAFIAQVSSQWDTNPDLATVGSCCLVGVVHDQTLFVANLGDSRAVLGKKVGRSGQIVAEQLSTEHNANHEAVRQELMAQHPDDPQIVALKHGVWRVKGIIQVSRSLGDAYLKDAKYNTERIKPKFRVSEPFSRPIMSAEPTIVSRSLEPSDCFVIFASDGLWEHLTNQEAVEIVHNNQRAGSAKRLIKAALQEAARKREMRYSDLMRIDKKVRRHFHDDITVIVLFINHELLAKGNAQVPPLSIRSALDH

SEQ ID NO: 13266 - protein, 550 aa, Oryza sativa
MAASPAAGAAAATVSSFVSPSSFSSVKASKPDRLRPARRAAAVNVRCQLIYGCSQTAHCRLVGFCYSSYRWRCAIECNELDIASADAITRSLGTTRKLLILSLALWYKFTERFSFRFEAFKTKVPRNANMAKLQAGYLFPEIARRRAAHLLKFPDAKIISLGIGDTTEPIPDVITNAMAKRAHALSTVDGYSGYGAEQGEKKLRAAIAATYYADLGIEETDIFVSDGAKCDISRLQVLFGSNVKIAVQDPSYPAYVDSSVIMGQTGLYQEDVQKYGNIEYMKCSPENGFFPDLSSVPRTDIIFFCSPNNPTGAAASRDQLTKLVKFAKDNGSIIVYDSAYAMYISDDSPKSIFEIPGAKEVAIETASFSKYAGFTGVRLGWTVVPKELLFSDGHPVAKDFNRIVCTCFNGASNISQAGGLGCLSPEGLKAMSDVVGFYKENTKIIVDTFTSLGFNVYGAKNAPYVWVHFPGRNSWDVFAEILEKAHVVTTPGSGFGPGGEGFIYSCNSVHTARAKIYRVSQYQYQDAEIHSITISMQKFCRRNPTVHLST

SEQ ID NO: 13267 - protein, 585 aa, Arabidopsis thaliana
MVSFKVSLVSTSPIDGQKPGTSGLRKKVKVFKQPNYLENFVQATFNALTTEKVKGATLVVSGDGRYYSEQAIQIIVKMAAANGVRRVWVGQNSLLSTPAVSAIIRERVGADGSKATGAFILTASHNPGGPTEDFGIKYNMENGGPAPESITDKIYENTKTIKEYPIAEDLPRVDISTIGITSFEGPEGKFDVEVFDSADDYVKLMKSIFDFESIKKLLSYPKFTFCYDALHGVAGAYAHRIFVEELGAPESSLLNCVPKEDFGGGHPDPNLTYAKELVARMGLSKTDDAGGEPPEFGAAADGDADRNMILGKRFFVTPSDSVAIIAANAVGAIPYFSSGLKGVARSMPTSAALDVVAKNLGLKFFEVPTGWKFFGNLMDAGMCSVCGEESFGTGSDHIREKDGIWAVLAWLSILAHKNKETLDGNAKLVTVEDIVRQHWATYGRHYYTRYDYENVDATAAKELMGLLVKLQSSLPEVNKIIKGIHPEVANVASADEFEYKDPVDGSVSKHQGIRYLFEDGSRLVFRLSGTGSEGATIRLYIEQYEKDASKIGRDSQDALGPLVDVALKLSKMQEFTGRSSPTVIT

SEQ ID NO: 13268 - protein, 433 aa, Corynebacterium efficiens YS-314
MCGGDTRKFYPLFYCRSAHAGLNCDSQHQLSMSLDSSLDSHSSRLTFPQKAEAPMTTTSAASSTASSTTTAKILPHPLNAWYVAAWDHEVTSKGIISRTIANKPLALYRTQDGRAVALADACWHRLAPLSKGKLTGRDGIQCPYHGLVYNSAGRCMSMPAQETLNPSAAVASFPVVEQYRYIWVWLGDPTLADPTTVPDMHQMTHPEWTGDGKTIAAACNYQLVLDNLMDLTHEEFVHSSSIGQDELSEADFEVTHTEDSVTVSRWMRDIDPPPFWQKNMNDKFPGYEGKVDRWQIIHYYYPSTICIDVGVAKAGTGAPEGDRSQGVNGYVMNTITPETDRSSHYFWSFQRNYRLDSQLITTQLRDGVHGVFGEDEEMLTAQQEAIDANPDYEFYNLNIDAGGMWVRRILEKALEAENRLHIPTTSAPVRKES

SEQ ID NO: 13269 - protein, 588 aa, Actinobacillus pleuropneumoniae
MSDKKIKGLEWQEKPLSDNERLKTDSNFLRGTILEDLKDGLTGGFKGDNFQLIRFHGMYEQDDRDIRAERLEEKLEPLKFMLLRCRLPGGIIKPYQWIEIDKFAREHTRYQSIRLTNRQTFQYHGVPKGKLQPMHRLLHSIGLDSIATAADMNRNVLCTSNPIESELHQQAYEFAKKISEHLLPRSRGYLDVWVDGKKIESSDDLLKIEDEPILGKTFLPRKFKTAVAIPPLNDVDVYANDLNFIAIQDDNGQLCGFNVLVGGGLSFEHGNTKTYPNVAYSLGFVPLEHTLAAAEGVVKTQRDFGNRSDRKNARVRYTIQNMTLDGFRAEVERCMNIKFEPTRPYEFTERGDRIGWVKGIDNNWHLTLFIESGRITDKPEKPLMTGVLELAKVHKGDFRITANQNLIVANVAEQDKAQIEAIARQYGLIQEISKLRENAMSCVSLPTCPLAMAEAERVLPDFISELDKVLSKHNVADESIITRITGCPNGCGRAMLAEIGLVGKAIGRYNLHIGGDRAGLRIPRLYKENITLQEIVNEIDQLVARWATERQTNEAFGDFVIRSNIIAPVVNAHIDFWDATKIIPTTII

SEQ ID NO: 13270 - protein, 588 aa, Actinobacillus pleuropneumoniae
MSDKKIKGLEWQEKPLSDNERLKTDSNFLRGTILDDLKDDLTGGFKGDNFQLIRFHGMYEQDDRDIRAERLEEKLEPLKFMLLRCRLPGGIIKPYQWIEIDKFAREHTRYQSIRLTNRQTFQYHGVPKGKLQPMHRLLHSIGLDSIATAADMNRNVLCTSNPIESELHQQAYEFAKKISEHLLPRSRGYLDVWVDGKKVESSDDLLKIEDEPILGKTYLPRKFKTAVAIPPLNDVDVYANDLNFIAIQDENGQLCGFNVLVGGGLSFEHGNTKTYPNVAYSLGFVPLEHTLAAAEGVVKTQRDFGNRSDRKNARVRYTVQNMTLDGFRAEVERCMNIKFEPTRPYEFTERGDRIGWVKGIDNNWHLTLFIESVRITDKPEKPLMTGVLELAKVHKGDFRITANQNLIVANVAEQDKAQIEAIARQYGLIQEISKLRENAMSCVSLPTCPLAMAEAERVLPDFISELDKVLSKHNVADESIITRITGCPNGCGRAMLAEIGLVGKAIGRYNLHIGGDRAGLRISRLYKENITLQEIVNEIDQLVARWATERQTNEAFGDFVIRSNIIAPVVNAHIDFWDATKIIPTTII

SEQ ID NO: 13271 - protein, 474 aa, Pinus sylvestris
MASRPENVGILAMEIYFPTTCVQQEDLETFDGVSKGKYTIGLGQDCMTFCTDLEDVISMSLTAVTSLLEKYEIDPKQIGRLEVGSETVIDKSKSIKTWLMHIFEKCGNTEIEGVDSTNACYGGTAALFNCINWIESSSWDGRYGLVVATDSAVYAEGAARPTGGAAAVAMLIGPNAPIATESKYRGTHMAHVYDFYKPNLASEYPVVDGKLSQTCYLMALDSCYKRFCNKFEKEEGRQFSLLDTDYIAFHSPYNKLVQKSFGRLLFNDFSRHARSVGKDAQEKLEPFAGLSEQDSYNSRDLEKVSQQLAKPLYDAKIQPSTLLPKQVGNMYTASLYAALASIIHNKHTTLDGQRVMMFSYGSGLASTLFSFKIREGQFPFTLSNITEVMDVQNKLDSRHEFLPEDFVENLKRMETLYGAKDFVSTSQLSLLRPGAFYLTKVDSMYRRFYSRKVISAGDNFEKSKLANGTTHDEL

SEQ ID NO: 13272 - protein, 591 aa, Helianthus annuus
MCGILAVLGCSDDSQAKRVRVLELSRRLKHRGPDWSGLYQHGDNYLSHQRLAIIDPASGDQPLFNEDQTIVVTVNGEIYNHEELRKRLTAAGHKFRTGSDCDVIAHLYEEHGEDFVDMLDGMFSFVLLDTRNNTYIAARDAIGITSLYIGWGLDGSVWISSELKGLNDDCEHFEVFPPGHLYSSKTGGFKRWYNPLWFAETIPSTPYDPLVLRCAFENAVIKRLMTDVPFGVLLSGGLDSSLVASITARYLAGTKAAKQWGAQLHSFCVGLEGSPDLKAAREVADYLGTVHHEFHFTVQDGIDAIEDVIYHIETYDVTTIRASTPMFLMSRKIKSLGVKMVISGEGSDEIFGGYLYFHKALNREEFHQETCRKIKALHQYDCLRANKSTSAWGLEARVPFLDKEFINVAMSIDPEAKMINMDQKRIEKWVLRRAFEDEEHPYLPKHILYRQKEQFSDGVGYSWIDGLKAHAELHVTDKMMLHAEHIFPHNTPVTKEAYYYRMIFERLFPQNSAKLTVPGGASIACSTAKAIEWDASWSNNLDPSGRAALGAHNAAYKKNMGPVGQVKLGPNIIDNVPRMMDISASELVIQG

SEQ ID NO: 13273 - protein, 474 aa, Shigella flexneri 2a str. 2457T
MQHKLLINGERVSGEGEKQPVYNPATGDVLLEIAEVSAEQVDAAVRAADAAFAEWGQTTPKARAECLLKLADVIEENGQVFAELESRNCGKPLHSAFNDEIPAIVDVFRFFAGAARCLNGLAAGEYLEGHTSMIRRDPLGVVASIAPWNYPLMMAAWKLAPALAAGNCVVLKPSEITPLTALKLAELAKDIFPAGVINILFGRGKTVGDPLTGHPKVRMVSLTGSIATGEHIISHTASSIKRTHMELGGKAPVIVFDDADIEAVVEGVRTFGYYNAGQDCTAACRIYAQKGIYDTLVEKLGAAVATLKSGAPDDESTELGPLSSLAHLERVSKAVEEAKATGHIKVITGGEKRKGNGYYYAPTLLAGALQDDAIVQKEVFGPVVSVTPFDNEEQVVNWANDSQYGLASSVWTKDVGRAHRVSARLQYGCTWVNTHFMLVSEMPHGGQKLSGYGKDMSLYGLEDYTVVRHVMVKH

SEQ ID NO: 13274 - protein, 392 aa, Escherichia coli
KITLQNGKLNVPENPIIPYIEGDGIGVNVTPAMLKVVDAAVEKAYKGERKISWMEIYTGEKSTQVYGQDVWLPAETLDLIREYRVAIKGPLTTPVGGGIRSLNVALRQELDLYICLRPVRYYQGTPSPVKHPELTDMVIFRENSEDIYAGIEWKADSADAEKVIKFLREEMGVKKIRFPEHCGIGIKPCSEEGTKRLVRAAIEYAIANDRDSVTLVHKGNIMKFTEGAFKDWGYQLAREEFGGELIDGGPWLKVKNPNTGKEIVIKDVIADAFLQQILLRPAEYDVIACMNLNGDYISDALAAQVGGIGIAPGANIGDECALFEATHGTAPKYAGQDKVNPGSIILSAEMMLRHMGWTEAADLIVKGMEGAINAKTVTYDFERLMEGAKLLK

SEQ ID NO: 13275 - protein, 558 aa, Helianthus annuus
MCGILAVFGCVDCSQAKRARILELSSRLRHRGPDWSGLHSEEDCYLAHQRLAIVDPASGDQPLYNEDKSIIVTVNGEIYNHKEFREQLKSHKFNTGSDCEVIAHLYEEHGEDFVHMLDGMFSFVLLDTRNKSYIAARDAIGITPLYIGWGLDGSVWFASEMKALSDDCEQFMSFLPGHIYSSKNGGLRRWYNPPWWSELVPSTPYDPLVLRNAFEKAVIKRLMTDVPFGVLLSGGLDSSLVAAVASRHLVDSEAYCQWGSQLHTFCIGLKGSPDLVAAREVADYLGTRHHEFYFTVQEGIDALEEVIYHIETYDVTTIRASTPMFLMSRKIKSLGVKMVLSGEGSDEIFGGYLYFHKAPNKEEFHEETCRKIKALHLYDCLRANKSTSAWGLEARVPFLDKEFINVAMSIDPKWKMIDRDNGRIEKWVLRNAFDDDEKPYLPKHILYRQKEQFSDGVGYSWIDGLRDHANKQVTDSMLANANFVYPENTPATKEAYYYRKIFEKFFPKNAARLTVPGGPSVACSTAKAVEWDASWSKNLDPSGRAALGVHAAAYEDAK

SEQ ID NO: 13276 - protein, 229 aa, Zea mays
MEVAAASAAGYGFKADDDVDSLRATELRLGLPGTEEEEAEESQNKAPPPPPSTPRGKKRDVVASSGPEDAPKKRDCETDTDAAPPPAAKAQLVGWPPVRSYRKSCFQQQAAAKNKPAAALAEEAPAAGGLFVKVSMDGAPYLRKVDLKMYKGYRELREALEAMFLCFSGAGAADAPAVNPSDFAVTYEDKDGDLMLVGDVPFGMFISTCKRLRIMKGSEARGLGSVKNN

SEQ ID NO: 13277 - protein, 1218 aa, Oryza sativa
MDDDGETPMPSLELHKLPTLAGAAIPNPIARHPLYHPSPSFFISPTDVVLRDILFDASPASAAGERRRRHVAAYHRAGPRREVAFDPATVRAAIFTCGGLCPGTNTVVRELVVGLSELYGVRGGVFGVRNGYRGFYSDEVVPLDPAAVEHWHKAGGAALGTSRGGFDLARIVDAIERHGFNQVYAVGGDGTMRGAARIHREVRRRGRLAVAVAGIPKTVDNDVGVVDRSFGFHTAVEAAQQAIAAGHVEAESAANGVGLVKLMGRSAGHIALHATLSSRDVDCCLIPEEDFYLRGAGGLFDFLYRRIKDNGHAVVVVAEGAGQRLIPRTTTTSASGACAGADESGNETFLDVGAWLKAEMRAWWEEEHAGEVFTVKYIDPTYMIRAVPANAGDNLYCTLLAHAAIHGAMAGYTGFVSGTINGNYAYIPMDEVAEAKNPVDTKDHKWAWSFVVYLGGHSHGRGGAALASSQERAKNSHHEFLGSFLGSKEKARDAIFYSYTKYINGFAATLEEEEAMEISKHPSVISVFPNRGHRLHTTRSWEFLGMEKDGRIRANSIWAKARFGEGVIIGNLDTGVWPEAGSFSDDGMGPAPVRWRGICQDQASDDAQVPCNRKLIGARYFNKGYLSTVGQAANPASTRDTDGHGTHTLSTAAGRFVPGANLFGYGNGTAKGGAPGAHVAAYKVCWRPVNGSECFDADIIAAFDAAIHDGVDVLSVSLGGAPAGYLRDGVAIGSFHAVRRGVTVVCSAGNSGPGAGTVSNTAPWLVTVGASTMDREFPAYLVLGNNKKIKGQSLSPVRLAGGKNYPLISSEQARAANATASQARLCMEGSLERGKVEGRIVVCMRGKNARVEKGEAVRRAGGAGLVLANDEATGNEMIADAHVLPATHVTYSDGVALLAYLNSTRSPSGFITVPDTALDTKPAPFMAAFSSQGPNTVTTQILKPDITAPGVSILAAFTGQAGPTGLAFDSRRVLFNAESGTSMSCPHVAGVAGLLKALHPDWSPAAIKSAIMTTARVKDNMRRPMSNSSFLRATPFSYGAGHVQPGRAADPGLVYDMNDTDYLGFLCALGYNSSVIATFMASGSGAQPPYACPPARRPEDLNYPSFALPHLSPSGAARTVTRRVRNVGAAPAAYVASVAEPRGVSVAVRPSRLEFTAAGEELEFAVTFRAKKGSFLAGEYEFGRLVWSDAAAGGRHRVRSPLVVRVVDKKGKNGLPIS

SEQ ID NO: 13278 - protein, 355 aa, Bradyrhizobium japonicum USDA 110
MKSFKVADFKAPLQEFDEPTPQPSGTQVLIKVKAAGVCHSDLHIWEGGYDLGHGRKPLSLKDRGINLPLTMGHETVGEIVAFGPDVKPTDQGDLRLGDVGLVYPWIGCGKCATCLGGDENMCLTPRSLGVYCDGGYSDHMLVPHPRYLLNLKGLDPATTAPYACSGVTTYSALKKVEQHFDTPIVMFGAGGLGLMALSLLKAMGGKGAIMVDIDARKREAAEKAGALATVDPKAPDALEQLAKKAGGPIRAVIDLVGNAATTQLGFDCLTKGGKLVIVGLFGGGATWALPLIPIKAVTIQGSYVGNLRETQELLDLVRTKNVPPIPVTRQPLAKANDALVQLQQGAVVGRTVLTP

SEQ ID NO: 13279 - protein, 484 aa, Streptomyces peucetius
MSPSTRSETADPQPPGERGTMSPTLSGHLRRPPGPAGYPVVGCGPDLVRDLVGTFTRAWREYGDIVSFRLPGKRNLFLIVHPDHIKHVLDDRQPNYPKDPLSVGKFEPWVGQGLFTSNGDFHFRQRRLAQPAFKGSRISGFGPAMVEATSDLVRDWHGRATREETFDITPEMFRLALTIVMQTLFSTDVSNRAGELARAVRICNAYTNVRLQRFVELPQALPSKARSRFLRARATLDSFVYGLIAERRRDPAPPDDLLTRFLNAQDEQTGERMSDKQLRDEVVTMFLGGYETTALSLVWAFSLLSRHPEAERKVRSEVAEVCGDREPAASDLPRLRYLRAFYQEVLRLYPSVWTLSRSPLEDDEIGGYHIPAGSQVFISPYLMHRHPGFWENPEGFRPERFEKSATGGAPLYAYIPFSRGPRLCPGSSVAVLEAPLVIARMLQDYRLTLAGGHVCEPTSNVFLYPRAGMPMRLQHFKSTGEGAA

SEQ ID NO: 13280 - protein, 551 aa, Streptomyces coelicolor A3(2)
MNADGRTRLHQTPEWAALVKHREQLGEVRLREMFAADPGRGTGWTLRVGDLHVDYSKHLVTDETLALLQELAAATGVSGLRDAMFRGERINITEDRAVLHTALRAPRDAVIEVDGENVVPQVHAVLDKMAGFADRVRTGEWTGHTGRRIRNVVNIGIGGSDLGPAMAYEALRAFTDRSLTLRFVSNVDGADLHEAVRDLDPAETLFIIASKTFTTIETITNATSARSWLLAGLGGDEKAVAKHFVALSTNAEKVADFGIDTANMFEFWDWVGGRYSFDSAIGLSLMIAIGPDRFREMLDGFHLVDEHFRTAPAESNVPLLMGLLGVWYGSFLGAQSHAVLPYSHYLSKFTAYLQQLDMESNGKSVDREGKPVQWQTGPVVWGTPGTNGQHAYYQLIHQGTKLIPADFIGFARPVDELSEELKSQHDLLMANFFAQTQALAFGKTPDEVRAEGVPEELVPHKTFPGDHPTTTILARELTPSVLGQLVALYEHKVFVQGAIWNIDSFDQWGVELGKVLAKRVEPALTEGADVPGLDPSTGALVAAYRELRGRR

SEQ ID NO: 13281 - protein, 501 aa, ASPERGILLUS NIDULANS FGSC A4
MATKEGKSNKLSFQLKTPKGTRDLSYRLPLTYAFNSESIFSAITEVFKRHGGTQLDTPVFELKEILAGKYGEDSRLIYDLADQGGEDSALRYDLTVPLARWLAMNTSVQHIKRFQIAKVYRRDQPAVAKGRMREFYQCDFDIAGSYDPMIPDAEVLRIVVEVFEALNMRDYITIKLNHRKILDGLFGACGVPGDKIRSISSAVDKLDKLPWEQVKLEMEEKGLAPEVADKVGQYVKLSGGRDILDTIRSDDLLSTNENVMKGVEDMELLFKYLEAFDVLDKISFDLSLARGLDYYTGLIYEVVTPLSSAEGFAQSQKKSKSKSNGEDQNIGVGSIAAGGRYDDLVNMFAKKRQIPCVGISFGVDRIFTIMKQRLENEAKEGNASMRASEVDVFVMAFGGKGFNGLLLERMSVANQLWKAGIKAEFAQTVKPKLPQQFKLAEAGGIPLAVILGEDELAAGKVKLKELGLPEGHPEKDGTLISREDLVEEIKKKLNKISLPIR

SEQ ID NO: 13282 - protein, 1025 aa, Ralstonia metallidurans CH34
MTPLTRKRANNGANDGANHRADHGQTGRLTSRLADSSSQSQSQSQSSGRLSARLAAGLAGAMPTMDRRSFLKRSGIGVGAGLAATQLTMMRRADADDGKGGAGGKGDIVVRRTVCGHCSVGCAVDAVVQNGVWVRQEPVFDSPINLGAHCAKGAALREHGHGEYRLKYPMKLVNGKYQRISWDQALDEISAKLKQIRQETGPDSLFFIGSSKHSNEQSYLLRKWVSFFGTNNTDHQARICHSTTVAGVANTWGYGAMTNSYNDMQNAKAALYIGSNAAEAHPVSMLHLLHAKESGCKVIVVDPRYTRTAAKSDHYVRIRSGTDIAFLFGVLYHIFQNGWEDKKYLSDRVYGMDKVKEEVLAKWTPDKVEEVCGVPEAEVRYVAETMAKNRPSTLVWCMGQTQHTIGNAIVRASCIVQLALGNIGVSGGGANIFRGHDNVQGATDVGPNPDSLPGYYGLAAGAWKHFAAVWGVDYEWIKKQFASQAMMEKSGTTVSRWIDIVTEKPELIDQDHNVRGVFFWGHAPNSQTRGLEMKRALDKLDLLVVIDPYPSATAAMANMPATEGDTPNPNRAVYLLPACTQFETSGSCTASNRSLQWREKVIEPLFESMPDHAIMQAFAEKLGFANELSKNYKLVEVKRAGRTWREPETESILREINAGNWTIGYTGQSPERLKAHMRNMHMFDVRSLRCKGGKDPVTGYDITGDYFGLPWPCYGTPELKHPGSPNLYDTSRNVMDGGGNFRANFGVERDGVSLLAADGSHSLGADITTGYPEFDAVLLKKLGWWDELTDAEKKAADGKNWKTDLSGGIQRVVMKNHGCHPFGNARARAVVWNFPDPIPQHREPLYSTRPDMVAKYPTHDDKMAFWRLPTLYKTVQQRNIENKVYEKFPIILTSGRLVEYEGGGEETRSNPWLAELQQENFVEINPKAASERGIRNGDYCWVKTPTGARIKVRALVTERVGVDTAFIPFHFSGWWQGKDLKPYYPEGAMPIVRGEAVNTATTYGYDSVTMMQETKTTVCQIERFA

SEQ ID NO: 13283 - protein, 728 aa, Pseudomonas aeruginosa PAO1
MTSITPVTLANCEDEPIHVPGAIQPHGALVTLRADGMVLAASENIQALLGFVASPGSYLTQEQVGPEVLRMLEEGLTGNGPWSNSVETRIGEHLFDVIGHSYKEVFYLEFEIRTADTLSITSFTLNAQRIIAQVQLHNDTASLLSNVTDELRRMTGYDRVMAYRFRHDDSGEVVAESRREDLESYLGQRYPASDIPAQARRLYIQNPIRLIADVAYTPMRVFPALNPETNESFDLSYSVLRSVSPIHCEYLTNMGVRASMSISIVVGGKLWGLFSCHHMSPKLIPYPVRMSFQIFSQVCSAIVERLEQGRIAELLRVSTERRLALARRARDADDLFGALAHPDDGIAALIPCDGALVMLGGRTLSIRGDFERQAGNVLQRLQRDPERDIYHTDNWPQPSEDSPDGGDCCGVLAIRFHRQESGWIFWFRHEEVHRIRWGGKPEKLLTIGPSGPRLTPRGSFEAWEEVVRGHSTPWSETDLAIAEKLRLDLMELCLNHAAEVDRMRQRLIAVLGHDLRNPLQSISMAAALLSSSDTRTTELRQHISASSSRMERLVSQILDMSRLQSGIGLTVNPVDTDVSQLVRQIVCETDVAYPGLVIEIAIDPQVRAVVDPDRYAQVAANLLSNARHHGLPGRPVLVTLTRQGDEVCLSVLNETSGLSEAQLANLFEPFKRESADNQRNRNGLGIGLYISQAIAQAHQGRIDVDCRDDVITFCLRLPVRQAETGSSS

SEQ ID NO: 13284 - protein, 103 aa, Zea mays
RVRYTCNALVLKANQVGTVTEAIEVVKQAKDAHWGVMVSHRSGDTEDSFIADLAVGASAGQIKAGAPCRGECLTNYNQLLRIEGELGSEGVYAGENWRTVNTS

SEQ ID NO: 13285 - protein, 293 aa, Saccharopolyspora spinosa
MKGIVLAGGNGTRLHPLTQAVSKQLLPVYDKPMIYYPLSVLMLAGIRDVLLISTPADMPLFQRLLGNGSQFGIRIEYAEQSQPNGLAEAFVIGADFVGDDSVALVLGDNIFYGQGFSGILQQCVRELDGCTLFGYPVRDPQRYGVGEVDDDGRLLSIVEKPERPKSNMAITGLYFYDNDVVRIAKGLTPSARGELEITDVNLAYLQEGRAHLTKLGRGFAWLDTGTHDSLVEASQFVQVLEHRQGVRIACLEEIALRMGYISADDCFALGVKLAKSGYGEYVMDVARNSGARG

SEQ ID NO: 13286 - protein, 123 aa, Triticum aestivum
  unsure (1)..(123): unsure at all Xaa locations
MAPTVMASSATSVAPFQGLKSTAGLPVSRRSNGASLGSVSNGGRIRCMQVLAHRGHQEFETLSYLPPLSTEALLKXVDYLIRSKWVPCLQXNKVXFIFREXNASPGXYNGRIGMWKLLMFGVH

SEQ ID NO: 13287 - protein, 486 aa, Pseudomonas aeruginosa PAO1
MIKHWINGREVESKDVFENYNPATGELIGEVASGGAAEIDAAVAAAREAFPKWANTPAKERARLMRRLGELIDRNVPHLAELETLDTGLPIHQTKNVLIPRASHNFEFFAEVCTRMNGHSYPVDDQMLNYTLYQPVGVCGLVSPWNVPFMTATWKTAPCLALGNTAVLKMSELSPLTANELGRLVHEAGIPPGVFNVVQGYGASAGDALVRHRDVRAVSFTGGTATGRRIMEAAGIKKYSMELGGKSPVLVFEDADLERALDAALFTIFSLNGERCTAGSRIFVQESVYPQFVAEFAARARRLIVGDPQDPKTQVGSMITQAHYDKVTGYIRIGLEEGATLVAGGLERPAGLPAHLSKGQFIQPTVFADVDNRMRIAQEEIFGPVVCLIPFKDEAEALRLANDVEYGLASYIWTQDIGKAHRLARGIEAGMVFINSQNVRDLRQPFGGVKASGTGREGGEYSFEVFAEIKNVCISMGSHHIPRWGV

SEQ ID NO: 13288 - protein, 263 aa, Poa pratensis
MASSSSVLLVVALFAVFLGTAHGIAKVPPGPNITATYGDKWLDAKSTWYGKPTGAGPKDNGGACGYKDVDKAPFSGMTGCGNTPIFKSGRGCGSCFEIKCTKPESCSGEPVLVHITDDNEEPIAAYHFDLSGKAFGAMAKKGEEQKLRSAGELELKFRRVKCEYPEGTKVTFHVEKGSNPNYLALLVKYVTGDGDVVAVDIKEKGKDKWIELKESWGSIWRVDTPDKLTGPFTVRYTTEGGTKGEAEDVIPEGWKADTAYASK

SEQ ID NO: 13289 - protein, 229 aa, Shewanella oneidensis MR-1
MSQKMAAEFLGTLWLVLGGCGSAVLAAAFPEVGIGLLGVSLAFGLTVLTMAFAIGHISGCHLNPAVSFGLWAGGRFPTSELLPYIIAQVAGGIAGAGVLYLIASGQEGFSLAAGFASNGFGEHSPGGYSMISVMICEIVMTLFFLLVILGSTDERAPKGFAPIAIGLCLTLIHLISIPISNTSVNPARSTGPALFVGDWAVSQLWLFWAAPIIGAILAGVIYRYFNAAK

SEQ ID NO: 13290 - protein, 111 aa, Prunus dulcis
GIIVLALTATLNSSRPQPCVVGSELCQPTSILQDVVLYTGKALASIGLGGTRYALATMGANQFDKPKYQASFFNWYFFTLYSTTAVALTVIVYIEDNAGWRWGFGYVSLPT

SEQ ID NO: 13291 - protein, 529 aa, Oryza sativa
MQFSSVFPLEGKACVSPIRRGGEGSASDRLKIGDSSSIKHDRAVRRMCLGYRGTKNGAQCVLTSDAGPDTLHVRTSFRRNFADPNEVAAVILGGGTGTQLFPLTSTRATPAVPIGGCYRLIDIPMSNCFNSGINKIFIMTQFNSASLNRHIHRTYLGGGINFTDGSVEVLAATQMPGEAAGWFQGTADAVRKFIWVLEDYYKHKAIEHILILSGDQLYRMDYMELVQKHVDDNADITLSCAPVGESRASDYGLVKFDSSGRVIQFSEKPKGTDLEAMKVDTSFLNFAIDDPTKFPYIASMGVYVFKRDVLLNLLKSRYAELHDFGSEILPRALHEHNVQVKVFKLEHYYAYVFADYWEDIGTIRSFFDANMALCEQPPKFEFYDPKTPFFTSPRYLPPTKSDKCRIKDAIISHGCFLRECTIEHSIVGVRSRLNSACELKNTMMMGADLYETEDEISRLLSEGKVPIGVGENTKINNCIIDMNARVGRNVVITNSEGVQESDRPEEGYYIRSGIVVILKNATIKDGKVI

SEQ ID NO: 13292 - protein, 497 aa, Zea mays
  unsure (1)..(497): unsure at all Xaa locations
ITMDPTKFRPSSSHDTTVTTTNAGAPVWNDNEALTVGPRGPILLEDYHLIEKVAHFARERIPERVVHARGASAKGFFECTHDVTSLTCADFLRAPGVRTPVIVRFSTVIHERGSPETIRDPRGFAVKFYTREGNWDLLGNNFPVFFIRDGIKFPDVIHAFKPNPRSHVQEYWRVFDFLSHLPESLHTFFFLFDDVGVPSDYRHMEGFGVNTYTFVSAAGKAQYVKFHWKPTCGVRCILTDEEAALVGGRNHSHATQDLYDSIAAGSFPEWTLYVQVMDPXDTEEQYDFDPLDDTKTWPEDLLPLRPVGRLVLDRNVDNFFNENEQLAFGPGLVVPGIYYSDDKMLQCRVFAYADTQRYRLGPNYLMLPVNAPRCAHHNNHYDGAMNFMHRDEEVDYYPSRHAPLRQAAPPTPLPPRPVAGRREKATIRKPNDFKQPGERYRSWDADRQDRFVRRFADSLGHPKVSQELRSIWIDLLAKCDASLGMKIATRLNMKPNM

SEQ ID NO: 13293 - protein, 392 aa, Escherichia coli
KITLQNGKLNVPENPIIPYIEGDGIGVDVTPAMLKVVDAAVEKAYKGERKISWMEIYTGEKSTQVYGQDVWLPAETLDLIREYRVAIKGPLTTPVGGGIRSLNVALRQELDLYICLRPVRYYQGTPSPVKHPELTDMVIFRENSEDIYAGIEWKADSADAEKVIKFLREEMGVKKIRFPEHCGIGIKPCSEEGSKRLVRAAIEYAIANDRDSVTLVHKGNIMKFTEGAFKDWGYQLAREEFGGELIDGGPWLKVKNPNTGKEIVIKDVIADAFLQQILLRPAEYDVIACMNLNGDYISDALAAQVGGIGIAPGANIGDECALFEATHGTAPKYAGQDKVNPGSIILSAEMMLRHMGWTEAADLIVKGMEGAINAKTVTYDFERLMEGAKLLK

SEQ ID NO: 13294 - protein, 395 aa, Helicobacter hepaticus ATCC 51449
MKKTTYAKRVELLGESTTIAISTLARELKAAGQDILSFSAGEPDFDTPEIIKDEAIRALKSGFTKYTAVAGIPELLEAIKDKLLRENTLAYERNEILVSNGAKHSLFNVFQALVDKDDEVIIPSPYWVTYPELVTFSGGKSVIVQTTQANNFKITPKQLREAITPKTKVFVLNTPSNPTGMVYTKEELESLAEVLKDTNIWVVSDEMYEKLVYGVKFFSVAAVNEDMMQRTITINGLSKSVAMTGWRIGYLACKDKKLVKLMNNLQSQCTSNINSITQKAAIVALKGEANNDIEDMRKAFEERMRFACDAINNIQNLNVCEPQGAFYLFINISTLPRYGTDSMGFCQALLKEQGVALVPGVAFGMEGFVRLSFACSLEQLKEGITRISQFVKTLF

SEQ ID NO: 13295 - protein, 436 aa, Azotobacter vinelandii
MTLRKGAGSCCPFFPLPAPSWPAAQEATLDSGDTAWMLTATALVLFMTIPGLALFYGGMVRSKNLLSVMMQCFAITGLISVLWVLFGYSLAFDTAGMEEGVLNFSSFVGGLDKAFLSGLTTDSLVGTFPESVFITFQMTFAIITPALITGAFAERMKFSSMLVFMSAWFLLVYAPIAHMVWSGNGALMWDWGVLDFAGGTVVHINAGVAGLVACLVLGKRKGYPGVAMTPHNLGYTLVGAAMLWVGWFGFNAGSRSRNGTAGMAMLVTQIATAAAALAWIPAEWLTHGKPSPGHRLRRGRAWWHHPGRGTVGPMGALVIGLASGSICFYCATAVKRRFGYDDSLDAFGVHGVGGIVGAVLTGLFAAPALGGFGEIDSIASQLWIQIKGVLFTVIYTGVATFVILKAIERVIGLRISEEEETMGLDLSLHNERGYNL

SEQ ID NO: 13296 - protein, 403 aa, Streptomyces coelicolor A3(2)
MKTIDELLSEGVAGKRVFVRADLNVPLDGTTITDDGRIRAVVPTVKALADAGARVIVASHLGRPKGAPDPAFSLAPAAARLGELLGADVAFAEDTVGSSAEAVVTGLADGGVAVIENLRFNAGETSKDDAERAAFADKLAGLADVYVGDGFGAVHRKHASVFDLPKRLPHYAGYLIATEVGVLKKLTDEVKRPYVVALGGAKVSDKLAVIDQLLGKADRLLIGGGMAYTFLKAKGYEVGISLLQEDQIPAVKEYIERAEKNGVELVLPVDVLVAPEFPDLKTKAPANPTTVAADAIPADQEGLDIGPETRKLYASKLADAGTVFWNGPMGVFEHPDYAEGTKAVAQALVDAPGFTVVGGGDSAAAVRTLGFDENAFGHISTGGGASLEYLEGKTLPGLAALED

SEQ ID NO: 13297 - protein, 462 aa, Eremothecium gossypii
MVRVLEEKYDGATVAFTFMGSALVFVMVPGLGFLYSGLARRKSALALIWVVFSALIVGIVQWYMWGFSLAFSKTAVDNKFIGNLNSFGLRDVYGKASPDADYPELVFAVFQGLFMCVTLAIIAGATAERGRLLPHMVFLFLFATVVYCPVAYWVWSPGGWAAQWGVLDWAGGGPVEILSGVGGFVYSYFLGARRESLLINFRPHNVSMVTLGTSLLWFGWLGFNGCTSLSPNLRSVYAFLNSMMSAAVGGMAWCVLDFRLERKWSTVGLCSGVISGLVAATPSSGCIPLYASLIQGVVAGVVCNFATKLKYYAKTDDSMDILAEHGIAGIIGLLFNAVFAADWVVGLDGSTEHDGGWLTQNWPQMYKQIAYIVAVSGYSILVTSIICYVLNCIPGMQLRASEAAEERGMDEDQIGEFAYDYVEVRRDYFSWGVQNDQSANPSVASSVAEKNAPGVPDDSEGK

SEQ ID NO: 13298 - protein, 412 aa, Methanosarcina acetivorans C2A
MSQKTAGKDYLTMDDVELDNKRILLRVDFNSPMDANGNILDDRKIKSHLYTLRSLENSRVVMMSHQGRPGDKDYTTLEAHAKLATELLGRKVTYEDDIFSACARNAIKSLEKGDILLLENTRFYAEENMNRAPEEQARTQMVRKLYPLFDVFINDAFSVSHRSQCSVVGFTEVLPSVAGILMDREITGLDKGLKCHEHPAVFALGGTKAKDIVKVISDILKRGGADRILTTGVVATVFMMAIGIEVGEVNRKFIEDHKYLDQVSIASRLLKEYSGKIIVPKDIALNNDGKREEVKVDKIKGDLPIADIGPETISDYSKFLKEAKLSVFHGPAGIFELESFRLGTEELLKAAAQSNYSIAGGGHTLAAIDQLGLESKYSHLSMGGGASITYLSGEHMPGIEALKNYASRCCKD

SEQ ID NO: 13299 - protein, 515 aa, Methanosarcina acetivorans C2A
MAQARRPLMLIILDGWGYREVEEGNAVLSAGTPNLDRLVKDYPWCLLEASGGAVGLPEGMMGNSEDGHLNIGAGRIVYQNLTRINISIRNGDFFKNPVFLNAISKVKANDSSLHLIGLVSCGGVHSYTPHLHALIKLAKEKGLKKVYIHAFLDGRDVPPKTALGDIKKLNEFCKEHGGAKIATVSGRYYAMDRDKRWDRTKLAYDVLTLGASQYKAPNAETAVSEAYGRGETDEFVKPTVITDHEEKPVATIRDKDSVIFFNFRADRARQLTWAFVKDDFDGFVREKRPKIYFVCMARYDEDLDLPVAFPHEELKNVLGEVLSKQGLTQLRIAETEKYAHVTFFLNGGEEKRYEGEDRCLIPSPKIATYDLKPEMSAYKITDEVVRRIQSGKYDVIVLNFANMDMVGHTGIFEAAVKAVEAVDKCIGRIVEALKEIGGVALITADHGNAEQMIDSKTGEPHTAHTSNPVRCIYFGNGEVKALKKGKLCDLAPTLLELIGIPKPQEMTGKSLLVKE

SEQ ID NO: 13300 - protein, 385 aa, Eremothecium gossypii
MRKRNGAAAPRNGSVYNGGCGQLLCRTQLQPVATMSSPSIPKTQHAIVFDKNGGPLEYREIEVPEPKPTELLINVKYSGVCHTDLHAWKGDWPLPTKLPLVGGHEGAGVVVAMGENVRGWQVGDLAGIKWLNGSCMSCEACEQGHESNCPEADLSGYTHDGSFQQYATADAVQAAHIPAGTDLAQVAPILCAGITVYKALKSANLRAGNWVAISGACGGLGSLAIQYARAMGYRVLEIDGGDEKEALFRKLGGEVFVDFRKSKDVVADVVKATGGGAHGVINVSVSEAAIESSTEYVRSNGTVVLVGLPGGAKCKSDVFNHVVKSVSIVGSYVGNRADTREALDFFARGLVQCPIKVVGLSELPDIYGKMERGEVAGRYVVDTSK

SEQ ID NO: 13301 - protein, 448 aa, Schizosaccharomyces pombe
MSSHVSNNSILDPVTFWNQANKSLIRYGGDFAPKIIVRAKGCCVYDEQDNAILDFTSGQMSAILGHSHPDITACIEKNLPKLVHLFSGFLSPPVVQLATELSDLLPDGLDKTLFLSTGGEANEAALRMAKVYTNKYECVAFSSSWHGVTGGAASLTFAAARRGYGPALPGSYTIPEPNPKLSPFRDAKGNYDWQKELDYSFYMLDKQSTGSLACMIVETILSTGGIIELPQGYLKALKKKCEERGMLLIIDEAQTGIGRTGSMFSFEHHGIVPDILTLSKSLGAGTALAAVITSEEIEKVCYDNGFVFYTTHASDPLPAAIGSTVLKVVKRDNLVEKAKISGELLRSDLLRLKDKHPLIVDVRGLGLLQGIEIASCTDPSKPSDFLGTVIGDKCLELGMNCNIVHLRGIGGVFRIAPPLTVTDEEIHKAIEIFDSALTFTAKEFSGSY

SEQ ID NO: 13302 - protein, 178 aa, Glycine max
  unsure (1)..(178): unsure at all Xaa locations
MASSMISSPAVTTVNRAGADMVAPFTDLKSMAGFPDQKTNNDITSIASNGGRVQCMQVWPPXGKKKFETLSYLPXLNNTQLAKEVEYLLRKGWIPCLKFKLKHGFIYQEHNKSPKYYNGHYXTMXKLPMFDCTDASQVLKELQEAKTAYPNNFIHIIKFHNIHQMQYISFITYEPPSF

SEQ ID NO: 13303 - protein, 179 aa, Gossypium herbaceum
GAWTAEEDRKLAEVITVHGAKRWKTIPSIAGLNRCGKSCRLRWMNYLRPNIKRGNISDQEEDLILRLHKLLGNRWSLIAGRLPGRTDNEIKNYWNSHLSKKVNQKEKHRGASARQGCKFAQQRLVENAKEQVREENTSTGFGESNISFDVDDFFDFSNVDTRNFEWVNRFLEVDDGFKF

SEQ ID NO: 13304 - protein, 489 aa, Oryza sativa
REQAEEAIVADSNGKEEEVGVMGVSAGEHGADDHHGGGGKFSMKNLLWHGGSVWDAWFSCASNQVAQVLLTLPYSFSQLGMLSGVLLQLFYGFMGSWTAYLISVLYVEYRSRKEKEGVSFKNHVIQWFEVLDGLLGPYWKAAGLAFNCTFLLFGSVIQLIACASNIYYINDRLDKRTWTYIFGACCATTVFIPSFHNYRIWSFLGLGMTTYTAWYLAIAALLNGQAEGITHTGPTKLVLYFTGATNILYTFGGHAVTVEIMHAMWKPAKFKYIYLLATLYVFTLTLPSASAMYWAFGDELLTHSNAFSLLPKTGWRDAAVILMLIHQFITFGFACTPLYFVWEKVIGMHDTKSICLRALARLPIVVPIWFLAIIFPFFGPINSAVGALLVSFTVYIIPALAHILTYRTASARMNAAEKPPFFLPSWTGMFVLNMFIVVWVLVVGFGLGGWASMVNFIRQIDTFGLFAKCYQCPKPAPALAQSPVPLPHH

SEQ ID NO: 13305 - protein, 188 aa, Triticum aestivum
  unsure (1)..(188): unsure at all Xaa locations
MAPSLLAEDRLLDFVASLVTKQAGFFDEAVVLSFWDIPFLVSGAVVSADVLLKTIYVFGFGVPLFIDADQGTGGXWGLWILHKLVLTGVYGLIIFMHHSRWKDRLPAKPAYYQYVCAMLALNGLSLFGCFLVACGAGFGLWLYNFTAVCYHALYLPLLYVTFMADFFQEEDMLLENVKDAGFFDADWD

SEQ ID NO: 13306 - protein, 232 aa, Methanothermobacter thermautotrophicus str. Delta H
MVSLEDAVIARLESHGERFEVLVDPDLAAEFRREDSDVSVEDVLAVQEVFRDARKGDKASEEAMRKVFETADPLEVTPVILRRGTIQLTAEQRRQMIEDKRLKIINKIAREAINPQNGLPHPPKRIEKAMEEARVHVDPFKTVDEQVNIVLKAIRTKIPIKFEKVRVAIKIPGERAGSAYGVISNFGKITNEEWQNDGSWIAVVEIPGGLQDSFYQKLSELTGGNVETRLIK

SEQ ID NO: 13307 - protein, 437 aa, Azotobacter vinelandii
MSNPSTSIQHVAAREILDSRGNPTVEAVVTLAGGATGVASVPSGASTGSREALELRDGALRYQGKGVMKAVDNVNGAIRERVVGLDALDQRAVDQAMLERDGTDNKAILGANAILAVSLATARAAAAARGLPLYAHLAELYGSPGEYSLPVPMMNILNGGEHADNNVDLQEFMIQPVGAASFKEALRIGAEVFHTLKQVLAERGLSTAVGDEGGFAPSLSSNEEALVVIQAAVERAGYVLGQDITLALDCAASEFYHDGQYRLAGEGKAFDSRGFADYLAGLCERYPIVSIEDGLDESDWAGWAYLTEKLGDKVQLVGDDLFVTNPKILREGIERGIGNSILIKFNQIGSLSETLEAIRLAQQAGYTAVISHRSGETEDTTIADLAVATRAGQIKTGSLCRSDRVGKYNQLLRIEEALQGKAPYDASALLKRRCCSR

SEQ ID NO: 13308 - protein, 248 aa, Methanothermobacter thermautotrophicus str. Delta H
MQPLQSAGYDRAITVFSPDGRLFQVEYAREAVKRGTTSLGVKSKEGIVLVVDKRPTSKLVEPKSIEKIFQIDEHIGAATSGLVADARAIIEKARLEAQINRITYNEPIRVESLAKKICDMKQMYTQHGGVRPFGTALIIGGVNGRGCRLFETDPSGALIEYKATAIGAGRPAAMEEFEKKYSDDMNLNQAIELALDAVYEATEGKTTPESVEIAVIEAADKKYRRLPDDEIRDHVEELLIRKEKEEEE

SEQ ID NO: 13309 - protein, 496 aa, Schizosaccharomyces pombe
MSEDLFVSINFPNGKSVKQPIGLYINGEWHKSAETWETVDPSIEEVIAKVYLAGEKEIDYAVKSAKEAFKTWKKVPGSEKGELLMKLAELTEKHADTLAAIEAMDSGKPLVSNARGDVDGTIALLRYCAGWADKIYGQVIPTGPEKLAYAKRTPIGVCGQIVPWNYPLNMAGWKIAPALAAGNCIIIKSAETTPLSLLYFATLVEEAGFPKGVVNIISGLGTVAGSYMAKHPGIDKIAFTGSTKVGVIVQQLAASNLKAVTLECGGKSPFLVFEDADLDQAVKWAALGIMYNSGQICTSNSRIYVQDSVYDKFIELFKKHVIQDYIVGMPFDDNTVVGPVVNKTQYNRIKNYIEQGKKEGAKLVLGDEPLPLKQGYFISPTIFADCSENMTIVKEEIFGPVVAISKFKTEDEAIEKANNTTYGLAAMCFTKDLERAHRVSDELEAGMVFINSTENSDIQAPFGGIKMSGIGNELGSNGIEMYTQIKAVHINFNNKL

SEQ ID NO: 13310 - protein, 132 aa, Lotus japonicus
ALYQWAFAIAAAGITSGSIAERTQFVAYLIYSSFLTGLVYPIVAHWFWSSDGWGSPARTENLLFGSGVIDFAGSGVVHLVGAVAGFWGAFIEGPRMGRFDHAGKPVPLRGHSGTLVVLGTFLLWFGWYGFNP

SEQ ID NO: 13311 - protein, 429 aa, Pseudomonas putida KT2440
MAKIVDIKGREVLDSRGNPTVEADVLLDNGIIGSACAPSGASTGSREALELRDGDKSRYLGKGVLKAVANINGPIRDLLLGKDPSDQKALDRAMIELDGTENKAKLGANAILAVSLAAAKAAAQDQDLPLYAHIANLNGTPGQYSMPVPMMNIINGGEHADNNVDIQEFMVQPVGAKTFSDGLRMGTEIFHHLKAVLKARGLNTAVGDEGGFAPNLASNEDALGAIAEAVEKAGYKLGTDVTLALDCAASEFYEDGKYNLSGEGKSFDAEGFADYLKGLTERFPIISIEDGLDESDWAGWKILTDKIGEKVQLVGDDLFVTNTKILKEGIEKGIGNSILIKFNQIGSLTETLEAIQMAKAAGYTAVISHRSGETEDSTIADLAVGTAAGQIKTGSLCRSDRVSKYNQLLRIEEQLGAKAVYRGRAEFRG

SEQ ID NO: 13312 - protein, 292 aa, Sphingomonas elodea
MKGIILAGGSGTRLYPATLSISKQLLPVYDKPMIFYPLSVLMLTGIRDVLIISTPRDLPMFQALLGDGSAFGMNLSYAEQPSPNGLAEAFIIGADFVGNNPSALILGDNIYHGEKMGERCKAAAEQASQGGANVFAYHVDDPERYGVVAFDPETGVATSVEEKPAVPKSNWAITGLYFYDKDVVDIAKSIQPSARGELEITDVNRTYLERGDLHITRLGRGYAWLDTGTHDSLHDAGSFVRTLEHRTGVKIACPEEIAFENGWLGAEDLLKRARGLGKTGYAAYLRKLVAAA

SEQ ID NO: 13313 - protein, 203 aa, Chlamydomonas reinhardtii
MNPEYDYLFKLLLIGDSGVGKSCLLLRFADDTYTESYISTIGVDFKIRTVELDGKVIKLQIWDTAGQERFRTITSSYYRGAHGIIVVYDVTDQESFNNVKQWLNEIDRYASENVNKLLVGNKSDLTSKKVVEYSVAKAFADEIGIPFLETSAKNATNVEQAFMTMAAEIKNRMASQPIPTKAGGPVVRPQEGKPINSKSSSCC

SEQ ID NO: 13314 - protein, 371 aa, Pseudomonas putida KT2440
MMIKSRAAVAFEAKKPLEIVEVDVAMPKAGEVLLRVVASGVCHTDAYTLSGADPEGIFPSILGHEGGAIVEAVGEGVTSLAVGDHVIPLYTPECGKCKFCLSGKTNLCQAIRATQGKGLMPDGTTRFSYKGQQLFHYMGTSTFSEYTVLPEISVAKIQKEAPLEKVCLLGCGVTTGIGAVLNTAKVKPGDTVAIFGLGGIGLSAVIGAVKAKASRIIAIDINPAKFEIARQLGATDCVNPKDYDRPIQEVIVDLTDGGVDFSFECIGNVQLMRAALECCHKGWGESVIIGVAGAGQEISTRPFQLVTGRVWRGSAFGGVRGRSELPSYVEMSEKGEIPLDTFITHTMGLEDINKAFDLMHEGKSIRSVIHF

SEQ ID NO: 13315 - protein, 241 aa, Zea mays
MEILPIPAESFKVGFIGAGKMAESIARGVVASGVLPPNRICTAVHSNLNRRDVFESFGVNVFSTSEEVVKESDVVIFSVKPQVVKKAVTELKSKLSKNKILVSVAAGIKLNDLQEWSGQDRFIRVMPNTPAAVGEAASVMSLGTGATEEDGAIVAMLFGAVGKILKADEKMFDAVTGLSGSGPAYIFLAIEALADGGVAAGLPRELALSLASQTVLGAATMVSKTGKHPGVLKDDVTSPGC

SEQ ID NO: 13316 - protein, 201 aa, Phytophthora infestans
MNPEYDYLFKLLLIGDSGVGKSCLLLRFADDTYTESYISTIGVDFKIRTIELDGKTIKLQIWDTAGQERFRTITSSYYRGAHGIIVVYDVTDQESFNNVKQWLHEIDRYACENVNKLLVGNKSDLTAKRVVSTDAAKEFAESLGIEFLETSAKNAANVEKAFMMMAAQIKKRMANAPVAPKAGVKLTPGQQVPSNGGSKCC

SEQ ID NO: 13317 - protein, 156 aa, Zea mays
  unsure (1)..(156): unsure at all Xaa locations
KKKPPPRPALPFTARPWRPGGRHQKSAFNAPXWTTNSGAHGGNNDSSLTGGARGPILLEDYHLGEKLPNWERDRIPYRVVHPRGPSAKGFFQGTHDITHLTCADFLRAPGVQTPVIVRFWRGIHERRIPQTLRDPRGFTTKFYTRHGNCDLTTNNF

SEQ ID NO: 13318 - protein, 392 aa, Escherichia coli
KITLQNGKLNVPENPIIPYIEGDGFGVDVTPAMLKVVDAAVEKAYKGERKISWMEIYTGEKSTQVYGQDVWLPAETLDLIREYRVAIKGPLTTPVGGGIRSLNVALRQELDLYICLRPVRYYQGTPSPVKHPELTDMVIFRENSEDIYAGIEWKADSADAEKVIKFLREEMGVKKIRFPEHCGIGIKPCSEEGTKRLVRAAIEYAIANDRDSVTLVHKGNIMKFTEGAFKDWGYQLAREEFGGELIDGGPWLKVKNPNTGKEIVIKDVIADAFLQQILLRPAEYDVIACMNLNGDYISDALAAQVGGIGIAPGANIGDECALFEATHGTAPKYAGQDKVNPGSIILSAEMMLRHMGWTEAADLIVKGMEGAINAKTVTYDFERLMEGAKLLK

SEQ ID NO: 13319 - protein, 392 aa, Escherichia coli
KITLQNGKLNVPENPIIPYIEGDGIGVDVTPAMLKVVDAAVEKAYKGERKISWMEIYTGEKSTQVYGQDVWLPAETLDLIREYRVAIKGPLTTPVGGGIRSLNVALRQELDLYICLRPVRYYQGTPSPVKHPELTDMVIFRENSEDIYAGIEWKADSADAEKVIKFLREEMGVKKIRFPEHCGIGIKPCSEEGTKRLVRAAIEYAIANDRDSVTLVHKGNIMKFTEGAFKDWGYQLAREEFGGELIDGGPWLKVKNPNTGKEIVIKDVIADAFLQQILLRPAEYDVIACMNLNGDYISDALAAQVGGIGIAPGANIGDECALFEATHGTAPKYAGQDKVNPGSIILSAEMMLRHMGWTEAADLIVKGMEGAINAKTVTYDFERLMEGAKLLK

SEQ ID NO: 13320 - protein, 192 aa, Triticum aestivum
  unsure (1)..(192): unsure at all Xaa locations
MAPTVMASSATSVAPFQGLKSTAGLPVSRRSNGASLGSVSNGGRIRCMQVWPIEGIKKFETLSYLPPLSTXEALLKQVDYLIRSKWVPCLEFSKVGFIFREHNASPGXYYDGRYWTMWKLPMFGCTDATQVINEVEEVKKEYPDAYVRIIGFDNMRXVQCVSXIXFKPPGCEESGKXTGSHGPHIKPLRFQL

SEQ ID NO: 13321 - protein, 187 aa, Triticum aestivum
  unsure (1)..(187): unsure at all Xaa locations
KKVLANKLNTWSKLQEHYDAEGKNLVIKELFEKDPQRFEKYHRVFKGSDKTKSSILFDFSKNRVTDETLKLLLELAKEAKVEEMRSKMFTGEHINFTEDRAVLHIALRNLSDRPIYDNGADVMPEVREVLAHMKQFSEAVRSGEWKGYTGKTITDIVNIGIGGSDLGPVMVTXEALKPYAQEGLKGS

SEQ ID NO: 13322 - protein, 480 aa, Zea mays
  unsure (1)..(480): unsure at all Xaa locations
MQRLASSRRLLQAALAPARANSSLSAAAVAAPAPANGAFPKMPAFDYTPPPYDGPRAEEIFRKRAQFLSPSLFHFYDRPLDIVEGKMQYLFDEDGRRYLDAFGGIATVCCGHWHPDVVEAIVNQAKRIQHSTVLYLNHAIADFAEALASKMPGDLKVVFFTNSGTEANELALMIARLYTXGCNDIISLRNGYHGNAAGTMGATAQSNXKFNVVQTGVHHALNPDPFRGAFGSDGEKYARDVQEIIEFGTTGRVGGFISEAIQGVGGIVELAPGYLPVAYSMVRKAGGLCIADEVQAGVARTGSHFWGFEGHGVIPDIVTMAKGIGNGIPIGAVVTTPEIAQVLTRRSYFNRSTFAGNPVSTAGGHAVLKVLEKEKLQENAFVVGSYLKEQLNNLKDKHEIIGDVRGKGFLLGVELVTDREKKTPAKAEISRVMNHMKDMGVLVGKGGFYGNVFRITPPLCFTKEDSDFFIEVMDIALSKL

SEQ ID NO: 13323 - protein, 534 aa, ASPERGILLUS NIDULANS FGSC A4
MADGVVAGTRVEAPVTWKTYLMCAFAAFGGIFFGYDSGYINGVMAMDYFIHEFSGKVKAEYEAADNLSGYVISSSNKSLITSILSAGTFFGAIIAGDLADWFGRRTTIISGCGIFMVGVALQTASTTVALLVVGRLIAGFGVGFVSAILILYMSEIAPRKVRGAIVSGYQFCVTVGLMLASCVDYGTENRTDSGSYRIPIGLQLLWAIILAVGLFLLPESPRYYVRKGDVSSAAKVLARVRDQDVESDYVKEELAEIVANNEYEMSLIPQGGYFATWFNCFRGSIWSPNSNLRRTILGTSLQMMQQWTGVNFVFYFGTTFFTNLGTISDPFLISMITTIVNVFSTPISFYTMEKIGRRPLLLWGALGMVICQFIVAIAGVVDGSNNKTVSAQIAFICIYIFFFASTWGPGAWVVIGEIYPLPIRSRGVALSTASNWLWNCIIAVITPYMVDEDKGNLKSKVFFIWGSLCACAFVYTYFLIPETKGLTLEQVDKMMEETTPRTSSKWKPHGTFAAEMGMTEKDVTQTVEDIAKKA

SEQ ID NO: 13324 - protein, 412 aa, Bordetella parapertussis 12822
MDKADISWLLVSTLLVLMMAVPGLALFYGGLVRSKNVLSVLLQVLCTFALGLLLWFAYGYSLAFTEGNAFFGGLSRTFFSGMFTPADGTYTLSGTLTELLFASFQATFAGITCALIVGSFAERARFSAVLVFTAIWFTFAYIPIAHMVWFASETAPGLLNARGALDFAGGTVVHINAGVAGLVGAYVVGRRIGYGREAMQPHNLPMTFIGAALLWVGWFGFNAGSSLAASDGATLAFFNTMTATAGAVLGWLFTEWAVKGKPSMLGAASGAVAGLVGITPAAGLVGPVGALVIGVTAGVVCVWGVNGLKRLLRADDALDVFGVHGVGGIVGALLTGVFNAKVLGGPGLDSASAIAGQVWVQFEGVLLTIVWSAVVAWIAYKIADKLCGLRVPEDQEREGLDVTSHGESAYHS

SEQ ID NO: 13325 - protein, 504 aa, Arabidopsis thaliana
MASALSCSASDLIPLLSGGANATAAAAAAEYICGRFDTVAGKFTDAAYAIDNTYLLFSAYLVFAMQLGFAMLCAGSVRAKNTMNIMLTNVIDAAAGGLFYYLFGFAFAFGSPSNGFIGKHFFGMYDFPQPTFDYPYFLYQWTFAIAAAGITSGSIAERTQFVAYLIYSSFLTGLVYPIVSHWFWSSDGWASPARSENLLFQSGVIDFAGSGVVHMVGGIAGLWGALIEGPRIGRFGVGGKPVTLRGHSATLVVLGTFLLWFGWYGFNPGSFATIFKAYGETPGSSFYGQWSAVGRTAVTTTLAGCTAALTTLFGKRLIDGYWNVTDVCNGLLGGFAAITSGCSVVEPWAALVCGFVAAWVLMGCNRLAEKLQFDDPLEAAQLHGGCGAWGIIFTGLFAEKRYIAEIFGGDPNRPFGLLMGGGGRLLAAHVVQILVITGWVSVTMGTLFFILHKLKLLRIPAEDEIAGVDPTSHGGLAYMYTEDEIRNGIMVRRVGGDNDPNVGV

SEQ ID NO: 13326 - protein, 523 aa, Ralstonia eutropha JMP134
MADWFAENGADRVRQFSLEAAGLYLDYSKNRITPQTMQLLLQLADEAGVPARRDAMFAGEHINATEDRAALHVALRATAGAGFKVDGVPVVPAIQNVLVRMRAFSEAVRSGAWTGTTGERITDVVNIGIGGSDLGPKMVCRALSHLAHDDGHSGPRMHFVSNVDGTELAEALERLDPRRTLMIVCSKTFTTLETMANAHSARQWYLDNGVAEDQLARHFVAVSTNVDAVRAFGIDPANMFEFWDWIGGRFSLWSSVGLSTALAVGFNAFADLLAGGRAMDEHFRTAPLERNMPVVLGMLGIWYRNFFNLPTSCMAPYSTSLELFPAFLQQLEMESNGKTVQLNGRRVRTHTSPVVWGTAGTNGQHAYFQMIHQGSQIVPVDFVAPLVPPRELPGHHAKLLANCFAQAEALMRGRSAEELRAAGMTDELRIAHMVFEGNRPSNTLLMEDLTPHVLGALIALYEHRTFVQGVVWNINSFDQWGVELGKILARPIESELNGAQAGSHDASTAALIARARGVLARNG

SEQ ID NO: 13327 - protein, 433 aa, Zea mays
MGVGAEPKDQAATAAGVPAEQDEAGGKEDKAAAVSCSICLDAVLAASGERSTARLHCGHEFHLDCIGSAFNAKGVMQCPNCRKIEKGNWLYANGSRSAHDVSMDEWAHDEDLYDVSYSDMPFRFHWCPFGRLTQLPSLFEEGESSPPVTFHDFMGQHVFTEQVAVSAAAGTTNPCPYVAYLHPLTPLTSLSSSHVPDRTMDRPAYHDHWNPMAGPSDVRSMQTMQPADFHHSHWAHVPHSYGQPNSNNEQPGIPFGARAVRVDGDSQRRASVVSPSYFSNGSGSRSRPPNVPPLMPQFMRAHGSISEQYQQNSSSSLFAGAHRSGGMRPAPTPLPENPTFTLFPPGSSGHSSMETDDAGGSRFYAWEGDRFAPYPLMPVDCETSWRTSQQQSHQSTSEPTSAPRRLFGQWLAVGRPSPSPEGSSYRQLHSPRM

SEQ ID NO: 13328 - protein, 353 aa, Pseudomonas putida
MYPRNTWYVACTPDEIADKPLGRQICGEKIVFYRGHENRVAAVEDFCRTRAPLSLGYVENGNLVCGYHGLVMGCDGKTVEMPGQRVRGFPCNKTFAVVERYGFIWVWPGDQAQADPSLIPHLEWAVNDDWAYGGGLFHIGCDYRLMIDNLMDLTHETYVHASSIGQKEIDEAPPYHRHRREVLSARHMENIMAPPFWRMALRGNGLADDVPVERWQICRFTPPSHVLIEVGVAHAGKGGYHAEQHKASSIVVWNFITPETDTSIWYFWVLACNFAAQDQALTANIREGQGKIFSEDLEMLERQQQNLLAYPQRNLLKLNIDAGGVQSRKILERLIANERMPQAELIATSASPA

SEQ ID NO: 13329 - protein, 261 aa, Photorhabdus temperata
MTEKKLETSLVNAGRSRKFTQGAVNPIIQRTSSVIFDSVASKRQATHNRANGELFYGRRGTQTHFSFQEAMAELEGGAGCTLYPSGAAAISNAILSFAAAGDHILLTGSAYDPTQGFCDKILSRMNITTDYFDPMIGEEIAELIKPNTKVVFLESPGSITMEVQDIPAIVRTVRQVNPDIVIMIDNTWAAGVLFKALAFGIDISIQSGTKYIVGHSDAMLGIAVANERCWVQLRESSYLMGQMADADTVYMASRGLRGSVV

SEQ ID NO: 13330 - protein, 216 aa, Zea mays
MAGRRAEEEYDYLFKVVLIGDSGVGKSNLLSRFTRNEFCLESKSTIGVEFATRTLHVEGKTIKAQIWDTAGQERYRAITSAYYRGAVGALLVYDITKKQTFENIQRWLRELRDHADSNIVIMMVGNKSDLNHLRSVAEEDGQALAEKEGLSFLETSALEALNVEKAFQTVLSDIHQIISKKALAAQEAAGSGPPGQGTTINIADPSANTKRGCCSS

SEQ ID NO: 13331 - protein, 270 aa, Beta vulgaris
  unsure (1)..(270): unsure at all Xaa locations
AMGGLIFGYDIGISGGVTSMPDFLKKFFPSVYRKEALDKSVNQYCKFDSVTLTLFTSSLYVAALVASLVASVVTRKLGRKLSMLFGGLLFCVGAIINALAKDVAMLIVGRILLGFGVGFANQSVPLYLSEMAPYKYRGSLNIGFQLSITIGILIANVLNYFFAKIHDWGWRLSLGGAMVPAIIISIGSLLLPDTPNSMIERGKRDEALLKLKRVRGVDDVEDEFNDLVVASENSKKVEHPWRNLLQRKXRPHLTMGFXIPFFHNLLGLMX

SEQ ID NO: 13332 - protein, 297 aa, Fusobacterium nucleatum subsp. vincentii ATCC 49256
MGKIAFVYPGQGTQYVGMGKELYENNSKAKGLFDKIFSSLDIDLKKVMFEGPEDLLKRTDYTQPAIVSLSLVLTELLKEKGIEPDYVAGHSVGEFAAFGGANYLSIEDAVKLVAARGRIMREVAEKVNGSMAAVLGMDAEKIKDVLKSVDGVVEAVNFNEPNQTVIAGEKEAVEKACVVLKEAGAKRALPLAVSGPFHSSLMKEAGEQLKEEAQKYTFNIGKVKIVANTTAELLETDSEVKDEIYRQSFGPVKWVDTINKLKSLGVTKIYEIGAGKVLSGLIKKIDKEIEVENIEII

SEQ ID NO: 13333 - protein, 306 aa, Streptococcus pneumoniae
MKKVKKAVIPAAGLGTRFLPATKALAKEMLPIVDRPTIHFVIEEALRSGIEDILVVTGKSKRSIEDYFDSTFELEYSLRKQGKMELLKSVNESTDIKVHFVRQSSPRGLGDAVLQAKSFVGDDPFVVMLGDDLMDITDSTAVPLTRQLMDDYNATQASTIAVMPVRYEDVSSYGVISPRLESSNGLYSVDAFVEKPKPEEAPSNLAIIGRYLLTPEIFSILETQKPGAGNEIQLTDAIDTLNKTQSVFAREFVGKRYDVGDKFNFMKTSIDYALQHPQIKESLKNYVIALGKQLEKLDDCSSSGHL

SEQ ID NO: 13334 - protein, 357 aa, Helicobacter hepaticus ATCC 51449
MQEHKELLERREFLKTSAKFGAAVSLASLSGFALSACDSKEDLKTDSTQNLQSTEKAGKSQIQNHLQGDTMEFITLNNGVKMPILGYGVYQIDPKETQRCVEDAISVGYRSIDTAQAYFNEAEVGAAIKTALQGGLKREELFITTKLWIDNYPEEKALKACEESLRKLGLEYVDLMLLHQPYNDTYGAWRALSRFYKEGRFKAIGVSNFYPDRIMDFYLNNEIKPMINQIELHPFYQKQAEQKVNTELDIVTQSWASFAEGKNGLFTNEILRNIGEKYNKSAAQVVLRWLIQRQIVVIPKTTRKERMIENFNVFDFSLSGEDMQKIATIDTGKTLFLDHHDPQSAKFLFDYTKIHKA

SEQ ID NO: 13335 - protein, 354 aa, Eremothecium gossypii
MVYKQLYMRGTPPDLSRCITGQDIAMVMNVRTIKLNNGADMPLVGLGCWKIPNEVAAEQVYEAIKLGYRLLDGAEDYANEREVGQGIRRAIDEGLVRREELFVVSKLWNNYHRPEDVGKALQRTLSDLGLDYLDLFYIHFPLAFKFVPLEERYPAGLYTGAADEQAGRLAQEPVPLIETYRALEQLVDEGRIRAIGLSNFQGCLVQDLLRGCRIRPAALQIEHHPYLTQERLVQYAKSEGLAVVGYSSLGPQSFLELGNTAAQNAAPLLQHEVVCRIAERHTATPAEVLLRWATQRDIAVIPKSSRKERLATNLRVDEALTLADDELRELSSLNCGLRFNDPWDWSAQPLPTFI

SEQ ID NO: 13336 - protein, 375 aa, Sinorhizobium meliloti
MDVRAAVALEAGKPLEVMTVQLEGPRAGEVLVEVKATGICHTDDFTLSGADPEGLFPAILGHEGAGIVVDVGPGVTSVKKGDHVIPLYTPECRSCPSCLSRKTNLCTAIRATQGQGLMPDGSSRFSINGDKIHHYMGCSTFSNFTVLPEIALAKVNPDAPFDKICYIGCGVTTGIGAVINTAKVEIGATAIVFGLGGIGLNVIQGLRLAGADMIIGVDLNNDKKPWGEKFGMTHFVNPKEVGDDIVPYLVNLTKRGADQIGGADYTFDCTGNTKVMRQALEASHRGWGKSVIIGVAGAGQEISTRPFQLVTGRTWMGTAFGGARGRTDVPKIVDWYMEGKIEIDPMITHTMPLEDINKGFELMHSGESIRSVVLY

SEQ ID NO: 13337 - protein, 377 aa, Zea mays
AGLQEQSPITAGGGGSCDEECRWSRGPRVRDNVSRPLYDGLKCAFIFPEVACDKYGRKDVMYQHWRWQPHGHGCDIPRFDGIKLLEELRNKRLVFVGDSVNRNQWVSLVCMVEASIPDDRLKMRIFNGSLISFKALEYNATIDFYWSPLLVESNSDNPIIHRVEYRIIRADRIEKHASVWRDADVIVFNSYLWWRKQKDDMRMKVMYGSFEDGDAKLDEMEMADGFEIAIKKLTEWLAENIDKNKTRIFFAGSSPTHSWASNWGGEDKNKCLNETEPIYRPGGYYKAATTDYSLMAKARSYFQRTLEPRGIRVQILNITELSDYRKDGHPTVFRRQFVPLTKEQIADPASYADCTHWCLPGVPDVWNEFLYGYLVHV

SEQ ID NO: 13338 - protein, 296 aa, Yersinia pestis biovar Medievalis str. 91001
MKCLKAVIPVAGLGTRMLPATKAIPKEMLPVVDKPLIQYIVDECVAAGVKEIVLVSHSSKNAIENHFDTSFELEAALESRVKRQLLKEIKNICPADVTIMQVRQGHAKGLGHAVLCAKSMVGDNPFIVMLPDVLLDDSTADLSKENLASMIKRFEETGHSQIMVEPVPKADVSKYGIADCGHVALAPGESTLMTAVVEKPSIAEAPSNLAVVGRYVLSKNIWPLLEKTPRGAGDEIQLTDAIAMLMQQEPVEAFHMTGKSHDCGDKLGYMKAFVTYGVRHHTEGEKFTAWLKQQLD

SEQ ID NO: 13339 - protein, 297 aa, Yersinia pestis biovar Medievalis str. 91001
MTKLKAVIPVAGLGMRMLPATKAIPKEMLPIVDKPLIQYVVNECVAAGINEIILITHSSKNAVENHFDTSYELEAMLEARVKRQLLDEVQSICPPGVTIMHIRQGHPEGLGHAVLCAKPLVGDSPFVVLLPDVLIDDEQSDLTRDNLAQLVQRFEETGVSQVLVHSVDPETLSNYSVVSCEKSTLLPGESSRINAMIEKPQSSADLQSNLSAVGRYVLSAHIWPLLEQTKPGAWGRIQLTDAIDALAAVEAVDAVALTGKSYNCGEKLGYMQAYVAYGLRHPQQGAEFKAWLKDFVA

SEQ ID NO: 13340 - protein, 572 aa, Streptococcus pneumoniae
MSYQENYQKWVDFVELPDYLRQDLENMDEKTKEDAFYTNLEFGTAGMRGLVGAGTNRINIYVVRQATEGLARLIESKGGNEKERGVAIAYDSRHFSPEFAFESAAVLAKHGIKSYVFESLRPTPELSFAVRHLNCFAGIMVTASHNPAPFNGYKVYGEDGGQMPPHDADALTTYIRAIENPFAVEVADVETEKASGLIEVIGEAVDVEYLKEVKDVNINPALIEEFGKDMKIVYTPLHGTGEMLARRALAQAGFDSVQVVEAQATADPDFSTVTSPNPESQAAFALAEELGRQVGADVLVATDPDADRVGVEVLQKDGSYLNLSGNQIGAIMAKYILEAHKNAGTLPENAALCKSIVSTDLVTKIAESYGATMFNVLTGFKFIAEKIQEFEEKHNHTYMMGFEESFGYLIKPFVRDKDAIQAVLVVAELAAYYRSRGLTLADGIEEIYKEYGYYAEKTISVTLSGVDGAEQIKAIMAKFRNNAPKEWNETAITVVEDFKAQTATVADGTVTNLTTPPSDVLKYTLADSSWIAVRPSGTEPKIKFYIAVVGETNEESQAKIANIEAEINAFVK

SEQ ID NO: 13341 - protein, 498 aa, Glycine max
  unsure (1)..(498): unsure at all Xaa locations
MEESGDARDLQKPFLHTGSWYKMGSRQSSIMGSSTQVIRDGAVSVLFCVLIVALGPIQFGFTCGYSSPTQGAIVRDLNLSISEFSFFGSLSNVGAMVGAIASGQIAEYIGRKGSLMIAAIPNIIGWLAISFAKDSSFLYMGRLLEGFGVGIISYVVPVYIAEIAPQHLRGGLGSVNQLSITIGIMLAYLLGLFVNWRVLAILGILPCTVLIPGLFFIPESPRWLAKMGMTDEFETSLQVLRGFDTDISVEVYEIKRSVASTGKRATIRFADLKRKRYWFPLMVXYDTVVGIGLLVLQQLSGINGVLFYSTTIFANAGISSSEAATVGLGAVQVIATGISTWLVDKSGRRLLLMISSSVMTVSLLIVSIAFYLEXYLIDTXGVVSEDSHLLSMLGIVSVVGLVVMVIXFSLGLGPIPWLIMSEILPVNIKGLAGSIATMGNWLISWVITMTANLLLNWNSGXGTFTIYTVVAAFTIAFIALWVPETKGRTLEEIQFSFR

SEQ ID NO: 13342 - protein, 604 aa, Chloroflexus aurantiacus
RRVTMKPTPAGEAIQISNGRLQVPDHPIIPFVEGDGTGRDIWRASVRVFDAAVALAYGGKRKIEWLEVLAGEKAFHETGNWLPDETIETFQKYLVGIKGPLTTPVGGGIRSLNVALRKHLDLYVCQRPVRHFAGVPSPVKHPEKVDMVIFRENTEDVYTGIEYRGGSEEAAKIIAFLQREFPKDFDKIRFGTPEKTDEFRQLIGEEPEGKIEVGIGIKPISRIGTERIMAAAIQYAITYKRKSITLMHKGNIQKFTEGAFRDWAYEYAERAFGDYVYTWAQWERTKAARGEAAANAEQKEALAAGKILVKDAIADIIFQQVLTRPDEFDVIVAPNLNGDYLSDALAAQVGGIGIAPGGNINYVTGHAIFEATHGTAPKYADLDKVNPGSVILSGEMMLRYMGWTEAADLIIAGLERTIADKTVTYDFARLMEGAREVKTSEFASLIIANMEKIVAGDVPHPTPTFGPEILRRADGRVYPHGSVGAVMTRAVVAVPAEASLRETSIYMRGRGIHSVIVKPDASGEWGIMTMRDVLKKVVREGRAIDGLTVGDLTSRPLLSVSPDTPITECAALMVERNIRRLAVFENGEPVGIISETDIFSHVAE

SEQ ID NO: 13343 - protein, 491 aa, Malus x domestica
MTSILMGYDIGVMSGASIYIEKDLKVTDTQIEIMIGVIEIYSLIGSAMAGKTSDWVGRRYTIVISGAIFFIGAILMGFSTNYTFLMCGRFVAGIGVGYALTIAPVYSAEVSPTSSRGFLTSFPEVFVNIGILLGYLSNYAFSFCPLDLGWRLMLGVGAIPSVGLAVGVLAMPESPRWLVMQGRLGEAKRVLDRTSDSKEESMLRLADIKEAAGIPEECNDDIVQVSGHSHGEGVWKELLVHPTPTVRHILIAAIGFHFFQQASGIDALVLYSPRVFAKAGITSTNQLLLCTVGVGLSKTVFTLVATFFLDRVGRRPLLLTSMAGMVGALVCLGTSLTIVDQHEGVRMTWAVILCLCCVLAYVGFFSSGIGPIAWVYSSEIFPLRLRAQGCGMGVAVNRLMSGILSMTFISLYKAITMGGTFFLYAAIGTVGWIFFFTMLPETQGRTLEDMEVLFGKFHKWRKANKLLEKKKRVAHGDIGTSDPDNRAHLLA

SEQ ID NO: 13344 - protein, 175 aa, Secale cereale
  unsure (1)..(175): unsure at all Xaa locations
MAPAVMASSATTVAPFQGLKSTAGLPVGRRSGSAGLSSVSNGGRIRCMQVWPIEGIKKFETLSYLPPLSTEALLKQVDYLIRSKWVPCLEFSKVGFVFREHNNSPGYYDGRYWTMWKLPMFGCTDATQVLNEVEEVKKEYPDAYVRVIGFDNMRQVQCVSFIAFRPPXCEESGKA

SEQ ID NO: 13345 - protein, 324 aa, Zea mays
MGRPPCCDKVGVKKGPWTPEEDLMLVSYVQEHGPGNWRAVPTNTGLMRCSKSCRLRWTNYLRPGIKRGNFTDQEEKLIIHLQALLGNRWAAIASYLPERTDNDIKNYWNTHLKKKLKKMQAGEGGGGDGDGAAGASEGGAVATAGAGGKRPAVPKGQWERRLQTDIHTARQALRDALSLEPSPSAPPPAKVEPLPATAPGYKTYASSAENIARLLEGWLRPGSGGGKGPEASGSTSTTATTQQRPQCSGEGAASASASHSGGAPANAAAQTPECSTETSKVAGAGSAPPAFSMLESWLLDDGMGHGEDGLMTDVVPLGDPSEFF

SEQ ID NO: 13346 - protein, 421 aa, Coxiella burnetii RSA 493
MTKSIQAIRGMSDTLPEEIPYWSFLENACRSVVSAYHYREIRFPVVEQTALFKRTIGEATDIVEKEMYTFTDRNGDSLTLRPEGTAGCVRAGIQNGLFYNQIQRLWYLGPMFRHERPQKGRYRQFYQLGVETYGMAGAPIEAELIFMCLRLWKALGLESCIHLELNTLGTLDSRNAYRQALVTYLQSREKELDEDSRRRLHTNPLRILDSKNPDLQPLLAEAPKLIDYLDETSRRHFDQLRSLLDQAEVPFIVNPTLVRGLDYYTHTVFEWVTDQLGAQGTVCAGGRYDNLVELLGGKSTPAAGFAAGLERLVLLLRGVQECLDKIDIYVVIAGEAVIQEGLLMTEQLRNVLPEWVIEADLSGSSLKSQFKRADKSGAKWALVIGEEEIKTNTVTLKHLRETVPQKSLTRDTLIPYLKSEG

SEQ ID NO: 13347 - protein, 175 aa, Secale cereale
MAPTVMASSATSVAPFQGLKSTAGLPVSRRSNGASLGSVSNGGRIRCMQVWPIEGIKKFETLSYLPPLTTEALLKQVDYLIRSKWVPCLEFSKVGFIFREHNASPGYYDGRYWTMWKLPMFGCTDATQVINEVEEVKKEYPDAYVRIIGFDNMRQVQCVSFIAFKPPGCEESGKA

SEQ ID NO: 13348 - protein, 309 aa, Shigella flexneri 2a str. 2457T
MTQFAFVFPGQGSQTVGMLADMAASYPIVEETFAEASAALGYDLWALTQQGSAEELNKTWQTQPALLTASVALYRVWQQQGGKAPAMMAGHSLGEYSALVCAGVIDFADAVRLVEMRGKFMQEAVPEGTGAMAAIIGLDDAPIAKACEEAAEGQVVSPVNFNSPGQVVIAGHKEAVERAGAACKAAGAKRALPLPVSVPSHCALMKPAADKLAVELAKITFNAPTVSVVNNVDVKCETNGDAIRDALVRQLYNPVQWTKSVEYMAAQGVEHLYEVGPGKVLTGLTKRIVDTLTASALNEPSAMAAALEL

SEQ ID NO: 13349 - protein, 270 aa, Nostoc sp. PCC 7120
MTIKFGLIGGGVMGEALLSRLIARGIYQPSEVIVSEPQTARQAFLQQKYHVGVTTDNSLVFTQAQDVVFLAVKPQVFSAIAQELADTVFTDHSPLVVSILAGVSLSQLEAAFPQSPVIRAMPNTPATVGSGMTAICSGAYTYAQHQKLAQQIFSAVGEVVEVSESLMDAVTGLSGSGPAYVALLVEALADGGVASGLPRGIANQLALQTVLGTAQLLHESKLHPAELKDRVTSPGGTTIAGIAQLEKAGFRSALIEAVKAATWRSQELGK

SEQ ID NO: 13350 - protein, 478 aa, Arabidopsis thaliana
MASTAATAALSIIKSTGGAAVTRSSRASFGHIPSTSVSARRLGFSAVVDSRFSVHVASKVHSVRGKGARGVITMAKKSVGDLNSVDLKGKKVFVRADLNVPLDDNQNITDDTRIRAAIPTIKFLIENGAKVILSTHLGRPKGVTPKFSLAPLVPRLSELLGIEVVKADDCIGPEVETLVASLPEGGVLLLENVRFYKEEEKNEPDFAKKLASLADLYVNDAFGTAHRAHASTEGVTKFLKPSVAGFLLQKELDYLVGAVSNPKRPFAAIVGGSKVSSKIGVIESLLEKCDILLLGGGMIFTFYKAQGLSVGSSLVEEDKLELATELLAKAKAKGVSLLLPTDVVVADKFAPDANSKIVPASGIEDGWMGLDIGPDSIKTFNEALDTTQTVIWNGPMGVFEMEKFAAGTEAIANKLAELSEKGVTTIIGGGDSVAAVEKVGVAGVMSHISTGGGASLELLEGKVLPGVIALDEAIPVTV

SEQ ID NO: 13351 - protein, 153 aa, Narcissus pseudonarcissus
MCGGAIISDFIPPSRSRKLTADYLWPNLNKGKDKKKSFGFEDDFEADFNEFEDESEEGESEAVDVKPFKFGAKAGFSREGSTYLKPIELNGAAERSSKRKRKNQYRGIRQRPWGKWAAEIRDPNKGVRVWLGTFNTAEEAARAYDDEARRIRG

SEQ ID NO: 13352 - protein, 492 aa, Zea mays
MDPYKHRPSSGSNSSFWTTNSGAPVWNNNSALTVGQRGPILLEDYHLIEKLAQFDRERIPERVVHARGASAKGFFEVTHDVSHLTCADFLRAPGVQTPVIVRFSTVVHERGSPETLRDPRGFAVKFYTREGNFNLVGNNMPVFFIRDGMKFPDMVHAFKPNPKTNLQENWRIVDFFSHHPESLHMFTFLFDDVGIPLNYRHMEGFGVNTYTLINRDGKPHLVKFHWKPTCGVKCLLDNEAVTVGGTCHSHATKDLYDSIAAGNYPEWKLYIQTIDLDHEDKFDFDPLDVTKTWPEDIIPLQPVGRMVLNKNVDNFFAENEQIAFCPAIIVPGIHYSDDKLLQTRIFSYADTQRHRLGPNYLMLPVNAPKCAHHNNHHDGFMNFMHRDEEVNYFPSRFDPARHAEKVPIPPRVLTGCREKCIIQKENNFKQAGERYRSFDPARQDRFIQRWVDALTDPRVTHEHRTIWISYWSQCDAALGQKLASRLNLKPSM

SEQ ID NO: 13353 - protein, 276 aa, Fusobacterium nucleatum subsp. vincentii ATCC 49256
MKNVKLLNGVEMPILGFGVYQIPDLEECERVVSEAIGVGYRLIDTAQIYRNEKAVGNAIKKSGVDRKEFFITTKVWITNSGYEKAKTSIEESLKKLQTDYIDLLLIHQPFGDYYGTYRAMEEYYKAGKLRAIGVSNFYPDRFIDIAHFFEIKPMVNQVETHVFNQQIIPQGIMKEYGTQIESWGPFAEGKNNLFTNETLVEVGKKYNKTAAQVALRYLIQRDVVVIPKTVRKERMIQNFDIFNFELSETDMKEILKLDKKESLFLSHYETLKQLTI

SEQ ID NO: 13354 - protein, 271 aa, ASPERGILLUS NIDULANS FGSC A4
MATPQADKQAVSKAAGQSLVIEEGPLMAPGPNEILVKVEACGVCFSDVFAQNNVMGGGFPIAPGHEIVGRVADRKGSCKACRKDWYQMCDSQVINGVTKDGGYAEYCLLNPEAAVRVPAHLSAAKYVPIPCAGVSVSNSIHHMKVPVGETVAIQGLGGLGHLAIQYTNKMGFRPLGGGDEAALGGFGSPWKVVDSICLNTALRFSSGHAATPQTQKRRLPLRSCKDRLSGGRVPSSQSKRGIRINVEEDSQVPGCHYDGMIQHYGHGNEEV

SEQ ID NO: 13355 - protein, 745 aa, Pseudomonas syringae pv. tomato str. DC3000
MSQLDKDAFEVLLANCADEPIQFPGAIQPHGLLFTLKEPELTILQVSANVQSVLGKVPDQLAGQTLDCVLGAGWAEVIRSTSANDSLVDVPRLLMSVEGVEFEALLHRSQEALVLELEIQDKAAQAISYSERTGNMGRMLRQLHAAADLQTLYEVSVREIQRMTGYDRVLIYRFEEEGHGQVIAEASAPAMELFNGLFFPASDIPEQARELYRRNWLRIIPDANYTPVPLVPQLRPDTQQQLDLSFSTLRSVSPIHCQYMKNMGVLSSMSVSLIQGGKLWGLISCGHRTPLYVSHELRSACQAIGQVLSLQISAMEALEVSRQRETKIQTLQQLHQMMATSDTDVFDGLAQQPQLLMDLVGATGVAIIEDRQTHCYGNCPEPSDIRALHTWMMAGGEPVYASHHLSSVYPPGEAYQTLASGVLAMSLPKPVDNGVIWFRPEVKQSVQWSGDPNKPLNLDASDNTLRLQPRTSFEIWKVEMTGIATKWSHGDVFAANDLRRSALENDLARQVSKEQQAVRARDELVAVVSHDLRNPMTVISMLCGMMQKSFSSDGPHTSRRISTAIDTMQQAASRMNVLLEDLLDTSKIEAGRYTITPQPLEVSQIFEEAYTLLAPLAMDKSIEISFNAEPDIKVNADPERLFQVLSNLIGNAIKFTPKLGRIGVAAMSNGDEVVFTVRDSGEGIPPEQLPHIFERYWTVKEGNPTGTGLGLYISQGIIKAHGGELAAQSQVGHGSEFRFTVPIAH

SEQ ID NO: 13356 - protein, 496 aa, Streptomyces coelicolor A3(2)
MADPKGFLTTPREEWPRRPAGERVRDWDEVYVPGALLPIVGRQADRCMDCGVPFCHEACPLGNLIPEWNDLVSRSDWRAASERLHATNNFPEFTGRLCPAPCEAGCVLAINQPAVTIKNVECAIADTAWEEGFVPPLPPERLSGRTVAVIGSGPAGLAAAQQLTRAGHTVAVYERDDRIGGLLRYGIPAFKMEKRHLERRVGQMRAEGTRFRTSAAVGRDVDAAALRTRYDAVVIATGATAWRELTVPGRELAGVHQAMEYLPLANRVCEGDLERSPLSAAGRHVVVVGGGDTGADCLGTAVREGAASVTQLDIYARPGAERDERAEPWPTYPRLYRLSAAHEEARDLRSAPAADADARLFAASTLRFTGDERGHVRALHLVGVDTGRRPLPGSERSLPADLVLLALGFSGPDRHDGLVDGLGLDMEPRGTITRDRGFATNVPGVFAAGDAARGQSLVVWAIAEGRAVAAAVDRHLSGGSTRLPAPVGPYDRPMTA

SEQ ID NO: 13357 - protein, 998 aa, Pyrus pyrifolia
MLLFLPLLLLLLPPLPTTLSLNQEGLYLQHFKLSLDDPDSALSSWNDADSTPCNWLGVSCDDASSSYPVVLSLDLPSANLAGPFPTVLCRLPNLTHLSLYNNSINSTLPPSLSTCQNLEHLDLSQNLLTGGLPATLSDVPNLKYLDLTGNNFSGPIPDSFGRFQKLEVLSLVYNLIESTIPPFLGNISTLKMLNLSYNPFHPGRIPAELGNLTNLEVLWLTECNLVGEIPDSLGRLKNLKDLDLAINGLTGRIPPSLSELTSVVQIELYNNSLTGELPPGMSKLTRLRLLDASMNQLSGQIPDELCRLPLESLNLYENNLEGSVPASIANSPNLYEVRLFRNKLSGELPQNLGKNSPLKWFDVSSNQFTGTIPASLCEKGQMEEILMLHNEFSGEIPARLGECQSLARVRLGHNRLSGEVPVGFWGLPRVYLMELAENELSGPIAKSIAGATNLSLLILAKNKFSGPIPEEIGWVKNLMEFSGGDNKFSGPLPEGIARLGQLGTLDLHSNEVSGELPVGIQSWTKLNELNLASNQLSGKIPDGIANLSVLNYLDLSGNRFSGKIPFGLQNMKLNVFNLSYNQLSGELPPLFAKEIYRSSFLGNPGLCGDLDGLCDGRAEVKSQGYLWLLRCIFILSGLVFIVGVVWFYLKYKNFKKANRTIDKSKWTLMSFHKLGFSEYEILDCLDEDNVIGSGASGKVYKVILSSGEVVAVKKLWRGKVQECEAGDVEKGWVQDDGFEAEVETLGRIRHKNIVKLWCCCTARDCKLLVYEYMQNGSLGDLLHSSKGGLLDWPTRFKIALDAAEGLSYLHHDCVPPIVHRDVKSNNILLDGDFGARVADFGVAKEVDVTGKGLKSMSIIAGSCGYIAPEYAYTLRVNEKSDIYSFGVVILELVTGRLPVDPEFGEKDLVKWVCTTLDQKGVDNVVDPKLESCYKEEVCKVLNIGLLCTSPLPINRPSMRRVVKLLQEVGTEKHPQAAKKEGKLTPYYYEDVSDHGSVA

SEQ ID NO: 13358 - protein, 570 aa, Salmonella typhimurium LT2
MSEKHPGPLVVEGKLSDAERMKLESNYLRGTIAEDLNDGLTGGFKGDNFLLIRFHGMYQQDDRDIRAERAAQKLEPRHAMLLRCRLPGGVITTTQWQAIDKFAADNTIYGSIRLTNRQTFQFHGILKKNVKPVHQMLHSVGLDALATANDMNRNVLCTSNPYESQLHAEAYEWAKKISEHLLPRTRAYAEIWLDQEKVATTDEEPILGQTYLPRKFKTTVVIPPQNDIDLHANDMNFVAIAENGKLVGFNLLVGGGLSIEHGNKKTYARTASEFGYLPLEHTLAVAEAVVTTQRDWGNRTDRKNAKTKYTLERVGLETFKAEVERRAGIKFEPIRPYEFTGRGDRIGWVKGIDDKWHLTLFIENGRILDYPGRPLKTGLLEIAKIHQGEFRITANQNLIIASVPESQKAKIETLARDHGLMNAVKPQRENSMACVSFPTCPLAMAEAERFLPSFTDKVEAILEKHGIPDEHIVMRVTGCPNGCGRAMLAEIGLVGKAPGRYNLHLGGNRIGSRIPRMYKENIAEPDILASLDELIGRWAKEREAGEGFGDFTVRAGIIRPVLDPARDFWE

SEQ ID NO: 13359 - protein, 388 aa, Mycobacterium avium subsp. paratuberculosis str. k10
MSDDGNAHPEFSGLATKAIHAGYRPDPATGAVNTPIYASSTFAQDGVGALRGGYEYARTGNPTRAALEATLAAVEAGSHGRAFASGMAATDCALRAVLRPGDHVVIPNDAYGGTFRLIDKVFTRWNVEYTPVPLHQLDAVAAAITPRTRLIWVETPTNPLLSIADIAALAQLGHQHSAKVLVDNTFASPALQQPLTLGADIVLHSTTKYIGGHSDVVGGALVTNDAELDDAFGFLQNGAGAVPGPFDAYLTMRGLKTLVLRMQRHTENASAVAQFLAGHPAVSAVLYPGLPGHPGHDVAARQMSGFGGMVSVRMRGGRQAARKLCANTRVFILAESLGGVESLIEHPSAMTHASTAGSQLEVPDDLVRLSVGIEDVDDLLADLDRALS

SEQ ID NO: 13360 - protein, 998 aa, Pyrus pyrifolia
MLLFLPLLLLLLPPLPTTLSLNQEGLYLRHFKLSLDDPDSALSSWNDADSTPCNWLGVECDDASSSSPVVRSLDLPSANLAGPFPTVLCRLPNLTHLSLYNNSINSTLPPSLSTCQTLEHLDLAQNLLTGALPATLPDLPNLKYLDLTGNNFSGPIPDSFGRFQKLEVLSLVYNLIESTIPPFLGNISTLKMLNLSYNPFHPGRIPAELGNLTNLEVLWLTECNLVGEIPDSLGRLKNLKDLDLAINGLTGRIPPSLSELTSVVQIELYNNSLTGELPPGMSKLTRLRLLDASMNQLSGQIPDELCRLPLESLNLYENNLEGSVPASIANSPNLYEVRLFRNKLSGELPQNLGKNSPLKWFDVSSNQFTGTIPASLCEKGQMEEILMLHNEFSGEIPARLGECQSLARVRLGHNRLSGEVPVGFWGLPRVYLMELAENELSGPIAKSIAGATNLSLLILAKNKFSGPIPEEIGWVKNLMEFSGGDNKFSGPLPEGIARLGQLGTLDLHSNEVSGELPVGIQSWTKLNELNLASNQLSGKIPDGIANLSVLNYLDLSGNRFSGKIPFGLQNMKLNVFNLSYNQLSGELPPLFAKEIYRSSFLGNPGLCGDLDGLCDGRAEVKSQGYLWLLRCIFILSGLVFIVGVVWFYLKYKNFKKANRTIDKSKWTLMSFHKLGFSEYEILDCLDEDNVIGSGASGKVYKVILSSGEVVAVKKLWRGKVQECEAGDVEKGWVQDDGFEAEVETLGRIRHKNIVKLWCCCTARDCKLLVYEYMQNGSLGDLLHSSKGGLLDWPTRFKIALDAAEGLSYLHHDCVPPIVHRDVKSNNILLDGDFGARVADFGVAKEVDVTGKGLKSMSIIAGSCGYIAPEYAYTLRVNEKSDIYSFGVVILELVTGRLPVDPEFGEKDLVKWVCTTLDQKGVDNVVDPKLESCYKEEVCKVLNIGLLCTSPLPINRPSMRRVVKLLQEVGTEKHPQAAKKEGKLTPYYYEDVSDHGSVA

SEQ ID NO: 13361 - protein, 987 aa, Pyrus pyrifolia
LPTLPTTLSLNQEGLYLQHFKLSHDDPDSALSSWNDADSTPCNWLGVECDDASSSSPVVRSLDLPSANLAGPFPTVLCRLPNLTHLSLYNNSINSTLPPSLSTCQNLEHLDLSQNLLTGGLPATLSDVPNLKYLDLTGNNFSGPIPDSFGRFQKLEVLSLVYNLIESTIPPFLGNISTLKMLNLSYNPFHPGRIPAELGNLTNLEVLWLTECNLVGEIPDSLGRLKNLKDLDLAINGLTGRIPPSLSELTSVVQIELYNNSLTGELPPGMSKLTRLRLLDASMNQLSGPIPDELCRLPLESLNLYENNFEGSVPASIANSPHLYELRLFRNRLTGELPQNLGKNSPLKWLDVSSNQFTGTIPASLCEKRQMEELLMIHNEFSGEIPARLGECQSLTRVRLGHNRLSGEVPVGFWGLPRVYLMELVENELSGTIAKTIAGATNLTLLIVAKNKFWGQIPEEIGWVENLMEFSGGENKFSGPLPESIVRLGQLGTLDLHSNEISGELPIGIQSWTKLNELNLASNQLSGKIPDGIGNLSVLNYLDLSGNRFSGKIPFGLQNMKLNVFNLSNNRLSGELPPLFAKEIYRSSFLGNPGLCGDLDGLCDGRAEVKSQGYLWLLRCIFILSGLVFIVGVVWFYLKYKNFKKANRTIDKSKWTLMSFHKLGFSEYEILDCLDEDNVIGSGASGKVYKVILSSGEVVAVKKLWRGKVQECEAGDVEKGWVQDDGFEAEVETLGRIRHKNIVKLWCCCTARDCKLLVYEYMQNGSLGDLLHSSKGGLLDWPTRFKIALDAAEGLSYLHHDCVPPIVHRDVKSNNILLDGDFGARVADFGVAKEVDVTGKGLKSMSIIAGSCGYIAPEYAYTLRVNEKSDIYSFGVVILELVTGRLPVDPEFGEKDLVKWVCTTLDQKGVDNVVDPKLESCYKEEVCKVLNIGLLCTSPLPINRPSMRRVVKLLQEVGTEKHPQATKKEGKLTPYYYEDVSDHGSVA

SEQ ID NO: 13362 - protein, 335 aa, Glycine max
  unsure (1)..(335): unsure at all Xaa locations
MALPPLCILLFLVFLLSATSTQQEEEFTEELLLKPLPDRKVLAHFHFQSDSPPLAAADESSSFDRHHHLFPKSISQLVQKYHIKAMELSFTQGRWNYERWGGFDSISSCNAKPPGVELWAVFDVPPHQVDASWKNLTHSLSGLFCASINFLXESSTSYSDPEWAFQSALGSXRNGTPPREAVCTENLTPWLKLLPCRDKAGLSSLMXRPSIYKSFYHSQQLHLTMSTDPSDGSRTGIIXEQTLTVVLQPNDQKAGMSHLSKTKIQPSWSLXSSIFGRKISGRCVLAKLSNVYLHAERSLVNQLENLQKNTVKFAANDTGLEDFRRNAGFPSVVFS

SEQ ID NO: 13363 - protein, 234 aa, Hyacinthus orientalis
MGRGKIEIKRIENTTNRQVTFCKRRNGLLKKAYELSVLCDAEVALIVFSTRGRLYEYSNNSIKSTIERDKKACADSSSSSAVIEVNTQRYYQQEASKLRQQIQILQNANRHLMGESLDPLNVKELKQLETRLERGITRVRSKKHELLFAELEYMQKREVELQTDNMYLRAKIGENERAHQASVVQAGTEFDALPTFDSRNYYQVHMLQAASHYSHHQDQTALHLGYETKADPSA

SEQ ID NO: 13364 - protein, 261 aa, Oryza sativa
  unsure (1)..(261): unsure at all Xaa locations
FGSSYLYESSSLHGFFIPISSRHYTYNRKQKSLGLLCTNFLSLYNRDTVHLIGLDDAATRLGVERRRIYDIVNVLESIGVLSRKAKNQYTWRGFAAIPLTLQDLKEEGLKENSNSLRGPGNHDKVSDDEDDEETQSNPAATGSQSDKLNPNSTLPKPLKNENRREKSLALLTQNFVKLFVCSNVELISLDEAAKLLLGDAHNTSVMRTKVRRLYDIANVLSXMNLIEKTHTMDTRKPAFRWLXSEGKTWDETLHISNLNDS

SEQ ID NO: 13365 - protein, 348 aa, Mucor circinelloides
MSEETFTAWACKSKSAPLEPMEMTFCHWDDDMVQMDVICCGVCGTDLHTVDEGWGPTEFPCVVGHEIIGNVTKVGKNVTRIKVGDRCGVGCQSASCGKCDFCKKGMENLCSTHAVWTFNDRYDNATKDKTYGGFAKKWRGNQDFVVHVPMDFSPEVAASFLCGGVTTYAPLKRYGVGKGSKVAVLGLGGLGHFGVQWAKAMGAEVVAFDVIPDKVDDAKKLGCDDYVLMQKEEQMEPHYNTFTHILATKIVNKCWDQYFKMLKNNGIFMLCDIPEVPLSGMSAFVMAGKQLTIAGTFIGSPSVIQECLDFAAKHNVRTWVNTFPMEKINEAFEFVRQAKPRYRAVVMN

SEQ ID NO: 13366 - protein, 310 aa, Hevea brasiliensis
MDRGIEILSPASYLQNSNWLFPETRATKWTPEENKQFENALALYDKDEPDRWQRVAAVIPGKTVGDVIKQYRELEEDVSDIEAGLIPIPGYSSSDAFTLEWFNNNQGYDGFRHYYTPGGKRTTAARSSEQERKKGVPWTEEEHRQFLMGLQKYGKGDWRNISRNFVTTRTPTQVASHAQKYFIRQSTGGKDKRRSSIHDITTVNLPDTKSPSPDEKKSSPDHSTTSLQSQPQQKMVGMAKGLIDWKPQNEGGGAAGVFSQANGNLLMAPLCGISSYGQKLQEQNLLRGTLPGYQFAPYNLIFQMQPMQRQ

SEQ ID NO: 13367 - protein, 457 aa, Escherichia coli O157:H7 EDL933
MQKYISEARLLLALAIPVILAQIAQTAMGFVDTVMAGGYSATDMAAVAIGTSIWLPAILFGHGLLLALTPVIAQLNGSGRRERIAHQVRQGFWLAGFVSVLIMLVLWNAGYIIRSMENIDPALADKAVGYLRALLWGAPGYLFFQVARNQCEGLAKTKPGMVMGFIGLLVNIPVNYIFIYGHFGMPELGGVGCGVATAAVYWVMFLAMVSYIKRARSMRDIRNEKGTAKPDPAVMKRLIQLGLPIALALFFEVTLFAVVALLVSPLGIVDVAGHQIALNFSSLMFVLPMSLAAAVTIRVGYRLGQGSTLDAQTAARTGLMVGVCMATLTAIFTVSLREQIALLYNDNPEVVTLAAHLMLLAAVYQISDSIQVIGSGILRGYKDTRSIFYITFTAYWVLGLPSGYILALTDLVVEPMGPAGFWIGFIIGLTSAAIMMMLRMRYLQRLPSAIILQRASR

SEQ ID NO: 13368 - protein, 492 aa, Ipomoea batatas
MDPSKYRPSSSFNTPFCTTNSGAPVWNNTCALTVGSRGPILLEDYHLVEKIQNFTRERIPERVVHARGASAKGFFEVTHDITHLTCADFLRAPGVQTPLIVRFSTVIHERGSPETIRDPRGFAVKMYTRGGNWDLVGNNFPVFFIRDGTQFPDVIHAFKPNPKSHIQENWRILDYLSHLPESLNTFAWFYDDVGIPTDYRHMEGFGVHTFTMINKEGKANYVKFHWKPTCGVKCLLEEEAIRIGGENHSHATQDLYESIAAGNYPEWKLYIQVMDPDHEDRFDFDPLDTTKIWPEELIPLQPVGRMVLNKNIDNFFAENEMLAMDPAHIVPGIYFSDDKMLQARVFAYADTHRHRLGPNYMLLPVNAPKCAHHNNSYDGYMNFVHRDEEVDYFPSKFDNTRNAERFPTPLRIVTGQRDKCVIEKENNFKQPGDRYRSWAPDRQDRFINRWVKALSEPRVTHEIRSTWISYLTQADRSLGQKVASRLNIRPTM

SEQ ID NO: 13369 - protein, 422 aa, Arabidopsis thaliana
MESGLISVDRWRNGSQAYFLTHIHSDHTRGLSGGWSQGPLYCSRTTASLFPSRFPGFDLSLLRVVPLFSWTSLSLRSPSSGSTVRLHLMAIDAHHCPGSIMFLFRGDFGCFLYTGDFRWDSDASDEARTTLVAAIDEFPVDILYLDNTYCNPIYSFPSRLVAVQLVADIIASHPSHDIIIAVDSLGKEDLLVHVSRILNIKIWVWPERLRTMHLLGFQDIFTTDTSLTRVRAVPRYSFSIQTLEGLNTMCPTIGIMPSGLPWVKRPFKGDDKLSGSFLTASMKNETVSAKKELEAAAVHKFHDYMYSVHYSDHSCYEEIGEFIKLVKPKSMKGIVVSSSSYVDPLYYFGRICGANQPPQVLLMRPDIAEEFRAVRIKSYSASDKTRMLAKEKRWKRDSHSSLKRNKKRARIQVKCAKILEVD

SEQ ID NO: 13370 - protein, 259 aa, Bacteroides fragilis
MNRFENKIIIITGAAGGIGASTTRRIVSEGGKVVIADYSREKADQFAAELSNSGADVRPVYFSATELKSCKELITFTMKEYGQIDVLVNNVGGTNPRRDTNIETLDMDYFDEAFHLNLSCTMYLSQLVIPIMSTQGGGNIVNVASISGITADSNGTLYGASKAGVINLTKYIATQTGKKNIRCNAVAPGLILTPAALNNLNEEVRKIFLGQCATPYLGEPQDVAATIAFLASEDARYITGQTIVVDGGLTIHNPTINLV

SEQ ID NO: 13371 - protein, 504 aa, Bifidobacterium adolescentis [sequence omitted]

SEQ ID NO: 13372 - protein, 676 aa, Arabidopsis thaliana
MTRDDKFPIVYSLLLIVLLFVSPIYGDGDADALLKFKSSLVNASSLGGWDSGEPPCSGDKGSDSKWKGVMCSNGSVFALRLENMSLSGELDVQALGSIRGLKSISFMRNHFEGKIPRGIDGLVSLAHLYLAHNQFTGEIDGDLFSGMKALLKVHLEGNRFSGEIPESLGKLPKLTELNLEDNMFTGKIPAFKQKNLVTVNVANNQLEGRIPLTLGLMNITFFSGNKGLCGAPLLPCRYTRPPFFTVFLLALTILAVVVLITVFLSVCILSRRQGKGQDQIQNHGVGHFHGQVYGQPEQQQHSEKSSQDSKVYRKLANETVQRDSTATSGAISVGGLSPDEDKRGDQRKLHFVRNDQERFTLQDMLRASAEVLGSGGFGSSYKAALSSGRAVVVKRFRFMSNIGREEFYDHMKKIGRLSHPNLLPLIAFYYRKEEKLLVTNYISNGSLANLLHANRTPGQVVLDWPIRLKIVRGVTRGLAYLYRVFPDLNLPHGHLKSSNVLLDPNFEPLLTDYALVPVVNRDQSQQFMVAYKAPEFTQQDRTSRRSDVWSLGILILEILTGKFPANYLRQGKGADDELAAWVESVARTEWTADVFDKEMKAGKEHEAQMLKLLKIGLRCCDWDIEKRIELHEAVDRIEEVDRDAGGGQESVRSSYVTASDGDHRSSRAMTEEFSLM

SEQ ID NO: 13373 - protein, 568 aa, Glycine max
MASSTLICDTQQWKELKAHAEDVEKTHLRDLLSDDERSQSMVVEFDGILLDYSRQQATLETREKLFKLAEVTSLKQKINQMYNGEYINSTENRSVLHVALRAPRDAVIQSDGNNVVPDVWNVLDKIQEFSERVRSGSWVGATGKELKDVVAVGIGGSFLGPLFVHTALQTDPEAIESARGRQLRFLANVDPIDVARNITGLNPETTLVVIVSKTFTTAETMLNARTLREWISNALGPLAVAKHMVAVSTNLTLVEEFGIDPNNVFAFWDWVGGRYSVCSAVGVLPLSLQYGFSVIEKFLKGASSIDQHMYSEPFERNLPVLLGMLSVWNVSFLGYPARAILPYSQALEKFAPHIQQVSMESNGKGVSIDGVPLPFEAGEIDFGEPGTNGQHSFYQLIHQGRVIPCDFIGVVKSQQPVYLSGEVVSNHDELMSNFFAQPDALAYGKTAEQLQKENVPPHLVPHKTFSGNRPSLSLLLPSLNAYNIGQLLAIYEHRVAVEGFIWGINSFDQWGVELGKSLASQVRKQLNASRTKGEPVQGFNFSTTAMLTRYLQASADVPADLPTRLPQI

SEQ ID NO: 13374 - protein, 560 aa, Pseudomonas sp.
MTKLQIVGMTCASCVEHVKEALEKIPGVHRADVSYASGKAELKVDEGVSREQMQAAVEALGYRAAFEDATAPTRSGLLDKARGWLSGSIGAGKDGDRLHVAVIGSGGAAMAAALKAVEGGARVTLIERGIIGGTCVNVGCVPSKIMIRAAHVAHLRRESPFDAGLSTTSLTVLRERLLAQQQGRVDELRHAKIEGILESTPAITLVRGTARFQDGRTLSVELAEGGERIVAFDRCLIATGASPAVLPIPGLKDTPYWTSDEALASDTIPKRLAVIGSSVVAVELAQAFARLGSKVTVLARSTLFFREDPAIGEALTAAFRMEGIEVLEHTQASQVSHVDGEFILSTNHGELHADRLLVATGRTPNTQGMNLQGAGVKLDERGAIQIDSGMRTSAPDIYAAGDCTDQPQFVYVAAAAGTRAALNMTGGEAKLNLDAMPAVVFTDPQVATVGYSEAEAHHAGIETDSRTLTLDNVPRALANFDTRVSSSWSSEEGSGRLIGVQAVAPEAGELIQTAAIAIRARMTVQELADQLFPYLTMVEGLKLAAQTFAKDVKQLSCCAG

SEQ ID NO: 13375 - protein, 149 aa, Pseudomonas syringae pv. maculicola
AETRDLLVSLAGEVGLKEAIKAQYDGELVNSSEGRPALHTALRRPVGDKLKVNGVDVMPDVHRVLNQMTELVGRIHDGLWRGYTEKPITDVVNIGIGGSFLGPELVSEALVAYAHKGVRCHYLANIDGSEFHELSMKIRAETTLFIVSS

SEQ ID NO: 13376 - protein, 149 aa, Pseudomonas syringae pv. maculicola
AETRDLLVALAGEVGLKDAIKAQYDGELVNSSEGRPALHTALRRPVGDKLKVNGVDVIPDVHRVLNQMTELVGRIHDGLWRGYTEKPITDVVNIGIGGSFLGPELVSEALVAYAHKGVRCHYLANIDGSEFHELSMKIRAETTLFIVSS

SEQ ID NO: 13377 - protein, 470 aa, Zea mays
MAVAVPNAPGRLFLLQSTPFPNPSSSASAARAQSFRVPPLRLSLFRRMAGRSLTVIAGASGGSERDLSASAVSVEALDSIASDSDLETKEPSVSTMLTSFENSFDKYGALSTPLYQTATFKQPSATDYGTYDYTRSGNPTRDVLQSLMAKLEKADQAFCFTSGMAALAAVTHLLQAGQEIVAGEDIYGGSDRLLSQVVPRNGIVVKRVDTTKISDVVSAIGPSTRLVWLESPTNPRQQITDIKTISEIAHSHGALVLVDNSIMSPVLSRPIELGADIVMHSATKFIAGHSDLMAGILAVKGESLAKEVGFLQNAEGSGLAPFDCWLCLRGIKTMALRVEKQQANAQKIAEFLASHPRVKQVNYAGLPDHPGRALHYSQAKGAGSVLSFLTGSLALSKHVVETTKYFSVTVSFGSVKSLISLPCFMSHASIPASVREERGLTDDLVRISVGIEDVEDLIADLDRALRTGPV

SEQ ID NO: 13378 - protein, 494 aa, Pseudomonas aeruginosa PAO1
MIDLNPIQPICIAGEWRAGGGDLYESLYPATGEAVARLHAASLEDVEEAMAGAHRAFRESGWAQRKPHERATVLYRIAALIRERSEELAQLQRLDNGKPIRETRNLVASAAATFQFFAAACETLEESITPSRGDFVSMSVYEPMGVVVAITPWNSPIASEAQKLAPALAAGNAVVVKPAEITPLAALALARICDEAGLPRGLVSVLPGKGALIGDALTRHPLARRVSFTGGTRTGKHIARIAADKMMPVSLELGGKSPTMVLADADLDHAVAGVLYGIFSSSGESCIAGSRLFVASERYDEFMERLATGAAALRVGDPADERTQMGPLISARHRESVERYVEMGVAEGGRLRTGGLRPHGGAFDRGYFYTPTIIEGLTNGARLCREEVFGPVLVAMPFASEEALIEEANDSCYALAAGIWTRDFQRAWRLGRAVQAGTVWINTYKQFSISTPFGGWRDSGLGREKGRLGILQYMEQKSLYWGLNEQPLAWAGSH

SEQ ID NO: 13379 - protein, 565 aa, Streptomyces peucetius
MAASPEKPASVTPRRKAGRHRGEGQWAMGHHTPLNGNEQTKKDDDGLNVRTRIETIYAHRGFDSIDGADLRGRMRWWGLYTQRKPGIDGGKTAILEPEELDDEYFMLRVRIDGGRLTTEQLRVIGEISQEFARGTADLTDRQNVQFHWIRIEDVPEIWRRLEGVGLSTTEACGDTPRTILGSPVAGIAADEIVDGTPAIDEIHRRYIGNKDFSNLPRKFKTAVSGSPLLDVAHEINDVAFVGVDHPEHGPGFDLWVGGGLSTNPKLGVRLGAWVPVDEVPDAWEGVISIFRDYGYRRLRNRARLKFLVADWGAEKFRRVLEDEYLKRPLLDGPAPQQPAQQWRDHVGVHRQNDGRFYVGFAPRVGRVDGATLTKIAELAESHGSGRVRTTVEQKMIVLDVAEDRVDSLVSGLEALDLRVTPSPFRRGTMACTGIEFCKLAIVETKGRGSALIDELERRLPRFDEPITININGCPNACARIQTADIGLKGQLMLDDEGNQVEGYQVHLGGALGLDPAFGRKVRGLKVTSAELPDYVERVLGRFQAEREDGERFATWAARASEEALS

SEQ ID NO: 13380 - protein, 449 aa, Mycobacterium avium subsp. paratuberculosis str. k10
MARLEQTRRLVTEIPGPASLELSKRRAAAVSHAVNVSVPVFVARAGGGIVEDVDGNRLIDLGSGIAVTTIGNSAPRVVDAVRAQVAEFTHTCFMVTPYESYVAVAEMLNRITPGAGDKRSVLFNSGAEAVENAVKVARAYTRKPAVVAFDHAYHGRTNLAMALTAKSMPYKGGFGPFAPEIYRAPLSYPYRDGLLDKELATDGEKAAARAINIIDGQIGADSLAAVIIEPIQGEGGFIVPVEGFLPTLLDWCRRNDVLFIADEVQTGFARSGAMFACEHEGPNGLEPDLICTAKAIADGLPLSAVTGRAQIMDAPHVGGLGGTFGGNPLACAAALATIETIESDGLIERARQLERLITEPLLRLQARDDRIGDVRGRGAMIAIELVKSGTAEPDKDLTQRLSVAAHAAGVIVLTCGMFGNIIRLLPPLTISDELLAEGIDILGGLLADL

SEQ ID NO: 13381 - protein, 152 aa, Zea mays
  unsure (1)..(152): unsure at all Xaa locations
HSYGITNYLKPAVTRFLLHYELDFLVSAVANXPNNPFAGIDGGSKVSSKIGVIENLLAQVLILILSGRLXTTFYNAQGYSVGKYLVQEDKPDLITNVIEKAEAXKGFLFILPHXIVVADNSADNTDSNIVPPTDIPDDCMGLDASPDATKTF

SEQ ID NO: 13382 - protein, 272 aa, Pseudomonas aeruginosa PAO1
MSSTIHPLPSFGLGTFRLTGQVVVDSVRSALELGYRAIDTAQIYGNEADIGRAIAESGVPRSELFLTTKVWVDNYAREKLLASLRESLEKLRTDRLDLVLIHWPAPGNGVELGEYMAALAEAKSLGLTRRIGVSNFNIELTRQAIAAVGAGEISTNQIELSPYLQNRALTAYLEEQGIAVTSYMTLAYGKVLKDPTLAGIAARHRATVAQVALAWAMQLGYAVIPSSTRRENLASNLLARDLRLDAEDMARIAGLERNGREVSPQGLAPAWD

SEQ ID NO: 13383 - protein, 122 aa, Caulobacter crescentus CB15
MKTLSSLKVLVVEDEALVSMLVEDMLSDLGCTIVGPAAEIEEALRLAGSAEIDAALLDVNLGGRPIFPVADALKARGVPFAFASGYGEAGLTEDHRGSTVLQKPFREADLRRVLEGLVAQIA

SEQ ID NO: 13384 - protein, 481 aa, Malus x domestica
MTSILLGYDIGVMSGASLFIKENLKISDVQVEIMNGTLNLYSLIGSALAGRTSDWIGRRYTIVLAGTIFFIGALLMGFAPNYAFLMFGRFVAGVGVGYALMIAPVYTAEISPASFRGFLTSFPEVFVNIGILLGYVSNYAFSKLPIHLNWRIMLGVGAFPSVILAVGVLAMPESPRWLVMQGRLGDAKRVLQKTSESIEECQLRLDDIKEAAGIPKESNDDVVQVSKRSHGEGVWKELLLHPTPAVRHILIAALGIHFFEQSSGIDSVVLYSPRIFEKAGITSYDHKLLATVAVGVVKTICILVATVFLDKFGRRPLLLTSVAGMVFSLSCLGASLTIVDQQHGKIMWAIVLCITMVLLNVAFFSIGLGPITWVYSSEIFPLQLRAQGCSMGVAVNRVTSGVISMTFISLYKAITIGGAFFLYAGIAAVGWVFFYMLYPETQGRTLEDMEVLFGKYHKWREANALLQKAKQVDGDDKGQVH

SEQ ID NO: 13385 - protein, 104 aa, Muscari sp.
HYPATDIPQASRFLFMKNKVRMICDCSAPPVKVIHDKKLPQSLSLCGSTLRAPHGCHAQYMANMGSVASLVMSVTINDDDKLWGLVVCHHTSSRFVPFPLRYAC

SEQ ID NO: 13386 - protein, 514 aa, Zea mays
MASPRGRMSFPLRSFLMICLMAQLGASNVVLMANNTTLSFDDVEAIFTPAVKGSGVNGVLYAVEPMDACSPLRTKAIGGSVSTFALVIRGGCHFDDKVRNAQNAGFKAAVVYDTEDNGILVSMAGSSSGVHIYAVFVSKASGEELKKYSGQTDAELWIIPTYANSAWSIMAISFISLLVMSAILAACFFARRHQIRRDRARLPQTREFHGMNSRLVKAMPSLIFTKVQEDDCTSATCAICLEDYSAGEKIRVLPCRHKFHAACVDLWLTSWRTFCPVCKRDANAGTPEPPVSESTPLLSSSAIRLPEPTASVSFRSTVAAAAAASPPRPISRHPSPSRSISRKHSVSGSSIPGTPIPRFHASSSSPTCTSGSSLDLANMPSSPWPRASHLASAHSSCGGRLSPPIHIRNTSAAHVSRSAYGSPSRYVGSSHMSRGSPSCYYLGSSSGQQHPYLRHCTLSGTSLFTMVPQSPQQNQLQHGGDSEKDLSAAAPFRQLYYLQHCPDSGTSSQSLPGC

SEQ ID NO: 13387 - protein, 151 aa, Zea mays
SLAPEIVLGRGHGFPADWWALGVLIYFMLQSDMPFGSWRESELEPITKIAKGHLVMPVSFSAEVVDLITKLLVVDENARLGTSGAEAVKKHPWFDGTDWERIASGTCAAPEEITERINYCIETLNEDLSASPSVPIEDPDDLTAPEWIQDW

SEQ ID NO: 13388 - protein, 425 aa, Photorhabdus luminescens subsp. laumondii TTO1
MAKNIQAIRGMNDYLPADTVIWQRIETILKRVLAGYGYSEIRTPIVEQTPLFRRAIGEVTDVVEKEMYTFDDRNGESVTLRPENTAGCVRAGIEHGLLYNQEQRVWYLGPMFRYERPQKGRYRQFYQLGAEVFGLQGPDIDAELILLTARWWRELGIFEHVTLELNSIGSLAARANYREALVAFLEQHQDKLDEDCKRRMYSNPLRVLDSKNPEVQQLLNDAPELCDYLDAESKEHFDGLCALLDGAGIKYRINQRLVRGLDYYNRTVFEWVTTALGAQGTVCAGGRYDGLVEQLGGRPTPAVGFAMGMERLILLVQEINPAFVAERTVADVYLASFGEGSQQAALILAEQVRDTLPQLRLMMNHGGGNFKKQLGRADKQGAKIALILGEDEVRSGQVAIKDLRTGEQQTLPQSEIAARLVELLS

SEQ ID NO: 13389 - protein, 290 aa, Actinobacillus actinomycetemcomitans
MKGIILAGGSGTRLYPITRGVSKQLLPVYDKPMIYYPLSVLMLAGVRDILIITTPEDNESFKRLLGDGSEFGVNLQYAIQPSPDGLAQAFLIGERFINGDSCCLVLGDNIFYGQNFTQMLQQAVARPYGATVFGYLVKDPGRFGVVEFDENFKAVSIEEKPIQPKSNYAVTGLYFYDNRVVDFAKQVKPSARGELEITTLNEMYLKDGSLNVQLLGRGFAWLDTGTHESLHEAASFVRTIESVQGLQVACLEEIAWRNGWLTSEQVETLAGPMVKNEYGQYLLRLINEEK

SEQ ID NO: 13390 - protein, 465 aa, Oryza sativa
MAASPAAGAAAATVSSFVSPSFFSSVKASKPDRLRPARRAAAVNVRCVSSPPATETSFKTKVPRNANMAKLQAGYLFPEIARRRAAHLLKFPDAKIISLGIGDTTEPIPDVITNAMAKDGAHALSTVDGYSGYGAEQGEKKLRAAIAATYYADLGIEETDIFVSDGAKCDISRLQVLFGSNVKIAVQDPSYPAYVDSSVIMGQTGLYQEDVQKYGNIEYMKCSPENGFFPDLSSVPRTDIIFFCSPNNPTGAAASRDQLTKLVKFAKDNGSIIVYDSAYAMYISDDSPKSIFEIPGAKEVAIETASFSKYAGFTGVRLGWTVVPKELLFSDGHPVAKDFNRIVCTCFNGASNISQAGGLGCLSPEGLKAMSDVVGFYKENTKIIVDTFTSLGFNVYGAKNAPYVWVHFPGRNSWDVFAEILEKAHVVTTPGSGFGPGGEGFVRVSAFGHRENIIEAARRLKQLYK

SEQ ID NO: 13391 - protein, 99 aa, Quercus turbinella
PATDIPQAARFLFKQNRVRMICDCHAKSVRIIQSEELKQPLCLVNSTLRSPHECHAQYMDNMGSIASLVMAIIINANDSSKLWGLVVCHHTSTRYVPYP

SEQ ID NO: 13392 - protein, 117 aa, Spinacia oleracea
ASRFLYKQNRVRMIVDCHVNPVSVIQDERLQQPLCLVGSTLRAPHGCHSQYMANMGSIASLVMAVIINGSDDEAAPGGRNAMRLWGLVVCHHTSPRSIPFPLRYACEFLMQAFGLQL

SEQ ID NO: 13393 - protein, 231 aa, Chromobacterium violaceum ATCC 12472
MGEFIGTALLVLLGNGVVANVLLKNTKGHNSGLIVVAFGWAMAVFVGVFSVAAISGAHLNPAVSVALAVAGKFPWEKVPGYVAAQMLGGMAGAGLMWLIYRKHYETTDCADTKLATFCTGPAIRSLPGNLVSEIVATFVLVFAILSMVAPKMSLGAIDALPVALLVLGIGVSLGGTTGYAMSPARDLAPRIMHAILPIPGKRDSDWGYAWVPVVGSLIGGALAALAFTLPL

SEQ ID NO: 13394 - protein, 114 aa, Urtica dioica
HYPATDIPQAARFLFMKNKVRMIVDCNAKHVKVFQDEPLPLDLTLCGSTLRAPHSCHLQYMANMNSIASLVMAVVVNEGEEDGDNAQKRKRLWGLVVCHNTSPRFVPFPLRYAC

SEQ ID NO: 13395 - protein, 586 aa, Medicago sativa
MCGILAVLGCSDDSQAKRVRILELSRRLKHRGPDWSGLHQHGDNYLAHQRLAIVDPASGDQPLFNEDKSIIVTVNGEIYNHEDLRKQLPNHKFRTQCDCDVIAHLYEEYGENFVDMLDGIFSFVLLDTRDNSFIVARDAIGVTSLYIGWGLDGSVWIASELKGLNDECEHFEVFPPGHLYSSKDREFRRWYNPPWFNEAVIPTTPYDPLVLRNAFEKAVIKRLMTDVPFGVLLSGGLDSSLVAAVTARYLAGTKAAKQWGAKLHSFCVGLKGAPDLKAGREVADFLGTVHHEFQFTIQDGIDAIEDVIYHTETYDVTTIRAATPMFLMSRKIKSSGVKWVISGEGSDEIFGGYLYFHKAPNKEEFHQETCRKIKALHRYDCLRANKSTYAWGLEARVPFLDKDFIKVAMDIDPEYKMIKHEEGRIEKWILRKAFDDEENPYLPKHILYRQKEQFSDGVGYGWIDGIKDHAAKHVTDRMMLNASHIFPFNTPLTKEAYYYRMIFERFFPQNSARLTVPGGASVACSTEKAIEWDASWSSNLDPSGRAAFGVHNSAYENQVNSVAKTVEPEKIIPKMEISNLGVAIQS

SEQ ID NO: 13396 - protein, 277 aa, Beta vulgaris
  unsure (1)..(277): unsure at all Xaa locations
EDLQLLPKILTWCRXIHLFVGVVYCLISWTVGLPKRAPIDGTLLKLLIPVAVCHALGHVTSNVSFAAVAVSFTHTVKALEPFFNAAASQFILGQPIPITLWLSLAPVVIGVSMASLTELSFNWLGFISAMISNISFTYRSIYSKKAMTDMDSTNIYAYISIIALFVCLPPAIIVEGPQLIKHGFNDAITKVGLTKFVSDLFWVGMFYHLYNQLATNTLERVAPLTHAVGNVLKRVFVIGFSIIIFGNKISTQTAIGTSIAIAGVAIYSFIKAKMEEE

SEQ ID NO: 13397 - protein, 368 aa, Burkholderia fungorum LB400
MKTKAAIAWKAGAPLTIEEVDLEGPRAGEVLIEVKATGICHTDYYTLSGADPEGIFPAILGHEGAGVIVDTGPGVGTLKKGDHVIPLYTPECRQCKFCLSRKTNLCQAIRSTQGKGLMPDSTSRFSIDGKPLFHYMGTSTFSNYIVVPEIAVAKVREDAPFDKICYIGCGVTTGVGAVVYSAKVEAGANVVVFGLGGIGLNVIQGAKMVGADRIIGVDINSGRVELAKKFGMTHFINPTEVENVVDHIVQLTDGGADYSFECIGNTKVMRQALECTHKGWGQSFIIGVAAAGEEISTRPFQLVTGREWKGSAFGGARGRTDVPKIVDWYMEGKINIDDLITHRLPLERINEGFDLMKKGESIRSVVLY

SEQ ID NO: 13398 - protein, 404 aa, Vibrio cholerae O1 biovar eltor str. N16961
MQNIGMSSKLDNVCYDIRGPVLKHAKRMEEEGHKILKLNIGNPAPFGFDAPDEILVDVIRNLPTSQGYCDSKGIYSARKAVVQYYQKKGIRSLDVEDVYIGNGASELIVMAMQALLNNGDEMLVPAPDYPLWTAAVALSGGKAVHYICDEEADWYPDLDDIRSKITPKTRGIVLINPNNPTGAVYSRDFLLEIIEIARKHKLMIFADEIYDKVLYDGAVHTSIATLADDVLVVTFNGLSKAYRVCGFRGGWMFLTGPKQQAQGYIAGLDMLASMRLCANVPMQHAIQTALGGYQSINELILPGGRLLEQRDRAWELINQIPGISCVKPKGAMYLFPKIDTKMYPIKDDQKMVLDFLVQEKVLLVQGSGFNWPKPDHFRIVTLPHVEDLEIAISRFERFITTYSQ

SEQ ID NO: 13399 - protein, 989 aa, Methylobacterium extorquens
MSNGPEPHGNKIEQPEIRADERQDAGGPANGAPSTSGGAYSQGAKSGGQAAPDPSGSYGIKDAPVAPATIAFEFDGQQVEAQPGETIWAVAKRLGTHIPHLCHKPDPGYRPDGNCRACMVEIEGERVLAASCKRTPAIGMKVKSATERATKARAMVLELLVADQPERATSHDPSSHFWVQADVLDVTESRFPAAERWTSDVSHPAMSVNLDACIQCNLCVRACREVQVNDVIGMAYRAAGSKVVFDFDDPMGGSTCVACGECVQACPTGALMPAAYLDANQTRTVYPDREVKSLCPYCGVGCQVSYKVKDERIVYAEGVNGPANQNRLCVKGRFGFDYVHHPHRLTVPLIRLENVPKDANDQVDPANPWTHFREATWEEALDRAAGGLKAIRDTNGRKALAGFGSAKGSNEEAYLFQKLVRLGFGTNNVDHCTRLCHASSVAALMEGLNSGAVTAPFSAALDAEVIVVIGANPTVNHPVAATFLKNAVKQRGAKLIIMDPRRQTLSRHAYRHLAFRPGSDVAMLNAMLNVIVTEGLYDEQYIAGYTENFEALREKIVDFTPEKMASVCGIDAETLREVARLYARAKSSLIFWGMGVSQHVHGTDNSRCLIALALITGQIGRPGTGLHPLRGQNNVQGASDAGLIPMVYPDYQSVEKDAVRELFEEFWGQSLDPQKGLTVVEIMRAIHAGEIRGMFVEGENPAMSDPDLNHARHALAMLDHLVVQDLFLTETAFHADVVLPASAFAEKAGTFTNTDRRVQIAQPVVAPPGDARQDWWIIQELARRLDLDWNYGGPADIFAEMAQVMPSLNNITWERLEREGAVTYPVDAPDQPGNEIIFYAGFPTESGRAKIVPAAIVPPDEVPDDEFPMVLSTGRVLEHWHTGSMTRRAGVLDALEPEAVAFMAPKELYRLGLRPGGSMRLETRRGAVVLKVRSDRDVPIGMIFMPFCYAEAAANLLTNPALDPLGKIPEFKFCAARVVPAEAAPMAAE

SEQ ID NO: 13400 - protein, 494 aa, Sinorhizobium meliloti 1021
MTDRPTITTTAGAPVPDNQNSLTAGPRGGIMLQDYQLIEKLAHQNRERIPERVVHAKGWGAFGSLKITGDISQYTRAKCLQPGAETPMLARFSTVAGEQGAADHERDVRGFALKFYTDEGNWDLVGNNTPVFFIRDPYKFPDFIHTQKRHPKTNLRSATAMWDYWSLSPESLHQVTILMSDRGLPQTPMHMNGYGSHTYSFWNDAGERYWVKFHFKTQQGHKFFTNEEGEAVIGKTREGYQESLFYAIENGEFPRWTVQVQIMPELDVEKTPYNPFDLTKVWPHADYPPVEIGVLELNRNPENYFAEIENAAFSPSNIVPGIGFSPDKVLQARIFSYADAHRYRLGTHYEHIPVNQPRCPVHHYHRDGQMNTYGGIRTGNPDAYYEPNSFNGPAEQPLAKEPPLRIDGDMSRYDHRVGNDDYVQVRALFGLFDEGQKSRLFSNIAAAMGGVPGEIIERQLIHFARVHPEYEAGVRQALKTAHGYEADTISTAAE

SEQ ID NO: 13401 - protein, 501 aa, Pisum sativum
MAMANLARRKGYSLLSSETLRYSFSLRSRAFASGSDENDVVIIGGGPGGYVAAIKAAQLGFKTTCIEKRGALGGTCLNVGCIPSKALLHSSHMYHEAKHSFANHGVKVSNVEIDLAAMMGQKDKAVSNLTRGIEGLFKKNKVTYVKGYGKFVSPSEISVDTIEGENTVVKGKHIIIATGSDVKSLPGVTIDEKKIVSSTGALALSEIPKKLVVIGAGYIGLEMGSVWGRIGSEVTVVEFASEIVPTMDAEIRKQFQRSLEKQGMKFKLKTKVVGVDTSGDGVKLTVEPSAGGEQTIIEADVVLVSAGRTPFTSGLNLDKIGVETDKLGRILVNERFSTNVSGVYAIGDVIPGPMLAHKAEEDGVACVEYLAGKVGHVDYDKVPGVVYTNPEVASVGKTEEQVKETGVEYRVGKFPFMANSRAKAIDNAEGLVKIIAEKETDKILGVHIMAPNAGELIHEAAIALQYDASSEDIARVCHANPTMSEAIKEAAMATYDKPIHI

SEQ ID NO: 13402 - protein, 389 aa, Oenococcus oeni PSU-1
MEIGIDQISFFTPNLYLDLTELAEKRGVDPNKYLVGIGQEKQSIVPPTQDSVSMAANAASILLEQKSTEFLNSIDEILFASESGIDNSKSGAVYLQKLLNLKKNMRAIEIKQACYGGTFALMTAFDYVKLHPNKRILVVASDIARYGLKSAGEVTQGAGAVAMLVSTQPRLASYNWDSVFQSEDLMDFWRPLDQSEALVFGKMSQEIYEKFFYEIWQTYSQKNLKKVSDFAAFVFHLPFTKMGKKALDQINDQIDESKKDQLEKNRLAGQIYNRKVGNLYTGSLYLSLISLLKNNILKNNDRIAMFSYGSGAEGELYSLSLAADYRQAILGDPAQMIASRRKVSVDEYEGLFRAFPEDSEDHELTNSYDSSHFQLKRIKDHQRIYGDNF

SEQ ID NO: 13403 - protein, 989 aa, Bordetella parapertussis 12822
MLLTKKTSGAAAGASESHFIQSLRRGMAQALPTMDRRTFLRRSGLGVGAGLAATQLALVKRAEAAEGDGKVAIGNTKIEVRRTVCTHCSVGCAVDAVVENGVWVRQEPVFDSPINLGAHCAKGASVREHGHGEHRLRYPMKLVNGKYQRISWDTAYEEITAKLMQLRKESGPDSVYWIGSSKHNNEQSYLLRKFVSFWGSNNCDHQARICHSTTVAGVANTWGYGAMTNSYNDMQNSKVALYIGSNAAEAHPVSMLHMLHAKETGCKMIVVDPRFTRTAAKADQYVRIRSGTDIPFLFGLLYHIFKNGWEDQAYIDARVYGMDEVKADILAKWSPDKVEEACGVDEATMYSVAKTMHENRPGTLVWCMGQTQHSIGNAMVRASCIVQLALGNVGKSGGGANIFRGHDNVQGATDVGPNPDSLPGYYGLAEGSWKHFANTWGVDYEWIKGRYASPAMMTKPGITVSRWIDGVLENPDLIDQDTNLRAVFYWGHAPNSQTRGLEMKRAMDKLDLLVVVDPYPSATAAMAAMPGKAEDLNPNRAVYLLPAATQFETNGSCTASNRSLQWREKVIDPLWESRTDHMIMYQLAEKLGFGKELSKNYKMQKVKGMDEPVVEDILREINASVWTIGYTGQSPERLKAHMRNMHVFDVKTLRAKGGKDAETGYDLTGDYFGLPWPCWGNPSLKHPGTANLYDTSLHVMDGGGNFRANFGVERNGVNLLAADGSHSKGADLTTGYPEFDHVLLKKLGWWEDLTPEEQKAAEGKNWKTDPSGGIIRVTMKVHGCHPFGNARARAVVWNFPDAIPQHREPIYGTRPDLVAKYPTHNDLKTFWRLPTLYTSLQQKNVAEKLYEKFPIILTSGRLVEYEGGGEETRSNPWLAELQQESFVELNPKAAADRGIRNGDRVWVLTPTGARLNVQALVTERVGPDTAFMPFHFSGHWQGVDMLASYPEGAAPIVRGEAVNTGTTYGYDSVTMMQETKTTICNIEKA

SEQ ID NO: 13404 - protein, 159 aa, Arabidopsis thaliana
MSYNSYAEMSYLLKTLTTKEEIDRVIRDTIDEVLVLRFGRSSDAVCLQHDEILAKSVRDVSKFAKVALVDVDSEDVQVYVKYFDITLFPSTIFFFNAHHMKLDSGTADHTKWVGAFHIKQDFIDVVEAIYRGAMKGKMIVQCPIPPERIPKYQLVYKDV

SEQ ID NO: 13405 - protein, 513 aa, Triticum aestivum
MATTNWTLPDHPTLPKGKTVAVVVLDGWGEASPDQYNCIHVAQTPVMDSLKNGAPEKWRLVKAHGTAVGLPSDDDMGNSEVGHNALGAGRIFAQGAKLVDAALASGKIWEDEGFNYIKESFDKGTLHLIGLLSDGGVHSRLDQVQLIVKGASERGAKRIRLHILTDGRDVLDGSSVGFVETIENDLAQLREQGVDARIASGGGRMYVTMDRFENDWSVVKRGWDAQVLMELPHKFRMLLDAVEDSNSRAADHGNAEDMVKRNKAGQPMLDKSGSIQILTSHTLQPVPVAIGGPGLHPGVRFRIGMYTPGLTNTVKFGHVTFFWNGNRSGYFDETREEYVEIPSDSGITFNEQPKMKALEIAERTRDAILSGKFDQVRINLPNGDMVGHTGDIEATVVACKAADEAVKMVLDAVEQVGGIYLVTADHGNAEDMVKRNKAGQPMLDKSGSIQILTSHTLQPVPVAIGGPGLHPGVRFRSDIQTPGLANVAATVMNLHGFQAPADYETTLIEVVDK

SEQ ID NO: 13406 - protein, 102 aa, Urtica dioica
HYSATDIPQAARFLFRQNRVRIICNCNAEPVRVVQSEDLKQPMCLVNSTLRAPHGCHVQYMSNMGSMASLALAVVINQTDSSRLWGLVVCHHSSPRYVPYPL

SEQ ID NO: 13407 - protein, 518 aa, Schizosaccharomyces pombe
MRDFQSRFADRYNQITNSYSYSSSRQGLITGMVNVGSFFGCLLSSPVADKIGKRLSIIVWTTVYLIGIIIQVTTVPSWVQILVAKIWTGLSIGALSVITPGYQSEVAPAIMRGAIVTTYQLFITLGIFIAACINMGTHKYSHGTTAQWRISIGINLLWGIITLVGIIFLPESPRYLIAIGKDDEALKIMCYNNDLPLEHEIIQTEYHTIKSDCDAELAGGPARWPEIFNANIRYRTFLGMAVMMFQQLTGANYYFYYGTQVFRGTGMDSPYLAALIPDAVNCGCTFGAIFVLEFFGRRSPLIVGGIWQYICFFIYAAVGDRALYHKNGTSNHRAGAVMIVFSCLFIFSFSQTWAPAAYVIVGESYPVRYRSKCAAVATSANWFWNFLISFFTPFITNSIGFKYGYIFASCNLTGAAIIFLFVHETKGRTLEEINTMYASNLKPWMPHPEGYREFGREQNNATLKSHIGLNGETTELIENTDNQGDSGSFQTSTPDDSRPEQNQASATYIRPDKREPRL

SEQ ID NO: 13408 - protein, 366 aa, Caulobacter crescentus CB15
MKAAVLREVGKPLQIETVAIGKPGPREVLIRTKAAGVCHSDLHFVEGSYTHALPAVLGHESAGIVEAVGSEVRTVKVGDHVITCLNPYCGHCEVCLTGHMNLCISPETRRSKSDAPRLFKEDLNGATGPMAQFLNLSSFAEMMLVHEHACVAIRKDMPFDRAALIGCSVMTGVGAVMHTSNVRPGETVAVIGCGGVGLATINGAAIAGAGRIIAIDRLAGKLELAKTFGATDVVDASQVDDIAKAVVELTGGGVHHSFEAIGLKATAEASFKMLRRGGTANVIGMIPVGTKIELHGVDFLGERRIQGSYMGSNRFPVDMPRLVDFYMSGKLKLDELISRRIKLEDVNSAFDELKRGELARSVIVFD

SEQ ID NO: 13409 - protein, 107 aa, Glycine max
MEHGSYTDQSKSTFSLVDEDHTFANAVRFTLNQDPRVSFCGYSIPHPSDNRVNIRVQTTGDPSREVLKDACQDLMLMCQHVRSTFDKAVSDFKISKARKNNEDMDVE

SEQ ID NO: 13410 - protein, 193 aa, Triticum aestivum
LVAGSRSTSQPRPAAGSTPKLVASFPAITYAEARALRDKDGDDTAVLECAVCLSEFEDGDQLRLLPKCSHAFHPDCIGEWLAGHVTCPVCRCSLAPEEPAPAAAEENSAGAEEQRAPEVAIDMDPEGDGAAHEERMREAAELERIGSLRRAVRSRSGRPFSRAHSTGHSLSARFDGDLERFTLRLPEHVRRDM

SEQ ID NO: 13411 - protein, 492 aa, Solanum melongena
MDLSKYRPSSAYDTPFLTTNAGGPVYNNVSSLTVGPRGPVLLEDYHLIEKLATFDRERIPERVVHARGASAKGFFEVTHDVSHLTCADFLRAPGVQTPVICRFSTVVHERGSPESIRDIRGFAVKFYTREGNFDLVGNNVPVFFNRDAKSFPDTIRALKPNPKSHIQENWRILDFFSFLPESLHTFAFFYDDVCLPINYRHMEGFGVHAYQLINKAGKAHYVKFHWKPTCGVKSMTEEEAIRVGGTNHSHATKDLYDSIAAGNYPEWKLFIQIMDPEDVDKFDFDPLDVTKTWPEDILPLMPVGRLVLNRNIDNFFAENEQLAFNPGHIVPGVYYSEDKLLQTRIFAYADTQRHRIGPNYMQLPVNAPKCAHHNNHRDGAMNFMHRDEEVDYLPSRFDPCRPAEQYPIPSCVLTGRREKCVIPKENNFKQAGERYRTWEPDRQDRYINKWVESLSDPRVTHEIRSIWISYLSQADKSCGQKVASRLLVKPTM

SEQ ID NO: 13412 - protein, 197 aa, Synechococcus elongatus PCC 7942
MKPLVVATGNPGKLQELQAYLAESGWTLQLKPADLEIEETGQTFAENAALKAQQTAIATGEWAIADDSGLSVDALNGAPGLFSARWGHSDRDRIDRLLRELTGHEQRTAAFICAIAVASPQGNIVLAVEGHCPGEILTAPQGAGGFGYDPIFWVPELQLSFAELAPEQKRQVSHRGRALAQLLPQLRSLATQQTAQP

SEQ ID NO: 13413 - protein, 316 aa, Oryza sativa
MNRRRTMLLLICLCATFCLMTQLGAANVVLMGTNLTLSFDDVEASFAPGVKGSGFEGVVYTAEPLDACSPLTSKAEKGPPSPFALIIRGGCTFDEKVKNAQDAGFKAAIVYDNENSGVLISMAGSSGGIHIYAVFISKASGEVLKKFSGHTDVEVWILPAFENSAWSIMAISFISLLAMSAVLATCFFVRRHHIRRDRPRIPEAREFHGMSSQLVKAMPSLIFTKVQEDNCTSSMCAICLEDYNVGEKLRVLPCRHKFHAACVDLWLTTWRTFCPVCKRDASTGIPDPPASETTPLLSSAVRLPSQSSSFRSSVAE

SEQ ID NO: 13414 - protein, 320 aa, Bordetella parapertussis 12822
MPSQLEALRRHTVVVADTGDFEAMRALRPTDATTNPSLILKAVQQEAYRPLLVQTARAHQGASPAEITDRLLVAFGRQILDIVPGRVSTEVDARLSFDTRATVERARGLIALYQAAGVPRERVLIKIASTWEGIQAARVLQAEGIRCNLTLLFCLPQAAACADAGVQLISPFVGRIYDWHKKNAGAEWVEDARRGANDPGVQSVSRIYRYYKRFGIETEIMGASFRNVDQILALAGCDLLTISPELLTRLSQTEGEVPAALSPQAGHDDADAVRLDGGEVAFRTQLNEDAMASEKLSEGIRLFVADARKLDALIESHGAA

SEQ ID NO: 13415 - protein, 420 aa, Mycobacterium avium subsp. paratuberculosis str. k10
MPEFSAPKGVPDYVPPDSAQFVAVRSGLLDAARRAGYGDIELPIFEDTALFARGVGESTDVVSKEMYTFADRGDRSVTLRPEGTAGVVRAVIEHGLDRGTLPVKLCYAGPFFRYERPQAGRYRQLQQVGVEAIGVDDPALDAEVIAVADAGFRSLGLDGFRLEITSLGDDSCRPQYRELLQDFLFGLDLDEETRRRARLNPLRVLDDKRPEVRAMTADAPVLLDHLSDAAKQHFDTVLAHLDALGVPYVINPRMVRGLDYYTKTTFEFVHDGLGAQSGIGGGGRYDGLMRQLGGQDLSGIGFGLGVDRTLLALRAEGKSVGSAARCDVFGVPLSDQAKLRLAVLAAGLRAAGVRVDMAYGARGLKGAMRAADRSGARIALVLGDRDIDAGTVGVKDLQTGSQVSVELDSVVAEVLSQLGR

SEQ ID NO: 13416 - protein, 272 aa, Glycine max
  unsure (1)..(272): unsure at all Xaa locations
MDENSATNGTHEVVLDVNRDVSRTTQASRSCVNVSFLQKLVAEVVGTYFLIFAGSASVVVNKNNNNVVTLPGISIVWGLVVMVLVYSVGHISGAHFNPAVTIAFASTKRFPLMQVPVYVVAQVLGSTLASGTLRLLFRGKHAQFSGTLPSGSNLQAFVFEFLITFLLMFVVSGVATDNRAVGELAXGFAVGSTVLLNVMFAGPVTGASMNPVRSLGPAIVHGEYRGIWIYLLAPVVGAIAGALVYNTIRYTDKPLREITKSASFLKGRGGST

SEQ ID NO: 13417 - protein, 428 aa, Escherichia coli CFT073
MKIATIKTGLTSLAMLPGLVMAAPAVADKADNAFMMICTALVLFMTVPGIALFYGGLIRGKNVLSMLTQVTVTFALVCILWVVYGYSLAFGEGNNFFGNINGLMLKNIELTAVMGSIYQYIHVAFQGSFACITVGLIVGALAERIRFSAVLIFVVVWLTLSYIPIAHMVWGGGLLASHGALDFAGGTVVHINAAIAGLVGAYLIGKRVGFGKEAFKPHNLPMVFTGTAILYIGWFGFNAGSAGTANEIAALAFVNTVVATAAAILGWIFGEWALRGKPSLLGACSGAIAGLVGVTPACGYIGVGGALIIGVVAGLAGLWGVTMLKRLLRVDDPCDVFGVHGVCGIVGCIMTGIFAASSLGGVGFAEGVTMGHQLLVQLESIAITIVWSGVVAFIGYKLADLTVGLRVPEEQEREGLDVNSHGENAYNA

SEQ ID NO: 13418 - protein, 431 aa, Yersinia pestis biovar Medievalis str. 91001
MMMKKLLSVLGLGTVALLPSWAMAAAPAVADKADNAFMMICTALVLFMTIPGIALFYGGLLRSKNVLSMMTQVMVSFALVCVLWILYGYSLAFSAGNAFFGSFDMAMLKGIELTSLSGSFYQYIHVVFQASFACITVALIVGSFAERIRFSAVLIFAALWFTFSYLPIAHMVWGGGFLAMDGALDFAGGTVVHINAAVAGLVGAYLLGKRAGFGKEAFKPHNLPMVFTGTAILYIGWFGFNAGSASAANEIAALAFLNTVVATAGAILSWVFAEWALRGKPSLLGACSGCIAGLVAITPAAGTVGVGGALIIGLVGGVAGLWGVVLLKKWLRVDDTCDVFGVHGVCGIVGCILTGVFTSASLGGTGYAAGVTMGHQVGVQLFSVGVTVVWSGVVAFVAFKIAGLIVGLRVPEEQEREGLDVNSHGENAYNQ

SEQ ID NO: 13419 - protein, 309 aa, Helianthus annuus
MKAWKYDEYGSVDVLKLATDVAVPEIKDDQVLVKVVAAAVNPVDYKRRLGYFKAIDSPLPIIPGFDVLGVVLKVGSQVKDLKEGDEVYGDINDKGLEGPTQFGTLAEYTAVEERLLALKPKNLDFIQAAALPLAIETAYEGLERAKFSEGKTILVLNGAGGVGSFIIQLAKHVYGASKVAATSSTGKLELLKSLGADVAIDYTKENFEDLPDKYDVVYDAIGQPEKALKAVNETGVAVSITGPIPPPGFSFILTSDGSILTKLNPYLESGKIKSDNDPKSPFPFDKLNEAYAYLESTGPTGKVVIYPIP

SEQ ID NO: 13420 - protein, 593 aa, Ralstonia eutropha JMP134
MSVIEVKVPDIGDFDAVELIEVLIKPGDTVEQEQSLIVLESDKASMEVPSPVAGKVVDVRVNVGDKVGQGTVICTVEAEAAAAAPAPAPAPAPAAAPAPAAAPAPAPAAASHAGGADIQCEMLVLGAGPGGYSAAFRAADLGMNTVLVERYATLGGVCLNVGCIPSKALLHNAAVIDEAKALAAHGILFGEAKIDLDGLRHYKNQVVGKLTGGLAGMAKARKVQVVRGIGTFLDPHHLEVDATEGEGKQTTGKKTVIRFEKAIIAAGSQAVKLPFIPEDPRIVDSTGALELPEVPNKMLVVGGGIIGLEMATVYSTLGADIDVVEMLPGLMSGADRDLVKVWEKKNKDRFGKVMLNTKTVAVEAKPDGIYVKFEGEQAPAEPQRYDLVLVSVGRSPNGKRIGAEKAGVAVTDRGFINVDSQMRTNVPNIFAIGDVVGQPMLAHKAVHEAHVAAEAAHGEKAYFDAKQIPSVAFTDPEVAWAGLTEDQCKEQGIKYSKGVFPWAASGRAIANGRDEGFTKLIFDEETHRIIGGGIVGTHAGDLISEVCLAIEMGADAVDIGKTIHPHPTLGESIGMAAEIYEGTCTDVPPPRKR

SEQ ID NO: 13421 - protein, 203 aa, Zea mays
  unsure (1)..(203): unsure at all Xaa locations
RGANNIKIGSTIPYHRTGIDAIEEVIYHDETYDVTTIRASTXPMFLMARKIKSLGVKMVLSGEGSDELLGGYLYFHFAPNKEEFHRETCRKVKALHQYDCLRANKATSAWGLEVRVPFLDKEFINVAMGMDPEWKMVQIRGLSDCAYSSVLCCFMMIDDDVFSSSCFDLLAHTRTVRQEPGPHREVGHEEGVRRRRAPLPAQG

SEQ ID NO: 13422 - protein, 319 aa, Lactobacillus delbrueckii
MKRIGILTSGGDAPGMNAAVRAVTRVAIANGLEVFGIRYGFAGLVAGDIFPLESEDVAHLINVSGTFLYSARYPEFAEEEGQLAGIEQLKKHGIDAVVVIGGDGSYHGALQLTRHGFNSIGLPGTIDNDIPYTDATIGYDTACMTAMDAIDKIRDTASSHHRVFIVNVMGRNCGDIAMRVGVACGADAIVIPERPYDVEEIANRLKQAQESGKDHGLVVVAEGVMTADQFMAELKKYGDFDVRANVLGHMQRGGTPTVSDRVLASKLGSEAVHLLLEGKGGLAVGIENGKVTSHDILDLFDESHRGDYDLLKLNADLSR

SEQ ID NO: 13423 - protein, 554 aa, Ralstonia eutropha JMP134
MSQAIEIKVPDIGDYDAVPVIEVHVKPGDSINAEDALVTLESDKATMDVPSPQAGVVKEVRIKVGDNVSEGSVLVMLEAAGAAAPAPAPAVAAPAPAPAQAAAPAPAPAAAPAPAAAPAAGGTIEVKVPDIGDYDAVPVIEVHVKPGDTINPEDAVVTLESDKATMDVPSPQGGVVKEVKVKVGDNVSEGTLLILLEGAAGAAAPAPAAAAPAPAPAAAPAQAAAPAPVAAAPAPAAAASAPVGVTGKAAHASPSVRKFARELGVDVSRVPGTGPKNRITQEDVQRYVKGVMTGQAAAPAQAAAAGGGGGELGLLPWPKVDFTRFGEVESKALSRIKKISGANLHRNWVMIPHVTNHDEADITDLEAFRVQLNKENEKSGVKVTMLAFMIKATVAALKKFPNFNASLDGDNLVLKKYFNIGFAADTPNGLVVPVIKDADKKGVLEISQEMSELAKLARDGKLKPDQMQGGCFSISSLGGIGGTYFTPIINAPEVAIMGVCKSYMKPVWDGKQFAPRLTLPLSLSWDHRVIDGAEAARFNTYFGQLLADFRRILL

SEQ ID NO: 13424 - protein, 300 aa, Streptomyces avermitilis MA-4680
MTESHPRITKAVIPAAGLGTRFLPATKATPKEMLPVVDKPAIQYVVEEAVSAGLDDVLMITGRNKRPLEDHFDRNYELESALQKKGDASRLAKVQESSDLATMHYVRQGDPKGLGHAVLCAAPHVGREPFAVLLGDDLIDPRDPLLARMVEVQEQRGGSVIALMEVAPEQIHLYGCAAVEATDEGDLVKVTDLVEKPDPADAPSNYAIIGRYVLDPHIFDILRKTEPGRGGEIQITDALQQLAADEKVGGPVHGVVFKGRRYDTGDRGDYLRAIVRLACEREDLGPEFRTWLRSYVAEEM

SEQ ID NO: 13425 - protein, 195 aa, Zea diploperennis
APLDKVCVLSCGISTGLGASINVAKPPKGSTVAVFGLGAVGLAAAEGARIAGASRIIGVDLSPSRFEEARKFGCTEFVNPKDHNKPVQEVLAEMTNGGVDRSVECTGNINAMIQAFECVHDGWGVAVLVGVPHKDAEFKTHPMNFLNERTLKGTFFGNYKPRTDLPNVVELYMKKELEVEKFITHSVPFAEINKA

SEQ ID NO: 13426 - protein, 465 aa, Acidithiobacillus ferrooxidans
MSHFSFIEDPRQDPKKLDVEERREAFREIYQSFDLGSAQLQADRCLHCGNPYCEWKCPVHNYIPNWLQLIVENRLEEAATLSHQTNTLPEICGRICPQDRLCEGACTLNATGGAVTIGNLERFVTEEALARAWQPDMPDILPNGKRVAVVGGGPAGLGCADILNRAGTEVVVFDRYPAVGGLLTFGIPSFKLEKAVVARRANLLQEMGIRFQLDTEVGRDISLGKLLEDFDAVFLGMGTYTAKTGDFPGEKLPGVLKALSYLIANTRHLMQLPDPTLPYISLSGKRVVVLGGGDTAMDCLRTAIRQGARQVTCVYRRDEENMPGSRREVANAREEGVHFLFHRQPVEVVGDAASGSPGRASGGDPSGEPDARGRRHPEIIPGSEQVLDADVVIIAFGFDPSPAPWFAEHHITTDSRGRISTNAQFQTSNPRIFAGGDMRRGSDLVVTAVDEGRRAAQGILDYLGV

SEQ ID NO: 13427 - protein, 467 aa, Glycine max
MAATRPVQCLLRRVCRGSRTIGVATEVNASSSSQKIIDKEYEHSAHNYHPLPIVFAQAKGTSVWDPEGNKYLDFLSGYSAVNQGHCHPKILKALQEQAERLTVSSRAFYNDRFPDFAEYVTNMFGYDMVLPMNTGAEGVETALKLARKWGYEKKRIPKDEAIIVSCCGCFHGRTLGVISLSCDNEATRGFGPLLPGNLKVDFGDAEALEQIFKEKGEHIAAFILEPVQGEAGVIFPPDGYLKAVRDLCSKYNVLMIADEIQTGLARTGKMLACEWEEVRPDVLILGKALGGGVIPVSAVLADKDVMLCIQPGQHGSTFGGNPMASAVAIASLEVIKNERLVERSAQMGEELTGQLLKIQQQYPDYVKEVRGRGLFIGVEFNSKKLFPVSGYELCKKLKYRGVLAKPTHDAIIRFTPPLCISVDEIQQGSKALADVLEIDLPKLQKTKPIDAAPVATSACDRCGRVLY

SEQ ID NO: 13428 - protein, 175 aa, Fusobacterium nucleatum subsp. vincentii ATCC 49256
MKYRIENLIDKEAVEKRIKELARQIEKDYAGEEIYCVGLLKGSVIFLSDLVKELNIPVIIDFMSVSSYGSETVSSGDVKILKDTDLDLRGKHVLIVEDIIDTGLTLEHVIKYFKEGKGVKSLRTCTLLSKPERRKVDVKVEYIGFDVPDKFVIGYGLDYNQKYRNLPYIAVVIPE

SEQ ID NO: 13429 - protein, 397 aa, Burkholderia fungorum LB400
MNKVLRLSDLIAEGKLSGKRVFIRADLNVPQDDQGNITEDTRIRASVPAIKAALDAGAAVMVTSHLGRPTEGDFKPEDSLAPVAKRLAELLGREVPLVANWVENGVNVAPGSVVLLENCRVNKGEKKDSDELAQKMAKLCDIYVNDAFGTAHRAEATTHGIARYAPVACAGPLLAAELEALGKALGAPKRPLVAIVAGSKVSTKLTILKSLADKVDQLIVGGGIANTFMLAAGLKIGKSLAEADLVNEAKAIIDAAKARGASVPIPTDVVTAKEFSPTAKAEVKAVADVQDDDLILDIGPETAKVLAAQLEKAGTIVWNGPVGVFEFDQFGNGTKTLAEAIAKSSAFSIAGGGDTLAAIAKYGIHDKVSYISTGGGAFLEFLEGKKLPAVEVLESRA

SEQ ID NO: 13430 - protein, 551 aa, Shigella flexneri 2a str. 301
MLMKNINPTQTAAWQALQKHFDEMKDVTIADLFAKDGDRFSKFSATFDDQMLVDYSKNRITEETLAKLQDLAKECDLAGAIKSMFSGEKINRTENRAVLHVALRNRSNTPILVDGKDVMPEVNAVLEKMKTFSEAIISGEWKGYTGKAITDVVNIGIGGSDLGPYMVTEALRPYKNHLNMHFVSNVDGTHISEVLKKVNPETTLFLVASKTFTTQETMTNAHSARDWFLKAAGDEKHVAKHFAALSTNAKAVGEFGIDTANMFEFWDWVGGRYSLWSAIGLSIVLSIGFDNFVELLSGAHAMDKHFSTTPAEKNLPVLLALIGIWYNNFFGAETEAILPYDQYMHRFAAYFQQGNMESNGKYVDRNGNVVDYQTGPIIWGEPGTNGQHAFYQLIHQGTKMVPCDFIAPAITHNPLSDHHQKLLSNFFAQTEALAFGKSREVVEQEYRDQGKDPATLDYVVPFKVFEGNRPTNSILLREITPFSLGALIALYEHKIFTQGVILNIFTFDQWGVELGKQLANRILPELKDDKEISSHDSSTNGLINRYKAWRG

SEQ ID NO: 13431 - protein, 238 aa, ASPERGILLUS NIDULANS FGSC A4
MAQDSDEPSGATLGYLAPICVAVFFIFVWYLPCLILSCLSPRLILNSFRYRIVFGTRQRFRGPNRQLDPESWPMGFSHAILTSAELEKRFPLIKFRAWTAASGHQAKHSERSEVDPDRDSTSQAPGSIPAPASNLALPLNASEKEVQVSASVEHEVASSHGDAHRECAICMEDFDDDDSIRALTCDHIYHATCLDPWFTKRQARCPLCKTCYYPEINPAVPVRPATALIRNQIFPRVL

SEQ ID NO: 13432 - protein, 652 aa, Microbulbifer degradans 2-40
MCGIAGLVSPSLPIDSLKATATAMAQAIEHRGPDAMGVWVEQEQKLAFSHRRLSIQDLSESGAQPMHSHSKRYTIAFNGEIYNFLEIKKPLIDAGFEFRGHSDTEVLLCAIEHWGLEQTIAKAKGMFAIALWDSQTKVLTLIRDRIGEKPLYYGVINGSFVFGSELKAIFAHTPAKALTLNKVAIASFLRHGYISAPNSVFVEVKKLSPGCRIDINLAKQSDWSIANLTPQPYWTVAQSANQPYLYTEQNQSEAISALDEKINKVINEQSIADVPLGAFLSGGIDSTVVSAVLQANTSTAIDTFTIGFEEKSFNEAEFAKEIAKHLGTKHHEHYVNQQDILELVNILPRVYDEPFADASQLPTILVNRFARSELTVCLSGDGGDELFAGYNRYVFTEAVLKKAAALPAVFKSILKALITSVAPGKWDKLYQALNSIAKRKGGAEFGNKLYKMVSLADAKSKAAAYEYLMSYWQQPEQVLKAFNGELAMQSPLSLEDDFINAAMAWDQQWYLPGDNLTKTDRASMAASLELRAPLLDIELIDFAWTVSPELKVRDGKSKWLLREVLYKYVPKELIERPKMGFSVPISQWIRTDLSAWVDELLDKEFIEKQGIFNYAPIQHALLEHRSGSYDHGKKLWTLLMFQAWFKTNIIDG

SEQ ID NO: 13433 - protein, 503 aa, Pisum sativum
MAITVSSRQLFIDGEWRVPILNKRIPNINPSTENIIGDIPAATKEDVDLAVDAAKRAISRKNGRDWSAASGSLRARYLRAIAAKIKEKKDELGKLESIDCGKPLEEALADLDDVVACFEYYAGLAEELDSKQKAPISLPMDTFKSYILKEPIGVVALITPWNYPFLMATWKIAPALAAGCAAILKPSELASVTCLELGEICKEVGLPRGVLNIVTGLGHEAGASLASHPDVDKISFTGSSATGSKIMTTAAQLVKPVSLELGGKSPIVVFEDVDLDKVAEWTGFGCFFTNGQICSATSRLIVHESIAVEFVDKLVKWAENIKISDPLEEGCRLGPIVSEAQYKKVLNCISSAKSEGATILTGGRRPEHLKKGYFVEPTIITDVTTSMQIWREEVFGPVLAVKTFSTEEEAINLANDTHYGLGSAVMSNDLERCERLSKALQAGIVWINCAQPSFIQAPWGGIKRSGFGRELGEWGLENYLSVKQVTRYTSDEPWGWYQPPSKL

SEQ ID NO: 13434 - protein, 249 aa, Pseudomonas fluorescens PfO-1
MLLQGKVAIITGAASARGIGRATATTFAQHGAWVVILDLDASAARDAAASLGEGHLGLAANVADESQVQQAVATVIEHFGRIDILVNNAGITQPLKTLDIRPGDYDKVLDVSLRGTLQMSQAVIPLMRQQASGSIVCMSSVSAQRGGGIFGGPHYSAAKAGVLGLAKAMARELGPDNVRVNSIAPGLIHTDITGGLMQDERRHAIIDGIPLGRLGEAQDVANAALFLASDLSSYLTGITLDVNGGMLIH

SEQ ID NO: 13435 - protein, 504 aa, Sinorhizobium meliloti 1021
MNEKQKKTQKLRARLPRGFVDRSAADIRAVDEMIAKIREVYERYGFDPVETPLFEYTDALGKFLPDSDRPNEGVFSLTDDDDQWLSLRYDLTAPLARHVAENFNEIQLPYRTYRAGYVFRNEKPGPGRFRQFMQFDADTVGAAGVQADAEMCMMMADTMEALGIARGDYVIRVNNRKVLDGVLEAIGLGGVEQTNTRLTVLRAIDKLDKFGPEGVRLLLGEGRKDESGDFTKGAGLNEEQIGKILFFVGITDYARSADELAALVAGTARGAEGVNELNTIRGLVLSAGYEADRIKIDPSVVRGLEYYTGPVFEAELQFAVTNEKGEKVVFGSVGGGGRYDGLVSRFMGQPVPATGFSIGVSRLMTALKNLGKLGAEQVTAPVVVCVMDRDIESMGRYQRFVQDLRHAGIRAEMYQGNKKNFGDQLKYADRRGSPIAVIQGGDERASGVVQIKDLIEGKRLSGEIEDNVAWREARVAQVSVPEGELVAKVRQILAEQAEDRKRAG

SEQ ID NO: 13436 - protein, 261 aa, Oenococcus oeni PSU-1
MKYGFLGAGNLSSAIIMGLLKAGFRSEDIFVSSPHSAALLSKRLAINNVDEDRLLADCDLIVLAFLPEQLGSIVQQVGSEKFANKLIVSVLGSTSLKELTEFLPTAKIVRVLPNVNAEFNNSLTSVAFGQNLSNEDLKLTKNFLQAFGTIIELAERDFPAFSAIAGSGPAFVALFIKALQEAGIKQGIDSKESLQIALHTIKGSTENILQSGKTADQLVKKVASPGGSTADGVESLEENHFIETVNNAILATINHGRKKFR

SEQ ID NO: 13437 - protein, 424 aa, Sinorhizobium meliloti; identical to SEQ ID NO: 306

SEQ ID NO: 13438 - protein, 236 aa, Bordetella parapertussis
MQPLFKRCGAEFFGTFWLVLGGCGSAVLAAGVPQVGIGYAGVALAFGLTVLTMAYAVGHISGGHFNPAVTVGLAASGRFGWRDVPPYIVAQVVGAIVAAATLASIAQGVAGFDLVASKFAANGYGDHSPGKYSMQAALICEIVLSAGFVFVILGATDKRAPAGFAPIPIGLALTLIHLISIPVTNTSVNPARSTGPALFVGGWALEQLWLFWLAPIAGALVGALAYRLVGTPSAQR

SEQ ID NO: 13439 - protein, 478 aa, Eremothecium gossypii
MEQVDLPNANKIAAGANKASVRVVNGLGALMGSKAMAAVDFEKDSMAEMLARDQREKEHYRHHKHISEQPWTLNNWHLHVNWVNIVLVVVVPIIGLYLALSGRVPPRFEVLALAIVYYSLGGLGITAGYHRLWAHRSYSARWPLRVMYALFGASSVEGSIKWWGHSHRIHHRYTDTPRDPYDARRGLWYSHMGWMLLQPNPRYRARADIEDLMNDWVVRLQHRHYVLIMAFMAFLLPAIICHFIFRDFWGGLVYAGILRVFAIQQATFCINSLAHYLGDQPFDDRRTPRDNWITALVTLGEGYHNFHHEFPTDYRNAIRWYQYDPTKVFIYCASLVGLAYDLKKFSQNAIQQGLIQQKQKKLDNARSRLNWGTPLSQLPVWDRSEFVRASRENSGLVVISGIVHDVSGYITEHPGGETLIQAALGKDATRAFNGGVYMHSNAAHNILATMRVAVVKEGQDAATRFAARRGEALEKKTA

SEQ ID NO: 13440 - protein, 528 aa, Synechococcus elongatus PCC 7942
MTAQQLWQRYLDWLYYDPSLEFYLDISRMGFDDAFVTSMQPKFQHAFAAMAELEAGAIANPDEQRMVGHYWLRDPELAPTPELQTQIRDTLAAIQDFALKVHSGVLRPPTGSRFTDILSIGIGGSALGPQFVSEALRPQAALLQIHFFDNTDPAGFDRVLADLGDRLASTLVIVISKSGGTPETRNGMLEVQSAFAQRGIAFAPQAVAVTGVGSHLDHVAITERWLARFPMEDWVGGRTSELSAVGLLSAALLGIDITAMLAGARQMDALTRHSDLRQNPAALLALSWYWAGNGQGKKDMVILPYKDSLLLFSRYLQQLIMESLGKERDLLGKVVHQGIAVYGNKGSTDQHAYVQQLREGIPNFFATFIEVLEDRQGPSPVVEPGITSGDYLSGLLQGTRAALYENGRESITITVPRVDAQQVGALIALYERAVGLYASLVGINAYHQPGVEAGKKAAAGVLEIQRQIVELLQQGQPLSIAAIADDLGQSEQIETIYKILRHLEANQRGVQLTGDRHNPLSLIASWQR

SEQ ID NO: 13441 - protein, 445 aa, Mortierella alpina
MATPLPPSFVVPATQTETRRDPLQHEELPPLFPEKITIYNIWRYLDYKHVVGLGLTPLIALYGLLTTEIQTKTLIWSIIYYYATGLGITAGYHRLWAHRAYNAGPAMSFVLALLGAGAVEGSIKWWSRGHRAHHRWTDTEKDPYSAHRGLFFSHIGWMLIKRPGWKIGHADVDDLNKSKLVQWQHKNYLPLVLIMGVVFPTLVAGLGWGDWRGGYFYAAILRLVFVHHATFCVNSLAHWLGDGPFDDRHSPRDHFITAFVTLGEGYHNFHHQFPQDYRNAIRFYQYDPTKWVIALCAFFGLASHLKTFPENEVRKGQLQMIEKRVLEKKTKLQWGTPIADLPILSFEDYQHACKNDNKKWILLEGVVYDVADFMSEHPGGEKYIKMGVGKDMTAAFNGGMYDHSNAARNLLSLMRVAVVEYGGEVEAQKKNPSMPIYGTDHAKAE

SEQ ID NO: 13442 - protein, 555 aa, Gluconacetobacter xylinus
MPSISPFAGKPVDPDRLVNIDALLDAYYTRKPDPAIATQRVAFGTSGHRGSSLTTSFNENHILSISQAIADYRKGAGITGPLFIGIDTHALSRPALKSALEVFAANGVEVRIDAQDGYTPTPVISHAILTYNRDRSSDLADGVVITPSHNPPEDGGYKYNPPHGGPADTDITKVVETAANDYMAKKMEGVKRVSFEDALKAPTTKRHDYITPYVDDLAAVVDMDVIRESGVSIGIDPLGGAAVDYWQPIIDKYGINATIVSKEVDPTFRFMTADWDGQIRMDCSSPYAMARLVGMKDKFDIAFANDTDADRHGIVSGKYGLMNPNHYLAVAIEYLFNNRENWNASAGVGKTVVSSSMIDRVAKEIGRKLVEVPVGFKWFVDGLYNGTLGFGGEESAGASFLRRAGTVWSTDKDGIILGLLAAEITARTKRTPGAAYEDMTRRLGTPYYARIDAPADPEQKAILKNLSPEQIGMTELAGEPILSTLTNAPGNGAAIGGLKVSAKDGWFAARPSGTENVYKIYAESFKSAAHLKAIQTEAQDAISALFAKAAQKNAG

SEQ ID NO: 13443 - protein, 155 aa, Triticum aestivum
  unsure (1)..(155): unsure at all Xaa locations
MAPTVMASSATSVAPFQGLKSTAGLPVSRRSNGASLGSVSNGGRIRCMQCWPIRGHQEFRDPVLLPPLNTXASLXVDYLIPLQVGPCLQFNKXFIFPFSTTTPGYYDGXYWAXWXLPIFXCTDXTQVINEVXGVQEGYLTLCRINRHNSACVNTP

SEQ ID NO: 13444 - protein, 265 aa, Holcus lanatus
MASSSRSVLLLVAALFAVFLGSAHGIAKVPPGPNITATYGDEWLDAKSTWYGKPTGAGPKDNGGACGYKDVDKPPFSGMTGCGNTPIFKDGRGCGSCFEIKCTKPESCSGEPVTVHITDDNEEPIAPYHFDLSGHAFGSMAKKGEEQKLRSAGELELKFRRVKCKYPDGTKPTFHVEKGSNPNYLALLVKYIDGDGDVVAVDIKEKGKDKWIELKESWGAVWRVDTPDKLTGPFTVRYTTEGGTKGEAEDVIPEGWKADTAYEAK

SEQ ID NO: 13445 - protein, 589 aa, Caulobacter crescentus CB15
MSDLERLQPILATALDAVVVMDVEGVVVDWTSRAEVLLGWRREEVLGRRLSALILPSEAGEGGAEDAALFSSSGRPSLFDVRRELMARRQDGGSIAIELSMVRWSEPDAAPLVLGFVRDISRRSEALKRLVVSEARFRAAIDAVQGVLWTNNASGKMVGEQPGWSALTGQIREEYEGVGWTKVVHPDDVEPTLSAWLAAVAEKRTFEFEHRVRRHDGVWRDCLIRAVPLIGDNGEIREWVGVHTDISEQKAAAEKLRESEALFRTLADAAPAPVWMTEPCGGMEFANAAFAELANVDREALLGYGWLSLLHPDDIAGLLERRQAARAGPDPYTFEARFKRQPDGWRWMLAHAKPRIDATGAFLGYVGMAMDLSEIKNAQAQQKLLINELNHRVKNTLASIQSIARQTLRADEVSPRARDQFIDRLMAMSAAHNVLTNERWSGAVIDDILREALRPFCDDRDPERITITGPSVRVEPGAALALALAAHELGTNAAKYGALSTPHGRVTVAWSLRGENHALVHWSESGGPEVQAPTRRGFGARLLERGLATDLGGKPELLFKPEGVEAQLPVRVVRADPNDQGPEQVVSPP

SEQ ID NO: 13446 - protein, 546 aa, Photorhabdus luminescens subsp. laumondii TTO1
MVNHPRAGQIARQSDLINVAQLTSQYYTLHPQPENSEHKVKFGTSGHRGSSQRHSFNEAHILAITQAVAEVRKQRGINGPCYVGKDTHALSEAAFISVLEVLTANSVNVIVQENNGFTPTPAISHAILCYNRLGKALADGIVITPSHNPPEDGGIKYNPPDGGPADTDLTAIIERRANELLTAGLKGIKRLPFVQVLNSEYLHQQDLVEPYVSALGDVVDMAAIQRAGLKIGIDPLGGSGIAFWQRIGERYNLDLTLVNDQVDQTFRFMHLDHDGVIRMDCSSPWAMAGLLAMRDKFDLAFANDPDYDRHGIVTPAGLMNPNHYLATAINYLFRHRPQWSESVAIGKTLVSSAMIDRVVADLGRKLVEVPVGFKWFVDGLHKGELGFGGEESAGASFLRFDGTPWSTDKDGIILCLLAAEMTAVTGENPQQHYNKLAARFGTPSYSRIQAPATYQQKALLAKLSPEMVKADKLAGDPITARLTKASGNGASIGGLKVITENGWFAARPSGTEEAYKIYCESLLGPEHRQKIEQEALDIVNQVFAAG

SEQ ID NO: 13447 - protein, 576 aa, Photorhabdus luminescens subsp. laumondii TTO1
MNDKQHGPFIVEGKLADSERMKQESNFLRGTISEDLTNGLTGGFEGDNFLLIRFHGMYQQDDRDIRAERAEQKLEPRHAIMLRCRLPGGVITPQQWLGIDKFAEENTLYGSIRLTNRQTFQFHGILKGKVKLAHQLLNQVGLDSLATANDVNRNVLCTSNPIQSELHQQAYEWAKKISEHLLPRTRAYAELWLDKEKVATTDEEPILGSTYLPRKFKTTVVIPPQNDVDLHANDLNFIAIAEGSKLVGFNVLVGGGLAMTHGDKNTYPSMASEFGYIPLEHTLAIAEAVVTTQRDWGNRTERKNAKTKYTLERVGVETFKAEVERRAGVKFEAIRPYEFTGRGDQIGWLKGIDDKWHLTLFIENGRLLDYPGKPLKSGVAEIAKIHKGDFRLTANQNLIIAGIPESEKQRIETIACRHGLIDDKTTVQRKNSMACVSFPTCPLAMAEAERFLPEFVTHVEQLMNKHGIGDEHIVLRVTGCPNGCARAMLAEVGLVGKALDRYNLHLGGNRIGTRIPRMYKENISSQAILSIMDELIGRWATGRQPNEGFGDFLIRTDIIKPVLDSARDFYDWQEAV

SEQ ID NO: 13448 - protein, 512 aa, Escherichia coli O157:H7 EDL933
MKIRSQVGMVLNLDKCIGCHTCSVTCKNVWTSREGVEYAWFNNVETKPGQGFPTDWENQEKYKGGWIRKINGKLQPRMGNRAMLLGKIFANPHLPGIDDYYEPFDFDYQNLHTAPEGSKSQPIARPRSLITGERMAKIEKGPNWEDDLGGEFDKLAKDKNFDNIQKAMYSQFENTFMMYLPRLCEHCLNPACVATCPSGAIYKREEDGIVLIDQDKCRGWRMCITGCPYKKIYFNWKSGKSEKCIFCYPRIEAGQPTVCSETCVGRIRYLGVLLYDADAIERAASTENEKDLYQRQLEVFLDPNDPKVIEQAIKDGIPLSVIEAAQQSPVYKMAMEWKLALPLHPEYRTLPMVWYVPPLSPIQSAADAGELGSNGILPDVESLRIPVQYLANLLTAGDTKPVLRALKRMLAMRHYKRAETVDGKVDTRALEEVGLTEAQAQEMYRYLAIANYEDRFVVPSSHRELAREAFPEKNGCGFTFGDGCHGSDTKFNLFNSRRIDAIDVTSKTEPHP

SEQ ID NO: 13449 - protein, 559 aa, Glycine max
MGSSGFSWKLADHPKLPKGKTVAVVVLDGWGEATPNEYNCIHKAETPCMDSLKKGAPERWRLVRAHGTAVGLPTEDDMGNSEVGHNALGAGRIFAQGAKLVDLALASGKIFEGEGFKYIKECFENGTLHLIGLLSDGGVHSRLDQLQLLLKGVSERGVKRVRVHILTDGRDVLDGSSVGFVETLENDLANLRAKGVDARIASGGGRMNVTMDRYENDWSVVKRGWDAQVLGEAPYKFTNALEAVKKLRAEPKANDQYLPPFVIVDESGKPVGPIVDGDAVVTFNFRADRMTMIAKALEYENFDKFDRVRYPKIRYAGMLEYDGELKLPSHYLVSPPEIDRTSGEYLVYNGIRTFACSETVKFGHVTFFWNGNRSGYFNAELEEYVEIPSDSGITFNEQPLMKALQIAEKARDAILSGKFDQVRVNLPNGDMVGHTGDIEATVVACKAADAAVKMILDAIEQVGGIYVVTADHGNAEDMVKRDKSGKPLLGKDGKIQILTSHTLEPVPIAIGGPGLAPGVRFRNDVPTGGLANVAATVMNLHGFEAPSDYETTLIEVVDN

SEQ ID NO: 13450 - protein, 488 aa, Bacillus subtilis subsp. subtilis str. 168
MSVITEQNTYLNFINGEWVKSQSGDMVKVENPADVNDIVGYVQNSTAEDVERAVTAANEAKTAWRKLTGAERGQYLYKTADIMEQRLEEIAACATREMGKTLPEAKGETARGIAILRYYAGEGMRKTGDVIPSTDKDALMFTTRVPLGVVGVISPWNFPVAIPIWKMAPALVYGNTVVIKPATETAVTCAKIIACFEEAGLPAGVINLVTGPGSVVGQGLAEHDGVNAVTFTGSNQVGKIIGQAALARGAKYQLEMGGKNPVIVADDADLEAAAEAVITGAFRSTGQKCTATSRVIVQSGIYERFKEKLLQRTKDITIGDSLKEDVWMGPIASKNQLDNCLSYIEKGKQEGASLLIGGEKLENGKYQNGYYVQPAIFDNVTSEMTIAQEEIFGPVIALIKVDSIEEALNIANDVKFGLSASIFTENIGRMLSFIDEIDAGLVRINAESAGVELQAPFGGMKQSSSHSREQGEAAKDFFTAIKTVFVKP

SEQ ID NO: 13451 - protein, 564 aa, Escherichia coli
MSTLKITGMTCDSCAVHVKDALEKVPGVQSADVSYAKGSAKLAIEVGTSPDALTAAVAGLGYRATLADAPSVSTPGGLLDKMRDLLGRNDKTGSSGALHIAVIGSGGAAMAAALKAVEQGARVTLIERGTIGGTCVNVGCVPSKIMIRAAHIAHLRRESPFDGGIAATTPTIQRTALLAQQQARVDELRHAKYEGILEGNPAITVLHGSARFKDNRNLIVQLNDGGERVVAFDRCLIATGASPAVPPIPGLKDTPYWTSTEALVSETIPKRLAVIGSSVVALELAQAFARLGAKVTILARSTLFFREDPAIGEAVTAAFRMEGIEVREHTQASQVAYINGEGDGEFVLTTAHGELRADKLLVATGRAPNTRKLALDATGVTLTPQGAIVIDPGMRTSVEHIYAAGDCTDQPQFVYVAAAAGTRAAINMTGGDAALNLTAMPAVVFTDPQVATVGYSEAEAHHDGIKTDSRTLTLDNVPRALANFDTRGFIKLVVEEGSGRLIGVQAVAPEAGELIQTAALAIRNRMTVQELADQLFPYLTMVEGLKLAAQTFNKDVKHLSCCAG

SEQ ID NO: 13452 - protein, 413 aa, Fusobacterium nucleatum subsp. vincentii ATCC 49256
MKLIKAVRGTKDIIGEEAKKYIYISNVAQKMFENYNYNFVKTPIFEETELFKRGIGEATDVVEKEMYTFKDRGDRSITLRPENTASLVRCYLENAIYAKEDISRFYYNGSMFRYERPQAGRQREFNQIGIEVFGEKSPKVDAEVIAIGYKFLEKLGITDLEVKINSVGSNASRTVYREKLVEHFKSHLDDMCDDCKDRINRNPLRLLDCKVDKDKDFYKSAPNIIDFLFEDERKHYEDVKKYLDVFGIKYTEDPTLVRGLDYYSSTVFEIVTNKLGSQGTVLGGGRYDNLLKELGDKDIPAVGFATGVERIMMLLGENYPKNNPDVYIAWLGENTSETALKIAESLRDNDIKVYIDYSEKGMKSHMKKADKLSVRYCIILGEDELNKGIVLLKDFSTREQKEVKIEEILNYIK

SEQ ID NO: 13453 - protein, 345 aa, Streptococcus pneumoniae R6
MKSAVYTKAGQVGLASIERPQIIEADDVIIRVVRACVCGSDLWRYRNPETKAGHKNSGHEAIGIVEEAGEAITTVKPGDFVIVPFTHGCGECDACLAGFDGSCDNHIGNNLGGDFQAEYIRFHYANWALVKIPGQPSDYTEGMLKSLLTLADVMPTGYHAARVANVQKGDKVVVIGDGAVGQCAVIAAKMRGASQIILMSRHEDCQKMAMESGATAVVAERGQEGITKVREILGGGADAALECVGTEAAIEQALGVLHNGGRMGFVGVPHYNNRALGSTFMQNISVAGGAASATTYDKQFLLKAVLDGDINPGRVFTSSYKLEDIDQAYKDMDERKTIKSMIVIE

SEQ ID NO: 13454 - protein, 466 aa, Sinorhizobium fredii
MSKRFRSRSAARAARHRLRRGEQDMSNRLNTTPNDLSAFWMPFTANRQFKKEPRLFVGAKDMYYTTHDGRTVLDGTAGLWCVNAGHCRPKITEAIREQAGELDYAPAFQLGHPKAFELANRLVDIAPEGLNHVLYTNSGSESVDTALKVALAYHRAKGNGSRFRLIGRERGYHGVNFGGISVGGIVANRKMFGTLLTGVDHLPHTHLPAKNAFTRGEPEHGGDLASELERIVTLHDASTIAAVIVEPVAGSTGVLIPPKGYLQKLREICTKHGILLIFDEVITGYGRLGTPFAAQYFDVKPDIITTAKGLTNGVIPMGAVFVTSEIHDAFMTGPEHLIEFFHGYTYSGNPIASAAALGTLDTYKEEGLLTRAAELASYWEEALHSLKDCPHVIDIRNIGLIGAVELEPIAGEPTKRAFSAFLKAYEKGLLIRTTGDIIALSPPLIIEKKQIDELIDKLRDVLKNNI

SEQ ID NO: 13455 - protein, 264 aa, Oryza sativa
MSPAPRVLVLVVATVVALQVSPAAGRIPGAYGGGEWQSAHATFYGGSDASGTMGGACGYGNLYSQGYGVNNAALSTALFNSGQSCGACFEIKCVNQPGWEWCHPGSPSILITATNFCPPNYALPSDNGGWCNPPRPHFDLAMPMFLHIAEYRAGIVPVSYRRVPCRKKGGVRFTINGFRYFNLVLITNVAGAGDIVRASVKGTSTGWMPMSRNWGQNWQSNSVLVGQALSFRVTGSDRRTSTSWNAAPAGWHFGQTFEGKNFRV

SEQ ID NO: 13456 - protein, 149 aa, Pseudomonas syringae
TETRDLLVSLAGEVGLKDAIKAQYDGELVNSSEGRPVLHTALRRPVGDKLKVNGVDVMPDVHRVLNQMTELVGRIHDGLWRGYTEKPITDVVNIGIGGSFLGPELVSEALVAYAHKGVRCHYLANIDGSEFHELSMKIRAETTLFIVSS

SEQ ID NO: 13457 - protein, 359 aa, Oenococcus oeni PSU-1
MANNKISQTTKKLSQIFNSEKQPAVFFDKNVSTIEENNSLLDGQTDVPVLDPHDLLVEVQAVSVNPVDTKLRQTGVASKIKILGYDAFGIVKNTGKDVTRFHAGDRVYYAGTTQRPGSNEKFQAVDERLVGRAPEKLNKSEIAAMPLTSITAYEILVDQLGLRFQNHAADGKNMLVINGAGGVGSVLLQMAAYLGINLSVTAHSSESIEWLKKYSVDKIYDYENIDETLADQKFDYIVFLYDPALYWDIAIKHIKPYGQLVSIVGTNKPLNMGPLKNIAVQFKWEYMFAKSDFNHNILSQGQALDKIAILLDAGILKTTLNKTFDLINAENLRQAYKLVESGRMQGKVVLNGPFDKALK

SEQ ID NO: 13458 - protein, 847 aa, Rosa hybrid cultivar
MEMPGRRSNYTLLSQVPDDHFAAATATSFYESEGKNNNNKAKGDSRGFDWETGGGEYRAAPANRIGNVYSSVGLQRQSSGSSFGESSLSGEYYAPTLSTTAANEIDGFGYVNDDGFKTGGGGGEFRGKGGGMDGGVGPPGGSSSGKSWAQQTEESYQLQLALALRLSSEATCADDPNFLDPVPDESSSRLSSSADAVSHRFWVNGCLSYFDKVPDGFYLIHGIDSYVWSMCTDVQESGRIPSIESLKSVDPGTGSSIEVVLIDRRSDPSLKELQNRVLSISYACITTTEIVDQLAKLVCSRMGGSASVGEAEFFSIWRESSDDLKDCLGSVVVPIGSLSIGLCRHRALLFKVLADTIDLPCRIAKGCKYCTRDDASSCLVRFGIDRELLVDLIGNPGCLCEPDSLLNGPSSISISSPLRFPRLRTVEPTIDFRSLAKQYFSDCQLLNLVFDEAPAGSAGDEDNKGFSMYPKQKFTDGNNLFLVSGLGDDTSMHVDDRNPQFLKSFNPSQNIVHQQTVLKDQIPLKRIPPIGHRDISRLDTSKDSRFGEGLQVVPSKPNKELTLDVDDLDIPWSDLVLKERIGAGSFGTVHRADWHGSDVAVKILMEQEFHAERFNEFLREVAIMKRLRHPNIVLFMGAVTKPPNLSIVTEYLSRGSLYRLLHKPGPILDERRRLYMAHDVAKGMNYLHRRNPPIVHRDLKSPNLLVDKKYTVKVCDFGLSRLKANTFLSSKSAAGTPEWMAPEVLRDEPSNEKSDVYSFGVILWELATLQQPWGNLNPAQVVAAVGFKNKRLEIPRDLNPQVASIIEACWANEPWKRPSFASIMESLRPLIKAPTPQPSHADMPILT

SEQ ID NO: 13459 - protein, 486 aa, Arabidopsis thaliana
MSVKNNSFSSAEIPDVADQPRDRFNPEATQDLQEKDETKEEKEGDEEVKHDEAEEDQEVVKPNDAEEDDDGDDAEEDEEEEVEAEEDEEAEEEEEEEEEEEEEEEDSKERSPSSISGDQSEFMEIDLGEIRKDVQCPICLGIIKKTRTVMECLHRFCRECIDKSMRLGNNECPACRKHCASRRSLRDDPKFDALIAALFTNIDSYEEEELAFHEDEMARNKQIQASIAQISQRQSEALVKRRSLGKEAAVLMRSPRIASGSRRRRNSRNMEQQNASEAHEDDDNDDNNNRGRDKDSSSDERGTEVRQKKRRKRSTSRSTQHPSSSGANKNNGNCADNDTEVYRDTKGISPGLVWNPEILAWGRGGTRSNTRHGNNTSGGSSKSVRNARVNKLVEYLRSSVDGSSVEFVALQIHLKTEEVELLVTRRRVGEDAAIENLPAVTPASAAASKDEMLSLEDNETLSRLKIDFISSHEQHLIIAYRKKQTE

SEQ ID NO: 13460 - protein, 507 aa, ASPERGILLUS NIDULANS FGSC A4
MYSSIHTTAPGPEYDSPTPTEYTSLLPKPTDDLFPDSLSSRDAEVTDHDSRKAILAEFLLLLKSSVPVILAYALQNSLQTVSVLIVGRISPEHLATSAFSLMFAMITAWMIALGGTTALDTLASSSFTGSDKRNLGILLQRGFFVLGLFYLPVAVLWIFSEKVFLLLGQDADLSKDSAQFLTALIPGGLGYVYFELMKKYLQAQGIMRPGTYVLLLTSPLNAALTYTFCYKLGLDLLGAPLALGISYWLSFALLVLYAILVRGSECWGGWSREALTNLGTFSRLAILGVVHVGTEWWAFEIVALAAGRLGTIPLAAQSVIMTADQVLNTIPFGVGVATSARVGNLLGAKDAKGARRAANVAAWLSMILGLVVLVAFMGTKDHFAKIFNSDPRVVSLTSAVLPFVALFQIADGLNGSCGGSLRGMGRQHVGAAVNIVSYYCGALPLGVYLAFHGWGLKGLWVGQCVALYLVGALEWVIVAASDFDKEVRKAFKRMDEAAYAEEEEGRL

SEQ ID NO: 13461 - protein, 358 aa, Haloarcula marismortui
MSSDQQDDQGEEDTLVNVADGVDHQVAMVMDLNKCIGCQTCTIACKNLWTEDGGSEYMYWNNVETKPGEGYPRGWENSGGGWKSGEHKERQPGEIPDEEDYGRAWEFNHEEIMYEGSDEPLRPRDGAEWGPNWDEDQGAGEYPNSYYFYLPRICNHCTHPSCVEACPRSALYKRQEDGIVLVDQDRCRGYRYCVEGCPYKKVYYNTVSKKSEKCIFCYPRIEGEGPDGETFAPACAEECPPQLRLVGFLDDEEGPIHKLVNEYEVALPLHPEFRTQPNVYYIPPFAPGQHTEDGETVDIDRIPRQYLRDLFGDGVDQALDTIERERQRARQGEDSELMELLQDKNPAKQYRLEVFDDE

SEQ ID NO: 13462 - protein, 244 aa, Trichodesmium erythraeum IMS101
MYRPFLEYLEKELFSKFDLRSRPIPAGLEANVSNRGKNKARIQSWCYECTELRKIRYTYIDAGATAQVFNSVIYPSYCYDIPLLGIDLLSFGKNKILIVLDFQPLFQEESYLAKYIEPMRSLREKYNDLAQNLEMKFYDANQYFSKYLLFAKTDAQTVQTKFFQAYKDYISLYWQMLHEAEIIQTEAEIQKIVKAQKDYDQYSAERDPASGLFSSYFGHEWSEKFLYQFLFEDAVPLAVPTSTR

SEQ ID NO: 13463 - protein, 256 aa, Trichodesmium erythraeum IMS101
MTATNNIVNLYQPFLDYALTKLKEELELQPYPIPSGFEHKVAMTGKGKKQQEVQTTSYAHCSPKLRQIRAAHVQGGSALQVLNFVIFPHLNYDLPFFGADLVSLPGGHLIALDMQPLFRDNLQYQKKYTEPIWETFQKHQKYLPWGGDFPEEATPFFSPAFLWTRPQKTELVETRVFEAFKDYLQAYLIFVKQTEQITNSEKLAEIKEAQLRYLRYRAEKDPARKMLTRFYGHEWTEEYIHGFLFDLERKLALNPA

SEQ ID NO: 13464 - protein, 327 aa, Glycine max
  unsure (1)..(327): unsure at all Xaa locations
DKAMNLMQAVRYDAYGGGPAGLKHVEVGVPSPKANEVLIKLEAVSINPIDWKIQKGLLRPLFLPRTFPTXPCTDVAGEIVEIGTQVKDXXSGDLVLAKLTHQYGGGXAEFAVASESLTAARPSEVSAAEAAALPXSRLTARDALTXICRVKLDGTGQLKNIXGTAAFRXXRSLIAVTSKTRHTHVTATGGARNIDFVRLRGPMRVLLQDSRGAALKSLLVEKRGGINEHWKSWALLIYLKKKRGGIDLTPNASSLWTAAMKKITFSKKQLVPFFVNVQREGLEYLLQLVKDGKLKSVIDSKFPLSKAEDAWAKSIDGHATGKIIVEP

SEQ ID NO: 13465 - protein, 465 aa, Caulobacter crescentus CB15
MSRDDQTRPPDPSPPRRDLLSGAMADAVPILISYVDRDERYRFVNRAYERWFGVDRAQIEGRPLREVVGDLAYARLAGHVRRALAGETLIFEGEVEYQGAGVRFIEARYVPDITPDGEIPGYYALITDITDRKRAEETERLLIREVDHRAKNVLTVVQSLAQLTPFESKDQYVQALSGRIGSLARAHSLLSTTRWSGVDLHDLLELELDPYGGEAGEQIAILGPPALIDAQAAQSLALVVHELATNASKYGALSRPLGRLNVSWGFGDAGVLHLTWREDAGASVAAPTQRGFGSTLIQSAVKQLGARIEHIWRPQGLKVRLDLLSGAQPRPAEGAPVYRPGLSAEGDTSLEDQHVLIVEDEAVVAMELTRMLSAAGATVVGPAGTIEEALALLDAHPVDCALLDVNLGGLPITPVAHALHRRGVPFVYLTGYQEPAVDDAPILRKPVPAHVLLGALARGTQLTAQ

SEQ ID NO: 13466 - protein, 416 aa, Shigella flexneri 2a str. 2457T
MESKVVVPAQGKKITLQNGKLNVPENPIIPYIEGDGIGVDVTPAMLKVVDAAVEKAYKGERKISWMEIYTGEKSTQVYGQDVWLPAETLDLIREYRVAIKGPLTTPVGGGIRSLNVALRQELDLYICLRPVRYYQGTPSPVKHPELTDMVIFRENSEDIYAGIEWKADSADAEKVIKFLREEMGVKKIRFPEHCGIGIKPCSEEGTKRLVRAAIEYAIANDRDSVTLVHKGNIMKFTEGAFKDWGYQLAREEFGGELIDGGPWLKVKNPNTGKEIVIKDVIADAFLQQILLRPAEYDVIACMNLNGDYISDALAAQVGGIGIAPGANIGDECALFEATHGTAPKYAGQDKVNPGSIILSAEMMLRHMGWTEAADLIVKGMEGAINAKTVTYDFERLMEGAKLLKCSEFGDAIIKNM

SEQ ID NO: 13467 - protein, 424 aa, Rhodopseudomonas palustris CGA009
MTNSELLTRRQTAVVRGVSQATPVFAERALNSEIWDVEGKRYVDFAGGIAVLNTGHCHPRIVAAIREQLDRFTHTCFQVAPYEGYIRLAERLNQLAPINGPLKSILLSTGAEATENAVKIARAATGRSGVIAFTGGFHGRTAFASAMTGKVIPYKKALGPPLPGVWHVPFPVAGSDVSVEDALRCVQFVFKADIDASQVAAIIIEPVQGEGGFHQAPPELMRGLRRLCDENGIVLIADEVQTGFGRTGKMFAMEHYDVQADIVCVAKSLAGGLPLSGVIGRAAIMDAAEPGGLGGTYAGNPLACAAALAVLDVFEEENLIARANQIGERLRSAIDRFALSNTLVPTSVARGPGAMVAFDILKQRGSNEPDAEATKRVTRLAHENGLILLSCGTAANTIRILVPLTASDAIVDEGLAILERCLAA

SEQ ID NO: 13468 - protein, 483 aa, Rhodopseudomonas palustris CGA009
MLMPSDPGLLAERCLIGGKWCGEPVDAVFNPATGERIGAVPRFGTDEAEEAVRAAEIAFRQWSKLLAKQRATMLRAWFDQIIANRDDLALLLTREQGKPLAEALGEIDYAASFVEFYAEEARRIYGETIPSHRADARTMVIRQPVGVVAAITPWNFPAAMITRKVAPALAAGCTVVIKPAPETPLTALALGVLAQRAGFPPGVLNIITGDAPAIGKAWTEHPTVRAISFTGSTEVGKILMRQAASTVKKVALELGGNAPFIVFDDADLDAAVEGVIASKFRNMGQTCVCANRIYAQDGIYDAFVEKLTAKVATLQVGNGVDAGVTQGPLITTEAIAKVERHVSDAVAKGAKVVLGGKRHKLGRTFFEPTVLAGVTTAMLITREETFGPVAPVYRFTDEADVIAQANDSPFGLASYFYARDLGRVFRVAEALESGMVGVNSALLGADVVPFGGVKQSGLGREGSRHGIEEYVETKYILLGGLDR

SEQ ID NO: 13469 - protein, 149 aa, Pseudomonas syringae pv. syringae
TETRDLLVSLAGEVGLKDAIKAQYDGELVNSSEGRPALHTALRRPVGDKLKVNGVDVMPDVHRVLNQMTELVGRIHDGLWRGYTEKPITDVVNIGIGGSFLGPELVSEALVAYAHKGVRCHYLANIDGSEFHELSMRIRAETTLFIVSS

SEQ ID NO: 13470 - protein, 92 aa, Malus x domestica
AEDLFSDVWAWRKYGQKPIKGSPHPRSYYRCSSSKGCSARKQVERSCSNPETFIITYTAEHNHVHPTRRNSLAGSTRSKFPSSRNKDKCSSS

SEQ ID NO: 13471 - protein, 243 aa, Leptothrix cholodnii
MSDTHFGFKTVDERQKADLVRGVFDSVASRYDVMNDAMSMGMHRLWKAYAVAVSGAREGHQVLDIAAGTGDLTRQFARKVGASGTVVHTDINESMLRTGRDRLLDEGLQLPTVLCDAERLPFPSARFDIVSVAFGLRNMTHKDVALGEMARVLKPGGKLLVLEFSRVAEPLRRAYDWYSFNVLPRLGQVLTGDAQSYRYLAESIRMHPPQAELKSMMKTAGFGHVDVHNMSAGVVALHVGLKC

SEQ ID NO: 13472 - protein, 353 aa, Caulobacter crescentus CB15
MAKAAPWPLDAWYVACTPDEIADRPLGRRICGKAMVFHRGKDDRPVALEDFCPHRGAPLSLGFVRDGELVCGYHGLTMGCEGRATAMPGQRVAAFPAIRAFPVLERYGFIWVWPGDPAQADPAKLHPLFWADSPDWAYGGGLYHIACDYRLMVDNLMDLTHETYVHATSIGQKEIDEAPVTTRLEGEEVVTSRFMEGIHAPPFWRMALRGAGLPENALVDRWQICRFSLPSHVMIEVGVALAGHGGYHAPADKKVSSVVVDFITPETETSHHYFWGMARSFAVGDAALTDTIREGQGKIFSEDLEMLERQQKNLLAYPDRKLLKLNIDAGGVRSRMAIDKAIAAETALAAQAK

SEQ ID NO: 13473 - protein, 149 aa, Pseudomonas syringae pv. syringae
TETRDLLVSLAGEVGLKDAINAQYDGELVNSSEGRPALHTALRRPVGDKLKVNGVDVMPDVHRVLNQMTELVGRIHDGLWRGYTEKPITDVVNIGIGGSFLGPELVSEALVAYAHKGVRCHYLANIDGSEFHELSMKIRAETTLFIVSS

SEQ ID NO: 13474 - protein, 369 aa, Anabaena azollae
MQVKAAVAYSVVQPLTIETVELEGPQAGEVLVEIKASGVCHTDAYTVSGADPEGLFPAILGHEGAGVVVEVGADVKSVKPGDHVIPLYTPECRQCEYCLSFKTNLCQAIRVTQGRGLMPNATSRFSIVGKMIHHYMGTSTFANYTVLPEKAVAKIREDAPFDKVCYIGCGVTTGIGAVIYTAKVEAGANVVISGLGGIGLNIIQAAKMVGANMIVGVDINPKKRALAEKLGMTHFVNPHEIEGDLVSYLIDLTKGGADYPFECIGNINVMRQALECCHKGWGVSVIIGVAGAGQEISTRPFQLVTGRVWKGSAFGGARGRTDVPKIVDLYMNGQINIDDLITHVMPIEQINHAFDLMYRGESIRSVVTF

SEQ ID NO: 13475 - protein, 366 aa, Caulobacter crescentus CB15
MQVTAAVTRSPSGPFSLEALDIEPPRAGEILVRVVATGVCHTDMVMRDQHLPTPQPVVLGHEGAGVVEQVGPGVAKVAVGDHVVMTFNSCGRCPSCSDHAPTYCHEFFPRNFMGAREDGSSGLSKGSEVIHANIFGQSSFATYALCHERNAVKVDKTAPLERLGPLGCGVMTGAGAVMNALKVPAGRSLVVFGAGAVGLSAVLAAKAIGAGPIIAIDINPERLALALELGADHALNGAEGGVVEKIQAITGTGAHFSIDTTANLKVMRQAVDCLGARGVCGLVGASKMGDELPLDAVSVMSGGKVVRGVVEGDADPDVFIPELIALHLAGRFPFDRLIQFYPLAEINQAVSDGETGRVIKPVVRMS

SEQ ID NO: 13476 - protein, 75 aa, Triticum aestivum
MNRARRGGRLFLLWLCAVVCLMARPGACSVVLMANNTTLSFSDVEATFTPEVKGSGLNGVIYTVEPLDACSPLIK

SEQ ID NO: 13477 - protein, 370 aa, Sulfitobacter pontiacus
MKTRAAVAVAAGQPLEVMDVNLEGPKRGEVLIEIKATGLCHTDEFTRSGDDPEGIFPAILGHEGAGVVLEVGEGVTTLEVGDHVIPLYTPECRECEYCLSGKTNLCQAIRVTQGQGLLPDGTTRFSMMDGTPIHHYMGCSTFANHTVIPEIALAKVRKDAPFDKICYIGCGVTTGIGAVINTAKVEIGARCVVFGLGGIGLNVIQGLRMAGADQIVGVDLNDDKEETGRYFGMTDFVNPTKVEGDMVAHLVELTKGGADYTFDATGNTKVMRQALEAAHKGWGESIIIGVAPAGAEISTRPFQLVTGRVWKGTAFGGAKGRTDVPKIVDWYMNGKIEIDPMITHKLTLDQINEGFELMHKGESIRAVVEF

SEQ ID NO: 13478 - protein, 406 aa, Photorhabdus luminescens subsp. laumondii TTO1
MSSVDILVPDLPESVADATVAVWHKKQGDRVERDEVLVEIETDKVVLEVPASEAGVLEAILEEKDATVLSRQLLGRIRLGDSTGKPAEIKEKTEATLAKRQTAGLDEESNDALSPAVRRLIAEHDLDAKAIKGSGVGGRIVREDVEKYMADNEKVASKPAESSAASAQGSLLPHRSEKRVPMTRLRKRVAERLLEAKNNTAMLTTFNEVNMKPIQEMRKQYGEAFEKRHGVRLGFMSFYVKAVVEALKRYPEVNASIDGTDVVYHNYFDISIAVSTPRGLVTPVLRDADALSMADLEKRIKELAIKGRDGKLTVEELTGGNFTITNGGVFGSLMSTPIINPPQSAILGMHAIKDRPMAVNGQVEILPMMYLALSYDHRLIDGRESVGFLVTIKEMLEDPARLLLDV

SEQ ID NO: 13479 - protein, 207 aa, Oryza sativa (japonica cultivar-group)
MCRTPRVFFLDCLLPATLAVAPSLMDHPAKVMMGWALIAKYHLPQPSSSDQAQTGPYRLVFALYVSTARPDCRQSPSDMAPGKQRGKAKGAPPPPAAPNAAAAGGFPACLRLMPPSTVAISIQAKPGSKLATITEIGDEAVGVQIDAPARDGEANAALVDFISSVLGVKKREVSIGSGSKSREKVVLVQDATLQGVFDALKKACASA

SEQ ID NO: 13480 - protein, 248 aa, Triticum aestivum
MMDGGGGVGDPVEEFLIGGAGDGGEDSLAAFCDGGLGIEDVRGGDSGLGHSNLGKRGRDEPSPSGPKSKACREKMRRDKLNDRFLELCSVMNSGKHTGVEECSASNPGKNAKLDKASILSDATRMLTQLRGETEKLKESNVNLRETIKDLKAEKNELRDEKLSLKAEKERLEQQLKAASAAPTGFAPHMPYPAAFHPAVFPPFAPPYQVPANKGAPVPAAFPGMAMWHWLPPTAMDTTQDPKLWPPNA

SEQ ID NO: 13481 - protein, 242 aa, Fusobacterium nucleatum subsp. vincentii ATCC 49256
MSKMPIIGISSSIIVDNSGSFAGYMRAYVNKDYVDAVIRAGGVPLIIPFSVDKEVIISQAQLIDGLILSGGHDINPYNYGQEPSQKIGEIFPERDIYEMILLEESKKRDIPILGICRGFQLINVAAGGTLYQDLSLIPGNILKHNQVSNPTLKTHKIEIKENSFISSIFGKETMVNSFHHQAIDKVADDFIVVARASDGVVEAIEHKTYKFLVAVQWHPEMLAVNCEKARVLFSKFVEEAKK

SEQ ID NO: 13482 - protein, 246 aa, Cynodon dactylon
AIGDKPGPNITATYGSKWLEARATFYGSNPRGAAPDDHGGACGYKDVDKPPFDGMTACGNEPIFKDGLGCRACYEIKCKEPVECSGEPVLVKITDKNYEHIAAYHFDLSGKAFGAMAKKGQEDKLRKAGELTLQFRRVKCKYPSGTKITFHIEKGSNDHYLALLVKYAAGDGNIVAVDIKPRDSDEFIPMKSSWGAIWRIDPKKPLKGPFSIRLTSEGGAHLVQDDVIPANWKPDTVYTSKLQFGA

SEQ ID NO: 13483 - protein, 312 aa, Vibrio cholerae O1 biovar eltor str. N16961
MKERFMSKFAIVFPGQGSQAVGMLADLAEQYAVVKQTFAEASEVLGYDLWALVQDGPVEDLNQTFRTQPALLAASVAIWRVWQQLGLEQPAVLAGHSLGEYSALVCAGVIDFKQAIKLVELRGQLMQQAVPAGTGAMYAIIGLEDEAIAKACADAAQGEVVSPVNFNSPGQVVIAGQKDAVERAGVLCKEAGAKRALPLPVSVPSHCALMKPAADELAKTLAELEFNAPQIPVINNVDVVAETDPVKIKDALIRQLYSPVRWTECVEQMSAQGVEKLIEMGPGKVLTGLTKRIVKTLEGVAVNDVASLDAVK

SEQ ID NO: 13484 - protein, 181 aa, Arabidopsis thaliana
MASSMFSSTAVVTSPAQATMVAPFTGLKSSASFPVTRKANNDITSITSNGGRVSCMKVWPPIGKKKFETLSYLPDLSDVELAKEVDYLLRNKWIPCVEFELEHGFVYREHGNTPGYYDGRYWTMWKLPLFGCTDSAQVLKEVEECKKEYPGAFIRIIGFDNTRQVQCISFIAYKPPSFTEA

SEQ ID NO: 13485 - protein, 149 aa, Pseudomonas syringae pv. syringae
TETRDLLVSLAGEVGLKDAIKAQYDGELVNSSEGRPALHTALRRPVGDKLKVNGVDVMPDVHRVLNQMTELVGRIHDGLWRGYTEKPITDVVNIGIGGSFLGPELVSEALVAYAHKGVRCHYLANIDGSEFHELSMKIRAETTLFIVSS

SEQ ID NO: 13486 - protein, 203 aa, Mycobacterium avium subsp. paratuberculosis str. k10
MGVAQISSAITPAQPAELYPGDIKSVLLTAEQIQARIAELGREIGDNYRDAATETGQDLLLITVLKGAVIFVTDLARAIPLPTQFEFMAVSSYGSSTSSSGVVRILKDLDRDIQGRDVLIVEDVVDSGLTLSWLLRNLSTRHPRSLRVCTLLRKPDARGAHVDIAYVGFDIPNDFVVGYGLDYDERYRDLSYIGTLDPRVYQQ

SEQ ID NO: 13487 - protein, 149 aa, Pseudomonas syringae pv. tabaci
TETRDLLVSLAGEVNLKDAIKAQYDGELVNSSEGRPALHTALRRPVGDKLKVNGVDVMPDVHRVLNQMTELVGRIHDGLWRGYTEKPITDVVNIGIGGSFLGPELVSEALVAYAHKGVRCHYLANIDGSEFHELSMKIRAETTLFIVSS

SEQ ID NO: 13488 - protein, 149 aa, Pseudomonas syringae pv. theae
AETRDLLVALASEVGLKDAIKAQYDGELVNSSEGRPALHTALRRPVGDKLKVNGVDVIPDVHRVLNQMTELVGRIHDGLWRGYTEKPITDVVNIGIGGSFLGPELVSEALVAYAHKGVRCHYLANIDGSEFHELSMKIRAETTLFIVSS

SEQ ID NO: 13489 - protein, 409 aa, ASPERGILLUS NIDULANS FGSC A4
MPSDRITPPSALLLLPPPPIVSFDEFRTVYEPVLSSVFANLLNALNGSNRTASLDIALSLPGLLSPSCQPPTRAFASLQRIVEHMYRLIGVISIERKIEMEAPGGIDSRVILLDFDSVRGTPATAANSGLVERNGPIVDLKTLASSGRLWDNIYYPETSVGQELATAFSNIYTSTKDPNGGLPQSISGSPQWTPGQSLVDSAGSVGSALHHSVILGGTFDHFHIGHKLLLTATALVLQPAGTGPTGQNRTITIGVTGDEMLKNKKYAQFLESWDERCRSTGAFLTSIMDFGPPETEPAHIERIYNPGPNGRQIVMKIRPGITLKMAQIHDPYGPTITEEDLSALVVSKETRSGGAAVNQERAKRGWKQLEVFEVDVIHTGEVPPGDVEDFASKISSTDIRRRRMELAMI

SEQ ID NO: 13490 - protein, 252 aa, Phaseolus vulgaris
MATSKVLLSNVLFVFVCFGICSAARTLLTLEDRVNLHVGTVVGGYGGGGGSGGGGGGAAVELGGGGYGEGAGGGEGAGAGYGAAGGGHGGGGGNGGGGGGGADGGGYGGGAGKGGGEGYGGGGANGGGYGGGGGSGGGGGGGAGGAGSGYGGGEGSGAGGGYGGANGGGGGGNGGGGGGGSGGAHGGGAAGGGEGAGQGAGGGYGGGAAGGGGRGSGGGGGGGYGGGGARGSGYGGGGGSGEGGGHGGGYYP

SEQ ID NO: 13491 - protein, 445 aa, Pseudomonas syringae pv. syringae B728a
MTLRQFAGLGALLSLALPGLALAADPVAEPVLNSGDTAWMLTSTALVLFMTIPGLALFYGGMVRSKNILSVMMQCFAITGLISILWVVYGYSIAFDTTGMEAGVVNFNSFFGGMGKAFLAGITPASITGPAALFPEAVFVTFQMTFAIITPALIVGAFAERMKFSAMLVFMGIWFTLVYAPIAHMVWGGVGGLLWDWGVLDFAGGTVVHINAGVAGLVACLVLGKRKGFPTTPMAPHNLGYTLIGAAMLWVGWFGFNAGSAAAANGTAGMAMLVTQIATAAAALGWMFAEWLTHGKPSALGIASGVVAGLVAVTPAAGTVGPMGALIIGLAAGVICFFCATSLKRKLGYDDSLDAFGVHGIGGIVGAILTGVFAAPALGGFGTVTDIGAQVWIQFKGVAFTVVYTAIVTFIILKVLDAVMGLRVTDEEESVGLDLAQHNERGYNL

SEQ ID NO: 13492 - protein, 465 aa, Phaseolus vulgaris
MATIHRLPSLVFLVLLALGVCSARRALLTLDAGYGLGHGTGGGYGGAAGSYGGGGGGGSGGGGGYAGEHGVVGYGGGSGGGQGGGVGYGGDQGAGYGGGGGSGGGGGVAYGGGGERGGYGGGQGGGAGGGYGAGGEHGIGYGGGGGSGAGGGGGYNAGGAQGGGYGTGGGAGGGGGGGGDHGGGYGGGQGAGGGAGGGYGGGGEHGGGGGGGQGGGAGGGYGAGGEHGGGAGGGQGGGAGGGYGAGGEHGGGAGGGQGGGAGGGYGAGGEHGGGAGGGQGGGAGGGYGAGGEHGGGAGGGQGGGAGGGYGAGGEHGGGGGGGQGGGAGGGYAAVGEHGGGYGGGQGGGDGGGYGTGGEHGGGYGGGQGGGAGGGYGTGGEHGGGYGGGQGGGGGYGAGGDHGAAGYGGGEGGGGGSGGGYGDGGAHGGGYGGGAGGGGGYGAGGAHGGGYGGGGGIGGGHGGNVP

SEQ ID NO: 13493 - protein, 442 aa, GIBBERELLA ZEAE PH-1
MGVKSDSHLNHGELRTSCVFSSQDALKAEQDHSAKNYQSLPIVFSRAQGASVWDPEGRHYLDFHAASTALNHGHCHPKLVATLVDQASRLTLTSRAFHNDIYPQFARYVTGLFGYDRVLPSSTGAEASETAIKVARKWAYKVKGVPENQAIVFGAAGNHHGRTLATIALASDNMSRDNYGPLDQNISCTIPGTNRHIEYNNKAALDEAFEAAGFNLAAFIVEPIQGDAGVIVADDDYLRHARSLCDKHNVLLICDEIQTGIGRTGKFLGHYWSGIRPDMVLLGKTMTGGMYPFSCVLGDNAVMLTVEPGTHGSTYGGNPLGAAIAMRALQVVEEENLAENAERLGCVMRDGLKEIQAQTNIIETVRGRGLLNAVVIDQSKTNGHTGIGLCELMKEKGLLLKSSRTGIIRISPPLVITVEEIHWSLRIMKESIDELMQLPSAS

SEQ ID NO: 13494 - protein, 470 aa, Vibrio parahaemolyticus RIMD 2210633
MIKFGTGGWRAFIGEEFTKDNVRLVAQAVANITNRESVADRGFVIGYDRRFLSDKAGRWFAEVLAANGIVVSFIDKFVPTPIVMFKAKEMGCAYSACITASHNPADYNGIKVFIEGGRDADEIITEKIETQISTLTAQDVKSVDFDQAVEDKLIEIINPMNEFVDSIIDFIDIEAIKKANLRVLIDPMFGVAKNALQTVLINGRCEVDVINDGKNPDFGGLMPSPSAATLYRLMHLVEQEGYDIGIGTDGDADRLGIIDEKGNFIHPNEVLILLYYYLLKYKGWKGSVVRNIATTHLLDKIAEDHGEKCFEVPVGFKHISSQMEADDSLIGGESSGGLTIRGHIKGKDGVFASSLLVEMISVTGKKLSELLDEIYGKYGYAYMAEGDCKFKPAQKAVLFNKIYVEKQLPEFEFDIEKVSYEDGAKVYFKNGGWIIARFSGTEPLLRIFAEMQDKDTAERVLQQFKDFLSL

SEQ ID NO: 13495 - protein, 344 aa, Streptomyces avermitilis MA-4680
MRATLIYGAGDVRVEDVPDPKIQQPTDAVVRVLRSCICGSDLWPYKSRPATEQGERIGHEFLGVVEDVGSDVSGLKNGDLVVAPFVWSDNTCDFCAEGLHTSCRHGGWWAADGVDGGQGEAVRVPQAQGTLVKLPVAEDSALLPSLLTLSDVFCTGHHSAVTAGVDPRTTVTVVGDGAVGLSAVLAARRLGAERIILMGRHKDRTDLGRDFGATDVVPERGEEGIERVRELTGGDGTHTVLECVGTLPALQMSLGVVRAGGTVSRVGAPQYDDVPLGFQEFMNNITLTGGVAPARAYIDELLPDVLEGKVEPGRVFDRTVGLDDVPAGYRAMDDREALKVLIRP

SEQ ID NO: 13496 - protein, 409 aa, Vibrio parahaemolyticus RIMD 2210633
MELATTVTELRYALDTFFFLISGALVMWMAAGFAMLEAGLVRSKNTTEILTKNFCLYAIACTTYLVIGYNIMYVDNGEGGWLPSFGGLIGTQGEGADHSLESDFFFQVVFVATAMSVVSGAVAERMKLWSFLLFSAVLTAFIYPMEGYWTWGGGFLSEAGFSDFAGSGIVHMAGASAALAGVLLLGARKGKYGKNGEIYPIPGSNMPLATLGTFILWFGWFGFNGGSQLMVSDFENATAVGQIFLNTNAAAAAGSIAALFVCKTTWGKADLTMILNGALAGLVAITADPLSPSPLYAVAIGAVSGALVVFSIIGLDKLKIDDPVGAISVHGVCGFFGLMVVPLSNGEATFGAQLLGAAVIFAWVFGASLVVWAILKATVGIRVTEEEEMEGMDMHDCGVGAYPEFVTVK

SEQ ID NO: 13497 - protein, 202 aa, Triticum aestivum
DFVEREDEFDINAYAERVEELMIDQDAEIDVETCEKNSSFSDFEDSADEIIYLPAIPSPDAPDEQPDKCLVSSSKLEDSNHSGSPPSSMDAVQNGLAIPPASSPLEVVDNSMAEEPSAEAANAKRKRRLSAKGLEMQQAEKVKKPPIKMSSNGKLSKPKSKPVVEPVNGNSSAKIKQQVVEPVNGNSSAADIDDEATEEDEM

SEQ ID NO: 13498 - protein, 887 aa, Methanothermobacter thermautotrophicus
MKGTVKFRIDGREVEAARGMTVLEAALANGIYIPNLCFREGIEPFGGCRLCLVENNEGRLVTACETPAEDGSEFISESERINRIRRTTLSLIIADHSRDCLACPASGDCRLQELSSYLNVSDGDLERLRPELSGIDVDESNPFFLRNHDKCILCGICVRVCRGLGAEAVDFAYRGHDTRIATFMDRDILDSSCVSCGECVEACPVGALLPRTERPSTEVRTVCPYCGAGCEIYLGVRGNRVVSSRGVPDSPVNQGRLCVKGRFALKFVNSPERLKKPLIKVDGEFVEVEWDEAISVVAERLSEYTGEEFAAVASAKCTNEENYLLQKFTRAVMGSGNIDHCARLCHAPSLTGLRMSLGSGAMTNSISELGAAGCILAVGTNPTETHPVTSYRVIRALRSRARLVVVDPRKTRLSELADIHLQNRPGSDIPLLMAMCRFILEEGLHDSEFIDSRTEKFEDFRDAVMALDLDEVERITGVNVKDIRRAAIMYASNSPASIIYSMGITQHVNGTGNVLALSNLALLTGNIGIKSAGINPLRGQNNVQGACDMGALPDLLPGYQGIGEAAGKFSEKWGSPIPPAGLTLPEMFDAARDGKIRCMYIMGENPLLSEPDIERTREALEGLEFLVVQDICLTETAELADVVLPAASFAEKDGTFTNTERRVQLLRKALDAPGDALPDWQIISMIAGRMGREDFDYESASRIFDEIRELVPSYAGISHERLKSGGIQWPCTSEEDAGTGYLHSEEFPTPTGRASFLLPDYQFRGVPEEYPLVLVTGRNLYQYHTRSMTARVEELESFSDHEELLMNPADASSMGIREGDTVEVTSERGSLRVRAGVTDEVMEGVVFMTFHFADAPANVLTGGDRDPFSGMPGLKFTPVRVCRVQLR

SEQ ID NO: 13499 - protein, 367 aa, Oryza sativa
  unsure (1)..(367): unsure at all Xaa locations
ARGRKINHPPSTSHTPLHSPRPTIKPAPGPGGLRTSGSPRTHLAKNPPKSSRSIANGGFLRSFCSVPARVRASLPDVRRVEEAHRAGAGPAHHNDVPQGRAPLRPHRRQPHLVRQLLRAAARGDHRLRLVAVHPAVAAAAAGAVRRQLVQDGAEVLRQLXARFPALSLGQHXCSTSRTPSASGSGRXDLVRLAARGSPSRAINVVLTADDVAVDGFCMSRCGTHGASPRSRAGRFAYVWVGNPATQCPGQCAWPYHQPVYGPQAAPLTPPNGDVGVDGMVISLASMIVGTVTNPFGNGFFQGDADAPLEAATACAGVYGKGAYPGYAGSLLVDPASGASYNANGAHGRKYLVPALVDPDTSACSTVG

SEQ ID NO: 13500 - protein, 470 aa, Methylobacterium extorquens
MPINVLMPALSPTMEKGNLAKWLKKEGDAIKSGDVIAEIETDKATMEVEAVDEGVLAKILVAEGTADVPVNELIALIAEEGEDPGSVQAPKGGAEAKTAPVEPKGTPDQNAAPDGSHASYARVDQVPEGAKPNGAAQPAGSGDRVFASPLARRIAKQEGVDLSAVKGSGPHGRVIQRDVQAAIENGTAKAGAAAKPEAKSEGKSAPAPEKSAPKAAAAGGAPAGLSLDQVKGFYEKGSFEEVPLDGMRKTIAKRLTEAMQVAPHFYLTVDCELDALMKLRETLNGSAGKDKDGKPLFKLSVNDFVIKAMGLALTRVPAANAVWAEDRILRFKHAEVGVAVAIDGGLFTPVIRKADQKTLSTISNEMKDFAGRARAKKLKPEEYQGGVTSVSNLGMFGIKHFTAVINPPQSSILAVGAGEKRVVVKDGQPTVAQVMTATLSCDHRVLDGALGAELIAAFKGLIENPMGMLV

SEQ ID NO: 13501 - protein, 479 aa, Methylobacterium extorquens
MSETYDVLIIGAGPGGYVAAIRSAQLGFKTAVVDREHLGGICLNWGCIPTKALLRSAEIYHYMQHASDYGLSAKEVSFDAAAIVKRSRGVSGRLNGGVGMLLKKNKVDVIWGEASIESGAKGNEPGKVTVKETKRAEPPKGAKGAGTYAAKHIIVATGARPRVLPGIKPDKKQIWTYYEAMVPEKMPKSLLVMGSGAIGIEFASFYRTMGADVTVIELLPQILPVEDAEIAGLARKRFEKQGIKILTSAKVTKVEKGADSVTATVEDDKGKTQQLTAEKLISAVGVVGNIENLGLEKVGVKIERGVVVTDGLGRTNVPGVYAIGDVAGPPMLAHKAEHEGVLCVETIKGLHTHPMDKAKIPGCTYCQPQIASVGVTEGKAKELGLSIKVGRFPFAGNGKAIALGEPDGLVKTIFDAKTGQLLGAHMVGAEVTELIQGYVVAMTLESTEEELMHTVFPHPTLSEMMHESVLDAYGRVIHT

SEQ ID NO: 13502 - protein, 360 aa, Oryza sativa (japonica cultivar-group)
MAKERKRRQPADAPPPGDDDEGRDHRREKKPRKERPDPVLPSQIKNKDKRKEVHAKLKREKKAQKRKLARERGQAAQRAVELGEQPPEKLVPRTIENTREPDETVCRPDDQELFAGNDADEFNAVLKQQTTPKVLITTCRFNSGRGPAFIEELMQVIPNSCYVKRGTYELKKIVEYANNRDFTSLVVVHTNRREPDALLIINLPAGPTAHFKLSKLILRKDIKNHGNPTSHKPELVLNNFTTRLGHRVGRMIQSLFPQEPNFRGRRVVTFHNQRDYIFFRHHRYIFEMKENKIASKDKKAKTSESKSQPEKQVICRLQECGPRFTLKLLTLQHGTFDTKNGEYEWVHKPDMDTSRRRFFL

SEQ ID NO: 13503 - protein, 419 aa, Treponema pallidum subsp. pallidum str. Nichols
MMLRTCKDVTMRGERVVVRVDFNVPMRDGMVQDDTRVTAAVPTLRYIIEQGPRHVVLISHLGDPTRDADKAEGNAKKDGCPFDRHAFINGKHRLKPVADCLAKKLGVPVHFAPSCVGQREFIEGLPDGSVVLLENVRFHPEETSGDAKVQEQFARELAQYGDIFVNDAFGTAHREHASTVVLPRLMRRRVAGLLIEREVRYLEPMVCNPKVPMVAVVGGAKVSSKIAVLESLLRTSTALIIGGGMAYTFLKAQGVGVGTSLVEDDFIDTARMLLQKAQSGGVSVVLPVDHVCASTFCADAQPVAVDDVHIPMHLMGMDVGPRTLEQYRAHLKGVSSVLWNGPVGVFEFDAFAHGTRVLAQLIAEATDAGATSVVGGGDSIAAVSKFGLASRMSHVSTGGGASLKLFEGKVLPGISCLET

SEQ ID NO: 13504 - protein, 442 aa, Methylobacterium extorquens
MATDILVPTLGESVSEATIGRWFKKPGDTVAADEPLVELETDKVTLEVNAPAAGELGEILVKDGETVEPGAVLGSIVEGGKGSGKSDAKPAPKSAEPAETKTQSREEKGESKPAKEDAPAQESSASYGSHGDAPPTDGRPADDSGPAVAKLARESGIDPASLNGSGKDGRVTKGDMLAAIDRNGQKAPAQEARSETKAPPPRAPSAPDDAAREERVRMTKLRQTIAKRLKSAQETAAMLTTFNDVDMGAVMAMRSQYKDIFEKKHGTKLGFMGFFTKAVIGALKDVPAVNAEIDGQDLVYKNYYHIGIAVGTDKGLVVPVVRDADDLSIAGIEKKISGFGKKAREGKLSIDEMQGGTFTITNGGIYGSLMSTPILNAPQSGILGMHRIEERPVVRNGKIEARPMMYLALSYDHRIVDGKEAVTFLVRVKEALEDPARLVLDL

SEQ ID NO: 13505 - protein, 149 aa, Pseudomonas syringae pv. tomato
TETRDLLVSLAGEVGLKEAIKAQYDGELVNSSEGRPALHTALRRPVGDKLKVNGVDVMPDVHRVLNQMTELVGRIHDGLWRGYTEKPITDVVNIGIGGSFLGPELVSEALVAYAHKGVRCHYLANIDGSEFHELSMKIRAETTLFIVSS

SEQ ID NO: 13506 - protein, 149 aa, Pseudomonas syringae pv. tomato
AETRDLLVALAGEVGLKDAIKAQYYGELVNSSEGRPALHTALRRPVGDKLKVNGVDVIPDVHRVLNQMTELVGRIHDGLWRGYTEKPITDVVNIGIGGSFLGPELVSEALVAYAHKGVRCHYLANIDGSEFHELSMKIRAETTLFIVSS

SEQ ID NO: 13507 - protein, 503 aa, Methanobrevibacter arboriphilus
MSNKKKFTTNKGIPVPNDQASITTGKGSNYTMLGDSHLTEKLAHFGRERIPERVVHAKGTGAYGYFEVTNDLSKYTRAKFLSEVGKKTEVFIRFSTVGGERGSADAKRDPRGTAMKYYTEEGNYDLVGNNTPIFFIRDAIKFPDFIHTQKRNPKNNLSDADMFWDFMSLTPESIHQATFLFTDRGTPQNYRHMDLFGSHSFMWYNEKNEYVWVKYHFKTAQGIQNLTNDEAIKMCGENPDHATEDLFNAIEEGNYPEWNVYVQIMTPEEAEKYEFDPFDVTKVWFHGDYPLIPLGKLVLNKNPENFFAEVEQVAFAPSNFVPGIGPSPDRLLQGRLFSYEDTQRHRLGPNHHQIPINRAKNAEVNTYQRDGPMTVTDNGGSGPNYYPNSFDGPEVDETVTPPTIELKAEINRHPRPVEDVDFFQTGELWRRVLSDEDKDHLVYNIVAHLGNAQERIQYRQCALFYKAEPEYGTRVAEGIGLDISKVKNLSEMTQEERVEATKK

SEQ ID NO: 13508 - protein, 433 aa, Vicia faba
MGSRIRVSFEDEKGAETGMPSFNSDDACYTEGNTVDAFHVSDFGAFGQPYRIEDAVALSGNSNSVFNSLKVSGQTISPGPAHISTLGKFPTSLDKSPLENQTEPHRLQLTKLQSSNLSSSSILSVHIENQEEFTMADASPRTDISTDVDTDDKNQRFDTNQSLVPVGSDSSDRSKDKSDQKTLRRLAQNREAARKSRLRKKAYVQQLESSRLKLTQLEQELQRARQQGVFISSSGEQTHSLSGNGAMQFDAEYARWLEEQNRQINELRAAVNSHASDTELRMIVDGILAHYDEIFRLKGVAAKADVFHLLSGMWKTPAERCFLWLGGFRSSELLKLLVSQLEPLTEQQLMGITNLQQSSQQAEDALSQGMEALQQSLAETLSTGAPSSSGSSGNVANYMGQMAMAMGKLGHSRASFDRLTICASRLYNKCTEY

SEQ ID NO: 13509 - protein, 287 aa, Arabidopsis thaliana
MAMQERCESLCSDELISSSDAFYLKTRKPYTITKQREKWTEAEHEKFVEALKLYGRAWRRIEEHVGTKTAVQIRSHAQKFFTKVARDFGVSSESIEIPPPRPKRKPMHPYPRKLVIPDAKEMVYAELTGSKLIQDEDNRSPTSVLSAHGSDGLGSIGSNSPNSSSAELSSHTEESLSLEAETKQSLKLFGKTFVVGDYNSSMSCDDSEDGKKKLYSETQSLQCSSSTSEDAETEVVVSEFKRSERSAFSQLKSSVTEMNNMRGFMPYKKRVKVEENIDNVKLSYPLW

SEQ ID NO: 13510 - protein, 419 aa, Bdellovibrio bacteriovorus HD100
MKQEIKVPAVGESITEATIGSWTKKSGDFVKRNEVLMLLETDKASVEVVAENDGVLTINPGCEAGAVVQIGATVATLDTDAKPAAGAAAPAAETAKAAAPASAPAGAAALPAAAGKDASAHLSPAVNRIVNEKGLDPSAIQGTGKDGRLTKGDVLEAQPGAKPAAPKAAPASAPTGAPALPAAASKQGDKKLVPMTTIRKRISEKLKEAQNTAALLTTFNEVDMGKVMELRSKYKDKFKEKYGVNLGFNGFFVKAVVEALKDFPAVNAWINGTDIEYHNYYNIGIAVSTEKGLMVPNVKDADTLSLAGIELAIRDLAAKGRDGKITPNDLGGGTFSITNGGVFGSLLSTPILNFPQSAILGLHKIQDRPMAINGKVEIRPMMYLALTYDHRIIDGKEAVSFLVKIKELVEDPERLLLEV

SEQ ID NO: 13511 - protein, 469 aa, Bdellovibrio bacteriovorus HD100
MADTQFDLIIIGSGPGGYVGAIRAAQLGLKTAVIEKDKTYGGTCLNVGCIPSKALLESSEHYQAAQHDLAAHGVKVSKVDLDLPTMQARKDKVVKTNTEGIAFLFKKNKITPFNGMGKIVAAGKVEVKGADGNTQILTAKNIVIATGSVPVELPFLKYDEKRIVSNTGALALDQVPKSMIVVGGGVIGLELGSVWQRLGAKVTVIEYANRLGGTMDQDCMNVLKKSMEKEGMSFLLSTKVTGSKVGNDGVEVTYESLTDGKASSMKADVVLVSTGRKAFSAGVGCEEMGIQKDPQGRIIVDKHYQTNVPGIYAIGDVIAGPMLAHKAEEEGVALAEILAGGAGHVNYDTVPGVIYTHPEIASVGITEEFAKEKGLEINVGKFPFMANGRARAKGYTEGFVKIIADKKTDKILGAHMVGPSVSELIHEVIVCMEFGGSSEDLARSFHAHPTLSEVVREAALAVEKRQRQM

SEQ ID NO: 13512 - protein, 202 aa, Magnetococcus sp. MC-1
MVRLVLATGNRKKLIELKRALAGQPVELLGLDAFPQAPEVVEDGESFAENAFKKAEALMQHTGLAALADDSGLVVDALHGAPGVRSARYAGEQASDAENVDKLLHAMAGHSNRAAHFHCTLALVTPEGGRACFEGRVDGWIVQAAVGEGGFGYDPLFQPEGEARTFAQMAPHEKDAMSHRGRAVNAFVAALAARQGQWPGEA

SEQ ID NO: 13513 - protein, 351 aa, Clostridium beijerinckii
MKGFAMLGINKLGWIEKERPVAGSYDAIVRPLAVSPCTSDIHTVFEGALGDRKNMILGHEAVGEVVEVGSEVKDFKPGDRVIVPCTTPDWRSLEVQAGFQQHSNGMLAGWKFSNFKDGVFGEYFHVNDADMNLAILPKDMPLENAVMITDMMTTGFHGAELADIQMGSSVVVIGIGAVGLMGIAGAKLRGAGRIIGVGSRPICVEAAKFYGATDILNYKNGHIVDQVMKLTNGKGVDRVIMAGGGSETLSQAVSMVKPGGIISNINYHGSGDALLIPRVEWGCGMAHKTIKGGLCPGGRLRAEMLRDMVVYNRVDLSKLVTHVYHGFDHIEEALLLMKDKPKDLIKAVVIL

SEQ ID NO: 13514 - protein, 279 aa, Pseudomonas aeruginosa PAO1
MTTAAPTPSLFGQCLAEFLGTALLIFFGTGCVAALKVAGASFGLWEISIIWGVGVSMAIYLSAGVSGAHLNPAVSIALWLFAGFEGRKLPFYITAQVAGAFCAAALVYTLYSSLFIEFEQAQNIVRGSQDSLALASVFSTYPHPALSVGQAFLVEVVITAILMAVIMALTDDGNGLPRGPLAPLLIGLLIAVIGSAMGPLTGFAMNPARDFGPKLMTYLAGWGPIAFTGGREIPYFLVPIFAPILGACLGAGGYRVLIARHLPSAAAPAEAEPEKVRAS

SEQ ID NO: 13515 - protein, 248 aa, Methanosarcina mazei Go1
MRKSIKKGVISMKGVILAGGTGSRLYPLTKVTNKHLLPVYDKPMIYYPIQTLINAGIKEIMIVSGKGHAGHFLELLGSGSELGVRLTYEIQEEAGGIAQALGLAEDFADNSPVTMILGDNIFQDNIIDSVKSFTSGAKIFLKEVSDAHRFGVAEIDGNRIISIEEKPKIPKSSLAVTGLYIYDSRVFEIIRNLKPSGRGELEITDVNNAYVRMGEMEYSILEGFWSDAGTFESLFRASELVKNLNNKN

SEQ ID NO: 13516 - protein, 164 aa, Glycine max
  unsure (1)..(164): unsure at all Xaa locations
ASSMISSPAVTTVNRAGAGMVAPFTGLKSMAGFPTRKTNDGITSIASNGGTVHCVQVWPPFGKKKFXTLSYLPDLNDAQLANDVXYLLRKGWIPCLESDLDHGFMYREHNRSPSYYDGRYWTMWNLPMFGCADASHVSNELQDVYTAYPLGSIPFTLVDDARQI

SEQ ID NO: 13517 - protein, 1124 aa, Cucurbita pepo
MSTSRPSQSSSNSGRSRHSTRIIAQTSVDANVQADFEESGNSFDYSSSVRVTSDVSGDQQPRSDKVTTAYLHHIQKGKLIQPFGCLLALDDKTFKVIAYSENAPEMLTMVSHAVPSMGDYPVLGIGTDVRTIFTAPSASALLKALGFGEVTLLNPILVHCKTSGKPFYAIVHRVTGSLIIDFEPVKPYEGPVTAAGALQSYKLAAKAITRLQSLPSGSMARLCDTMVQEVFELTGYDRVMAYKFHDDDHGEVISEVAKPGLQPYLGLHYPATDIPQAARFLFMKNKVRMIVDCRAKHLKVLQDEKLQFDLTLCGSTLRAPHSCHLQYMENMNSIASLVMAVVVNEGDEENEGPALQQQKRKRLWGLVVCHNSSPRFVPFPLRYACEFLAQVFAIHVNKELELENQIIEKNILRTQTLLCDMLMRDAPLGIVSRSPNIMDLVKSDGAALLYKKKIWRLGLTPNDFQLLDIASWLSEYHMDSTGLSTDSLYDAGYPGAIALGDEVCGMAAVRITNNDMIFWFRSHTASEIRWGGAKHEHGQKDDARKMHPRSSFKAFLEVVKTRSLPWKDYEMDAIHSLQLILRNTFKDTDATEINRKSIQTTLGDLKIEGRQELESVTSEMVRLIETATVPILAVDLDGLINGWNTKIAELTGLPVDKAIGKHLLTLVEDSSVEVVRKMLFLALQGQEEQNVQFEIKTHGSHIEVGSISLVVNACASRDLRENVVGVFFVAQDITGQKMVMDKFTRLEGDYKAIVQNPNPLIPPIFGSDEFGWCSEWNPAMAKLTGWSREEVIDKMLLGEVFGVHKSCCRLKNQEAFVNLGIVLNNAMCGQDPEKASFGFLARNGMYVECLLCVNKILDKDGAVTGFFCFLQLPSHELQQALNIQRLCEQTALKRLRALGYIKRQIQNPLSGIIFSRRLLERTELGVEQKELLRTSGLCQKQISKVLDESDIDKIIDGFIDLEMDEFTLHEVLMVSISQVMLKIKGKGIQIVNETPEEAMSETLYGDSLRLQQVLADFLLISVSYAPSGGQLTISTDVTKNQLGKSVHLVHLEFRITYAGGGIPESLLNEMFGSEEDASEEGFSLLISRKLVKLMNGDVRYMREAGKSSFIITVELAAAHKSRTT

SEQ ID NO: 13518 - protein, 1131 aa, Zea mays
MSSSRPAHSSSSSSRTRQSSRARILAQTTLDAELNAEYEESGDSFDYSKLVEAQRSTPPEQQGRSGKVIAYLQHIQRGKLIQPFGCLLALDEKSFRVIAFSENAPEMLTTVSHAVPNVDDPPKLGIGTNVRSLFTDPGATALQKALGFADVSLLNPILVQCKTSGKPFYAIVHRATGCLVVDFEPVKPTEFPATAAGALQSYKLAAKAISKIQSLPGGSMEALCNTVVKEVFDLTGYDRVMAYKFHEDEHGEVFAEITKPGIEPYIGLHYPATDIPQAARFLFMKNKVRMICDCRARSVKIIEDEALSIDISLCGSTLRAPHSCHLKYMENMNSIASLVMAVVVNENEEDDEPEPEQPPQQQKKKRLWGLIVCHHESPRYVPFPLRYACEFLAQVFAVHVNKEFELEKQIREKNILRMQTMLSDMLFKESSPLSIVSGSPNIMDLVKCDGAALLYGDKVWRLQTAPTESQIRDIAFWLSEVHGDSTGLSTDSLQDAGYPGAASLGDMICGMAVAKITSKDILFWFRSHTAAEIKWGGAKHDPSDKDDNRRMHPRLSFKAFLEVVKTKSLPWSDYEMDAIHSLQLILRGTLNDASKPAQASGLDNQIGDLKLDGLAELQAVTSEMVRLMETATVPILAVDGNGLVNGWNQKVAELSGLRVDEAIGRHILTLVEDSSVSLVQRMLYLALQGREEKEVRFELKTHGSKRDDGPVILVVNACASRDLHDHVVGVCFVAQDMTVHKLVMDKFTRVEGDYKAIIHNPNPLIPPIFGADQFGWCSEWNAAMTKLTGWHRDEVVDKMLLGEVFNSSNASCLLKSKDAFVRLCIVINSALAGEEAEKASFGFFDRNEKYVECLLSVNRKVNADGVVTGVFCFIHVPSDDLQHALHVQQASEQTAQRKLKAFSYMRHAINKPLSGMLYSRETLKSTGLNEEQMRQVRVGDNCHRQLNKILADLDQDNITDKSSCLDLDMAEFVLQDVVVSAVSQVLIGCQAKGIRVACNLPERSMKQKVYGDGIRLQQIVSDFLFVSVKFSPAGGSVDISSKLTKNSIGENLHLIDFELRIKHRGAGVPAEILSQMYEEDNKEQSEEGFSLAVSRNLLRLMNGDIRHLREAGMSTFILTAELAAAPSAVGR

SEQ ID NO: 13519 - protein, 303 aa, Streptomyces glaucescens
MLVLVAPGQGAQTPGFLTPWLELPGAADRVAAWSDAIGLDLAHYGTKADADEIRDTAVAQPLLVAAGLLSAAALGDIAPGAVAGHSVGEITAARFAGVLDDTAALTLVRKRGLAMAEAAAITETGMSALLGGDPEVSVAHLEKLGLTPANVNGAGQIVAAGTLEQLAALNEDKPEGVRKIVPLKVAGAFHTHHMAPAVDKLAEAARELSPADPEVPYVSNKDGRTVATGDEVVARLVGQVANPVRWDLCMETFKELGVTALLEVCPGGTLTGLAKRALPGVKTLALKTPDDLDAARELFAEQA

SEQ ID NO: 13520 - protein, 178 aa, Glycine max
SARDIIVKVVAAALRNVPEANAYWNVETGEVVLNDSIDICIAVATEKGLMTPIIKNADQKTISAISSEVKELAAKARAGKLKPHEFQGGTFSISNLGMFPVDKFCAIINPPQACILAVGRGNKVVEPVIGTDGIEKPSIATKLSLTLSADHRVFDGKVGGAFLSALQSNFSDIRRLLL

SEQ ID NO: 13521 - protein, 467 aa, Methylobacterium extorquens
MSYDLIVIGTGPGGYVCAIRAAQLGLKTAVVEKRATHGGTCLNVGCIPSKALLHASEAFEEANKHFSELGIDVGTPKLDLKKMQSFKQSGVDGNTKGVEFLLKKNKVDTYHGRGRIAGAGRVEVISDDGGNQLLETKNIVIATGSDVTRLPGVEIDEKTVVSSTGALELAEVPKRLVVIGAGVIGLELGSVWRRLGAEVTVIEYLDRVLPGMDGEVGKQFQRILAKQGMVFKLSTKVTGVETGKKGRATVTVEPAQGGEPEKLEADVVLVAIGRVPYTEGLGLETVGVATDDKGRIEVDSHYATNVTGIYAIGDVIAGPMLAHKAEDEGVAVAEILAGQSGHVNYGVIPNVVYTFPEVASVGKTEEELKKDGIAYNVGKFPFTANGRAKANGTTDGFVKILADAQTDRVLGVHIVGADAGNLIAEVAVAMEFAASAEDIARTCHAHPTLTEAIKEAALAVDKRAIHV

SEQ ID NO: 13522 - protein, 573 aa, Treponema pallidum subsp. pallidum str. Nichols
MSISLLQQERHRYLPKVPDLLRGDFRRVCARRGLSTTAVADYDALRSLFARTYGQPLVNFVNASEKNEDSPMETAPEPRGLRVAIVLSGGQAPGGHNVIAGLFDGLKRWHADSVLIGFLGGPAGVLSGDHIEICADRVDAYRNTGGFDLIGSGRTKIESESQFAAAAQTVTRMALDALVVVGGDDSNTNAALLAEHFVNSGISTKVIGVPKTIDGDLKNEAIETSFGFDTATKTYSELIGNIARDACSARKYWHFIKLMGRSASHIALECALKTQPNVCLISEEVAAQSLTLAQIVQSLCDTIATRAQHGEHFGIVLVPEGLIEFIPEMKALITELNEVMARRAQEFEALDTPDAQRVWIEQALSASARAVFNALPAEISTQLLADRDPHGNVQVSRIDTERLLILQVTERLAQMKQEGTYTGVFSSIAHFFGYEGRCAFPSNFDADYCYTLGLTACLLAVHRFTGYVASVRNLTSSVAEWAVGGVPLTMLMNMERRHGSQKPVIKKALVDLEGMPFRVFSRRRASWALKTSYVYPGAVQYYGPPAVCDEPSVTIRLERPAPAANSSFGHRSS

SEQ ID NO: 13523 - protein, 412 aa, Zea mays
MAAPQHVRAAPLARALRATATATATATASVPVPVPVPAGIKSQGTSRRALLGLSEPQLRQLAIDLGQQSYRGKQLHDLLYKSRAKQIQEFNHVPKAFREALLGAGWSVGRSPVHHAVTASDGTTKILLKLEDNRLIETVGIPVDDDNKGSSRLTACVSSQVGCPLRCSFCATGKGGFARNLQPHEIVEQVLAIEETFKHRVTNVVFMGMGEPMMNLKSVLEAHQCFNKELKIGQRMMTISTVGVPNTIKMLASHKLQSTLAVSLHAPNQKLRETIVPSAKSYPLGALMDDCKSYFLETGRRVSFEYTLLAGINDEKEHAEELAELLRMCGGGYHVNLIPYNPIEGSEYKRPYRKVVQAFVDALEARKITVSVRRTRGLDANAACGQLRNEFQKNPLLEIEPSPSTERTLVAA

SEQ ID NO: 13524 - protein, 480 aa, Streptococcus pneumoniae R6
MPIQNKTMLITYSDSLGNNLKDLYDNLEEHFGDAIGGVHLLPFFPSTGDRGFAPVDYDEVDSAFGDWEDVKRLGERYYLMFDFMINHISRQSKYYKDYQEKHEASEFKALFLNWDKFWPENRPTQSDVDLIYKRKDRAPKQEIVFEDGSVEHLWNTFGEEQIDLDVTKEVTMEFIRKTIQHLASNGCDLIRLDAFAYAVKKLDTNDFFVEPDIWDLLDKVRDIAAEYGTELLPEIHEHYSIQFKIADHDYYVYDFALPMVTLYTLYSSRTERLAKWLKMSPMKQFTTLDTHDGIGVVDVKDILTDEEIDYASNELYKVGANVKRKYSSAEYNNLDIYQINSTYYSALGDDDVKYFLARLIQAFAPGIPQVYYVGLLAGKNDLKLLEETKEGRNINRHYYSNEEIAKEVQRPVVKALLNLFSFRNRSEAFDLEGTTEIETPTAHSIVIKRQNKDKSVTAVVEIDLQNQTYRVIENGVEVTF

SEQ ID NO: 13525 - protein, 390 aa, Rhodopseudomonas palustris CGA009
MDKTTNLRQRGANTRAVHGGQHFDPATGAVTTPIYATSTFVQSAPGVHKGYEYARSQNPTRAAFEAAIADAERGHAGFAFASGLAAEAALLEIAGQGSHIVASDDLYGGSWRLFHRVRSHSAGLTITHVDPANLDALRDAIQPNTAFIWIETPSNPTLRLADLEAIAAIGRERGVLTVVDNTFASPAVQRPLEHGIDIVVHSVTKYIGGHSDIVGGAIVVRDPDLAQKLQFLQNATGGILDPFSSFLALRGIKTLPLRVQRHSSNALAVARWLDAHPKIERVVYPGLNSHPQHALAVRQMDGGGGMVAAYLKADEQQVVDVLSRFRLFALAESLGAVESLVGQPWTMSHGSLPEADRLAREITPNLIRLSIGIEDVEDLTDDLEQALSIL

SEQ ID NO: 13526 - protein, 237 aa, Burkholderia fungorum LB400
MHPYIAEFIGTALVVLLGDGAVANVLLARTKGKGADLIVIVMGWAMAVFIAVYVTASFSGAHLNPVVTISLALAGKFAWTKVPGYVAAQMLGGMAGALLVWIAYRQHFAKEGDADVKLGVFCTAPAIRSVPHNLLTEMIATFVLILGVLYLASPQVGLGALDALPVGLLVLGIGISLGGPTGYAMSPARDLSPRLMHALLPIPGKRDSDWHYAWIPVCGPLLGGAAAACLYLYLHVH

SEQ ID NO: 13527 - protein, 266 aa, Ustilago maydis 521
MINFHPGQSWSSQPNQAYVNMGTPSFSTAAASSSSDPTSHTSQPIVTGTSVLGIKYKDGIMLATDTLASYGSLARFMDITRISQFGQNTLIGASGDMSDWQYVQHMLNKLITSEDVAADGHNLTPTQIYAYLARVMYQRRSKINPLWNSFVLGGVDPKDGTPFLGYVDLLGTTFTSSTIATGFGLHLAQPLLRKMVEGREDTLTEAEAKEILENCMKVLFYRDARSLNRFRIAKVTRDGCEISEPYSVPTSWGFAEMLRGYGPQTQ

SEQ ID NO: 13528 - protein, 205 aa, Malus x domestica
GHIKDKRIAAVQALSGTGACRLFADFQKRFRPESQIYIPVPTWANHHNIWRDAHVPQKTFHYYHPETKGLDFAGLVDDIKNAPNGSFFLLHACAYNPTGVDPSEEQWKEISKLIKEKGHFPFLDMAYQGFASGDPERDTKAIRIFLEDGHLIGIAQSYAKNMGLYGQRVGCLSVLCEDEKQAVAVKSQLQMLARPMYSTHLFMER

SEQ ID NO: 13529 - protein, 147 aa, Glomerella cingulata
MAFKRINKELTDLGRDPPSSCSAGPVGEDLFHWQATIMGPGDSPYSGGVFFLAIHFPTDYPFKPPKVNFTTRIYHPNINSNGSICLDILRDQWSPALTISKVLLSICSMLTDPNPDEPLVPEIAHVYKTDRARYEATAREWTRKYAI

SEQ ID NO: 13530 - protein, 548 aa, Pseudomonas fluorescens PfO-1
MTLSPFAGKPAPAELLVDIPRLVTAYYTGQPDASVSTQRVAFGTSGHRGSSFDLSFNEWHVLAISQAICLYREAQGITGPLFVGIDTHALSTPAGASALEVLAANGVTVMIAEGDEYTPTPAVSHAILCYNRGRTTGLADGIVITPSHNPPQSGGYKYNPTNGGPADTHITKWIEAKANELLANKLAGVKRISYEQALKAETTHRHDYVNTYVADLINVIDFDAIRGAKLRLGVDPLGGAGVRYWSAIAEHYRLDLDVVNKEVDSTFRFMTVDWDGQIRMDPSSSHAMQGLIGLKERFDVAFACDPDHDRHGIVTPSGGLLAPNNYLAVSIDYLFQNRPQWRADAAVGKTVVSSGLIDRVAKRLGRRLYEVPVGFKWFADGLFDGSLGFGGEESAGASFLRKDGGVWSTDKDGLIPALLAAEMTARTGRDPSQAYRALTDELGEPFSVRVDAKANPEQKALLSKLSPEQVTSTELAGEKIQSILSKAPGNDQAIGGLKVMTENGWFAARPSGTEDIYKIYAESFIGDDHLKQLVAEAQMLVDGAISTQ

SEQ ID NO: 13531 - protein, 856 aa, Magnaporthe grisea
MNPGPAPRPPTDRPRLNLTPSQNLPGNMANMSLNSPGMGRGQFGGGSSVYGGSTISLPLSRAASNTDGLGGVAVIKEGWAQVKESKNFINPWKQKYLILRKEALDFHKQEGSKSSYTLYLKDVINVGRVEAAGTIFEVKRQSNGTSTSPGEDDGTVRTLQIKVKSDDDLYEWIDFIYARCPGMGGVSNPTNFSHAVHVGFDPQTGEFVGLPPEWSKLLNSSAITKEDYERNPQAVFEVLDFYSDLTKRNDNPAQYSSLTPTPPAGAMPNKQLGYSTGANVAPPRQMQQQQQPMQRTNNYPNMSGGGLPPNASGARGPSPPDPQQQQRQQMQNMSSNYINQGDPNRDAERQRQAEAAQRQRMMEIEEQNRRDLEAYNASIPQTKKPIAQQEIGGYGGAPSSSADRFNPNRAPPPAPKPTAQQSNLQAQRPAPRAPNAAGGPRPGISQQNSSQNVRDPASQQQQRVPPRNDQSPNAQRYPNGGPAPQPRTNGQPQNQQPSRLPAPVKPLNVAPKPAAQSDAVRAAEAALTAKPPAQERQKDVRMSTMSETEVMAKLKEAVSKDDPNLSYSKQKKIGQGASGSVYVAKVKETAVSPIARELLREQGSRAQVAIKQMDLAHQPRKELIVNEIMVMKDSTHRNIVNYLDAFLRNNYSELWVVMEYMEGGALTDVIDNNPVITEEQISTICLETCQGLQHLHSQSIIHRDIKSDNVLLDARGNVKITDFGFCAKLTESKSKRATMVGTPYWMAPEVVKQKEYGPKVDIWSLGIMAIEMIESEPPYLNEEPLKALYLIATNGTPRLKNPAKLSKELKAFLSVCLCVDVKSRASAKELLEHDFLKHGCPLGSLSDLLAFKKHAK

SEQ ID NO: 13532 - protein, 429 aa, Deinococcus radiodurans
MTGNEQNPSKWLAAEKKYDSGVYNKHDVVMVRGQGATVWDENGRSYIDCVVGYGVATLGHSHPDVVKAVQEQAGKLMVMPQTVPNDKRAEFLQELVGVLPQGLDRVFLCNSGTEAMEAAKKFAITATGRSRFVSMKRGFSGRSLGALSFTWEPKYREPFGDAVDNKSVDFVTYGNLDELRAAVTEQTAAVIMEPVQGEGGVRPASAEFIQEARRITREKGALLILDEIQTGFCRTGKMFACEHFGVIPDGMTLAKAIAGGTPTAAFAMMSEVADRMPAGGHGTTFGGNPLSMAAGVASLRAMKREGLAEQAREKGAYMMDKLRAIQSPKIREVRGLGLMIGVELKEKSAPYIHAMEHDEGVLCLAATPLVVRFLPPAVISKEQIDQVVAAFERVLNNVNPREERQAELRAQQSEMGQQQVSQGESVQTE

SEQ ID NO: 13533 - protein, 267 aa, Ralstonia eutropha JMP134
MSIPSFGVGTFRLTGQAAVDSVYNALDLGYRAIDTAQIYGNEADVGQAIAESGVKRDELFLTTKIWTEHYAADKLVPSLRESLDKLRTDYVDLTLIHWPAPGNGVPLREFMEALAAAKSLGLTRQIGVSNFNIALTHQAIDVVGKGEIATNQIELSPYLQSRKLTAFLTEQGIAVTSYMTLAYGKVLTDPVLAQIAAKHGATVAQVALAWALQLGYAVIPSSTKRENLASNLLARDLKLDAGDMAQITALERNGREVNPEGLAPEWD

SEQ ID NO: 13534 - protein, 261 aa, Triticum aestivum
MMKTLSKSACVPEVLCTCADQSYLGILLNCCLCCSLASILNAPLSESSARFYAASVVVALEELHRRSILYRGVSADILMLDRSGYLQIVDFRFAKKLEGERTYTICGIADSLPPEIVLGRGHGFTADWWALGVLIYFMLQSDMPFGSWRESELEPFGKIAKGRLIIPSAFSVEVGDLITKLLVVDENTRLGATGADAVKEHPWFDGIDWKQIADGTSRVPQEISNRIDIYVETLQQDLTVPPSILTEDPADMTTPEWIKDW

SEQ ID NO: 13535 - protein, 176 aa, Vibrio parahaemolyticus RIMD 2210633
MKHTIEVMISEQEVQERIRELGKQITERYQGSEDLVLVGLLRGSFVFMADLARAIELTHQVDFMTASSYGNTMESSRDVRILKDLDDDIKGKDVLLVEDIIDTGNTLNKIREILSLREPKSIAICTLLDKPSRREVNVPVDWIGFEIPDEFVVGVGIDYAQKYRHLPFIGKVVPQE

SEQ ID NO: 13536 - protein, 256 aa, Oceanobacillus iheyensis HTE831
MTFPILEDKVAIVTGAAMGMGKATAILFAESKAKVVIADFNEEKGQEVVEEVKQAGGQAAFIKVDISDSAQVKQMVQFAVDQFGKLDIAVNNAALTPDDKPASEFDEDYWDKLISVDLTGTALCMKYELQQLLEQGNGGSIVNISSVSGFRPQPNNIAYVAAKHGVVGMTKVAALENGPQNIRVNTVAPGAIDTPMLRGALEQFNHTEEEYAPQLSLLNRFGQAREVAQASLWLASDAASYVTGTTIHADAGYTSR

SEQ ID NO: 13537 - protein, 165 aa, Zea mays
MSIEKIWAREILDSRGNPTVEVDLHTAKGLFRAAVPSGASTGIYEALELRDGDKQRYLGKGVLKAVDHINTTIAPVLISSGLSVVEQEKLDNLMLDLDGTENKSKFGANAILGVSLAVCKAGAAERELPLYRHIAQLAGNSDLILPVPAFNVINGGSHAGNKLAM

SEQ ID NO: 13538 - protein, 213 aa, Malus x domestica
PIKAPILVEQGLFWDNEELISLLSKESEQNELQKPLQISPSLAGARREAVDWMLRVASHYSFSALSAVLAADYFDGFLSSLQLQVEKPWMTQLAAVACISLAAKVEETQVPLLLDFQVEDSKYVFEARTIKRMEILVLSTLQWKMNPVTPISFIDYITRRLGLKNHLCWEVLKRCELVLLSLISDSRFMSFLPSVVATAIMLHVVNNIEPCLL

SEQ ID NO: 13539 - protein, 343 aa, Zea mays
MVRVGLSSAPGVNLTEQIDNVFDQLINKIEHADFDTRPFLKQLNVLGRYEPIKRNVYCTKRRIEDYGISCHCKPSPGSSVVCGRDCHCGMLFSCCSSQCECDDTCTNKSFQHRPLKKTKLIKTEKCGHGLVAEDEIKKGEFVIEYVGEVIDDRTCENRLWTMKRLLDTDFYLCEVSSNMVIDATNKGNRSRFINHSCEPNTAMQKWTVDGETRVGIFALRDIKIGEELTYDYNIMYRFVQFGAAQVCHCGSSNCRKMLGTTKYSGSSQNHHAKKKKRKTSCENCIQQFLRLWHPHKKMYVGCWIIDFDQETKMHTLKFNDLHTEKFNLKEEEWHFLEVDFDED

SEQ ID NO: 13540 - protein, 357 aa, Nicotiana tabacum
MGGLEVEKTTIGWAARDPSGVLSPYTYTLRNTGPEDVEVKVLYCGLCHTDLHQVKNDLGMSNYPLVPGHEVVGEVVEVGPDVSKFKVGDTVGVGLLVGSCRNCGPCKRDIEQYCNKKIWNCNDVYTDGKPTQGGFAKSMVVDQKFVVKIPEGMAPEQAAPLLCAGITVYSPLNHFGFKQSGLRGGILGLGGVGHMGVKIAKAMGHHVTVISSSNKKRQEALEHLGADDYLVSSDTDKMQEASDSLDYIIDTVPVGHPLEPYLSLLKIDGKLILMGVINTPLQFISPMVMLGRKSITGSFIGSMKETEEMLDFCKEKGVTSQIEIVKMDYINTAMERLEKNDVRYRFVVDVIGSKLDQ

SEQ ID NO: 13541 - protein, 211 aa, Ustilago maydis 521
MSHILEPLDAPSSYRDSRSQSSRQEQQQALRQTSTLYLGNLSFYTTEEQIYEVFGRVSSVSTGGGIKRIIMGLDRNTKTPCGFAFVEFYTHAEAVDCMRYVSGSKVDERVIRCDLDPGYKDGRQYGRGRSGGQVRDEYRQEYDAGRGGWGHNRLREEEERKRMEEEQKRRSEREQLYQEGVVGMDTGGGGMVPMGGSSKSRTRPQKRQELR

SEQ ID NO: 13542 - protein, 139 aa, Triticum aestivum
LIFFGGIANTFMLAAGLSIGKSLAEADLVNEAKAIIDEARERGASVPIPTDVVTAKEFSPTAAATVKQVADIEADDMILDIGPDTAKALASQLEKAGTIVWNGPVGVFEFDQFGNGTKTLAEAIAKSSAFSIAGGGDTL

SEQ ID NO: 13543 - protein, 181 aa, Triticum aestivum
  unsure (1)..(181): unsure at all Xaa locations
MAPAVMASSATTVAPFQGLKSTAGLPVSRRSSGSLGRVSNGGRIRCMQVWPIEGIKKFETLSYLPPLSTEALLKQVDYLIRSKWVPCXLRFSKVGFRLPVSTTSSPRVITNGRYWTMXKLPYVRCTDAXTQVLNEVXEEVKKEYPDAYVRRNRASTTCAQVQCVSXFIAFRPPGCEESGKA

SEQ ID NO: 13544 - protein, 264 aa, Bordetella parapertussis 12822
MRQALFLGYGRMGAALGEAWLRAGLLAGIDAVDPGRDGAGLRARLVRGADELPEQAYDLVVLAVKPAMAQQALRPVPPARLARACLVSIMAGVPAGALRQALQPPRPVARAMPNTPVMAGQGCTGLYGGDDVAPAQRAAIGRLFEAVGAAFWVDTEDQLHAVTALSGSGPAYYHLFSEALAQAGEQLGLPAALARSLAARTALGAASLQCEEGADFAALRREVTSPHGTTHAAIEVFEQAGALRTLVRDAVRQAQARSRELARP

SEQ ID NO: 13545 - protein, 229 aa, Bacillus amyloliquefaciens
MSSLFQTYGRWDIDIKKAKGTYVEDQNGKTYLDFIQGIAVSNLGHCHEAVTEAVKKQLDSVWHVSNLFQNSLQEQAAQKLAAHSAGDLVFFCNSGAEANEGAIKLARKATGKTKIITFLQSFHGRTYAGMAATGQDKIKTGFGPMLGGFHYLPYNDPSAFKALGEEGDIAAVMLETVQGEGGVNPASAEFLSAVQSFCKEKQALLIIDEIQTGIGRTGTRFAYQHFGLS

SEQ ID NO: 13546 - protein, 475 aa, Vibrio parahaemolyticus RIMD 2210633
MSKEIKAQVVVLGSGPAGYSAAFRCADLGLETVLVERYSTLGGVCLNVGCIPSKALLHVSKVIEEAKAMADHGVVFGEPQTDINKIRIWKEKVVNQLTGGLSGMAKMRNVTVVNGYGKFTGPNSILVEGEGESTVVNFDNAIVAAGSRPIKLPFIPHEDPRIWDSTDALELKEVPEKLLIMGGGIIGLEMGTVYHSLGSKVEVVEMFDQVIPAADKDIVKVYTKRIKDKFKLMLETKVTAVEAKEDGIYVSMEGKKAPAEAERYDAVLVAIGRVPNGKLIDGEKAGLEIDERGFINVDKQMRTNVPHIFAIGDIVGQPMLAHKGVHEGHVAAEVISGKKHYFDPKVIPSIAYTEPEVAWVGKTEKEAKAEGIKYEVATFPWAASGRAIASDCSDGMTKLIFDKETHRVIGGAIVGTNGGELLGEIGLAIEMGCDAEDIALTIHAHPTLHESVGLAAEVFEGSITDLPNKKAVKKK

SEQ ID NO: 13547 - protein, 124 aa, Triticum aestivum
STTRVEARVQLSLRRYGNGLIVQTVALGKPDGKKATPGKKVFVTYTGKLKNGKIFDSNVGRKPFSFRLGVGQVIKGWDIGVNGMRIGDKRKLTIPPSMGYGNQKAGEIPPNSTLMFDVELMNVQ

SEQ ID NO: 13548 - protein, 627 aa, Vibrio parahaemolyticus RIMD 2210633
MAIEINVPDIGADEVEVTEILVSVGDKVEEEQSLITVEGDKASMEVPASQAGIVKEIKVAEGDKVSTGSLIMIFEAEGAADAAPAPAAEAAPAAAPAPAAAAELKEVHVPDIGGDEVEVTEIMVAIGDSIEEEQSLITVEGDKASMEVPAPFAGTLKEIKVAAGDKVSTGSLIMVFETAGSGAPAAPAAVEAPAAAAPAASAAKEVNVPDIGGDEVEVTEIMVAVGDTVEEEQSLITVEGDKASMEVPAPFAGTVKEIKIAAGDKVSTGSLIMVFEVAGAAPAPVAAPAQAAAPAAAAPKAEAPAAAAPAAGDFQDNDEYAHASPVVRRLAREFGVNLSKVKGSGRKSRILKEDVQNYVKEALKRLESGAAASGKGDGAALGLLPWPKVDFSKFGETEVQPLSRIKKISGANLHRNWVMIPHVTQWDNADITALEAFRKEQNAIEAKKDTGMKITPLVFIMKAAAKALEAFPAFNSSLSEDGESLILKKYVNIGIAVDTPNGLVVPVFKDVNKKGIYELSEELMAVSKKARAGKLTAADMQGGCFTISSLGGIGGTAFTPIVNAPEVGILGVSKSEMKPVWNGKEFEPRLQLPLSLSYDHRVIDGAEGARFITYLNACLSDIRRLVL

SEQ ID NO: 13549 - protein, 389 aa, Xanthomonas axonopodis pv. citri str. 306
MRALCWNGVNDLRVETVPDPALVNPRDVILKVGLTTTCGSDLHFIDGYLPTMREGDVIGHEFMGTVVEIGTAVKNVRVGQRVVVPSFISCGGCWHCERKEFSLCDNTNPNWEMQEPLLGHPTAGIYGYTHAFGGYAGSHATYIRVPHADVGCFEVPDGVSDEDALFLSDAGPTGFMGADFCDIQSGDTVAVWGCGGVGLMAQQSARILGAERVIGIDRLPERLAMARDVLGVEVIDYSAVDSVVDVLREMTGGRGPDACIDAVGMEAHGTGIGHTYDRVKQALHLHTDRGQALREAILACRKGGILSVLGVYGVMDKFPLGAVMNKGLTVRTAQQHGQRYVPKLLDLAQAGRLKSGFLLTHKMPLEDAVRGYDMFKHKHDGCVRAGFVP

SEQ ID NO: 13550 - protein, 366 aa, Trichodesmium erythraeum IMS101
MLQRNQKIKNLQTNSCDRSSSFDLRKIGLNPNFWYPLAQSKELKKEKPHQVSFGGEPIVLVRTKSNQIFALEDRCAHRQIPLSMGVVCGEKITCTYHGWQYDQTGKIAKVSYLPKNCSLPKGVKSYPCKEAYNHIFVFPGKVELAETVPFPEIKNWSNNEYKTMYFSRRVNCHYSFMKENLMDMNHQFLHRKFMGKVKPTIIENSQGENWVEAKYKFSGEPHPSANLVLAAGRKEDSSSEDLDFDIMTIRTEYPYQTLKVCPPNSENPLLNLWVVYIPVDQEQKINHSFGMLMIRKPKIPGLINLLWPLMRYFTQVIFTEDKLAVETEQKAYDIQGEDRNQEVFPLILDVRELLYKKGVSLFPKIK

SEQ ID NO: 13551 - protein, 214 aa, Paeonia cambessedesii
  unsure (1)..(214): unsure at all Xaa locations
IVESVGEGVTDLKPGDHVLPVFTGECKECRHCKSEESNMCDLLRINTDRGVMLNDGKSRFSINGQPIFHFVGTSTFSEYTVVHVGCVAKINPEAPLDKVCVLSCGISTGLGATLNVAKPKKGSSVAIFGLGAVGLAAAEGARIAGXSRIXGVDLNPKRFEEAKKFGVTEFVNPKDYNKPVQEVIAEMTGGGVDRSVECTGSIMAMISAFECVHD

SEQ ID NO: 13552 - protein, 157 aa, Triticum aestivum
  unsure (1)..(157): unsure at all Xaa locations
MAPTVMASSATSVAPFQGLKSTAGLPVSRRSNGASLGSVSNGGRIRCMQVWPIEGIKKFETXSYLPPLNXGGXLSKQVDYLIAPSWVPCLXFNKVGFIFREHNASPGXYYDGRYXTMLKLPKFGAPTPKNDXQGGGVKKGYPDPMSDNFTWPSSSSP

SEQ ID NO: 13553 - protein, 357 aa, Nicotiana tabacum
MGSLDVEKSAIGWAARDPSGLLSPYTYTLRNTGPEDVQVKVLYCGLCHSDLHQVKNDLGMSNYPLVPGHEVVGKVVEVGADVSKFKVGDTVGVGLLVGSCRNCGPCKREIEQYCNKKIWNCNDVYTDGKPTQGGFANSMVVDQNFVVKIPEGMAPEQAAPLLCAGITVYSPFNHFGFNQSGFRGGILGLGGVGHMGVKIAKAMGHHVTVISSSNKKRQEALEHLGADDYLVSSDTDKMQEAADSLDYIIDTVPVGHPLELYLSLLKIDGKLILIGVINTPLQFISPMVMLGRKSITGSFIGSMKETEEMLDFCKEKGVTSQIEIVKMDYINTAMERLEKNDVSYRFVVDVAGSKLDQ

SEQ ID NO: 13554 - protein, 399 aa, Pseudomonas fluorescens PfO-1
MSGNRGVVYLGAGKVEVQKIDYPKMQDPRGRKIEHGVILRVVSTNICGSDQHMVRGRTTAQVGLVLGHEITGEVIEKGSDVESLKIGDLVSVPFNVACGRCRSCKEQHTGVCLTVNPARAGGAYGYVDMGDWTGGQAEYVLVPYADFNLLKLPDRDKAMEKIRDLTCLSDILPTGYHGAVTAGVGPGSTVYIAGAGPVGLAAAASARLLGAAVVIVGDVNTIRLAHAKAQGFEIVDLSKDTPLHEQIAALLGEPEVDCAVDCVGFEARGHGHDGVKSEAPATVLNSLMGVVRVAGKIGIPGLYVTEDPGAVDAAAKMGSLSIRFGLGWAKSHSFHTGQTPVMKYNRQLMQAIMWDRINIAEVVGVQVISLDQAPEGYGEFDAGVPKKFVIDPHKLFSAA

SEQ ID NO: 13555 - protein, 416 aa, Helicobacter hepaticus ATCC 51449
MVAFSLHFQTQHQKVCDTLFESICEERDSQKSGYYDLPFTEVAVDESSCFVNDNKAFLQTLSHLVIIGIGGSSLGLKAIDSMLEHLPHRNKLKLSFLEHTDPISITKSLQGIKRENTLFIVISKSGTTIETSSLLKFVLEEYNLLQNVQSKRHLLVITDRDSPLEHWAKVEKLTYFGIPPNVGGRFSVLSMVGILPLSILGFDTRAILRGAAGITQRFFERKEEHILHKALTYFTHKNHISMNVLFSYSSLFTHFNAWYVQLWGESLGKINAMGERVGLTPIALIGSIDQHSFLQLIVQGVRDKSVTFLSLNPTHSAQPSIPNLQIPFLESTNFVNTQSFATLLNNQRIATMQTIENEGILTDCIEVMSLCEESVGILIAYFEILTSCMGQLFEINTYDQPGVEFGKARLKKLFES

SEQ ID NO: 13556 - protein, 831 aa, Microbulbifer degradans 2-40
MTVTRRDFVRHQALATAAAAAGVAVPAAATNIVTTAADNKLVWSKAPCRFCGTGCSVNVATKEGRVVATHGDIKSPVNRGLNCVKGYFLSKVMYGEDRLTQPLLRKKNGVYAKDGEFEPVTWEEAFTIMAEKFKKTLKEKGPEGIGMFGSGQWTVWEGYAASKLMKAGFRSNNIDPNARHCMASAVGGFMRTFGIDEPMGCYDDFEHADAFVLWGSNMAEMHPILWTRIADRRLSYPHVQVAVMSTYEHRSFDLADLGVVFTPQSDLAIANFIANYIIQNKKVNWDFVKKHTNFRVGTTDIGYGLRPEHPLQKAAKNADSAGASEPIDFETYAKFVADYTVEKASEISGVSEDKLIKLAKLYADPNIKVMSLWTMGVNQHTRGVWMNNLIYNIHLLTGKISEPGNSPFSLTGQPSACGTAREVGTFSHRLPADMVVTNPKHRAYAEKIWKLPEGSIPEKVGAHAVLQSRKLKDGEINAYWVQVNNNVQAGPNINEEVLPGYRNPQNFIVVSDAYPTVTAQAADLILPSAMWVEKEGAYGNAERRTQFWHQLVNAPGDARSDLWQLVEFSKYFKVEEVWPADLIAKMPEAKGKTLFDILYKNGKVNKFPLAQVSKDYENKEADAFGFYIQKGLFEEYAEFGRGHGHDLADFDRYHEERGLRWPVVNGEETLWRYREGSDPYVEKGKGVQFYGKPDGKAIIFALPYEPPAESPNKEYPFWLCTGRVIEHWHSGSMTQRVPELYKAFPDAVCFMHPEDARSAGLRRGDKVKLQSIRGHIITRIETRGRNKPPKGLVFVPWFDARQLINKVTLDATDPISKQTDFKKCAVKVERV

SEQ ID NO: 13557 - protein, 121 aa, Glycine max
  unsure (1)..(121): unsure at all Xaa locations
KVGASFSEGGAVLTQNGRFYLGEQNNDPERAKKLPCLADLVGKDSXGTAHRAHASSEGGTKYLQXSAAGFLSQKEPVYLVAAXEGPKGPKVAXFGGSNVSYQTGEIDSLSQKADILLVVGG

SEQ ID NO: 13558 - protein, 459 aa, ASPERGILLUS NIDULANS FGSC A4
MAPFSKSIPIAIIGDGAFGLSTALHLVQNGYTDITVLEQDEKIPPPYSAANYLNKIVREEYEDPFYTNLTVLCPMGSGYINTDKATGVSHSPFPVNQEASSGFLPAEDETRIRKLLQQTLPALANRPLVLKSLCWFADTKDSDFIIDFVPGSKGSVVIESADSGHGFKMFPIVGSWTSLLSKRHTPNSIHSGKPNLRANMGQSTYRGNYGLPWVLPSVQQARRGFNEKGLVHEYLPILRLKGLREGAARYCTLREKGGAADADAASDAVAARKVYIPSTTWSNHRLLFSSLGFTVGQFNYYNNATRSLNIDSYLAALRSADHGSVVLLHACAHNPTSLDPYIEQWKQIWDIIKERRLFPIFDAAYLGLNSGDYDKDAWAIRGRLTEPGEGVGRIILQPTPFSQSVLESLQRSEISNLPAFRAKIAEAIMSDDMLKNVWLEDLKTMSGRIAEMRRAFSTG

SEQ ID NO: 13559 - protein, 313 aa, Ustilago maydis 521
MEFVSQQFNSTVGSILNPTTTHLAADLYKNTDFASLNVLERAWANWYLYWGNPVLATGIMSFVLHELVYFGRAIPWIIIDSMPSMRKYKLQDEKIPTPEQQWKCTKYVLLSHFTVELPQIWSFHPICEYFGLATHDVPFPHWTKIAWQIGVFFLFEDAFHYWAHRALHWGPLYKHIHKKHHEYSAPFGLAAEYAHPLEVLILGMGTIGGPFALCAFTKDLHILTVYIWIVLRLFQAIDAHSGYDFPISLHNWVPFWAGADHHDYHHQAFVGCYSTSFRWWDHMLGTDLSYKRARARQAEKKREALQAAKAKAQ

SEQ ID NO: 13560 - protein, 416 aa, Ustilago maydis 521
MSLSSKLGITDVDLKDKKVLIRVDFNVPMDGDKITNNQRIVAALPTVKYAIEQNAKAVVLMSHMGRPDGKPVPKYSLKPVAAEVSKLLNKDVEFLADCVGAETEKAVESATGGKIFLLENLRYHVEEEGKGTNEAGEKVKADPKKVEEFRASLTKLGDVYINDAFGTAHRAHSSMVGVQLPQRAAGFLMKKELEFFAKALESPERPFLAILGGAKVSDKIQLIDNMLDKVNSLIICGGMAFTFKKTLDNVKIGTSLFDEAGSHKVAELVEKAKKNNVELVFPVDYITADKFDKNAKTGSATDADGIPDEWMGLDAGEESRKKFRETILKAKTILWNGPAGVFEFDNFAGGSKAMLDACLEAEKNGSTVIVGGGDTATVVAKYGAEDGISHCSTGGGASLELLEGKTLPGVKELSEK

SEQ ID NO: 13561 - protein, 299 aa, ASPERGILLUS NIDULANS FGSC A4
MSTKPTTQTLCILGCGNLGTAILKSVLATPEPDRLFTHYIACIGSPSSKERLEFQFKDQANLTIALDDNIAAIRAADVVILALDPALIPAGLAQPGFRDALGQKLLISVAAGWTVKKLTETIYGDGLAEEGKARATIIRTLPNICALVGQSLTAIEVDPAAKTAEEALSLTTSIFSRVGKTLIIPPSLIDATTAVAGSTPAMFAVIVDSMIDASVAVGVPRSMAQAMIYQSMRGSAEMLQSGLQPGDLRDQGTSPEGCTIGGLMVMEERGVRGGVGRAVREAVSVARRMDGRLHLNDTR

SEQ ID NO: 13562 - protein, 530 aa, Bordetella parapertussis 12822
MRPPRDGKQSSRRHNDIRRQTMDLSDLKKLGLDVAYPFKEQYENYIGGQWVPPVGAEYFDNLSPITGQPFCRVPRSGAADIELALDAAHRARAAWARTSPAERANILLRIADRIEGQLPMLAVAESIDNGKPLRETTAADLPLAIDHFRYFAGCIRAQEGAISEIDANTVAYHFHEPIGVVGQIIPWNFPLLMAAWKLAPALAAGCVVVLKPAEQTPASILVLAELIGDLLPPGVLNVVNGYGKEAGQALATSKRIAKIAFTGSTPVGKHILHAAADNLIPATVELGGKNPNIFFDDVMDHDDEFLDKALEGLAMFALNQGEVCTCPSRILIQESIYERFIEKAIARVQSIKTGHPLDAGTMVGAQVSQVQMDKILSYIDIGRQEGAQCLTGGARNDMLPGGLDQGFYVQPTMLLGKNSMRIFQEEIFGPVAAVATFKDEEEAIAMANDTFYGLGAGVWSRDGARAYRVGRGIEAGRVWTNCYHLYPAHAAFGGYKQSGIGRETHKAALSNYQQTKCLLVSYSAKALGFF

SEQ ID NO: 13563 - protein, 343 aa, Agrobacterium tumefaciens str. C58
MMKMKAVVMTGANQPWEVQEVPVPKAEPGLVLVKIHASGMCYTDVWATQGAGGDIYPQTPGHEVVGEIIEVGAGVHTRKVGDRVGTTWVQSSCGRCSYCRQNRPLTGQTAMNCDSPRTTGFATQGGHAEYIAISAEGTVLLPDGLDYTDAAPMMCAGYTTWSGLRDAEPKPGDRIAVLGIGGLGHVAVQFSKALGFETIAITHSPDKHKLATDLGADIVVADGKELLEAGGADVLLVTTNDFDTAEKAMAGVRPDGRIVLCALDFSKPFSIPSDGKPFHMMRQRVVGSTHGGQHYLAEILDLAAKGKVKPIVETFALEQATEAYERLSTGKMRFRGVFLPHGA

SEQ ID NO: 13564 - protein, 275 aa, Oryza sativa
MPRREGGRSRSAAYLVLFASCLLAVAAASHQEFHEAAGSRTLLMSHEHTNQVHCSRERSRAAWKAIDEYLMPFVEKEKYELPSKCRLHPGNDMFREQEQHKIHFDINEWRCGFCKKAFRAEKFLDQHFHNRHNNLVDNSQGRCLADLCGALHCDLMLEFKKPKSKCSATAAARNRHLCESLADSCFPINQGQSASRLHEFLLRQFCDAHTCKNGSKPFPKGGRKQTNRFYLALCALTIVLLPLFYLIVFLHQREMKKGGQNLRRISKVVQKKKPS

SEQ ID NO: 13565 - protein, 434 aa, Geobacter sulfurreducens PCA
MRNELVTPGAGELTYEIRNIVNVAEKLQKHGVKINWENIGDPIVKKEEIPRWMKEIVAAAVMENDTWGYCHTRGVLETREFLCGLTNNRGGAQITPDDIIFFNGLGDAISTVYGNLRHESRILMPSPTYTTHSIGEAAHAQAAPVCYRLKPEDNWFPDVEDLENHVKYNPQISGILLINPDNPTGMVYPREILEQIVAIARRYDLFIIADEVYNNITYNGQTTVPISDVIGEVPAIAMKGISKEIPWPGSRCGWIEVYNGNRDEQFHKFLNSILTAKMNEVCSTTLPQKCIPAIMKHPEYQTYLRERIACYERMSTITYDCLKQVPGLMVNRTNGAFYMSVAFRDGLLTDRQSLPIESVEVRELVEKLVNAPGVSPDKRFVYYILASTGICIVPLSSFNTPLQGFRVTLLEKDENECMRIYRTLAERIKEYLNS

SEQ ID NO: 13566 - protein, 2229 aa, GIBBERELLA ZEAE PH-1
MTTLLDALRQATQVDCDTLDANVQAIAFSEISRPLAGEPLLHHDALVKDAIEKARGALKEFQGSATFEEFVVQILTNPKLSYSTDGTMSDAHRIVNIFKALAPEFDTKRVCIKIPATWEGLQACRALEVEGIATLATTMFCMEQATLAADAQCTYIAPYVNELKVHFEAGYVDEHKAFDFCREAQTYYINHSCRTQVLAASLTSVDEVMQLAGIQHITISPNLLNGLASTKLSDWDGKLGDYFAQGPANKSWETRDYNALTKNESAWRMAFTRSGFGTSEGEFLFPVRARLMEKVTDISTSLAADVSDGWLQQTDPPEERVDLMIDPNSKRWTKVHRYFTKVLESDMAIEDVIRRSFTHHQYRMMAPTERTDVKEMQAANTKRYNALLAGRFKGIEDSLATRLTAMYFGLPAAPVDNPLEEIAMMLGLDEKEVPRYNFRPPLHFLTAHDRRNWGKETLKSEEATIDALPLPRAMEPTLSLRGGGDDDDLIGWTDDYTQEYETTALFTDGWTYLHGIYGRLPFVPRKWRSFSKVLRQLLQVKDYEYQDFSLLWYDRKLGKPKVIHDQLPLTKESPAMTFLDEHFADSTRSHKDCCALFIDNIHTDINKGPQHWEPIDGQLQSDTIKIGRSLGNAPNGPEDEVISYAYLAFPKTKVDTFKIGKYGSNQYNAHFCKTLNVLFGAPESSAHHHALFRLVDKKKNKTNWAVPIVYGAMGLPQWAWELLHPVNNPGADWMVECCWLNPGLEAVLLSNYYPKPNPYLITRNSRNGAERFNQAYRQICEMTTEAFDASVCRKIDSVFLIEGHKPKTAGELVIDGFQVRPRRDLKSWKLGIPGTPNDDTPRDLGKKLGESPNFYRTVHVNWRPGHCRLFPGWYSGGDFSVEMPRLSSTVVEFLEAMGELFKLVGPPNLNGTGPEDSCFLLTEAPSFDGLQVQDMDSPSYYIGVGATDDDWHDIRKSITSPFVSVSIVKKPKNTSWSTSISKHNLWGLRLDKEALRQNEMNGGGSRRDALQLYDLDGESVDILHGYPADPVPLEPIDPNNNVSVTTNGKPWTPTSRRRPDAFVPPRLLKIRSKSVGGAEGLHLPSTLVIGGASTPDGEPESDIGILATSRPKFRGFPPPPSEDEDDGDLAGGLAEDDHRRYSMYGDLLSDSGEEDGGGSRNKDADGDEAMEDTSLPSVPQADVIGGGEANDDDEDETPKLFGLQKIPEEKEPEDNPEDRPEQTVPPPSVTTSKPLFQASNTVGADDRAHTWATQPSIFTNEDQRAWPADAEIGLPITAAPVEKIHRLSGNVPMYSKAILTPTEQAELQHGFGDLRNILLKRTNMCPFQGCRFTWRLDQNEELNIHVFTAHAKRKCPFCDDALFGWWDKNQQIKHLGDKHPDEVKKMKVHGVQKGNISVPVTVNAPANLIGEAFAEEIRSWGPQYKLKAPPRLLTYPLLAWYDNFGTTAVKDPPKKCPIPSCSVPHLEHLSSHGVWTHFKNYHTDLEMDACPFCNLSFYVYGEKDKDGVRTVIPRSIDECIMHLDCHVYQLWDLLEPVVDQPTKVNMPSQGNKDFQTISAEKLESMRAEVVSKTVAAALARTGAATQSVADQSPPPQVSYGHVTDASQILRKCVYFEKCGAYVGSMTEKQYRRHVRVNHPKEISTLSSSSEDETDGEDQASTDDGSEDRGDDKPNDGDDGRDGAGKTAALKFGRLKPTSKPAQASTPSKPKEKAVLGKPPSPPDPDEMDISTDDNVVETESSRSEESAVMISEKTPTTKITTPQTPPPDGDSDTNEESGSSVSRGRRSVKALKSKRKAPTKRAEPDVDEDNTEDNGEKEIDDFDEDGEADGSGSKSSHTEGRGRSAKKAGKRRPRGDDDGDYEDEGDQDDDDFVMAGNNGRRYRRRAPSPDWIKVLGPEDPNFDPEDKMYCSKCLRKAPLRRAKSPNRSPIGRAGEIEAHTDKTKCCRIRNGLGSATGLPNRSGWIPANKLPGTLTSLKEDFLNRYPSYMRTMYPTSSRDHHASVWRSDPNNPENDAWFDVPWPPYEGLPPFPGDWIAPGLPWDDTPEGRQRRAMYIGNRVVDENYQYQSETDSDDDLKPDVNDIPDFQADLNPLKRPAEDEEETSDEPAPKKAKKSKTAATKTPKATGTKKTPAPKKAAAPSKTPAKTRSKAPSKAASKAPSKTPSKAASKTPSKAPSKTPSKAPSKAPSKASSKGPSKTPSRASSRKTTPSKTPSTPSTRPPSEAGDE

SEQ ID NO: 13567 - protein, 214 aa, Paeonia peregrina
  unsure (1)..(214): unsure at all Xaa locations
IVESVGEGVTDLKPGDHVLPVFTGECKECRHCKSEESNMCDLLRINTDRGVMLNDGKSRFSINGQPIFHFVGTSTFSEYTVVHVGCVAKINPEAPLDKVCVLSCGISTGLGATLNVAKPKKGSSVTIFGLGAVGLAAAEGARIAGASRIIXVDLNPKRFEEAKKFGVTEFVNPKDYNKPVQEVIAEMTGGGVDRSVECTGSIMAMISAFECVHD

SEQ ID NO: 13568 - protein, 838 aa, Bradyrhizobium japonicum
MTSPKLDRRQMLKLEAAAIAAAAAGLPVPALAANLATEREVSELKWDKAACRFCGTGCSVMVATKENRVVATHGDIKAEVNRGLNCVKGYFLSKIMYGHDRLTQPMLRKANGKYDKNGDFTPVSWTEAFDIMEVKWKEAMKKRGPNGVAMFGSGQWTIWEGYAASKLFKAGFRTNNIDPNARHCMASAVAGMMRTFGIDEPPGCYDDIEATDAFVLWGSNMAEMHPILWTRLTDRRLSAPHVRVAVLSTFEHRSFDLADIGMVFKPQTDLYLLNAIANHIINTGRVNKDFVAAHTVFRRGQTDIGYRVRPEHPLQKKATGAAKANRNDPRQDYDEYVKFVSEYTLEKAAEMSGVPLNRLEALAELYADPKTKVVSFWTMGFNQHTRGVWCNNLVYNIHLLTGKISSPGNSPFSLTGQPSACGTAREVGTFSHRLPADMVVTNKEHRTKAEHIWQLPEGTIPDKPGAHAVLQSRMLKDGLINAYWVQVNNNLQAGPNANEETYPGFRNPDNFIVVSDAYPSVTALAADLILPTAMWVEKEGAYGNAERRTQFWHQLVPAPGESKSDLWQLMEFSKRFKIEEVWPEELIAKKPEVRGKTLFDVLYKNGQVDKFPVSDIEQGYLNDESKAFGFYVHKGLFEEYASFGRGHGHDLAPFDAYHKERGLRWPVVNGQETRWRFREGSDPYVKQGTDVQFYGYPDGKARIFALPYEPAAESPDGEYPFWLSTGRVLEHWHSGTMTRRVPELYKAFPEAVCFMHPDDAQEAKIRRGDEVKVVSRRGFIRVRVETRGRDRPPRGLVFVPWFDESKLINKVTLDATDPISLQTDFKKCAVRIERVNVS

SEQ ID NO: 13569 - protein, 214 aa, Paeonia peregrina
  unsure (1)..(214): unsure at all Xaa locations
IVESVGEGVTDLKPGDHVLPVFTGECKECRHCKSEESNMCDLLRINTDRGVMLNDGKSRFSINGQPIFHFVGTSTFSEYTVVHVGCVAKINPEAPLDKVCVLSCGISTGLGATLNVAKPKKGSSIAIFGLGAVGLAAAEGPRIAXASRIIGVDLNPKRFEEAKKFGVTEFVNPKDYNKPVQEVIAEMTGGGVDRSVECTGSIMAMISAFECVHD

SEQ ID NO: 13570 - protein, 214 aa, Paeonia peregrina
IVESVGEGVTDLKPGDHVLPVFTGECKECRHCKSEESNMCDLLRINTDRGVMLNDGKSRFSINGQPIFHFVGTSTFSEYTVVHVGCVAKINPEAPLDKVCVLSCGISTGLGATLNVAKPKKGSSVAIFGLGAVGLAAAEGARIAGASRIIGVDLNPKRFEEAKKFGVTEFVNPKDYNTPVQEVIAEMTGGGVDRSVECTGSIMAMISAFECVHD

SEQ ID NO: 13571 - protein, 214 aa, Paeonia officinalis
IVESVGEGVTDLKPGDHVLPVFTGECKECRHCKSEESNMCDLLRINTDRGVMLNDGKSRFSINGQPIFHFVGTSTFSEYTVVHVGCVAKINPEAPLDKVCVLSCGISTGLGATLNVAKPKKGSSVAIFGLGAVGLAAAEGARIAGASRIIGVDLNPKRFEEAKKFGVTEFVNPKDYNKPVQEVIAEMTGGGVDRSVECTGSIMAMISAFECVHD

SEQ ID NO: 13572 - protein, 596 aa, Microbulbifer degradans 2-40
MGKRFKISEQPMISLQKELRFLVETHLRFIYDEQSYPDLDHAQLARKLIKIVELDEQCLKPAVHESLWDEQDVLVITYGDSIKKEGEPPLDTLNNFFNKHLADTVNGVHILPFFPYSSDDGFSVIDYTQVNDGLGDWGDIEEIASNFDLMADLVVNHCSSRSRWFDNFKQCKEPGKNYFFECDPSADTSDVVRPRTSPLLREVETLEGKKYVWCTFSHDQVDLNFANPDVLCEMIQIIKLYLDRGVKIFRMDAVAFVWKELGTPCIHHPKTHELVRLMRTLIEHHSPRAIIITETNVPNHENLSYFGNANEAHAVYNFSLPPLLLNALITGSSAHLKAWQMSMPPAQEGTFYFNFIASHDGIGLRPAEGLLQDQEIDTLINTMQSFGARISWRAAQGGLNKAYEINVTLFDALQGTTKGPDKWQIQRFLCAHGIMLALEGIPAIYIHSLVATNNYQEGVELTASNRTINRYKWDADELETQLATEHTHHAKVFEQLKRLISIRRGQQAFHPNATQFTLHLGDQLFGFWRQSIRRDQSIFCIYNVTDDTVTIPLSSINLISLNKWVDLVSGQEYTDLHLDLVLEPYQFVWLTNKIAC

SEQ ID NO: 13573 - protein, 158 aa, Oryza sativa
CLVLPKDIKGNDVKLSEYEGKVLLIVNVASKCGLTNSNYKELNVLYEKYKEKGLEILAFPCNQFAGQEPGSNEEIEQTVCTRFKAEFPIFDKIDVNGKEAAPLYKFLKSQKGGFLGDGIKWNFTKFLVGKDGKVVERYAPTTSPLKIENDIQKLLGTS

SEQ ID NO: 13574 - protein, 144 aa, Triticum aestivum
  unsure (1)..(144): unsure at all Xaa locations
MAPTVMASSATSVAPFQGLKSTAGLPVSRRSNGASLGSVSNGGRIRCMQVWPIEGIKKFETLSYLPPLSTEALLKQVDYLIRSKWVPCLXVQQVGFIFREHNASPGYYEGRYWXMWKLPKFGVTDAXQVINKVEEARRIPDRFR

SEQ ID NO: 13575 - protein, 458 aa, Pseudomonas fluorescens
MTTTSSSLADKDMRHQLHPYTNARAHEELGPLVIDRGDGVFVIDENGKPYIEAMAGLWSAALGFSNKRLVAAAEKQMSTLPFYHLFGHKAHAPSIELAEKLINMAPVPMSKVFFTNSGSEANDTVIKLVWYLNNAQGKPARKKIISRIGGYHGITLASASLTGLLANQRGFDVPLPGFLHVGCPHHYRHALPHETEEQFADRLAAELDALIVKEGPETIAAFVGEPLMGPGGVIVPPRTYWEKIQRVCRKHDILVVADEVICGFGRTGKDVRQPDFGIEPDIMILSKQLSSSYQPISAILINDRVYQGIADQTKSFGALGHGFTGGGHPVAAAVRLENLKIIDEENLVVHAAHMGELLRRGLQGFSDHPLVGEVRGAGLIAAVELVADRATKAPLDAPGTLGRFLAGRAQEHGMITRNLGDAIAFCPPLIINEDEDEVQSIVDRFGMALDDTSKWVNG

SEQ ID NO: 13576 - protein, 180 aa, Phaseolus vulgaris
MASSMISSPAVTTVNRAGAGAGMVAPFTGLKSLGGFPSRKMNNDITSVANNGGRVQCIQVWPTVGKKKFETLSYLPPLTKQQLAKEVDYLLRKGWVPCLEFELEHGFVYREHNKSPGYYDGRYWTMWKLPMFGCTDSSQVLKELYEAQTAHPDGFIRIIGFDNVRQVQCISFIAYKPPGY

SEQ ID NO: 13577 - protein, 363 aa, Pirellula sp. 1
MGHEFQFTLVLTMSTSEAPAPPESAKRDKLVCDESNDYGSGAVPTEAMAVGETGIDPQRLPRPEETQPLRIMWQYVIVLSLVHLVALAAFVPAWFSYLFTWSGLIAGIAGHFIFGMFGITIGYHRLLTHRGFKCPKWMEHTLAILGMCNLQDSPARWVAIHRMHHQHSDHQPDPHSPLVNFLWGHMGWVVCRHKDLDKTSHYERYVRDLLRDRFYLKLERKDGWFFVFLIHGIIISLIGGAVGYAVSGGDWAVAYRYLLSWTVWAVAIRTVFVLHGTWSVNSLSHVFGYRNYDTRDHSTNNWLVALISHGEGWHNNHHATPRSARHGHKWYEFDMSWGIIRVWEMMGLITDVQRPTKASVAGK

SEQ ID NO: 13578 - protein, 809 aa, Salmonella typhimurium LT2
MEIKKWLNTTITRRDAIVATAKVGAAVTLSQAITLPFATTAQAQDTPIPKDANGETVRHSACLVNCGSRCPLKVIVKNDRIVRIEPEDAKDDAVFGEHQIRPCLRGRSSRWRVYSPDRIKYPMKRVGKRGEGKFKRISWDEATAFIAAELTRVSEKYGREAIYYNYQSGAYYHTQGRPAWIRLLNLTGGYLNYHNTYSTAQIATATPYTHGDYVGSHFTQIAHSDLVVLFGLNLSETRMSGGGQVEELRRALETSKARVIIIDPRYTDSVITEHAEWLPIRPTTDAALVAGIAHTLITEQLLDEALVNRYCVGYDRSTLPDTAAPNASYKDYVLGTGDDGIAKTPEWAADITGIPATRIRQLAREIASARACYICQGWGPQRHANGEQTVRAIQTLPALTGHFGRPGTNNGNWPYGTPYGVPLLPVGKNPITTSIPCYLWTDAIQHPEKMTATTMGVKGADRLKTGIKLFFNQAGNTLLNQHGETNRTRQILADESLCETIIVIENHMTPSAMYADLLLPETSYLEAEDLVDSSYAAGSHNYMIAIQKTVKPMWEVRSTYDICADIAGHLGLREQYTEGRTQAQWAEMHYQQIREKRPYLPEWSVAKEMGVIDQRIATEQQSLAFADFRADAEANPLSTPSGKIEIYSQALADLAQTWTLPEGERIPALPEFCPAKESHLNKALTAKYPLQLSGFHTKGHTHSTYSNVLMLHEAVPDEVWINPIDASARQLKSGDRVHVFNDRGVVELPCKVTQRILPGVAAMPQGAWTRLDGNGVDVGGCINTLTSHHPSPLAKGNPQHTNLVEIKRA

SEQ ID NO: 13579 - protein, 464 aa, Agrobacterium tumefaciens str. C58 (Cereon)
MALWRSPSAIWPSTVEESPMSATTKEILDLNRFDASRTEGFPAELAERVAKRQATFGASSVLFYEQPIEMVSAQGAYLYDAGGRKYLDVYNNVPSVGHCHPRVVEAIARQVGELNIHTRYLNRVVEAYTENLLSKFPAGLSNVVLTCTGSESNDLALRIARIGTGAEGFIVTEAAYHGNTALVTEVSPSSLRKRKPAAFVAIIPAPAARDGMSVASNFAASVEQAINELNSRGIKFAALIVDTIFSSDGIYADPAGFLKEAVDVVHRAGGLLIADEVQPGFGRTGGSLWGFERHGVTPDIVTMGKPMGNGFPMGGVVTRPDLLQRFCEETGYFNTFGGNPVAAAAGHAVLRVIEEEGLIERSATVGGYFKQSLQALQSRHSEIGDVRGAGLFIGLDFVDPATGEPDSTRATHAINQLRHNSILIGAAGKYGATLKIRPPLCFSNEDVDLFTGTLDIILQARRAA

SEQ ID NO: 13580 - protein, 176 aa, Desulfovibrio vulgaris subsp. vulgaris str. Hildenborough
MIIKDLKVVYSEEQIAARVRELAQEINRLYKGEPLVVVCVLKGAFMFFTDLVRHLDMHPELDFVRLASYGDATHRGSTISFLKDVEVKLEGKHVLIVEDIVDTGHTMDFLFRQLAARGAKSMRLAVLVDKTERREVPVRADFVGFALPRGFIVGYGLDYAQKYRELGAIYEAIVDA

SEQ ID NO: 13581 - protein, 413 aa, Dechloromonas aromatica RCB
MTSHIKVPQGGSKIVPGQAIPDNPIIPFIEGDGIGIDITPVMIKVIDAAVEKAYGGKKKIHWMEVYAGEKSTRLYGSDEWLPKETFDALKEYSVSIKGPMTTPVGGGIRSLNVALRQELDLYQCVRPVRYFKGVPSPLKHPELTNMVIFRENTEDIYAGIEWACGSEGVKKVVKFLQEEMGVKKIRFPETSGIGIKPISIEGTSRLVRAAIKYAIDNDRKSVTIVHKGNIMKFTEGLFRDACYKLAQDEFGAELIDGGPWCRIKNPKNGREIIIKDSIADAFLQQILLRPAEYDVIATTNLNGDYISDALAAQVGGIGIAPGANISDRYACFEATHGTAPKYAGLDKVNPGSLILSAEMMLRHLGWGDAANLVLKAMEAAIGDKQVTYDFARQMEGANELSCSEFGDAMIARM

SEQ ID NO: 13582 - protein, 248 aa, Zea mays
MARPPCCDKEGVKKGPWTPEEDLVLVSYIQDHGPGNWRAVPTRTGLMRCSKSCRLRWTNYLRPGIRRGNFTEQEEKLIVHLQALLGNRWAAIASYLPERTDNDVKNYWNTHLKRKLQAGSGDGDGDGAAKPPAHRPSPSNSKGQWESRLQTNINMARRALREALTPLGDLKPQQQRFGGAPAAEGPYVLTADTVSRMLDGWAGLNGKRRGGAPGTPGGAETASTGSSSEVSYGGGTAVVAPAAGGPVF

SEQ ID NO: 13583 - protein, 214 aa, Paeonia officinalis
  unsure (1)..(214): unsure at all Xaa locations
IVESVGEGVTDLKPGDHVLPVFTGECKECRHCKSEESNMCDLLRINTDRGVMLNDGKSRFSINGQPIFHFVGTSTFSEYTVVHVGCVAKINPEAPLDKVCVLSCGISTGLGATLNVAKPKKGSSVAIFGLGAVGLAAAEGPRIAXASRIIGVDLNPKXFEEAKKFGVTEFVNPKDYNKPVQEVIAEMTDGGVDRSVECTGSIMAMISAFECVHD

SEQ ID NO: 13584 - protein, 214 aa, Paeonia officinalis
IVESVGEGVTDVKPGDHVLPIFTGECKECRHCKSEESNLCDLLRINTDRGVMLNDGKSRFSFNGQPIFHFVGTSTFSEYTVLHVGCLAKINPEAPLDKVCVLSCGISTGLGATLNVAKPKKGSTVAIFGLGAVGLAAAEGARIAGASRIIGVDLNPKRFDEARKFGVTEFVNPKDYNKPVQEVIAEMTGGGVDRSVECTGSIMAMMSAFECVHD

SEQ ID NO: 13585 - protein, 1383 aa, Methylobacillus flagellatus KT
MATQVKSVCPYCGVGCGIVMEVEHARIIKVMGDKQHPSNYGRLCTKGSTCAQAVTASGRLEHAYLRTERNAEPARIGMDKAIKESARRLRAILDEHGPDAVALYVSGQMSIESQYLANKLIKGYIGSNNIESNSRLCMASAGSGYKLSLGADGPPGSYQDFDNTDLFFVIGANMADCHPILFLRMMDRVKAGARLIVVDPRRNATADKAHLFMQIKPGTDMALLNGLLHLLHKNGHTDPDFIARFTEGWEAMPEFLEDYSPEAVSEITGIPEADIRQAAEWIGKASNWMSCWTMGLNQSTHGTWHTNAICNLHLATGAICRPGSGPFSLTGQPNAMGGREMGYMGPGLPGQRSVLSAQDRAFIENLWGVPAGTLHTSSAGGTIAMFEQMAAGKIKACWIICTNPVASVANRQNVIAGLERAELVITQDAYLDTETNRYADILLPGALWAEAEGVMINSERNMTLTQQAVPPPGDAMPDWQIIASIACEMGYAEAFSYASAAEVFEEIKRTSNPKTGYDIRGVSHDRLRATPVQWPCPPDDPQDRHPIRYLNDGISQQLKIREDGERPRIAFATESGKGVFFARPWLPPAEMPDHDFPFVLNTGRLQHQWHTLTKTGKIPTLNKLNPGPFVELHPEDAASLGIRDKDQVEIRSRRGRAVLPAVITARVLPGHCFAPFHWNDVFGDDLAINAITSDAVDPLSQQPEFKFSAVALARVEGTPQRMRNAAPEGHHKDEETHTDNAREIAMKDIDALAQLLGLKDTPAIKLEPAEQLYLQGYLAGLRSDASRQAGGVPILPPTAPLPPDKKTLVDGILAGLFSRTWIGAGSLPTQGHEDTATQPVVHILWASQTGNAETFASQCAAKLQAEGWQTVLSSMDEVQPAELANASRALLLASTFGDGDPPDNGSQFWAALQSDHLTLSGLQYAVLAFGDSNYDQFCGFGRKLDARLAALGATALTARTDCEPDYETAAQVWLGQVVSALASRKSPHPSTTTDRQPELILAGDMPADMTCPGTTAPSYTRHHPLHAQLVVNQRLSGNGAEKEVRQFAFDLGGSDFQYEAGDALGVWPRNDPALVGEMLTALQFSPATVVDVHEHGEMTLVEALSNHYEIARITPEMLQFIAARSGSADLADRIGKQGELKPWLWGKQPVDLLHAYPIKVEVSEWLGVLKRLQPRLYSISSSPKTVTDQVHLTVSIVRYGERGGVCSTFLADRAKGLPVPIFLQKSPHFRVPRNPETPLIMVGPGTGIAPFRAFLQERQAAGASGKNWLFFGEQHVDTDFYYRDELAAMQQAGILHRLDTAFSRDQQEKIYVQHRMLEHGAELWRWLEQGAHFCVCGDAARMSRDVDAALKQVVQTHGNMSAEAAAQYVAKMAQDKRYVRDVY

SEQ ID NO: 13586 - protein, 193 aa, Zea mays
  unsure (1)..(193): unsure at all Xaa locations
MDPTQFRPSRMHDTTLTTTNVAAIASEPYEELTAGAPAPILLEDYHLIEKVAHFARERIPERVVHARGASAKGFFXCTHDVTSLTCADFLRASGVRTPVIARFSTVIHERWSPETIRDPCGFAVKFYTREGNWDLLGNNFPVFFIRDGIKFPDVIHAFXPNPRSHVQEYWCVFDFLSHLPESLHTXFFFLFDH

SEQ ID NO: 13587 - protein, 214 aa, Paeonia officinalis
IVESVGEDVTDVKPGDHVLPIFTGECKECRHCKSEESNLCDLLRINTDRGVMLNDGKSRFSINGQPIFHFVGTSTFSEYTVLHVGCLAKINPEAPLDKVCVLSCGISTGLGATLNVAKPKKGSTVAIFGLGAVGLAAAEGARIAGASRIIGVDLNPKRFDEARKFGVTEFVNPKDYNKPVQEVIAEMTDGGVDRSVECTGSIMAMMSAFECVHD

SEQ ID NO: 13588 - protein, 214 aa, Paeonia officinalis
  unsure (1)..(214): unsure at all Xaa locations
IVESVGEGVTDVKPGDHVLPIFTGECKECRHCKSEESNMCDLLRINTDRGVMLNDGKSRFSINGQPIFHFVGTSTFSEYTVLHVGCLAKINPEAPLDKVCVLSCGISTGLGATLSVAKPKKGSTVAIFGLGAVGLAAAEGARIAXASRIIGVDLNPKRFDEARKFGVTEFVNPKDYNKPVQEVIAEMTGGGVDRSVECTGSIMAMMSAFECVHD

SEQ ID NO: 13589 - protein, 270 aa, Pleurotus djamor
AHFDRERDPERVVHAKAAGAHGYFEVTHELSDITSNPLLTSVGKKVDLTARFSTVGGESGSADTARDPRGFAFKLRTEQGNWDWVFNNTPIFFIRDPAKFPHFIHTQKRDPQTHLKDADMFWDYLGQNPESIHQMMILFSDRGTPDGVDSMHGYSGHTFKWLKNDGTFVYVQVHVRADQGFKTLDGPTAHKLTADNPDYSTEKMFNRIEKGDYPSWTVYIQTMTPEQAESFRYNILDLTKVWPHAQYPLRPIGKVVLNKNPVTYFAEVEQ

SEQ ID NO: 13590 - protein, 473 aa, Pseudomonas syringae pv. tomato str. DC3000
MSSSSTTAAADTQGRQNASPNRLIFISVLVATMGALAFGYDTGIIAGALPFMTLPADQGGLGLNAYSEGMITASLIVGAAFGSLASGYISDRFGRRLTLRLLSVLFIAGALGTAIAPSIPFMVAARFLLGIAVGGGSATVPVFIAEIAGPSRRARLVSRNELMIVSGQLLAYVLSAVMAALLHTPGIWRYMLAIAMVPGVLLLIGTFFVPPSPRWLASKGRFDEAQDVLEQLRSNKDDAQREVDEMKAQDEQARNRPKAKELLRQRWVIKLLLIGIGLGFTAQLTGVNAFMYYTPIILKNTGMGTNAALTATIGNGVVSVIATLLGIWAIGRYGRRHLLMTGLVMVILMQAALGCVLQFMPQNLTQSYTALACILVFLLFMQMCISPVYWLLMSELFPMQVRGLLTGTAVSMQWLFNASVAFTFPIAVDTIGNPTFFIFAAINVGSLIFVFLCLPETKGKSLEQIEKHLKKEL

SEQ ID NO: 13591 - protein, 447 aa, ASPERGILLUS NIDULANS FGSC A4
MPHSVLYTKIDTRPPEVIHSRGNYLHTSDGRTIFDASGGAAVACLGHNEPQVKQAIMAQLDKVAYIYSPFFTVPAAEEIATFLTESTGGAMSKVFIVSSGTEAIEAALKMTRQYFTELSKPQLQRTKFIARRQSYHGNTLGSLAAGGHKARRAIFEPILAASTSHVSPCYPYREMKKGESNEEYVSRLAEELENEFQRVGPDTVCAFIAETMSGTTLGCIPAVPGYLKAMKQVCDRHGALFVLDEVMSGMGRTGTLHAWQQEGVVPDLQTVAKGLGAGYAPVGALLVGNRVADVLSKGTGSFTHSQTYQGHPIACAAACAVQKIIQKENLLDNVRRQGEYLGRLLNERLGGHRNVGDVRGRGLFWALEFVRDKETKEPFPAEAGIAQKVHLTGLQKEHSISVIPGAGVADGRNGDIIQIAPAYNVSKEDIELIVERVEGVVHAAFGA

SEQ ID NO: 13592 - protein, 375 aa, Sinorhizobium meliloti
MDARAAVAIQAGKPLEVMTVQLEGPRAGEVLVEVKATGICHTDDFTLSGADPEGLFPAILGHEGAGIVVDVGPGVTSVKKGDHVIPLYTPECRSCPSCLSRKTNLCTAIRATQGQGLMPDGSSRFSINGDKIHHYMGCSTFSNFTVLPEIALAKVNPDAPFDKICYIGCGVTTGIGAVINTAKVEIGATAIVFGLGGIGLNVIQGLRLAGADMIIGVDLNNDKKPWGEKFGMTHFVNPKEVGDDIGPYLVNLTKRGADHIGGADYTFDCTGNTNVMRQALEASHRGWGKSVIIGVAGAGQKIATRPFQLVTGRTWMGTALGGARGRTDVPKIVDWYMEGKIAIDPMITHTMPLDDINKGFELMHSGESIRSVVLF

SEQ ID NO: 13593 - protein, 577 aa, Oryza sativa
MSATTSNSRRLCNGRGQVIPGPTLPEAVKMGPHAIRIVVGGLGEGELSTATTVHGPERASSSSAPPEMASAALPEAVAPKKKGNVRFAFACAILASMTSILLGYDIGVMSGASLYIKKDFNISDGKVEVLMGILNLYSLIGSFAAGRTSDWIGRRYTIVFAAVIFFAGAFLMGFAVNYAMLMFGRFVAGIGVGYALMIAPVYTAEVSPASARGFLTSFPEVFINFGILLGYVSNYAFSRLPLNLGWRIMLGIGAAPSVLLALMVLGMPESPRWLVMKGRLADAKVVLEKTSDTAEEAAERLADIKAAAGIPEELDGDVVTVPKRGSGNEKRVWKELILSPTPAMRRILLSGIGIHFFQQASGIDSVVLYSPRVFKSAGITDDKHLLGTTCAVGVTKTLFILVATFFLDRVGRRPLLLSSTGGMILSLIGLGAGLTVVGQHPDAKIPWAIGLSIASTLAYVAFFSIGLGPITWVYSSEIFPLQVRALGCSLGVAANRVTSGVISMTFLSLSKAITIGGSFFLYSGIAALAWVFFYTYLPETRGRTLEEMSKLFGDTAAASESDEPAKEKKKVEMAATN

SEQ ID NO: 13594 - protein, 425 aa, Glycine max
MESGVVAVNNNINNYESKATSTITIKGILSLLMESIDDENCDGGGSKKRVISLGMGDPTLTTLFHTPKVVEEAVADALQSRKFHGYAPTAGLLQARIAIAEYLSRDLPYQLSRDDVFITCGCTQAIDVSVAMLARPGANILLPRPGFPIYELCAAFRGVEVRHYDLLPEKGWEVDLDAVEALADQNTVALAIINPGNPCGNVYSYHHLEKIAETAKRVGTIVISDEVYGHLAFGSKPFVPMGVFGSTVPVLTLGSLSKRWIVPGWRLGWFVTNDPSGTFREPKVVERIKKYFDLLGGPATFLQAAVPQIIANTEEIFFEKTIDNLRHTADICCKEIEDIPCIFCPYKPEGSMAMMVKLNLSLLEDISDDIDFCFKLAKEESVIILPGTAVGLKDWLRITFAADPSALGEGMRRIKSFYQRHARKL

SEQ ID NO: 13595 - protein, 520 aa, Zea mays
  unsure (1)..(520): unsure at all Xaa locations
MEGRMTSLEATMKVSSLMASSMSRNADPDQQTLRPNSVEQFYFPRPGQSLPGIPPFFGPPSSSLYLPNDNEAKFGNQFESNPSQNTDWDPQAIVSNLTFLEQKIKQVKDIVQSMSNRENQVAGGSSELAAKQHLVTADLTSIIIQLISTAGSLLPSMKNPLLSSNPAVRQLGNTLGSPMGLGMNANQRPSVDSKTDIPDTGKTSDYDELMNSLNPTQDERDEMFKCPNPXCDGKGSEPASMEDHDVKESDDGGEGENLPPGSYVVLQLEKEEILAPHTHFCLICGKGFKRDANLRMHMRGHGDEYKTPAALAKPTKDSGADHAPVTRYSCPFVGCKRNKEHKKFQPLKTILCVKNHYKRSHCDKSYTCSRCNTKKFSVIADLKTHEKHCGRDKWLCSCGTTFSRKDKLFGHVALFQGHTPALPMEDVKVSEASEQPQDGEPTNEMARSMVYSFPCSSSDGLLNLDMKMADDVRGYLSPLSFDNCFGAFDDFTRPGFDISENPFSFPPSGSCSYGQQNGDS

SEQ ID NO: 13596 - protein, 478 aa, Pseudomonas syringae pv. syringae B728a
MSQKFDVVVIGAGPGGYVAAIKAAQLGLKTACIEKYQDKEGKLALGGTCLNVGCIPSKALLDSSWKFYEAKNGFSVHGISTSDVSIDVPAMIGRKSTIVKGLTGGVASLFKANGVTTLQGHGKLLAGKKVELTAADGTVEIIEADHVILASGSRPIDIPPAPVDQKIIVDSTGALEFQQVPQRLGVIGAGVIGLELGSVWARLGAQVTVLEALDKFIPAADEAVSKEALKTFNKQGLDIKLGARVTGSKVEGEQVVVSYTDAAGEQSITFDRLIVAVGRRPVTTDLLASDSGVDLDERGFIYVDDYCTTSVPGVYAIGDVVRGLMLAHKASEEGIMVVERIKGHKAQMNYNLVPSVIYTHPEIAWVGKTEQTLKAEGVEVNVGTFPFAASGRAMAANDTGGFVKIIADAKTDRVLGVHVIGPSAAELVQQGAIAMEFGTSAEDIGMMVFSHPTLSEALHEAALAVNGGAIHIQNRKKR

SEQ ID NO: 13597 - protein, 244 aa, Eucalyptus globulus
MGRGRLQLKRIENKINRQITFSKRRAGLLKKAHEISVLCDAEVALIVFSAKGKLFEYSTDSCMERILERYERYSYAEHQVLASETESIGSWTLEHAKLKARLEVLHRNYRHFMGEDLDSLSLKDLQNLEQQLESALKHIRSRKNQLMHESISVLQKKDRALQEQNNLLTKKIKEKERALAQQAQWEQQDHALDSPVVLPHYLPSLDINGSYQARHNGHDDGENLTQPRAGTLLPPWISASQLRL

SEQ ID NO: 13598 - protein, 306 aa, Neurospora crassa
MASAVLNATVAGLSSTDTYFTVLEEVSKYNVQLSYPEKLWAAWYLWMQNDVLATGLMSFFMHEIVYFGRSLPWMIIDALPMFNKYKIQKEKRPTWREQFECAGLVLLSHCTVELPQIWLFHPIATYFGLDYGVPFPPLWKMALHICIFFVMEDAWHYWNHRALHYGPLYKAIHKIHHTYSAPFGLTAEYASPIEVMLLGIGTVGSPILWVSITKDLHLATMYVWIVLRLFQAIDAHSGYDFPFSLRHFLPFWCGAEHHDLHHERFIGNYASSFRWWDYCLDTEAGEEAAKARRDKKLAAIKAKKAQ

SEQ ID NO: 13599 - protein, 547 aa, Magnaporthe grisea 70-15
MMLWRKPPNVAGTSANALFALLLVASGGCLFGHDTGVINGVLAMPSFRDQFNPSTSQSSLIVAILSAGTFLGSLMSAPMADFIGRRKALHIAIGVFCLGVVFQVCSADIPMLLGGRFVAGIGVGLISVLVPLYQSEMAPKWIRGTMVCAYQLFITLGLLAASVINIITSDIPGPAAYRIPLGLQLVWACVLMMGLLILPETPRYLIKRGLDTEAALSLSRLRRLDITHPALIEELAEIKANHEYELALGPDTYKDVFFGSPHLGRRTLTACGLQMLQQLSGVNFIMYYGTWFFKGAMVDNPYLISCIMNIVNFISTLPGLVVVESWGRRRLLIVGAIGMSICQLSVASFTAATKHIAGSNGSSTTQNQVLVTFVAIYIFFFAASWGPVVWVVTAEIFPLKVRAKSMSVSTASNWLLNFGIAYSTPYMVDTGYASLGPLIFFVWGAFCIVGIFFVYFMVYETSKISLEQIDEMYERVTVAWKSRDFEPSWSFQQMRDLGYSDSGIPPDESNELQQTTTTQSETASSGMAPSNGDSKSIPTMGNVDFSY

SEQ ID NO: 13600 - protein, 379 aa, Lactobacillus plantarum WCFS1
MQDEMLGIILAGGQGTRLGKLTKDTAKPAVPFGGRYRIIDFTLSNCANSGVNTVGVITQYQPLELNAHIGSGASWGFDSLNGGVTVLQPYSSSEGEKFFQGTAHAIYQNIEYIDQQDPKYLLVLSGDHIYKMDYDAMLKYHQEKKASLTVGVIHVTNEEAKRFGMMNTDATDRIIEFEEKPEHPKSDKASMGIYIFNWPTLRDYLVKSYATDKSLEDFGKNVIPSYLANNESVYAYAFKGYWRDVGTIKSLWQANMEFLSPHNRLNIGDRYWRIYSKAEVLPPMFLTETSQVNNAMVVDSCYVAGEIDHSILSQRVSVGMGSRVVDSMIMPGATIGKNVVIDHALIGEDAVIGDDAQIIGTTDKIAVVGYHETMGVEQP

SEQ ID NO: 13601 - protein, 379 aa, Pennisetum glaucum
MATAGKVIKCKAAVAWEAGKPLSIEEVEVAPPQAMEVRVKILYTSLCHTDVYFWEAKGQTPVFPRIFGHEAGGIIESVGEGVTDVAPGDHVLPVFTGECKECPHCKSAESNMCDLLRINTVRGVMIGDGKSRFSINGKPIYHFVGTSTFSEYTVMHVGCVAKINPEAPLDKVCVLSCGISTGLGASINVAKPPKGSTVAIFGLGAVGLAAAEGARIAGASRIIGVDLNPSRFEEAKKFGCTEFVNPKDHNKPVQEVLADMTNGGVDRSVECTGNINAMIQAFECVHDGWGVAVLVGVPHKDAEFKTHPMNFLNERTLKGTFFGNFKPRTDLPNVVELYMKKELEVEKFITHSVPFSEINKAFDLMAKGEGIRCIIRMEN

SEQ ID NO: 13602 - protein, 388 aa, Mycobacterium tuberculosis H37Rv
MTDRVALRAGVPPFYVMDVWLAAAERQRTHGDLVNLSAGQPSAGAPEPVRAAAAAALHLNQLGYSVALGIPELRDAIAADYQRRHGITVEPDAVVITTGSSGGFLLAFLACFDAGDRVAMASPGYPCYRNILSALGCEVVEIPCGPQTRFQPTAQMLAEIDPPLRGVVVASPANPTGTVIPPEELAAIASWCDASDVRLISDEVYHGLVYQGAPQTSCAWQTSRNAVVVNSFSKYYAMTGWRLGWLLVPTVLRRAVDCLTGNFTICPPVLSQIAAVSAFTPEATAEADGNLASYAINRSLLLDGLRRIGIDRLAPTDGAFYVYADVSDFTSDSLAFCSKLLADTGVAIAPGIDFDTARGGSFVRISFAGPSGDIEEALRRIGSWLPSQ

SEQ ID NO: 13603 - protein, 214 aa, Paeonia officinalis
IVESVGEGVTDVKPGDHVLPIFTGECKECRHCKSEESNMCDLLRINTDRGVMLNDGQSRFSINGQPIFHFVGTSTFSEYTVLHVGCLAKINPEAPLDKVCVLSCGISTGLGATLNVAKPKKGSTVAIFGLGAVGLAAAEGARIAGASRIIGVDLNPKRFDEARKFGVTEFVNPKDYNKPVQEVIAEMTGGGVDRSVECTGSIMAMMSAFECVHD

SEQ ID NO: 13604 - protein, 315 aa, Helianthus tuberosus
MSISCSDCFSDLLCCEDSGILSGDDRPECSYDFEYSGDFDDSIAEFIEQERKFVPGIDYVERFQSQVLDASAREESVAWILKVQRFYGFQPLTAYLSVNYLDRFIYCRGFPVANGWPLQLLSVACLSLAAKMEETLIPSILDLQVEGAKYIFEPKTIRRMEFLVLSVLDWRLRSVTPFSFIGFFSHKIDPSGMYTGFLISRATQIILSNIQEASLLEYWPSCIAAATILCAASDLSKFSLINADHAESWCDGLSKEKITKCYRLVQSPKILPVHVRVMTARVSTESGDSSSSSSSPSPYKKRKLNNYSWIEEDKR

SEQ ID NO: 13605 - protein, 503 aa, Tropaeolum majus
MSGTKATSVSVPLPDFKQSVNLKYVKLGYHYSITHAMYLFLTPLLLIMSAQISTFSIQDFHHLYNHLILHNLSSLILCIALLLFVLTLYFLTRPTPVYLLNFSCYKPDAIHKCDRRRFMDTIRGMGTYTEENIEFQRKVLERSGIGESSYLPPTVFKIPPRVYDAEERAEAEMLMFGAVDGLFEKISVKPNQIGVLVVNCGLFNPIPSLSSMIVNRYKMRGNVFSYNLGGMGCSAGVISIDLAKDLLQVRPNSYALVVSLECISKNLYLGEQRSMLVSNCLFRMGGAAILLSNKMSDRWRSKYRLVHTVRTHKGTEDNCFSCVTRKEDSDGKIGISLSKNLMAVAGDALKTNITTLGPLVLPMSEQLLFFATLVGKKVFKMKLQPYIPDFKLAFEHFCIHAGGRAVLDELEKNLKLSSWHMEPSRMSLYRFGNTSSSSLWYELAYSEAKGRIKKGDRVWQIAFGSGFKCNSAVWKALRNVNPAEEKNPWMDEIHLFPVEVPLN

SEQ ID NO: 13606 - protein, 430 aa, Helicobacter pylori J99
MELLHSINDFNEAKQVIAGGVNSPVRAFKSVKGTPPFILKGKGAYLYDVDNNHYIDFVQSWGPLIFGHADEEIEENIINVLKKGTSFGAPTELETTLAKEIISCYEGLDKVRLVNSGTEATMSAIRLARAYSQKDDLIKFEGCYHGHSDSLLVKAGSGCATFGSPSSLGVPNDFSKHTLVARYNDLNSTEECFKKGDVGCVIIEPIAGNMGLVPAQKEFLLGLKALCEKYQAVLILDEVMSGFRASLSGSQEFYGVVPDLVTFGKVIGAGLPLACFGGRAEIMDLLSPIGGVYQAGTLSGNPLAVCAGLSALYKIKRDKTLYTRLNALAVRLTQGLQKSAQNYNIALETLNMGSMFGFFFNENAVRDFDDALKSDTEMFAKFHQKMLFKGVYLACSSFETGFICEPMTEEMIDLAISKADESFDEIINGV

SEQ ID NO: 13607 - protein, 214 aa, Paeonia cambessedesii
IVESVGEGVTDVKPGDHVLPIFTGECKECRHCKSEESNMCDLLRINTDRGVMLNDGKSRFSINGQPIFHFVGTSTFSEYTVLHVGCLAKINPEAPLDKVCVLSCGISTGLGATLNVAKPKKGSTVAIFGLGAVGLAAAEGARIAGASRIIGVDLNPKRFDEARKFGVTEFVNPKNYNKPVQEVIAEMTGGGVDRSVECTGSIMAMMSAFGCIHD

SEQ ID NO: 13608 - protein, 495 aa, Escherichia coli
MNFHHLAYWQDKALSLAIENRLFINGEYTAAAENETFETVDPVTQAPLAKIARGKSVDIDRAMSAARGVFERGDWSLSSPAKRKAVLNKLADLMEAHAEELALLETLDTGKPIRHSLRDDIPGAARAIRWYAEAIDKVYGEVATTSSHELAMIVREPVGVIAAIVPWNFPLLLTCWKLGPALAAGNSVILKPSEKSPLSAIRLAGLAKEAGLPDGVLNVVTGFGHEAGQALSRHNDIDAIAFTGSTRTGKQLLKDAGDSNMKRVWLEAGGKSANIVFADCPDLQQAASATAAGIFYNQGQVCIAGTRLLLEERIADEFLALLKQQAQNWQPGHPLDPATTMGTLIDCAHADSVHSFIREGESKGQLLLDGRNAGLAAAIGPTIFVDVDPNASLSREEIFGPVLVVTRFTSEEQALQLANDSQYGLGAAVWTRDLSRAHRMSRRLKAGSVFVNNYNDGDMTVPFGGYKQSGNGRDKSLHALEKFTELKTIWISLEA

SEQ ID NO: 13609 - protein, 506 aa, Pseudomonas aeruginosa UCBPP-PA14
MRYAHPGSEGAIVSFKARYGNYIGGEFVPPVKGQYFTNTSPVNGQPIAEFPRSTAEDIDKALDAAHAAADAWGRTSVQERSNILLKIADRIEQNLELLAVTETWDNGKAVRETLNADIPLAADHFRYFAGCIRAQEGSAAEINDSTVAYHIHEPLGVVGQIIPWNFPLLMAAWKLAPALAAGNCVVLKPAEQTPLGICVLLELIGDLLPPGVLNVVQGFGREAGEALATSKRIAKIAFTGSTPVGSHILKCAAENIIPSTVELGGKSPNIYFEDIMQAEPAFIEKAAEGLVLAFFNQGEVCTCPSRALVQESIYPAFMEEVLKKVRAIKRGDPLDTETMVGAQASQQQYEKILSYLDIAQQEGAEVLTGGSVEKLEGNLASGYYIQPTLLKGHNKMRVFQEEIFGPVVGVTTFKDEAEALAIANDTEYGLGAGLWTRDINRAYRMGRGIKAGRVWTNCYHLYPAHAAFGGYKKSGVGRETHKMMLDHYQQTKNLLVSYDINPLGFF

SEQ ID NO: 13610 - protein, 214 aa, Paeonia mlokosewitschi
IVESVGEGVTDVKPGDHVFPIFTGECKECRHCKSEESNMCDLLRINTDRGVMLNDGQSRFSINGQPIFHFVGTSTFSEYTVLHVGCLAKINEEAPLDKVCVLSCGISTGLGATLNVAKPKKGSTVAIFGLGAVGLAAAEGARIAGASRIIGVDLNPKRFDEARKFGVTEFVNPKDYNKPVQEVIAEMTGGGVDRSVECTGSIMAMMSAFECVHD

SEQ ID NO: 13611 - protein, 1307 aa, Ceratodon purpureus
MSATKKTYSSTTSAKSKHSVRVAQTTADAALEAVYEMSGDSGDSFDYSKSVGQSAESVPAGAVTAYLQRMQREGLIQNFGCMVAVEEPNFCVIAYSENASEFLDLIPQAVPSMGEMDVLGIGTDIRTLFTPSSSAALEKAAATQDISLLNPITVHCRRSGKPLYAIAHRIDIGIVIDFEAVKMIDVPVSAAAGALQSHKLAARAITRLQALPGGDIELLCDTIVEEVRELTGYDRVMAFKFHEDEHGEVVAEIRRMDLEPYMGLHYPATDIPQASRFLLMKNRVRLIADCYASPVKLIQDPDIRQPVSLAGSTLRAPHGCHAQYMGNMGSIASLVMAVIINDNEEYSRGAIQRGRKLWGLVVCQHTSPRTVPFPLRSVCEFLMQVFGMQLNLHVELAAQLREKHILRTQTLLCDMLLRDAPIGIVSQTPNIMDLVKCDGAALYYGKRVWLLGTTPTENQIKEIADWLLEHHNDSTGLSTDSLADANYPGAHLLGDAVCGMAAAKITAKDFLFWFRSHTATEVKWGGAKHDPDEKDDGRKMHPRSSFKAFLEVVNKRSPPWEDVEMDAIHSLQLILRGSFRDIADSDTKTMIHARLNDLKLQGVEERNALANEMSRVLETAAAPILAVDSRGMINAWNAKIAQVTGLPVEEAMHCSLTKDLVLDESVVVVERLLSLALQGEEEQNVEIKLKTFGTQTTERAVILIVNACCSRDASDFVVGVFFVGQDVTEQRMFMDRFTRIQGGEKTTVQDPHPLMRPSFDGDEFGRTFKRNSALGGLKDHATGSVERLDLYLRRAEECMEVMETIPSPKFNNKQCQYLAGKLKAVLQSASLFLRISHHEHHELGASIDMGRHVEIFKLLLALAKEIESFIQGCCKDEWIKAAMTLTNVSEYVSSMGFNLELCKIAFCKSCAASGSLTLDQIEVICKDEAEVVKRNASIDVDTLFAKVIYDLTEKTLSSDQNDLAIYLLQRLKRAKPILPSFSSRPSWWNFYDDWSFSEKFFQWIQITGSLGSGSSATVEKAVWLGTPVAKKTFYGRNNEDFKREVEILAELCHPNITSMFCSPLYRRKCSIIMELMDGDLLALMQRRLDRNEDHDSPPFSILEVVDIILQTSEGMNYLHEKGIIHRDLKSMNILVKSVKVTKSEIGYVHVKVADFGLSKTKDSSTRYSNQTWNRGTNRWMAPEVINLGYESTEGEISFDGKVPKYPLKSDVYSFGMVCYEVLTGDVPFPEEKNPNNVKRMVLEGVRPDLPAHCPIELKALITDCWNQDPLKRPSFAVICQKLKYLKYLLMTGFSSYQDSYPSTEEPS

SEQ ID NO: 13612 - protein, 416 aa, Burkholderia fungorum LB400
MPAVKPILKSNKLLNVCYDIRGPVLEHAKRLEEEGHRIIKLNIGNLAPFGFDAPDEIIQDMILNLPGSSGYSDSKGVFAARKAIMHYTQQKGVHGVELDDIYIGNGASELIVMALQGLLNDGDEVLLPAPDYPLWTAGVSLSGGTPVHYICDESNSWMPDLDDIRAKITPNTRALVVINPNNPTGALYSDELLLGLIEIARQHGLVIFADEVYDKIVYDGKKHTSMAALSEDVLTVTFNSLSKSYRSCGYRAGWMFISGLTAGENRRHAKDYFEGLGILASMRLCPNVPGQYAIQTALGGYQSINDLIVPSGRLYKQRELAYDMLTAIPGVSCVKPEAALYMFPRLDPKIYPIQDDQQFILDLLLEERVLLVQGTGFNWPTPDHFRVVFLPNVDDLADSINRIARFLDGYRKRHTA

SEQ ID NO: 13613 - protein, 650 aa, Bacillus subtilis
MITYVFPGQGSQQKGMGQGLFEQYQHLTDQADQILGYSIEKLCTEKSYLDVNHTEYTQPALYVVNALSYLKRVEETGRKPDFAAGHSLGEYNALMAAGAFDFETGLRLVKKRGELMGRITGGGMAAVIGLSKEQVTAVLEEHRLYDIDVANENTPQQIVISGPKKEIEKARAVFENTKDVKLFHPLNVSGAFHSRYMNEAKQVFKQYIDSFQFAPLAIPVISNVYAEPYHQDRLKDTLSEQMDNTVKWTDSIRFLMGRGEMEFAEIGPGTVLTGLIHRIKNEAEPLTYIPKKNPAISAHLKEQRNVQAGITAESLGSAEFKQDYHLTYAYLAGGMYRGIASKEMVVKLSRAGMMGFFGTGGLSLKEVEDAIHAIQGELGKGQAYGINLVHNMKHTESEEKMIDLLLRNQVSIVEASAFLSVTPVLVRYRAKGVKRNQNGDVICSNRLIAKISRPEVAESFLSPAPENMLQKLLGENKITMNEAELLRCIPMADDICVEADSGGHTDGGVAYSLMPAMTSLRDEMMKKYQYRKKIRVGAAGGIGTPEAAMAAFMLGADFILTGSINQCTVEAATSDKVKDLLQQMNVQDTAYAPAGDMFESGSKVQVLKKGVFFPARANKLYELYQRYGSIRELDAKMLAQLEEKYFKRSV

SEQ ID NO: 13614 - protein, 195 aa, Amylomyces rouxii
MAEIRRKLVIVGDGACGKTCLLIVFSKGTFPEFYVPTVFENYVADVEVDGKHVELALWDTAGQEDYDRLRPLSYPDSHVILICFAVDSPDSLENVQEKWISEVLHFCQGLPIVLVGCKKDLRNDPGTIEELRRNSQKPVSSEEGASIAQRISAYKYLECSAKTGEGVREVFEHATRAALMVSKKKKSKSGVCNLL

SEQ ID NO: 13615 - protein, 270 aa, Oryza sativa
MQQQGAAALTPATGLGSRPSLTVKTSRVCTTAALPPLCRCGRRHLIGSTSATALLPLLALPSPAASPVDPEVMLERVHPARPEWYEKFYATAMDKFMKPYEAEISLYQNSQIAQYKSKLFSQLMTAGKNILELGVGTGPNLKYYANADGVNIVGVDPNKHMEEYARAAAVSAGLPPSNFTFRRGVGEALPAEDNSMDAVVGTLVMCSLPEIVTDFLSKKINALTVTGLEICTLLNKQYELQYHARFPRLNIPCHTLDGLVFRNGWMPRRY

SEQ ID NO: 13616 - protein, 397 aa, Streptomyces virginiae
MSARIGAISESATLAVDAKAKALKAAGRPVIGFGAGEPDFPTPDYIVEAAVEACRNPKYHRYTPAGGLPELKAAIAAKTLRDSGYEVEASQVLVTNGGKQAIYEAFAAILDPGDEVIVPAPYWTTYPESIRLAGGVPVDVVADETTGYRVSVEQLEAARTERTKVVLFVSPSNPTGSVYSEADAKAIGEWAAEHGLWVLTDEIYEHLVYGEAKFTSLPVLVPALRDKCIIVNGVAKTYAMTGWRVGWVIAPQDVIKAATNLQSHATSNVSNVAQVAALAAVSGNLDAVAEMRKAFDRRRQTMVKMLNEIDGVFCPTPEGAFYAYPSVKELLGKEIRGKRPQSSVELAALILDEVEVAVVPGEAFGTPGYLRLSYALGDEDLVEGVSRIQKLLAEAKA

SEQ ID NO: 13617 - protein, 478 aa, Nicotiana tabacum
MAAVNGVGISWPSKLTQGQRPKLVFSPSPRRCTPSSSTIKMTASVDEKKKTFTLQKSEEAFSKAKELMPGGVNSPVRAFKSVGGQPIIIDSVKGSRMRDIDGNEYIDYVGSWGPAIIGHADDEVLAALAETMKKGTSFGAPCLLENTLAEMVISAVPSIEMVRFVNSGTEACMGVLRLARAFTGRPKIIKFEGCYHGHADPFLVKAGSGVATLGLPDSPGGPKAATSDTLTAPYNDISAVESLFEEHKGEVAAIILEPVVGNAGFIQPNLDFLAAIRKITKENDALLIFDEVMTGFRLAYGGAQEYFGITPDLTTLGKIIGGGLPVGAYGGRRDIMEMVAPAGPMYQAGTLSGNPLAMTAGIHTLKRLQGPGTYEYLDKITGELTQGILDAGKKTGHAMCGGYIRGMFGFLFAEGPVNNFSDAKKSDTEKFGRFYRGMLEEGVYFAPSQFEAGFTSLAHTSEDIQKTVAAAEKVLKQI

SEQ ID NO: 13618 - protein, 478 aa, Nicotiana tabacum
MAAVNGVGISWPSKLTQSQRPKLVFSPSPRRCTPSSSTIKMTASVDEKKKTFTLQKSEEAFSKAKELMPGGVNSPVRAFKSVGGQPIIIDSVKGSRMRDIDGNDYIDYVGSWGPAIIGHADDEVLAALAETMKKGTSFGAPCLLENTLAEMVISAVPSIEMVRFVNSGTEACMGVLRLARAFTGRPKIIKFEGCYHGHADPFLVKAGSGVATLGLPDSPGVPKAATTDTLTAPYNDISAVESLFKEHKGEVAAIILEPVVGNAGFIQPNPDFLAAIRKITKENDALLIFDEVMTGFRLAYGGAQEYFGITPDLTTLGKIIGGGLPVGAYGGRRDIMEMVAPAGPMYQAGTLSGNPLAMTAGIHTLKRLQGPGTYDYLDKITGELTQGILDAGKKTGHAMCGGYIRGMFGFFFVEGPVNNFSDAKKSDTEKFGRFYRGMLEEGVYFAPSQFEAGFTSLAHTSEDIQRTVAAAEKVLKQI

SEQ ID NO: 13619 - protein, 299 aa, Glycine max
PFDYTHLPDHGIFRDGSKDISEAQNSLYKRTLLQDLNRQGAVVLEGKTLDMEMEHPRTVAEILARRKQECDGVVDEERQNRISKMTLIDDLQAQDNHPYAPLCIKDPRDYFDFQQANAVKTLDDSQTGMEQMKCSLGSEEAYGSLRASISKIKTTGLRDPLFSPDVALKVLNGLTKNISSPKYHLGRSSQGSVLDILPNTTKETLLDHWVCSQELLRHFWSSYPITTQNLVNKTRRLKESISQIYSKLEDIKVFAESDLRHHVSLVVHPMQQALNAALLHYEADIRKRNARGQKPNGYV

SEQ ID NO: 13620 - protein, 265 aa, Oryza sativa
MAFAVSDELLGTFVPIAVYWLYSGLYIVLDAMGMDDYRLHPKGEEATKNVVSKWTVVKGVLVQQSFQIAVSLLLFTVTIGDESGTVRKQPPALVIALQFIIAMFVMDTWQYFMHRYMHVNKFLYKHVHSKHHTLVVPYAFGALYNHPLEGLILDTIGGALSFLIAGMTPKTAIFFFSFATIKTVDDHCGLWLPGNILHVFFSNNSAYHDIHHQLYGNKYNFSQPFFVMWDKILGTYMPYTLENRKGGGFEARPIKLNVAEQSKTD

SEQ ID NO: 13621 - protein, 103 aa, Mycoplasma genitalium
KKTAILDHFDYDLILENALIQKNKLQEHKEIEDIANLAHIFFVRQKNQDGLGDAILFAESFVGNEDFAVLLGDDVVFSKEPALKQCLEAYYETNCQTIGVQEV

SEQ ID NO: 13622 - protein, 90 aa, Ricinus communis
RESFPVPSAICSGKREKCVIEKENNFKQPGERYRSWPPDRQERSLNRLVGGFSEPRITQELRTIWISYWIQCDKSLGQKLATRLNVKPSI

SEQ ID NO: 13623 - protein, 294 aa, Helianthus tuberosus
MEQYEKVEKIGEGTYGVVYKARDKVTNETIALKKIRLEQEDEGVPSTAIREISLLKEMQHGNIVRLQDVVHSDKRLYLVFEYLDLDLKKHMDSCPEFSKDPRLVKTFLYQILRGIAYCHSHRVLHRDLKPQNLLIDRRTNALKLADFGLARAFGIPVRTFTHEVVTLWYRAPEILLGSRHYSTPVDVWSVGCIFAEMVNQRPLFPGDSEIDELFKIFRIMGTPNEETWPGVTSLPDFKSAFPKWSSKDLATVVPNLEKAGLDLLCKMLWLDPSKRITARTALEHEYFKDIGFVP

SEQ ID NO: 13624 - protein, 307 aa, GIBBERELLA ZEAE PH-1
MTSRTALRGFSRSLNPSRCSQTFVRPFSSANVVRKNYQTPTSDRPTHFGYETVTEAEKQQRVAGVFTSVAETYDKMNDFMSLGIHRLWKDYFISSLNPGATNPPGQAQRILDVAGGTGDIAFRHLQHAHEFNCNPNVSVIISDINPDMLGVGRQRSLALPASHQSALSFLEANAEVLPSQIEDNSLDLYTVAFGIRNFSNIPAALKEAHRVLKPGGVFACLEFSKVDKHPIFNTIYKQWSFKGIPLIGQLVAGDRDSYQYLVESIERFPSQTQFRDMIKDAGFVVAGEGYEDLTGGIAAIHKGMKPV

SEQ ID NO: 13625 - protein, 414 aa, Vibrio parahaemolyticus RIMD 2210633
MLKGINTSRPLRLTWMKIMFEKVVAAPADPILGLTEEFKKDPRAEKINLGVGIYKNEQGETPVLATVKKAEAALIETEKTKSYLTIEGTAEYGLAVQKLLFGADAEIVAEKRAKTAQAPGGTGALRVAGEFIKRQLGNVKIWISNPTWANHNGVFTAAGLETAQYTYYNAETKDKDFDAMLNDLQAASEGDIVLLHGCCHNPTGIDPTAEEWETLAKLIAEKKLLPLFDFAYQGFAKGVEEDAAGLRIFAKYNKEILVASSFSKNFGLYNERVGAFTLVAESEEVATTAFSQVKAIIRSIYSNPPAHGSAVVTHILNNKELRAEWEAEVQEMRDRIQEMRELFVATLKEEGVDADFSFIERQNGMFSFSGLSKEQVNRLKDEFAIYIVGSGRISVAGMTKSNMGPLCKGIAAVL

SEQ ID NO: 13626 - protein, 118 aa, Zea mays
MASLFKEQAKLSAYRDRRFSGTQEEFDEALRASTTVYIGNVSFYTTEEQLYELFSRAGEIKKIIMGLDKNTKTPCGFCFVLFYSREDTEDAVKYISGTILDDRPIRVDFDWGFQEGRQ

SEQ ID NO: 13627 - protein, 214 aa, Paeonia mlokosewitschi
IVESVGEGVTDVKPGDHVLPIFTGECKECRHCKSEESNMCDLLRINTDRGVMLNDGKSRFSINGQPIFHFVGTSTFSEYTVLHVGCLAKINEEAPPDKVCVLSCGISTGLGATLNVAKPKKGSTVAIFGLGAVGLAAAEGARIAGASRIIGVDLNPKRFDEARKFGVTEFVNPKDYNKPVQEVIAEMTGGGVDRSVECTGSIMAMMSAFECVHD

SEQ ID NO: 13628 - protein, 319 aa, Zea mays
MDPKFPPPPPLNKTEPTTATTTTTSTAQQQQQLDPKDYHQQQPAQHQEHHHHLQIQTHQPPQQDGGGGGKEQQQLQVVAQPGERRQQALAPKRSSNKDRHTKVDGRGRRIRMPALCAARIFQLTRELGHKSDGETVQWLLQQAEPAIVAATGTGTIPASALASVAPSLPSPTSGLARPHHHMWAPSAGFSSPSFLNSAAAGTGDAAGIMQRMGIPAGFELPGASAAGATLGAGGHIGFAPMFAGHAAAMPGLELGLSQDGHIGVLAAQSISQFYHQVGAAAGGGGQMQHAHGHHHHHHQQQEDGEDDREDGESDDESGQ

SEQ ID NO: 13629 - protein, 214 aa, Paeonia peregrina
  unsure (1)..(214): unsure at all Xaa locations
IVESVGEGVTDVKPGDHVLPIFTGECKECRHCKSEESNLCDLLRINTDRGVMLNDGKSRFSINGQPIFHFVGTSTFSEYTVLHVGCLAKINTEAPLDKVCVLSCGISTGLGATLNVAKPKKGSTVAIFGLGAVGLAAAEGARIAXASRIIXVDLNPKRFDEARKFGVTEFVNPKDYNKPVQEVIAEMTGGGVDRSVKCTGSIMAMMSTFECVHD

SEQ ID NO: 13630 - protein, 222 aa, Saccharomyces cerevisiae
MSNEDYGYDYDYLFKIVLIGDSGVGKSNLLSRFTTDEFNIESKSTIGVEFATRTIEVENKKIKAQIWDTAGQERYRAITSAYYRGAVGALIVYDISKSSSYENCNHWLTELRENADDNVAVGLIGNKSDLAHLRAVPTDEAKNFAMENQMLFTETSALNSDNVDKAFRELIVAIFQMVSKHQVDLSGSGTNNMGSNGAPKGPTISLTPAPKEDKKKKSSNCC

SEQ ID NO: 13631 - protein, 540 aa, GIBBERELLA ZEAE PH-1
MNTLRRASLSKPEEAGKTWPAIAIGAFVAFGGVLYGYDTGTISGILAMPYWQSLFSTGYRDAKGHLNITTAQESGIVSILSAGTFFGALSSPFMTDYIGRRPGLMIATWVFNLGVCLQVAATSIPLFLAGRFFAGFGVGQISAIIPLYQSETAPKWIRGAIVGSYQWAITIGLLLAAIVNNATGGRNDTGSYRIPVAVQFAYSLILFGGMIILPETPRFLIKKDRHEAAAKALSRIRRLTPDHPAIQAELAEVRANHEYETSIGKSSYLDCFKPPILKRQFTGCALQALQQLTGINFIFYYGTKYFQNSGISSGFVISMITSAINVASTIPGMYAIDKWGRRPLLLWGAVGMCVSQFIVAMAGTFSTGQNADGTIFVKSLAGQKAAVSFVCIYIFFFASTWGPLAWVVTGEIFPLKTRAKSLSMTTATNWLFNWAIAYSTPYLVDYGSGKANLQSKIFFIWFGCCFLCIAFVYFFIYETKGLSLEEVDQLYDEVSVASKSKQWKPSESWEHRQSVSGADGKMFGGNDHQGEVTHNEKNEA

SEQ ID NO: 13632 - protein, 214 aa, Paeonia peregrina
IVESVGEDVTDVKPGDHVLPIFTGECKECRHCKSEESNLCDLLRINTDRGVMLNDGKSRFSINGQPIFHFVGTSTFSEYTVLHVGCLAKINPEAPLDKVCVLSCGISTGLGATFNVAKPKKGSTVAIFGLGAVGLAAAEGARIAGASRIIGVDLNPKRFDEARKFGVTEFVNPKDYNKPVQEVIAEMTGGGVDRSVECTGSIMAMMSAFECVHD

SEQ ID NO: 13633 - protein, 371 aa, Acetobacter pasteurianus
MDVRAAVAFEAGRPLEIERVQLEGPRAGEVLVEVKATGLCHTDKYTLSGADPEGLFPAILGHEGAGVVVEVGAGVQHLRPGDHVIPLYTPECRECKSCLSRKTNLCTAIRATQGKGLMPDGTSRFSFKGQPIHHYMGCSTFANYTVLPEIALAKIRPDAPFDKVCYIGCGVTTGIGAVLFTAKVEPGSTVVVFGLGGIGLNVIQGAKMVGADRIIGVDINPAREAMARQFGMTDFVNPRDLGPNGDVVGHLVELTGGGADYTFECVGNPTLMRQALECAHRGWGVSTIIGVAAAGQEISTRPFQLVTGRRWIGSAFGGARGRTDVPKIVDWYMENRINIDDLITHKLPLERINEGFDMMERGESIRTVVEF

SEQ ID NO: 13634 - protein, 502 aa, Rhizobium sp. NGR234
MDESVRNYLDQYGVSDATRRFLAKPQKMFIDGAWSDSSNGATFDIFEPSTGGLITRAPSGTPEDLDRAVRAARRQFDGGAWRRLKPLERERLLHSLADLIEAHSDELAEIEAIDMGKSVTFAREIDIRGTVDTFRYFAGWASKLHGRTVEPSLPGNYLAYTRKEPLGVVAAIVPWNFPLQTLAWKLAAALAVGCTAIVKPAELTSLSTLRFAELVQEAGIPDGVVNIVTGKGSIIGAAMSTHPGINKVTFTGSTPVGQEVGRTAVGNLKHVTLELGGKSPVLVLDDADLQSAAVAVANGVFFNSGQVCDAGTRVYVQGSVHDAFLDELVSVTSALKIAPGLDRDCYIGPLVSAQQKKVVSGYIEAGRREGAELIHGGASLHRQGHFIEPAIFSHCKPQMSIVREEIFGPVLVTSPFDDLDDAVSLANDTPFGLAAAIYSNDLSRVHTLIPRLHAGSIYVNAHSTIDPAMPFGGFKASGFGKDLGPEQLDYLMETKAVWITLP

SEQ ID NO: 13635 - protein, 490 aa, Pseudomonas fluorescens PfO-1
MARFELQKLYIDGAYSDAGSDATFEAINPANGEVLAHVQRATKEDVERAVVSAEKGQKIWAAMTAMERSRILRRAVDILRERNDELAALETLDTGKAFSETKYVDIVTGADVLEYYAGLVPAIEGEQIPLRDTSFVYTRREPLGVVAGIGAWNYPIQIALWKSAPALAAGNAMIFKPSEVTSLTTLKLAEIYTEAGVPNGVFNVLTGSGREVGTWLTEHPRIEKISFTGGTDTGKKVMASASASSLKDVTMELGGKSPLIICDDADLDRAADTAMMANFYSSGQVCTNGTRVFVPSHLKAAFEAKIVERVARIRVGNPEDENTNFGPLVSFPHMESVLGYIAKGKEEGARVLCGGERLTDGEFAKGAFVAPTVFTDCTDDMTIVREEIFGPVMAILSYETEEEVIRRANDTDFGLAAGIVTRDLNRAHRVIHQLEAGICWINAWGESDAKMPVGGYKQSGVGRENGISSLNNFTRIKSVQVELGDYVSVF

SEQ ID NO: 13636 - protein, 470 aa, Triticum aestivum
  unsure (1)..(470): unsure at all Xaa locations
MPMDSCHPTSPPPPPPRSLGRSSPSSWGNAIKPPPPPPPPAPSPHPPPPPAEDLPDGLRPRLRLRSPLHGQPRRTRLRQDQGAVARTGGAINLGQGFPNFDGPXFANEEALRNKTWGKISQLXGYGVPEMNSAVAERFLKDSGLQIDPDKEVTVTSGCTEAIAATILGLINPGELLFLLGPLXNRWKVNGSXAGVRMKATSLRPPEILVTLQELXGGAIVKDIRPSAPNTPHPPPENMFXREEQLEFIADLCKENDVLLFADEVYDKLAFEADHISMASIPGMYERTVTMNSLGKTFSLTGWKIGWAIAPPHLTWGVRQAHSFLTFATAPPLLSGGVAEAHAPHSYFEELKREFSAXTALRAPDSYFEELKRDYGAKKALLVDGLKAAGFIVYPSSGTYFVMVDHTPFGFDNDIEFCEYLIREVGVVAIPPSVFYLNPEDGKNLVRFTFCKDDDTLRAAVDRMKAKLRKK

SEQ ID NO: 13637 - protein, 234 aa, Bradyrhizobium japonicum
IRRGATGRSRCCDVAGGTGDISFRAAKAAGPGFHATVCDINSDMLAVGRERAAKRHLETQVDFVEGNAEALAFADRSFDAYTIAFGIRNVPQIDLALREAYRVLRPGSRFLCLEFSTVEMPGLDKLYDLFSFKVIPPLGRMITGDGESYQYLVESIRKFPKPNAFADMIRDAGFCRVNWQTLSGGIVALHSGWRLSFLQLPTPRASCALRSCSRAKACSAPSIRAWCRRPGSSR

SEQ ID NO: 13638 - protein, 327 aa, Bacteroides thetaiotaomicron VPI-5482
MDNKYIGILTSGGDASGMNAAIRAVTRAAIFNGFKVKGIYRGYEGLIAGEVKELTTEDVSSIIQRGGTILKTARSETFTTPEGRKKAYKVIQKENINALIIIGGDGSLTGARIFAEEYDVTCIGLPGTIDNDLYGTDFTIGYDTALNTIVECVDKIRDTATSHDRIFFVEVMGRDAGFLAQNSAIASGAEAAIIPEDRTDVDQLETFIGRGFRKTKNSSIVIVTESPENKNGGAIYYADRVKKEYPGYDVRVSILGHLQRGGAPSANDRILASRLGEAAIQALMEGQRNVMIGIRNNEIVYVPFVQAIKKDKPIDKSLIRVLNELSI

SEQ ID NO: 13639 - protein, 583 aa, Ustilago maydis 521
MAISTSSRLVIHQDVLSWLQHRPFASAFTLLVVYITYKLAIKPILFPSPYRHLPRPERASYILGQRIVEANGLTYIDASTNQRVKVSGPGEVCKHYARTLDTSVFVFPEPFGGETLFISDPFALNAILADVDKFQSDLLRTTIIEFIVGKGIVARFGDAHRKQRKLMAPAFTPAHIKGLTPIFAKYAQLMCHKIALADDESVDFAEYLDCTMLDIIGEAGFGYRCSALERGRGGSELSSAFNSVNQAAIDFGPARAIHLGLSAMLYPRASIWPLSEANRRIAKVNRVMDRITMQIVREAKSRVEKEGEDLGDKKDLLSLLIKSNLDARIGERMTDKEISGQIQTFMFAGYETSSVTTSWTLYFLARHPEVQNKLRNILTATLSERKGIPLEELDVSTLEYDDVWCQDLEYFDWILAETLRLCPPLSGNDRQAMQDSVLPLMTPVKMTNGENVSQLMVKKGSRLTIGIKTVNCDRKLFGDDADEFRPERFAELPQRHAEAKLPPYATYSFFGGPKSCIGSKFALTEMKVIIIAVLSRFQLSPEPGVTIKQHQALIVRPRVETSTGGPAAGMPLRIKRLPHQVSV

SEQ ID NO: 13640 - protein, 308 aa, GIBBERELLA ZEAE PH-1
MSRQIQQPSNQIKLTNVSLVRLKKGKKRFELACYKNKVLEWRSGIETDLDNVLQIPNVFLNVSKGQTAPREDLDKAFGKGKSTDDIILEILKKGEMQVGEKERAAQTERVHNEVVSIVASKLVDPRTKRVYTSGMIEKALDMLSSQAHNATPDKSAAGSATGTPATGEAGEAKPRPQHNWTGVSTTKSAKSQALEAMKALIAHQPIPVARARMRLRIACTTNVLKQAIKAPKGANKEEEGEQKAVGTVKDKILSYVEQVESQDVVGSEWEVVGFVEPGAFKPLSDFIGNETKGQGRVEVLDMAVTHED

SEQ ID NO: 13641 - protein, 147 aa, Zea mays
  unsure (1)..(147): unsure at all Xaa locations
RSPYKEERSVGSQKICGXQLKGCVQMLCVDQYPIVLMEDPLDQTRXLHYPKMTNAIGEKAQIVGDDLVLTNPTRVTQAITEKSFNALLLKANQIXSATESIDGVKTXRRAPWGVMTSYRSXRLXDTFIADQADWLNTLQINTGAPCT

SEQ ID NO: 13642 - protein, 463 aa, Gluconacetobacter diazotrophicus
MSLPRTIRTFSPRGTTIALATLAGAALPAMAAPAMAADPAPPAINTGDTAWMLVSTALVLMMTVPGLALFYGGMVRKKNVLATLMQSFAICCIVTIVWMVAGYSLAFGTGSPYIGDLSRFMLNGIGAQISKGSDVGFTLGLGSANATVMTIPESVFMMFQMTFAIITPALITGAFAERMKFSALCVFTILWSLLVYAPVAHWVWSPLGWVAGFGAIDFAGGTVVHINAGVAGLVTALVVGKRQGYGQDDMSPFNLTYAVIGASLLWVGWFGFNAGSAVGANGRAGMAMATTQIASAAAGVAWMLAEWARTGKPTVLGIISGAVGGLVAITPAAGFVLPGGALIIGLLAGAVCHWTATTMKHMLGYDDSLDAFGVHGIGGILGALLTGVLAYGPLSATDANPAGVVGSFAQLVTQAKAVGVTIVWCAVVTFVLLKIVDLAIGLRVRSEDEIEGLDMTQHGERIN

SEQ ID NO: 13643 - protein, 405 aa, Mesorhizobium sp. BNC1
MEEFHKVRRLPPYVFEQVNRLKASARSRGADIIDLGMGNPDLPTPKAIVDKLCEVVRDPRTHRYSSSRGIPGLRRAQAAYYARRFGVKLNPDTQVVATLGSKEGFANMAQAITAPGDVVLCPNPTYPIHAFGFIMSGGVIRSIPAEPDHNFIPVLERAVRHSIPKPLALILNYPSNPTACLASLDFYKDVVAFARKHDIIILSDLAYAEIYFDTEAPPSVLQVPGAMDVAVEFTSMSKTFSMPGWRMGFAVGNERLIAALSRVKSYLDYGAFTPIQVAATAALNSDGTEIEEVRSVYHRRRDVMVDAFGRAGWQVPPPPATMFAWAPIPEPFRQLGSLEFSKLLVEKADVAVAPGIGFGEHGDDYVRIALVENEHRIRQAARNIKRFLATAAEHPSNVVPFAATR

SEQ ID NO: 13644 - protein, 214 aa, Paeonia peregrina
IVESVGKGVTDVKPGDHVLPIFTGECKECRHCKSEESNMCDLLRINTDRGVMLNDDKSRFSINGQPIFHFVGTSTFSEYTVLHFGCLAKINPEAPLDKVCVLSRGISTGLGATLNVAKPKKGSIVAIFGLGAVGLAAAEGARIAGASRIIGVDLNPKRFDEARKFGVTEFVNPKDYNKPIQEVIAEMTGGGVDRSVECTGSIMAMMSAFECVHD

SEQ ID NO: 13645 - protein, 214 aa, Paeonia peregrina
IVESVGKGVTDVKPGDHVLPIFTGEYKECRHCKSEESNMCDLLRINTDRGVMLNDGKSRFSINGQPIFHFVGTSTFSEYTVLHFGCLAKINPEAPLDKVCVLSRGISTGLGATLNVAKPKKGSIVAIFGLGAVGLAAAEGARIAGASRIIGVDLNPKRFDEARKFGVTEFVNPKDYNKPVQEVIAEMTGGGVDRSVECTGSIMAMMSAFECVHD
